United States Patent Application Publication US 2026/0103690 A1 - sequence listing, part 70

SEQ ID NO: 342503 - protein, 337 aa, unidentified
MIIIGCDFHPSYQQIAALDTKTGAVKEHKLGHATGEAQRFYRELATPALVGIEAVGNDQWFVQLLQKLGHEVWVGDAAQIRASYVRKQKTDRRDARHILQLLREGRFPRIWVPNAEIRDHRQLLIHRHKLVQIRTRVKNELQHLMLNQGMQKKQRLWSTAGRVALESLALETWADRRRRDLLILLDMLDQQTQQLNEAVLQLSRLYPEVQLLMSQPGVGAVTALGFVLTIGDVRRFRRGKQVASYLGLIPREYSSGGKQRMGGISKQGSRLMRFLLIEAANIAVRWDPELRKEYWHRCHQKHFFVAKVAAARKLAIRLYWILRTQTPYPQVLTSRVA

SEQ ID NO: 342504 - protein, 311 aa, unidentified
MTYVGIDVSKKTLDCCVLDADNEVYLKVQNSQGGYDELMSLLVLYDDVHVCLEATGSYWQSLVEFLAANDVRVSVENPAKIHYFAKASMLRMKSDKRDALLIADYCKVMTPRLYITVAAAVAELKLLVGMYQRLKKQKISERVKLLEAPALVKPLINSNIEHFNNQLLETKEMLKAFFRSNADLAHKHEILQTIPGIGFSSGVVLLSILASGYTFESANQFVAYLGLNPRKMESGTALKGRERISKIGKPEYRAALYMPAVVAYSKNLYPDIVTRLQSNGKTPKVIIVALMRKLAIYAYTVYKTNSAYVAK

SEQ ID NO: 342505 - protein, 406 aa, unidentified
MISVGIDVSKGKSTVCAIKPYGEVLMTPRDFKHTKDDLDSLVKQLSRFKEEIHIIMEATGNYHLPVYQYLKSKDYQISIINPLEMKRYRCQGIRNPKTDKIDSMIIAQYGIDYWYRFKPNDDMDEKRQELRLLGKQYTSYMRIRTIRCQDLCHILDRTMPGVYGLLDDFNRDNGRDKLCDFAKKYWHSDNITKYSEKVFTERYSSWLKKKGYRPNEKEARQLYSIAKNAIPTLDSKLPSTKLLVQEAVNVLREVDSSLYDILNQLKDLSKEMPEYETVLSMKGIGTTLAPRFIAEIGDPRRFHSAKALIAYAGIDAPPYQSGQFTGIKRHISKRGSSNLRKLGYEMMDSVNKHKSSYIGDPVCEYFMKKRNEGKPYRVAMIAAFNKFLRIYHSRVSEVLNEYDNSH

SEQ ID NO: 342506 - protein, 345 aa, unidentified
MPIVGGLDIHRKQLTFDYLDTVTGEVKRGQIAPADRAHLRAWLARFAGRGDVAFAVEGCTGWRYVAEELAAAGVAAHLGEPADTAALRGRKRHAKTDKTDARHLRALLAEGRLPECWIPPAQILEYRALLETYHDLRAAHTAWVQRIHAVFFHQGAPPLGEGALRTEQGLAGLRAAAAAHLSAAGQLQVATALDMLAATEARMEVLRARLLDAARHLTGAKVLAARLYGVGPVTALALTCWLAGAGRFSSSRKAVRFTGLDITVWSSDSKGPPGRLSRQGPPMLRWAVYEAGKTHARASAPDHGYYAAVADRKNTKRAALSEARKIVRQACHILTELGDDALAAA

SEQ ID NO: 342507 - protein, 340 aa, unidentified
MNENAVSTDAVVGIDVAKQKVDLYAVNNGKGKSKVFDNTHAGHKDTQNWLRERGFVPAQTHVCMEATGPYSESLATALVSGGWKVSVVNPARIKGFAQGELVRNKTDRADAALLARFCAAMKPSLWEPPPAAFRQLRGWVDRLQALKDMRQQEMNRIEALEASEQPDVLAHVNTHVIWLDNEIAKLARDIDDHIDRHPELKADAELIASIPGVGKTTVAKVLAYAGDVRRFNSAKALAAFIGLSPRQRQSGTSVRGRTMMSRAGHKALRHALYMPGLVARRHNKALKIFGDRLSAAGLAPKAVIGAVMRKLAHFIYGVIKSGKPFDLKKAMPTLDFQDGN

SEQ ID NO: 342508 - protein, 419 aa, unidentified
MSTERRKVCGIDVHKKFLVATILDREGKSETRRISQNTESLIELRTWIQSENCESVAFESTADYWRTLYLVLEDHVPVTVANAHHIKHVPGKKTDITDSHWIAQLELNNLITPSRIFTGEVNDLRTLTRSRELLVRNRTELKNKIHHLLDSTNIRLSSVLSDLFGKSGSIILKGLVQNKSLDEIIESLPKKMRGNADIISATLPASISPVVLVLLQSYLKLVDDLDAEIKLLEGRIRESLATKSREFQIITSIPGIGFIGASTLIAEIGNIHDFDDADKLTKWAGLTPTVYQSANVTRTGSITKQGSRHIRWILVELAHVAIRSPGRIKSVFERLMPKKGYKKAIVAVARKMLRIVWHLLVHDELFVDEFPRSKQVKFPKLPKKIQKVGINKLIELLSKASEVIIRDRNQDIFRLDMSD

SEQ ID NO: 342509 - protein, 427 aa, unidentified
MPYRIAGIDVHKRMLAVVIADVAVEGEYKFEHRWVGANPGELRKLAEWLIEQEVEEVVMESTAQYWRPVWGELEETWMPRRRNREDAGPMSGMLHLAQAQSNRGAAGRKKDFPDAERLVKRYVAGELTLSFVPDGEQRLWRTVMRRKYQVTCDRVQLHNRLECLLEEARIKLSSLVSDLFGLSARRMLQALADGETDPGRLASLGDWRLKATPEQFRDALGACRNLHPVYRQLLQLMLEELQLIEKQINELDKQMASMLVVHQDAVKRLAEVPGLGVDSAQQIIAEVGASAATFPSAKQLASWVGVCPGESESAGVNYSHRSPKGNRQMRRVLNQAANAAVKTKGSIFELVFQRLVPRLGFAQAICAVAHRLCRLIWKILHQGVQYEERGPAVTRKRKQQRAAKMIRDLRSLGYRVELVGSRSESPA

SEQ ID NO: 342510 - protein, 421 aa, unidentified
MEEITEEAAELVARVAALDIGKASLVACVRVPHETKPGARRQEVRTFTTTTRSLLQLQDWLVCQGVTLCVMEATSSYWKPPFYLLEDAIECWVVNARDVKNVPGRPKTDRLDAVWLGKLAERGMLRPSFVPPPWQRELRDLCRYRRTLIQERTREKQRAEKLLEDAQIKLSAVISDIFGKSGRDMLEALIAGQRDPYVLAQMARGSMRGKIGVLQEALTGHFRDHHGYLLTMMLARIDALTAQIEALTGRIDEVIAPFARQVAQLDEIPGVGATGAQEMIAEFGADMTRFPTAGHLVSWAKYAPKARQSAGKHKPGSTGKGNPWIAGTLGEAAMGAARTKTFLGSRYHRLARRRGKQRALVAVGNSILTIAYYLLSDPEAHFTDLGPDWHDRLAPIRRKRQLIAELERLSGKKVLLQEAAA

SEQ ID NO: 342511 - protein, 351 aa, unidentified
MGDSDKFKSILMKKLFIKQNIGIDIAKDDFKASLSALSNEFEIVTVGAKTFVNSIKGFTGLQEWFKVKGIENIKVSFTMEATGVYYESLAYFLVEQGYTVHVVLPNQSKKYAESLGNKSKTDKIDAQMLARMGTERNLLPWQPLSPCLLTLKQLTREREALIHERTIINNQLHAYKHQGRINSSTITRSEKLISILNDHIKEIEKEINVIVKQDKELNDRLGKIQSIPGVGLITAVTIVAETNGFSTINSIKQLTSFAGMDILILESGLWKGKSRISKKGNSHIRKALYFPSFTKIKYDSATQQYYERLKIKKAKPMIAAVAVQRKLLCLIYTIWKKNEMFCPNYEQQKAA

SEQ ID NO: 342512 - protein, 340 aa, unidentified
MEHIVGIDLHSDNGYYGIIEPDGKRVFKTRLTDDLPTVLSTLEPYEETITCIVVESTYNWYWLVDGLMDNGYSNRVQLANPAGFKPYEGLKHGDDETDAFFLTELKRLGILPVGYIYPKEERPVRDLLRRRMMLVQQRTSHILSFQSLITRQTGTKMSCNNIKRLQEDYIEELLDEDYLILAGQTNISVVHFLTEKIRRLERAVLKRIKLRPAYERLLTVPGIGKILGLTIMLESGDIGRFVGAGNYTSYCRCVKSKRMSNNKKKGEGNRKNGNKYLEWAYVEAANFARRFCPEAKRYYQRKLAKTNQIVATKALASKISKACYFIMRDQEVFKTEKLFG

SEQ ID NO: 342513 - protein, 468 aa, unidentified
MNRRPSSTPAGDRGTTRRDGARPSALPLPVIRPQVAGIDIGSTEHWVAAPPLPDGQPNVRTFGTTTPELEALAEWLIAQGVVSVAMESTHVYWIPIYELLESRGLEVLLVNARTLRNVPGRKTDMLDCQWLQILHSCGLLRGSFRPSDAICRLRALQRQVGNLIEERTRTVQWMQQALDQMNIQVHRAVTDVTGKTGMAIIRAICDGERDPLQLAVLRDRRVKKSQQQIAEHLTGNWRDDHLFNLASALHLFDTVEAMISTYDARILVELETLQPPERKEEAPPPHPTATKQRALSTRGDQTKRMALWRFSGADLTRIDGIGIATAQTILAEVGFDLSAFPTENDFVSWLRLCPRVPISGGKPLRKKPNGMGSGRVAGALRMAALSLKHSKTALGAEFRRTARRKSGAIAVFAVARKLAQLTYRMLRYGQDYVDIGETAYEERFRSRSIRRLHQVAKDLGYDLTPAIA

SEQ ID NO: 342514 - protein, 343 aa, unidentified
MKLSRVGIDLAKNVYQLHGVDRHGKAVWKRRLKRHQWLKVLLDKAGPACEVGMEACAGAHHWARELQSRGYTVKLIPPQFVKPYVKSNKSDARDAEAICEAMSRPNMRFVTVKTVEQQDIQATHRIRAELITQRTAKANQVRGLVAEYGLVAPKHLSSLRAAIPCWLEDAENGLTADFRTLLHGVWGDLRALDARVGEMDQVIKRLAENHEDCVRLQQLRGIGPMTSTAMVATVGDARQYHKSRQMAAAIGITPKQHSSGDRDRLLGISKRGDVYLRTLMIHGARAVVARAKHKDDPLSRWVTGIAMRRHPNVAAVALANKTARMAWAMLRHETDYDPDFAIS

SEQ ID NO: 342515 - protein, 357 aa, unidentified
MQKEKNNLDFSDQEIFVGLDTGKKSWKVSILTKDFEHKTFTQPPEPETLVKYLHRHFPGARYHCVYEAGYFGFWIYDALKQQGVKCMVVNPSDVPTKNKERANRNDQVDARKLAHNLRNGELIPLYVPERRFQEDRSLVRMRMTMVKKQTRCKNQIKGLLTFYGYTIPDELSGSKWSGNFINWLYKLEFQQDSGKQALQILLDELKHLRQSITQLTYQIRALSQQESYRTHVQYLKSISGISTFTAMVLLTEIVDINRFKNLDHLASFVGFVPGEDSSGDQEINTGISRRHNAYLRVLLVECSWIAVRKDPALLMAFNKLTERMPKNRAIIRIARKILNRIRYVLKNHQPYEPCVVA

SEQ ID NO: 342516 - protein, 489 aa, unidentified
MESSVVMRKPAEILDADHELVIERVCAIDVAKASGMVCTRLPQTGAAGRRVSRVWEVVATTRAITELADHLVAVGIEQVTVESTSDYWRIWFYLLEARGLAVQLVNARDVKNLPGRPKTDKLDAVWLAKLTEKGLLRPSFVPPAQIRVLRDYTRLRVDLTRERTRHWQRLEKLLEDALIKVSSVASKLDTRSVRDMLEALIAGDRDPRQLAELARGRMKTKRAALVEALSGRFDEHHAEIARMLLDQIDGLSAAIEKLTTRAELLLQTLLAARAGDPRTGGAGSAVHAQGSCDPRPAPTRATEVPVEAPTEASVRADGTPAHRGGNGLSAAQRLDEIAGIGPLAAQVIIAEIGLDMSRFPTAGHLVSWAKLCPRTIQSGATRRGGAAGKGNPYLKGVLGEAAAAAAKTNTFLGERYRRLVKRRGKLKALVAIARSILVIVWHLLSDPTARFYDLGPDYHTHRIDTTRKIRNHVSGLTALGFRVTLEPAA

SEQ ID NO: 342517 - protein, 492 aa, unidentified
MIQIPAVIERCAGIDVGKRELAVAVIVGPADQEGEVETRTFGTTVPALEELRAWLVEQGCTSVAMESTGSYWIPVKNVLEANLRIALVCAKKHKPRRGEKTDFRDAKNLAHLHRHGLLKGSFLPHQAVVELRDLTRRRKKLLAHLAAEKNRIQKVLEVANIKIGSIVSDVFGVSGQAMLSVLVTGKQISAEEIADLSKRRLRQRIPELTEALQGHHLNDHHRWLIAQSVEHAVLLDRQMEQLETRIEEKLQPYREQYELLQTIPGVKEMTAASILAEIGPDMSQFETAKHLCSWAGISPGNNQSAGKSKHSRIKKGSKFLLTTLVEAAWAAARKRDSMFQRKFHRWMRTLGEAKANVALARSLLEVAYVLLKERQPYQEPDPKQMHKLEKAKLVRHHAKRLRQLGADNELVEQVIARLDRHDASSVETEMTTRPSLQATRRVSPAKVCRGALGFRARQTRKHGYSIVRKRAPETRSRSKSNEPLETNTPETQ

SEQ ID NO: 342518 - protein, 350 aa, unidentified
MIEFSAGIDLSKDTFYACLQAREPVNAPTIIGTKEFDNSRKGFETLLAWVRKRVSKGAVVQFVMEATGVYYEELAYFLYEQGYKVAVVLANKMHHYAKSLNIKTKTDRVDASIIASFGMDRSVKEWKPMSPFYKELRELSRAFLSLKKQKQRAKNQLHALRHAHKTSVVVMELKKDQIAFYEQKIALLKEEIRKVATQDQAFYAKVKKVESLPGAGFETIIGIVCETNGFELFNSIRQLVSYAGLDVVFNQSGVFNGKTRISKRGNARIRQILYMPALSAIQHHRSIKGLYERVVERNPTVKNKGVVAGMRKLLIYIFTLWTKNEEYDPTYQWSTHSVEQKKGAKSPRTR

SEQ ID NO: 342519 - protein, 340 aa, unidentified
MTAIGLDTHKDSLAACAVDALGAVVAEATFANDVAGHASLAEWARRVAPGAVLGFEGSSTFGAAAARTLATVGFAVREVPPHLSRRERGRTRRAGKSDPGDALAIARVTAREPDLPPVRGTDPTTELRLLLAARDDLVAEATRVRNRLHADLIVLVPGYGAKAANLVAERHLATVGRTLRRTAGVHAELARERLVDLRRLHARIRLLATRIGRLVAGHPLLELAGVGRLTAAALIAQAGDINRFRSADAFAMLAGVAPIPASSGQTHRMRLNRGGDRQLNRALHVVATVQARTSPLAKAFIARKLAEGHSRRDAIRSLKRHLARIVFRLLAAGRTSAAAV

SEQ ID NO: 342520 - protein, 326 aa, unidentified
MMILGIDIAQEKFDLALYQGKELVASGQFANNAAGFKKLSKWLNNKAAGQVKACLEATGRYGDALALYLYQAGHQVSLVNPARIKKYGQSQLQRNKTDKLDARVIADFCRTQEPGLWRPPAPEKRELQEMVRRLSALIKEQTREHNRLTAGLQSQVVKESITANLEFLAAQIAKLEQQIQQHIEQHPGLKRDKELLTSIKGIGAKTAAIILAELPEVDHFDHAGQAVAYGGLNPAQHDSGSSVHKRSKLTKTGNQNLKTALYFPALSAIRHNPIVKALARRLEEKGKEKMVIIGAAMRKLLQLAYGVLKSGQPFDPDYATKIQAAI

SEQ ID NO: 342521 - protein, 387 aa, unidentified
MAKQNDLSRCLVILEQDATVIAVIEMGQSSWLVAGIVPGLERNPLKKLSPDPDALLQLLYRWQKEAVQAGRAIKRIVVAYEAGRDGFWLARWLRAREIEAYVIHPSSVPVSREHRRAKTDRLDTELLKRAFLGWLRGEPKHCSMAAIPTVADEDTKRPGRERQSLVGERTRIINRVKANLARLGIRGFRANLAQASSRLEALRTPEGIAVPANTRAELQRDMDRLRFVKQQIKEIETTRAKRLAGAPNEQRHAMVRLLAQVVGVGIETADMLVQEVFSRNIRDRRALARYAGLTGAPDESGKKRRERGLAKAGNARVRRGMIELAWGHLLHQKASALTAWYRKRTSDTRGGTRKTMIVALARKLLIALWRLVTTGETPAGLLLRPAV

SEQ ID NO: 342522 - protein, 393 aa, unidentified
MKKADLLSTLFVGIDISSRSNVVALLDFESQKPLQSFAVGNNQPGAVKLANRLADYLRSRKDLTKLVVALESTSFYGVHVTNYLSSCDVLASFHTAVYCLNPKAIKNYKKSFIDLGKNDYVDAFVIADFARANRITTNPWRGSQFLALQRLTRHRLHLAKALTREKAYMLSNIFLKFSEFSLLDAEDQPFSNSFGATASSVLTDFLSMEEIIEMPTEGLISYICEKGHNRFPNPEKTASLLQQAARNSYRLDKCLYEPLTVSIASSFTLISTYETEIKAVNKAIEKTLKGIDPNAYQSLLSIPGIGPVMAAGILSEIGYIDAFKNQEALAKYAGLVWRENQSGNFQADDTPLSKAGNAYLRYYVIEATSHVSVSGRNRVPSPPAISKTGFVRL

SEQ ID NO: 342523 - protein, 324 aa, unidentified
MEARMTSTGPETHSNHAIGIDVSKDHLDAFCNHRASGSRFTNTAEGHKDLLTWARPTATTRFAFEPTGAYHIGLETTLGRAGHLICKINPHRASLFAKASGMPAKTDQLDARGLAHMAAMDLVQPGPAVSENARALRELETVLASLIADAAALKTRLQTLTLARLKRLAKTRLTLLERQIGEVESELCRYLSQDATMKRRVDILRSVPGIADRTATRLALFMPELGDLTNSQIASLSGTAPRTRQSGQWSGKAFVHGGRSHVRKCLYMPAIVALRCNPTMKAIYTRLRDAGKPPKLAIMVIMRKLIILANALIRDDRLWTQTRP

SEQ ID NO: 342524 - protein, 352 aa, unidentified
MVVLGVDAHKRTHTIVIIDERGRRIADRTINATTADHLALVTWAQAHGEERLWAVEDCRHLSRRLERDLLAAGERIVRVPTKMMAAARKSSRDYGKSDPIDALAVARAALQEPDLPVAHLDGPAREVRLLVDHREDLVAERTRIINRLRWHLHELDPTWDPPVRSFDRNKTIVQLTTTLAERAGTVARLARRLLVYCTNLTAEIKALDDEIAELIVKIAPTLLETCGVGTLSAAKIVGETADVRRFKSKDAFARYSGTAPLPVWSSDHPRHRLSRVGNRQLNCAIHRMALTQAHWHPDARAYLERRKAAGDTPKEALRALKRRLSDVVYRALIADARPASSIKQSEKFPEAA

SEQ ID NO: 342525 - protein, 350 aa, unidentified
MIIIGADYHPGFQQIAFVDTDSGEFQERRLEHREEAEKFYRDLATQGMRVRVGMEASGHARWFERLLGELQVELWIGDAAEIRTKRVRKQKTDRQDAELILRLLLEDRFPRVWVPSWENRDLRQLLWHRHRMVQARTRIMNQLQAVALNEGLRCKKRLWRDAGREQLESFRLAPWASRRRRDLLELLDRLTSTIAELTQAIEQEVARCPEARRLQTHPGVGALTALAFVLIIGRAERFQCGKQVASYLGLVPLEESSGQRRRLGHITKQGNSLLRFLLVEAAQVTVRSNQEWRNKYFHLALRRGRKIAKVAMARRLAVRMYWMWRKAWDYEQLRKFGSHAGQLGTGDGVR

SEQ ID NO: 342526 - protein, 354 aa, unidentified
MSQKLESAIAVIGIDIGKNSFHVVGHNERGAIMLRQKWSRGQVEARFANMPTCLIGMEACVGAHHLSRKLKALGHDARLMPAKYVRPYSKGQKNDFRDAEAIAEAVQRPTMKFVATKTADQLDLQALHRVRERLVSQRTGIINQIRAFLLERGIAVRKGQRFLRAELPRILATPPDVLSPRMVRVIEDLAGDWRRLDERIEGLSSEIETVARQDAGCERLMSVPGIGPIISSAMVAAIGTGDAFTKGRDFAAWLGLVPKQMSTGDRTILGKISRRGNRYLRVLFVQAAWVVLIKPKIWERYGLKPWIEAAKKRLHHNVLAIALANKLARIAWSVLARGRAFEVRKMDEAANQSA

SEQ ID NO: 342527 - protein, 421 aa, unidentified
MLILYQRCAAIDIGKDVIAVAVRLPGDGAEHRQTIKQTFKTFYGVLKHAARWLTEQQVTHVAMEATGIYSMPVYHALIEHGGFEKVLVCNAGHVRNVPGRKTDLSDAEWLVHLLECGLLRGSFIPPAQIKAARDVIRSRTKLTESRTSELQRLGNVLQDAGIKVDSVASTITTRSVRAMVEALIDGERRPVLLAELAKGRMRARIPDLQRALEGRFDDHHALMCRLHLDHLDHLEEMIARLDTQIQDMMQPFRAQRELLTTIAGIGPFAAAAIISEAGADIGETFPSAGHFASWIGVCPGNHESAGKRHSGKPRKGNQHLQHVLVECAWAASRTPGYLQSLYRWHVRKFGGSRNPTAKNKAIVAVAHKLAIIIWHVLATGKPYTDLGADYLDRRIDPAKETRRLIARLQALGHTVTIEPAA

SEQ ID NO: 342528 - protein, 372 aa, unidentified
MNQTIIHVGLDVDDTQYHGSALDKNTGEVIHFKCRPTLKGLLGQLDKLGQYFPKCTLTLCYEATYIGFTLQRDLANKGYACEVVAPTSIPSPRGKQIKTDRIDATQLAQFYANGLLTLVSIPEREQEQDRDLLRSRQHLVQQRTELRTHVQALLRRNGLHYKEQTGNKTHWTKYHYCWLTRIVEAATGSLKANLGLLLRQLKGMNAILADYNQQIEELANTPRYQKPVQALTCYKGVKNLFALTMITEIGDIKRFPHPRQLVSWIGMDIREYSSGGKHNRFGITKQGNRYLRTAFIEANQRGYRTARITKDIKARRAHTAPELIDIADRCLRRLNKKGNRLLISGKHPNKVKVACAREMVGFVWESLNKVAA

SEQ ID NO: 342529 - protein, 483 aa, unidentified
MKSKPEEKNKRATNHPTQPHWDEMNRRQRREMTRKIQSEGLRLEVMHPDAAGIDIGNESHYASVPPSRDSQPVREFGCTTAELKAMADWLKQCRIRTVAMQSTGVYWIAVYDILEQAGLEVYLVNARDTKNLPGHKSDVQESQWLMKLHTYGLLRNSFRPTQEIRVMRTYWRQRNDLVQSASRHILRMQKALTQMNLQLANVLTDISGATGQAIIKAILAGERNPHKLAEFRDYRVKASEGQIAQSLEGNWQEDLLFVLKQEHEGYEFCHKQMAECDRQLQQYLQQREDRSHGAPLPEEKRKGRLQKKRANKPQFNLREGLFRMTGTDLTRIDSIDVMTATTVISEAGYDMSKWKTENHFVSWLRLCPDNRISGNRVIGKGRLPTNNPISIALKMAATTLRESKTYLGAQFRRLRTRLGAPIAIKAMAAKLARLVYRMLRYGMKYLDQGAAVYEIRHRELQIKRLKAKAEKLGYRVTSIPAAA

SEQ ID NO: 342530 - protein, 364 aa, unidentified
MLYVGIDQHRKQLTVSVREESGNVILRRQVSTEWKKVRAFFDELRELSSAHDGYLAVVEICGFNEWLLKLLPEHGCRETIVVQPEEKSSHKTDRRDASGLSEVLWINRERIAQGLPVRGLRRIQVPGTTEQADRRLTSLRHDVGRELTRAINRMKAILRRHNLEQECPTKGIQTQRARKWLEGLTLSAVERGELNHQLARQDLLRKQLKQLQAAIMQRYEAHPAARLISTMPGAAAYSSLGLASRIGDIRRFKHPRSLANYWGLTPGSRNSGEATQRLGSITKQGSALARFLLGQLVLHVLRDDAWMRNWFRGIKRRRGSKIARVAVMRRLATILWHMLTRNEAYVSGGPPRTRLKPQAAVVRT

SEQ ID NO: 342531 - protein, 388 aa, unidentified
MIYVGIDIAKLNHFASAIDSDGVVLIEPFEFLNDNDGFYMLLSKLSSFEKDSIIIGLESTAHYGNNLVYFLVTKGFHVCLINPIQTSSLRKSNIRKTKTDKVDALLITKAVVLMDNPRFVTLYDVALMQLKNLGRFRLKLVKQRSRTKIQLTSYLDQVFPELQYFFKSGIHQKTVYAILKEAPSANQIASMHLTHLKNLLVSNSMGHFKKETALELRVLAQKSVGTADRALSVQITQSIAQIELLDSQIAAVESEITDIVSSLDSVIMTIPGIGPINGGMILGEIGDITRFSKPRKLLAFAGLDPSVYQSGNFSAKKTRMSKRGSSALRYALMNAAHNVVKNNKTFREYYDSKRAEGRGHYNALGHCAGKLVRVIYKMMRDDVEFNLD

SEQ ID NO: 342532 - protein, 342 aa, unidentified
MTNYAALDVSLEATAVCVVDQDGLLLAEKKVPTCPDAIASWLATNASNLVRVGMETGPLAMWLWNELHEKGLPIICTDARHANAALKVRPNKTDRNDAAGLAQIVRTGWFKQVTIKSRSGYELRSLLAAREVLVRSRVKIENEIRGLLRTFGVLFGKSVGGFSRRVDEIINGELDASPVIRDVIASLAKARTALLDRIKDLDRRILASAKSYSTARLFMSAPGIGPIRALSVASAFDDASRFKRSSSAGAYLGLTPRRYDSGEVSRNGRISKQGNKMTHKHLAATTLLTRNIGFSTLKAWGLRLAKKVGFKKARVAVARKLAVILHAMGKTNTAFRWSPVAA

SEQ ID NO: 342533 - protein, 401 aa, unidentified
MRSIGMDVHRSFAQIAVVEDGRCRDDARIDVKPEDLREWAMTLEPDDEIALEATTNSDAIATMLRPLVAHVVVSNPRKTRAIAEAKVKTDKVDARILAQLLAADFLPETWVADDQTRMRRRLVARRTQLVRQRTRLKNQVHGILSRNLVPTCPHADLFSGVGRKSLSGKDLPADEWRSVEALLRQLDFHGDELAAVERDIAIDALDDPVVARLMTIPGVDVTVAVSVVAAVGDFSRFPSPDKLVAYLGLNPKVRQSGNSPAMHGRITKAGRSQARGMLVEAAFSAARAPGPLRAFYNRIKTRRGFQVATVATARKLTVLCWHLVTKNQDYAFARPSLNAHKRRKLELAAGATSRRGPTAGPSRDYHLKQLRDAEQALVEQQERAYEVLVAHWHAKRPAANG

SEQ ID NO: 342534 - protein, 342 aa, unidentified
MPHYVGLDVSLEETSICVVDENGQKVWQGKSSSEPCVIAKNVRRHAPDAAKVGFETGPLSTWHWHELQELGLPVVCLDARHAKAALSMQVNKTDANDAHGLAQIVRTGWYREVEVKSIDAHLVRTLLISRSKLVDVRTKLSNQLRGILKTFGLMVGKTSGGAFEMRVRELTAGKIALESIIDCLLSVWRCTCEQIRVLDRQILAHARADEVCRRLMTAPGIGPVIALAYKAVIDDPNRFKKSSSVGAYLGLTPKRYQSGEMDKSGRVSKCGDALMRTHLYEAANVILTRVRKWSSLKAWGVKLAKRIGAKKAKVAMARKLAVILHCMWVNGTDFRWSAPRNA

SEQ ID NO: 342535 - protein, 355 aa, unidentified
METSYDGRQVVGMDLHRRRSVLVRMTEDGRRLGTAKITNSPQELRREIARAGKAPQVVLEATYGWYWAADTLAEAGAEVHLAHPLGVKAFSYRRVKNDERDSADLADLLRMGRLPEAWIAPHEVRELRELTRYRHKLVHLRTSCKDQVHGVLAKLGVTVTCTDIFGKAGSAWLDGLRLPQPYAGKVTSLRHLAGELTTEITMLSEVIAALLAGDRGYQVIQQLPGIGPVLAAVIVAEIGDVTRFRNAAQLCSWAGLTPRHRESDTKIARGHVTKQGSRLLRWALIEAIQRLPRDSVIGSVKDAIIARRGKEAKNIAKVAAARRLLTLVFYGMRDGQIRCLSRPAGPPAAAPARAA

SEQ ID NO: 342536 - protein, 373 aa, unidentified
MPKYSTAFGMDVHLRSTTVCALDADTGEAVTRRFPGNPWGEIAGWMDGFPGPSLAAYESGYLGFAPQRELAGLGVECVVAAVSKIPRSAADSASKNDRNDAARMAKAILAHDISPVWVPSPEVEGIRDLAGAYDGATARLATAKQRLLAFLARRGFVYGGTTPAGNPRKYWTYDFLRWLDKVRPEDDGGVRTLAALRNEVEAAAEARADLLSEYRAAVDASPIAAEVAALQSIKGCAFALAAAFSAEVGDFTRFRSGRQVTAYFGLAPSQRSSGDSVRLGGISGAGNALVRKLAVEGSWCYAAARHQPKLMPRDTGVPLEIRMHGRKGSERLLRRREEMLARGVPAAKANAATAAELVRWLWALGMMCREGAE

SEQ ID NO: 342537 - protein, 382 aa, unidentified
MNRILKIGMDVHSTSYTLCAMEPVLGGEDRIFANIQVTSDYRNVIQFIDKLKEKLGSSDSYSIECGYEAGCLGYSLYHQLTKSGVKCTILAPTTMLTQQGKRVKTDKRDAVMIAQCLSYGGYHAVHVPADKDVSVKEYLRMRDDHKVALKKIKQQINAFCLRQGYFYAGNKWTIKHLNWLKKLVLSDLYRETLNEYLTSYEEQTAKIERFDKRIEELAEDSDYQENVKKLGCLLGIKIHTALSLIVETGDFKRFRKGNTYAAFLGLAPGESSSGEKINRTGITKAGNSHLRTLLIEAARGMCRGRIGYKSKVLRSRQDGNPTEVIAYADRGNTRMRSKYYRMIRHGKKDNVAVAAVARELACFIWGLMTNNITPKEEGTKAA

SEQ ID NO: 342538 - protein, 362 aa, unidentified
MHNHRTLVGLDVHAKATIAAGLELDTGELRFRRINGPPRSAVNYLEELPGPVMATYEAGPVGYGLAREAAARRIEVRVCAPGSIPRKPGERIKTDRRDAERLVRSLLAGELSFVRVPTVEEEQFRDLARCREAARADLMRARHRLSKFLLRREIEFPGPGASWSVAHWQWLRSIDLADHPSRSVLNDYLAAVLALEQRRDGLDAQIEIAAPRSPWALTIANLRCLRGINTVTAYGLCCEVGAFDRFEHPATLTAYLGIVPSEHSSGEQVKRGPITKAGSPHARRLLVEAAHHYRHKPAIYKDLARRQRGQDPRACEIGWRCQQRLHRQWQRLRLERGKPGNVVVIALARELANFVWEVGQLN

SEQ ID NO: 342539 - protein, 339 aa, unidentified
MAILFVGIDLAKNVFAVHGVDEHGKAVLVRPSVQRAKLHELVASLPVCTIGMEACSGAHHWARRFKQHGHEVRLMAPKFVSPYRMSGVRGKNDAADAAAICEAVQRPNMHFVPVKSEDEQARLCVHRVRQGFVEQRTATINRLRGLLSEFGIVLPQKAATVRREATAHLEELPGWANMAVGDSLSEVHRLDERIAEYDQHVSHMAANDERSRRLMQLQGVGCTTASALVSTIGDAHDFKNGRQLAAWLGLVPGQYSSGGKARLGSITKAGDRYLRTLLVLGAKSVLAAAKSKDDRLSRWALALQVRRGYWRAVVAIAAKNARMAWAVLAKGENFRPIQT

SEQ ID NO: 342540 - protein, 395 aa, unidentified
MNKIVHYIGLDVHKETIAVSIAPQNSTEVRRYGIIGGTLDAVDKLVKKLAQENVELHLVYEAGPCGFVLCRHLRSRGIHCEVIAPSLIPRKASDRVKTDRRDADQLARLYRAGELTAIHVPDQEDEAIRDLVRARTCGMTDQRQARNRLKGFLLRLGFRYTGKSSWNDAHKRYLSGLVMPQGPQQIAFQEYIHAINDATDRLERLAKAVEDALPGWKWEPVARALMSLRGVQVLTAMTLVAEVGDFSRFEDPRSLMHFFGLTPSEHSSSDKRVQGGITRCGNAHCRRVLTEAAWHYRLKPKVSETIQKRQEGQSKPVRLIAWKAQERLHKRFHQLSAKKKSVVAATAVARELAGFVWAIACQVKPAQQPAAPEIIRTCRGKVYRLDPAKKFQKKK

SEQ ID NO: 342541 - protein, 410 aa, unidentified
METIVARAAGLDVHKARVTACVRVPGRGRERAQELAEFQTTVRGLLALRDWLKAHRVTQVAMEATGVYWKPVWAILEDEFDCLLVNARHVKQVPGRKTDVSDAAWLCQLLEAGLLARSFVPPKPIRALRNLTRYRKAQIGERQREANRLHKILEDTGIKLDCVATDILGASGRAMLDALVQGTTDPQVLAELARGKLRAKIPALKEALVGRFDRQHALIVSAILAHLDFLDQQIQLLSDEIEAQLAAFAAAVELLCTIPGVQRRTAEAVLAEIGTDMSRFPSERHLASWAGQCPGNDRSAGKRRSGRTRHGSKWLDTALTEAAMAATRTSDVYLAAQYRRLRPRRGHGRALGAVKHSILCACWHMLQTGELYREAGGDYFSRRDPERTTRRLVAQLERLGHTVTLKAAAA

SEQ ID NO: 342542 - protein, 360 aa, unidentified
MAKAKSLVGLDVHATKIVAAVLDAETGELQFFAMTADIGRTAGFCAALPRPVRVAYEAGPTGYGLARELVKRRVECVVAAPSKIPRASGDRVKTDRRDAELLARLLLAGKLHAVRVPGPEEEALRDLVRAREQVRVDLMRCRHRLSKLLLRHGIRFDDGEAWTDRHRRWLNEVVLEWPAAQATLLDVRGAIDALTHRRDGLERQIVSMVPSSPWRSQVGVLRCLRGIDTLTAVGLSAEVGDFARFARAEQLMSYVGLVPCESTTGQQRHLGSITKTGSGHARRLLVEAAWHYRSRPNLGKALTERQADQPQQAIAVAWTAQKRLHRTWARLEARGKRRTIIAVAAARELTGFVWAITQSE

SEQ ID NO: 342543 - protein, 356 aa, unidentified
MDSTKYIGMDVHKEATTIAVMSSAGKLVMESIVETKAATLVQFLEGLRGELYVTFEEGTWAVWLYDLLKPHVTKVMVCNPRKNALLKAGNKSDRIDARKLAELLRAGLLSAVYHGETGLRTLKELGRSYLAISKDLTRTMNRVKALYRSWSIPCGGPSVYATRHRAEWLSKITEPGVRRRAELFYQELDGLQKLRQEARRDLLVESRKHGATELLRRIPYIGPIRAALLIALMQTPHRFRTKRQLWAYSGLALETHSSAEYHYVQGQLQRSKRPVALRGLNHNHNHDLKSIFKGAATKAATAKGPFHDFYTAMVAKGMKPTMARLTLARKIAAITLLVWKKGVCFDAQQLKQQVSV

SEQ ID NO: 342544 - protein, 393 aa, unidentified
MLKIVYPICCGMDVHKSFIVACIASTNEQGVTTYKSKRFSTFTGNLRRCAAWLATNNCKDVCMESTGKYWIPIYNILESTCNIVLAHPKYVKAIRGKKTDKRDAKWIADIFKHDLVAGSFIPPADIRQLRDLFRYRWKLTSFTTGEKNRAQNCLTVSNFKLDDVFSDVFGKAASAITARILENPTEKITDVSSFRTKRLKATDEEILAAVDGEMCEEQAEKLRIIRSHMDSLELCKLNLESLILATAEKYLPQLDLVMTVPGIQSFAAIGIISEIGVDMSVFPTSKHLCSWAGLTPQNNESAGKKKTTESAGPEPTSNRCLFSAPSMRFVPKNSQKSAIATLLSRNAVATRKQSSPLPGCCSPPFTICSRRTSRTTLNSTARATGLPYTVRFL

SEQ ID NO: 342545 - protein, 354 aa, unidentified
MQYIAFDSHKRYTYAVVEEKEKGRVMEKRIEHRRGEIGAFLSQCEVGSPVALETIGSWYWIVDEIEAAGMLPRLVNARKAKMMIASSKKTDRLDAKGLNTLQRTGTLPTVWIPSSELRDIRELYRTRMVLTQMVIRLKNRILSCFSKYGISFDETSDAFNIKGRASLEAALEILPTQTCFALKELLRQLDLLQEAVKEFEARMLQVQSNDPEIKLLQTIPGVGAILSYVIAYETGDIHRFPSASCFASYAGTTPSVHASGGKVRYGHTPSDVNHYLHWAFIEAANVISMRHEVLRFRHTARLYERLRQAKGHGIAVGAVARHLAEATYWILTTKTAYREPNQNKQVVVVSSKEG

SEQ ID NO: 342546 - protein, 284 aa, unidentified
MNHFIGIDVAKATLQVYIPQGEIDLEFSNTKSGLNKLYKTLKVNYKESLQELVFVYESTGCYSRPLEEFCQKMEINCFKVGAYQSASFSKTIKNRNKTDKVDARMLSAMQILVGKGDIKIPYRDEDAHQLRSYIKYYQSLNKEKTRQNNYLEAAEINQEDDYILKQVKKRIKQIDKEQENLMALSMKLIKANSDYLKAYENIISIKGLGQKSGIVLLYLFLRYPNASRQQMTALTGLDPVQKESGTSLKSKTRISKQGISLMRGLLYMPILSTVQHNNEMKHFY

SEQ ID NO: 342547 - protein, 410 aa, unidentified
MEQIYERVAGLDVHRDSVSACTRVPGARRGMVNHKARYSTTTAGLAELSDWLAAEAVSVVGMEATGVYWKPVLYALEDRFEVWLCNAHHVKNVPGRKTDMSDAAWLADVVAHGMVRPSFVPPPPIRELRDLTRYRKRQVDTRAAEVQRLEKVLQDAGIKLSSVASEVLSMSGRNMIEALIAGERDTAVLAEMAIGRMRNKKPALVEALTGHFGDHHAITSRQILDHIDFLDTRIAAVSEQVAVRMVPFSGAFELLVEIPGISRISAEVIIAETGADMSRFPSPAHLASWAGVAPGNHESAGKRRRVGTSSGNRWLRRILIEAARGAARTKGSYFGAQYRQIARRRGPNKAAVAVAHSLTDVIWHLLSTGERFKDLGADYYERRRDPERETRHLVRKLEALGHSVALSPTA

SEQ ID NO: 342548 - protein, 419 aa, unidentified
MNKLYIGMDVSQKDVKVYILDQEGNEVVKRFAVDNNPPGAETIASRVLECCRKLDIHKVFAGLESTSVYGWHLQYYLADHLELKAYQPMIICFNAKLIEAFKKSLGNLPKNDWVDAFTIAERLRFGRLPKSCPVDFRYLALQRLTRHRFHIVDSIVREKNYFLSNLFLKFSGLCQNQVFGTNFGAVATELFNEFLTLDDIAARPLDELVDFMVEHGKDHFENPKATAIALKDAVRKSYRINPSVDNSLSFVIKSCLDNIQALEKQKKAVEKAIAHEITGFNNQYLCLTSAKGIGPTIAAGLISEIGGISRFDNDNALAKFSGLYWSEYQSADFVAEDTYLKRTGNEYLRYYFIQAADQLRKYLPEFSQYYARKFKEAKTHKHKRALVLTARKAVRLVFALLREEKLYKPSAMKGEDNLI

SEQ ID NO: 342549 - protein, 386 aa, unidentified
MIEAVIERCAGIDVGKKFLVVCVMTGPLEAEPKIEIRRFGTFVAELELLRDWLIRERCSHAVMESTGSYWKPAFNVLENSVEVVLANAYDVQNRRGHKTDPNDSRWLAHLLRHGMIRPSFIPERAVRELRDLTRRRRQLVGERARERNRIQKVLEDANIKLGDVLSDVLGLSRRLMINALLEGVMQAEEIAQLAQRKAKQKIPDLIAALQRHRLTDHHRFLLRHALRHLDFLEVEIEALNIEIRSRLSTEQFKKQHALLQSIPGIKEESSAAILAEVGPNMAQFPSGAHLASWAGLCPGNHESAGIRKTGRTNRGNNWLRSVLTQCAWAASNRKDSMLRSFYSRLSPRCGRKRAIVALGHRLLRVIYYVLLRSQLYQEANTRFISA

SEQ ID NO: 342550 - protein, 390 aa, unidentified
MFYLGIDIGKFHHAAALLTHEGKVVATLSSFPNTHDGFQELLTLITCHLPAGEELRIGMEATGPYWIPLAEWLKTKGWPPVVLNPIKTSSLRNYGVRGSKTDNIDSVLIANALRFEGSQPQKVSPKHSEELRHLTRLRADMVKDRTRLVLRVTSQLDRLFPELLCSFSKTTSPSCLALLAEAPTPDRVLALGEEKLTALLRKASGGKLGVARAKEILGKAASSIGVSSPGLEEVLVLLMEQINLIDRQLKALDRRIADLYDQAGLFFTTIGGVGILTAATILGEFGSVDRFTKATQMVAFAGVDPKLRNSGQHQGQVHISKRGSPYLRRALYLACQGAVRNDGYFKSIFQRHRDNGKSYKEAIVAVMNRFIHVLYAVWRDNRPYSPLTPA

SEQ ID NO: 342551 - protein, 315 aa, unidentified
MEKVYDKCCGVDVHKKLIVACLRQGRKQEVRKFGATTRELLEMAAWLTEGGCEAVAMESTGSYWKPVYNILEMSELNAMVVNAQHMKAVPGRKTDVTDAEWIADLLQHGLLRASFIPDKAHRELRELVGYRKSLIKEQSAELNRVQKMLEGANIKLSGTISDINGVSGRNLLNAILSGEKMDLAKITDMRREKLLANNLKAADEQLVDDLNGVLTSLQRKMLAVMLKHIDELAKHIAQLDDDIDRHMKDEEKIAAARIQELPGIGNTSAETIISVIGADMSRFPSDKHISKWAGLCPGNNESAQKRKSGRTTGMV

SEQ ID NO: 342552 - protein, 416 aa, unidentified
MSDENKVASIDVHKKVLMVVVGSREGDAIGPKGELERRRFGTTTIDLHGLSLWLQERGVKEAVMESTAEYWKPVWAELEPYMRLHLAQAFSNRAPKGRKHDFRDAERLLRRHVAGELILSFVPEPEQRAWRTLTRMKTRLARQRVRLHSQVECLLEEMRIKLSCVLSDLFGASGLRILRALAEGETDPKKLAALGDDRLKCTKEQLLDALTGNVQGMHLELLTLYLQQLRLVDEQMEKLHRLIAQALKPHQEAVARLAEVPGFGPDSAQQVIAEVGVQASTFPSAGHLASWVGTCPGQEESAEENYSSRSAKGNKYMRRVLTEAAQAAVKAKGSHFQVVFRRLLPRLGYKQALWAIAHRLCRMVWKILHEAVHYVEQGAYRDPRARKQRARALAQALRRLGYDVQITPKEPATVQA

SEQ ID NO: 342553 - protein, 353 aa, unidentified
MPVYVAVDFHAREQTISWCDTADGEVHRTKLRHQHDDVRQFYEQFSGEVIVAFEASGYSAWFEQMLAELGHTVWLGNAAEIRRKAPRKQKNDRRDADLMLELMLKSDFPRVHTFSAESRTVLRQLRYRHKLVKVRTIAKNSVHAIGINAGLPLRGRLLTQTGLEQLQALPLSPVLSQQRDEWLALIRLMNKQIGAVEESLAQYAKDDEAVELLRTHPGIGLLTALALRYTLEPIARFTSTRSVVGYAGLDCVEEQSSERRRMGSISKQGSRLLRFLLNEAGQTAARKDPQLKQFYRRLLRRRNKPKAKVAVARKLLVRSFIMLRDQIDYAEFVRRGVAARVARETHSPKVTDL

SEQ ID NO: 342554 - protein, 371 aa, unidentified
MQKKALYVGLDVHKASISTTVAEDGRDSAVRFIGAIPNTPFDIVKLAKRLSKDGSRLEFCYEAGGCGYGIYRQLLSLGHSCMVVAPSLIPRKPGERIKTDRRDSEKLARQHRAGDLTSVWVPDPVYEAIRDLVRAHMDAAAQLTRARQQCLAFLLRHGRIYGPNRKNWTLRHRRWLGLQTFEQAPHQIVFQDYVEAVWAAQDRRDQLEARIAAMLPDWSMAPLVEALRAMRGLDTISAVIFLASIGDLARFETPRQLMAYLGLVPSEQSSGTSVWRGGTTKAGSSEARRMLVEAAWSYRYPPRLASEKVLVVERQEKPVRDIAWKAQVRLCGLYRKLSATGKKPTVVVTAIARELCGFIWAIGQEVAPAPS

SEQ ID NO: 342555 - protein, 346 aa, unidentified
MEVVIGVDPHKGTNAAAVLNDREELLEYAVFATNRAGLRSLTRWAKRFSERRWAVEGASGLGRPVAQHLVAAGETVVDVPAKLSSRIRLLSVGSERKNDQVDAICVAVAALRGKRLTEVGEEEGRATVLRMLSERRKDLIKERTRTLNRLHGLLRDLVPGGAPKNLSAHKAALLLRGVRPRVDPALTRRRLAADLIGDVRRLDRRLSDLERHIREAVEQASTSLTGLFGVGPILAARIIGEVGTIARFPTKAHFASYTGTAPIEASSAEVVRHRLSRAGNRQLNHALHLIAICQVRHDTEGRTYYRRKLAEGKSEKEALRCLKRRISDAVFKKLYADLESEISTAA

SEQ ID NO: 342556 - protein, 345 aa, unidentified
MEQISRIGMDTSKHFFQLHGVNAAEKVVLRKKLRRKEMVAFFKTLAPTVIGIEACGASHHWARILRSFGHEVKLIAPQLVKPYVKRGKNDTADAEALCEAMSRPTMRFVPVKTAEQQAALMMVALRDRLIRNRTQLSNAIRGYAAEFGFTAARGMAHIDPLLDRIQADENVPVLARELFAAQAEEYAQLQAQIAEVAAKLMAWHKADECSRRLAKIPGVGPIGAALLMMKTPAPEMFRSGRQFAAWIGLTPKDHSTAGKVRPGVITRAGDEALRSVLVVGATAVVQQVRRGGRGSPWIVDLLKRKPPKLAAVALANKMARIAWKLMVTGNSYAAKSAPAALMGAA

SEQ ID NO: 342557 - protein, 350 aa, unidentified
MIIIGCDYHPSFQQIAFVDTETGELQERRLQHREEAEKFYRELAAQGMKVRVGMEASGHARWLERLLSELQLELWMGDATEISARRVRKQKTDRQDAQLILQLLLEDRFPQIWVASWENRDLRQLLWHRHRMVQARTRIMNQLQAVALNEGLRSKKRLWREAGREQLEGFRLAPWASHRRRDLLELLDRMNPTIAKLTQAIDVEVEKCPAARRLKTHPGVGSLTALAFVLIIGKADRFQCGKQIASYLGLVPLEKSSGNLRRLGHITKQGNSLLRFLLVEAAQVTARSLPEWRSKYVHLTMRRGRKIAKVAMARKLAVRLYWMMRKEWDYEQLRKFGSYAGKPGNRDGVK

SEQ ID NO: 342558 - protein, 359 aa, unidentified
MSQQKYIGMDVHQATICAAVVDAQGKVLMECVLETKASTIVEFVQGLQGTLSLTFEEGTWAAWLHDLLKPHVSRLVVCDPRKAALLKEGNKSDRIDARKLAEMLRTNQLRPVYHGEHGLRTLKELGRCYLTLSKDVTRTMNRIKSLYRSWGIPCHGSSVYAPRQRAEWLAKIVEPGVRMRAAYLYQQLDGLQPLRLQARCELLRESHKHAAVEHLRQIPSIGPIRAALLAALLVALLQTPHRFRSKRQLWAYSGFAVETHDSGEYRWVRGKLQRNRERITVRGLNDNHNRDLKNLFKGAAISASTRPGPLQDFYLARVAQGIRPTMARLTLARKIATITLTMWKKGASFDPEQLRRQAV

SEQ ID NO: 342559 - protein, 337 aa, unidentified
MKNASTIKVYKDCLAVGIDVSKADLDVVGITMKESYLSTIINQVKSIKSFMHRLKRCGFKGKIICESTGHYHLKLAFVCHELGLELIVLNPLQSSKHSKAKIRKTKTDPQDAQMLATMCITEPNLPKPAQLTLSKILIRLKMGQIASVEKQLQKMRQSLNQYEETYAGLGLPLSDLQQVLHEHCNSLKKIQKQLGKELEALLSEALPDDDSFQQLCKIPGYSNIVSGFVGMLDREVKSAHSWTAYVGLDVSVRQSGTWRGRGRLTKRGNAYIRKRLFQAAWGACLNYDYVRAYYDRLKAQGRKHVEAVCIIARKQLRIAYHIVVNKIDFDPKIAFSD

SEQ ID NO: 342560 - protein, 356 aa, unidentified
MSQNLDSKVAVIGIDIGKNSFHIVGQDRRGALVLRQKWSRGQVEARLANLPPCLIGMEACTGAHHLSRKLQALGHDARLMPAKYVRPYCKGDKNDYRDAEAIAEAVQRPTMKFVATKTADQLDLQALHRVRERLVSQRTGIINQIRAFLLERGIAVRQGLRFLRAELPDILAKRTDVLSPRILRIVEDLSGDWRRLDERIEGLSSEIEALARQDQGCARLMSVPGIGPIISSAMVAAIGTGDPFSKGRDFGAWLGLVPKQMSTGDRTILGNISRRGNRYLRTLFVQAAWVVLVKVGPKQWERYGLKSWIEAAKKRLHHNVLAIALANKLARIAWAVLHNGRAFECVKTNATASRSA

SEQ ID NO: 342561 - protein, 412 aa, unidentified
MNVVYERCCGLDVHKKMLVACLIVPGADGQRSKEVRSCSTMLADLLALRDWLTAAGCTHVAMESTGVYWKPIYNVLDGSVEVLVVNAQHLKAVPGRKTDVHDAEWIADLLQHGLLRASYIPSRAQRELRELTRTRTRLIQQRSQTINRLQKVLEDSNIKLGSVVSDIMGMSAQAMLKALLEGQTDPRLLAELAQGRLRAKREQLEQALVGSFQPHHRFLIQEHLTHIDYLDEAISRLSREIAEQLRPFEALLERLDTIVGINRRLAEVLLAEIGTNVKRFPTAKHLASWAGMCPGNDQSAGKRLSGRTRKGNRWLRTALMEAGHAAAHSKNTYLSAQYHRLASRRGKQKAVVALAHSILVIVYMVMSRQEVFKELGGNYFDERDRQAVEKRLVRRLEQLGYQVSLHPNDPAA

SEQ ID NO: 342562 - protein, 338 aa, unidentified
MPLYGGIDLHANNSVIVLLDDQDQVVYQKRLPNDLPSLLQQLSPYQASLQGVVVESTYNWYWLVDGLMERGYVVHLANTAAIQQYAGLKYTDDHSDARWLAHLLRLGVLPEGYIYPKEGRAVRDLLRKRSQLVQHKTTHLLSIQNLLTRNTGRAMSGNRIKQLTVADVDGLLPEPELALAVKSNLAVMRCLETQIATIAQTVTQRVKLQAEFNDLLTVSGIGQILALTIMLETGDIRRFPAVGNFASYCRCVGSQKLSNGKRKGSGNTKNGNKYLAWAFVEAAHFAVRYNPCIKRFYQRKQAKTNTVVATKAVAHKLARACFYILRDQVPFDVSKAFQ

SEQ ID NO: 342563 - protein, 315 aa, unidentified
MTSTQVFVGVDISKAQLDLALRPEGQFSVPNNEAGFAQVLEHLNAVHPTLVVLEATGGLELPLTGVLAAAGVPVVVVNPRQVRDFAKATGRLAKTDALDAQMLAHFAEVMRPEPRPLPDEQTQALAAILARRRQLVEMLPAEKNRLGTAGKPVRKSLRTHIAWLERELSHTDRGLAQTIRESPVWREKEALVRSTPGVGPVVTTTLLATLPELGTLTGKQIAALVGGAPLNRDSGTWRGKRTVWGGRAQIRAVLYMAALVAARCNPVIRACYQRLRAAGKAKKVVLTACMRKLLIVLNAMLKHRTPWRAELVQCA

SEQ ID NO: 342564 - protein, 359 aa, unidentified
MSTQSKPFSFKGQKIFVGLDVHLRSWSVTILSEQAVLKKFTQDPSPVALNKFLTNTYPDAEYYSAYEAGFCGFWIHWELQNLGINNIVVNPADVPTMAGERLRKTDAVDSGKLARSLRAGELKGIYVPDSVATEIRSLIRLRDSLTKDQTRHKNRIKAHLRYLGIDIPEEFCRPGRTWTNRFVLWLKGLELETKYGKKTLDLLIAQYEDLRGQQLKMMKELRVLSRTERFDKPLQFLMSIPGIGQLAGLTILSEVDDISRFKDAAHFASFIGMVPMCYSSGEHDGTGNITVRRHAKLRWLIVEAAWIASRKDPVLSAAYVEYCRTMKPSKAIIKIARRLVNRIYFVMKHQQPYVNCYVS

SEQ ID NO: 342565 - protein, 370 aa, unidentified
MPPPSTLYVGLDVHTDSIAVAYVAKAHDAEVIYLGTIGTRQADIDQLLRNMPSKAKHLVFVYEAGPCGYWLSRDLTQKGHRCWVVAPSLIPKKAGDRVKTDRRDAVQLARLMRAGDLTPVDVPQVEDEAIRDLTRAREEAIGDVKTAKFRLTAFLLRHDLRYTGRAAWGPAHLRWLSEVVCPTPAQQSVFQEYVRAVNEHTERRQRLEQALQEHVNTWRLQPVVEALQALRGVQFTVAVTLVAELGDLTRFDTPRQLMRYLGLIPSAYSSGERRRQGGITNAGHTHARRALVEGAWAYRYPAKGSRHIQLRLEQLPKPIQDISWKAQVRLCQRDRHLMARGKHANQVVVAIARELVGFLWAIAQQVPVTS

SEQ ID NO: 342566 - protein, 461 aa, unidentified
MKNKSSSKAKKQSKQKVAIDQNWQLINPDAAGIDVGSREHWAAIPPSRGGQTVRCFGATTPELEALGNWLKEAKVSSVAMEATGVYWIAVFQVLERMGFKVLLVNSRQVKNVSGRKSDVLDCQWIQRLHTYGLLGGSFRPADPYCVVRSYLRYRDELVSARSRQIQHMQKALLQMNVQLSHVISDISGQSGLAIIGAIVAGERNPLVLAGKTSQRIKSNRDKVARALIGDYRPEHLFVLQMAYSLYETYQTKIAECDQAMIEELNKLPDRVDVQAKPLPPRTEGKKIDQALRQGLYQKMGVDLTAIEGIGAKVVLTMLTEVGPDLSAFPSEKHFTSWLGLCPDNRISGGKVLSSRTRRVVNRFSDALRLAATSLECSQSALGAYYRRMKGRLGAAEGVTATAHKLARLIYRLVKHGEEYVRLGLEQYEQKNKNRKLRSLQNVAATLGLQLVPIQAQTEGVS

SEQ ID NO: 342567 - protein, 423 aa, unidentified
MMKLKYSICCGLDVHKNVIVATIVTTNKDGISEYLQKSFSTINSDIQRFHNWLIENNCYHVCMESTGKYWIPIFNYLENDIDVCLTHPKYVKAIKGKKTDKKDSKWIADLYKFDLVRCSFIPPKDFRQLRELSRYRFKLVCMKSSEKNRIQNCMTISNVGIASVLSDPFGKTATEIISYLLEHTADSMDEKAVRKLIKKGAKSKSDEIIEAIKGYTIETDQAKKLELARGHLEYLDDMITQTEVELYVLIKPYYEFVEFVSTMPGMTELSSTIVLAETGVDMDIFDDAKHLCSWCGLSPANNESAGKKKSVRIAKAGDYLKPMMVQCALAAIKSKKQPYFAIKYGRIKKRRGHKKAIIAIARMMMVCIYHMVSEKKPFTPTDYEELMDPQNHVESVVLNENNVFAYLESLGYDSSKLVKRNDN

SEQ ID NO: 342568 - protein, 399 aa, unidentified
MISVGIDISKEKSTVCILKPYGEIISSPYEITHTENQVSELAARIKTFDDEVRVVLEATGNYHLPVLSFLKTQGIFVSVINPLVMKKYASTTLRKGKTDKLDAIKIANYGLDNWFHLVNYEAAEEVYSELRLLGRQYEHYIKMHVESKLSLSNMLDYTMPGIKSLLNSRSEKPGKDKLNDFVEEYWHFDNITKKSEKQFISSYQKWTKKKGYQQSELKAQNIYALAQEGIPTLSSNAPSTKMLVLESVRVLREVDKTLTLILSQMQEIAKGLKEYSVVREMKGVGEILAPRLIAEIGDVRRFHSGKALIAYAGIDTPPFQSGQFTGTNRRISKRGSSTLRKTGYEVMKCLKCNKPQDDAVYLYIIKKEAEGKASKVAKIAGLNKFLRIYYARVKEKLSE

SEQ ID NO: 342569 - protein, 346 aa, unidentified
MMLIGCDYHPSWQQICWFETATGETGELKLEHGSGEAEKFYRGLLGHALIGMESTGNCQWFVEMATTAGHDVWIGDAAQIRASEVRQQKHDRRDAALILKLLMEGRFPRIWTPSGAEKDLRQLLIHRYKLVRIRAQVKTELQHLAMNQGVTRKRKLWSKAGEKVLRELPLKPWASRRREDLLKVREMLNGQITLLDQAVVEAAEKNEKARLLMTQPGVGPITSMAFVLTMGDVNRFKRGKQVASYLGLIPREYSSGGHQRFGSISKQGNRFLRMLLVEAAQGAVRCDPGFRNEYLHRCHKKAKGVAKVAAARKLAIRLYWMLRTNTGYPEVVRVESSSRVPLVSAS

SEQ ID NO: 342570 - protein, 409 aa, unidentified
MEVLHERVAGLDVHRDTVAACVRLPGRGQPEVHKDRFPTTTAGVAQLGDWLTGWAVTVVSMEATGVYWKPIYYGLENRFELWLCNAQHVKNVPGRKTDMSDAEWLADVVAHGMVRRSFVPPPEIRQLRELTRYRRTQIEARIREFERLEKLLQDASIKVSSVASSVKTQSVRAMVEALIDGHRDPEMLAGLAKGKMRSKIDALAQALAGNFDAHHAVAARQILDHIDFLTASITALDTEIAARLRPHQAVVDLLGDIPGLGQRSIEVIVAETGADMTRFPSAAQLASWAGVCPANHESAGRRRHGGTPPGNRWLVTTLVEAARAAARTKHSYFRAQYRQIARRRGPNKAAVAVAHSLLITVWHILTTGERYHDLGEDYFRARIDPDRQRRRLVHQLNALGYTVTLQTAS

SEQ ID NO: 342571 - protein, 381 aa, unidentified
MKTLSKTVAANDTEQQAKLFVALELGQATWVVALHSPIADKISIYRIAGGDTDNLMALIEKKRMQAARQLGRAVQVVSCYEAGRDGFWLHRFLIRSGIDNRVLDSASILVDRRARRAKTDRLDARALLRVLMALLRGEEQVCRVVRVPNIAQEDERRLSRERQRLLHERNSHIARIKGLLILHGVRDYRLIERDWKERLDAVRTAEGQALPARAKTEIERECRRLWLVKQMLAEVEREIEQMIAQDGAVAGKLIRVRGIGPTFASVLTHEVYYRSFDNRRQVGSYLGLVSIPWQSGRVRRDQGITRSGNARARRCAIELAWLWLRHQPGSALACWYRTRVGTMTGRMRRIALVALARKLIVALWRYLQNGIVPEGAALKAA

SEQ ID NO: 342572 - protein, 341 aa, unidentified
MSNVTLIGIDIGKHTFHLHAQDKFGKEVSRKKCSRQQMMRALANHPACIVVMEACAGSHFLARELKAMGHEAKLISPQFVKPFVKSNKNDFVDAQAICEAASRPSMRFVTPKSPEQQTLSVSHRMRESLIRDRTKTVNQIHGFLLEFGVDLPTGMAVIKRLASALEEHDLPVRFVALLQRLHDHFVYLNEQIKLLDEELASQLADDDLGSRLLSIPCVGPITASLLAVEMGDGQQYGSSRDFAASVGLVPRQYSTGGRQTLLGISKRGDKNLRHLLVLCARVYMLRLKHQKGPLAEWVRTLLTRRHSNVVACALANKLARIAWAIATRHSQYETEPDAMNA

SEQ ID NO: 342573 - protein, 422 aa, unidentified
MSYCPVAGIDVSKRFSDMCILSPDNKIFAQEKIYHDETSINRANALLQKAERLFFSKPVIVMESTSHYHLILFQFFSEHGYDVIVVNPLQSNSMKDFSIRKRKTDRVDAFKLAMMYRTKTLRPSQIPQTATRALRQLCRHRAELLNDVSSYKNRLTALLDQTFPGYDKVFSDVGGVTSCAVLVRFPTPTILLVEEESELVEVIATASKSGYSFAKKKAGLLISAAQKAQALGIHSCADETLIVCTIQMLRTLSESVLQIETAIDDLLAQIKEMRNNVSLLQSIPGIGSHSAALLLGEIGDISLFKKPKQLAAYFGLDPTERQSGSFRGTKNKLSKRGSSYARAALHMGIVNSICKRGKDSAANPVLLSYYEKKCKNKPAKVAQAASMHKLVFIIFAVLRDQKPFELKTPEQHAVEQGFVKAA

SEQ ID NO: 342574 - protein, 319 aa, unidentified
MQSKLTIGMDIGKAQVVVACHESAFAVLKMANAVPVLRRWLATLPAGSRLGLEATGGYHEPVAELAHSLGFTVYILNPKDVHHYARALGARGKTDWLDAQVIAAYVAEHNARLHAFVPLSADEKLLRELARRRATLVNAKSMLQQSLRVLPGFEREGRELLRAMGSFADRLERKLAEIAARSSERAALVKRLQTIDGVGTLTSIRCATLFTRVPLHGSDAAVAFFGLDPRPHDSGQHRGRRRLSKRGPSEDRRLLYNAAMSAIRTPTWRPLYQHLRNRGLASTEAIIIIARRMVRIAFAMYQNHSDFNPRLVPRPSCPA

SEQ ID NO: 342575 - protein, 317 aa, unidentified
MSDHPETFVGIDVAKAQLDVAIHPQGECWPLPNDETGSVELVRRLQQLGPALIVLEATGGLEASVTAALAAAALPVVVVNPRQVRDFARAKGILAKTDRVDARVIAQFADVIRPATRPLKDAELQALNALVVRRRQLVDMLTAEKNRLTMAPKTVRRDIKQHIKWLERRLNDVNNDLNQAIKASPVWREKDELIQSVPGVGPVLSVSLLSDLPELGALNRRQIAALVGVAPFNRDSGTYRGHRAIWGGRAHIRAVLYMSTLSAIRCNPVIRAFYQRLVAAGKQHKLALTACMRKLLTILNAIVKSGTPWQNKLPCDA

SEQ ID NO: 342576 - protein, 387 aa, unidentified
MDQDTTYVAFDTSKETIAVAIAESGRQKEVRFFGTIASRPEAVRKLIDKLAKQHHRLAFCYEAGPHGLYRQIRAMGYGCQMVAPSMVPVRPGGHIKTDRRDATTLAALFRAGELTAIWVPDAAHEAMRDLSRGRQAAMEGLRRARQQLLSFLLRHGRVYPTRSHWTRAHRRWLSEQRFDHAAQQIVFEELIQAIEQAQSRRDRLEQQMVASLPSWSLCEVVAALQALRGVALLSAITLMAEIGDFRRFANPRELMAWLGLVPREHSSGATTVRGAITKAGNRRARRVLVEGAWTYRLPARVGLVTGASSVLASQPRSSRSPSRGSSPPSSGPSPSPSCHRSSQQPDKPPSTAKETIPTIIMLRTAGRGGRQGNPRCDSARPIGIRAT

SEQ ID NO: 342577 - protein, 333 aa, unidentified
MNYAGIDVSHKELVIVVSVKGKAHKAKTFENTASGHKAIIQLLSKLKGESKVCIEATGVYHFDLAVALSRAEGIEVMVINPKASHNFAKVLMKRSKTDAVDAEILAIYCERMPFEAWQRPADENIALRAIARRIAALTKLKTQTKNQLHALKATEETPVLVIEYTEELIEVVDKQIQVHRESARQLIQQHDELAEAFALITGIKGIAVASAVQMLGELMILPKDMSAKQWVAYAGLDPRQFESGSSVTKKPRISKAGNKFVRRALYMPALVATCHEPHIKGYYTHMIQDNGLKKIQAVCAVMRKLLHAIHGMLKAKKEFDGTRFYTFPVEANS

SEQ ID NO: 342578 - protein, 426 aa, unidentified
MRVMFERVAGIDVHKDMIKVGIRTPGHRAWTRNSEVLEYRTFYGVLLTMAADLRRRGVTHVVMEASGVYTEPVYYALGGQGFEQVAVINPAHAKALKGHKTDAKDCLRLAELFECGLLRGSYIPAQDLKDLRDLTRYRIKTVQARTSEIQRLAKALESAGIKLDSVVSDLTGKSAGLMIEALIDGERRGQVLADLAIGRMRTAGKLADLSRALTGRFTDHHAVLCRLHLDRIALFNAAVDGLEARIAVKAAPYRRELELLKSIDGFGDAVAQAWLAEIGPAPHEYFGSHEKLASWVTLCPGNYMSAGKRAHGRTGKAGAYIKPMLVQAAWSAVKTEGRLQARYHKLVRRFGGPKNPAAVKKAILAIAHTLLKIAYQVLRSGKPYEDPGADFYARRESPEQRRAYLLRQLEKLSPGCTITITPAEAA

SEQ ID NO: 342579 - protein, 344 aa, unidentified
MSEVIIIGLDIAKHVFHVHGADERGRAIFSKRISRVKLLDFFAAHPSCTVALEACGGAHHWARQLTQLGHEVRLIPPAYVKPFVRRQKNDAIDAEAICEAAQRPSMRFVAVKSEQQQAAGLVFRTRDLLVRQRTQLINAIRGHLTEYGWIAPKGPSHVAMLAELLEEEEMASSLPEAARAMFRLMLDTLAGLGSKIADLDKEIARRAREDEVSRRLMTVPGIGPISATAIAALAPPAETFAKGRDFAAWLGLTPLQRSTGGKQKLGATSKMGERTLRRLLIIGSSAIVLQASKRGAPKGSWLEQMLARKPRMLVTVALANKMARIVWALLVKQENYRALVAAKA

SEQ ID NO: 342580 - protein, 314 aa, unidentified
MRIVGMDVSKDKIDAAIVAASAHRSFANSAQDQQQMLSWLDEHDVEKAVMEATGGYERPWAKLLQDGGIAVQIVDPRRVRHYAQAAGQRAKNDRLDAEVIALFGETFADEPGQLHDEDGSALDQLVSGRARLKAIAWQLGNWTEHAPPQEIAEACQAVAAVLEQQLERLDKTIAGKIEQTEHFAERAAIIESVPGLGSGSAAGLIAGLPELGLVDNKAIAALLGVAPYDNDSGKHHGARSIRGGRAKLRQLLYLPTVGAATRHNPVIKAYYQRMIDNGKPPKVALIACMRKLIVILNTMIARGEKWDPTKHATP

SEQ ID NO: 342581 - protein, 343 aa, unidentified
MEHYAGLDVSVKEISVCVVDGAGRVVREVKVASEPGAILGVLADEAFTLKRIGLEAGPLSQWLYGALAEADLPVICVETRHMKAALSAQINKSDRNDARGITQMMRVGLYRPVHVKTLASQKQRMLLTSRQLLQAKAHDIESDLRGTLRNFGLKVGPVSRGKFEVRIRELVVDCPDLAAITGPLLIAWRALREQFAVLHRRLLAVVRDDAVCHRLMTMPGVGPVVALTFRATVDVPSRFANSKAVGAVFGLTPRQHQSGEVNRMGYISKCGDAMMRAMLFEAAQVMLTRTTKWSWLKAWGMKVARHRGMKRAIVALARRMAVVMHRMWVDGTEFRWTNFAEAA

SEQ ID NO: 342582 - protein, 346 aa, unidentified
MKRYKYFIGIDVSKLTLDFAIMNVEKLIYHKKIANDETAIASMLVELKEINGFKLSNSVFGMEHTGIYSNKILSILEGKKANIVYENPTHIKNSLGNLRGKNDKLDSIRIATYLKKLKDDLRLWQGKRKIIQELASLVALRDRLARTKRALKTPLKEDHLFVSTKFAIQNEKFSSRTIDALEADIHILDETINLLCLSDPKIKRMMDIITSIPCVGPFTALQMIITSNEFETISSPKQFAAYAGLAPYPKQSGTGLQSRSRVSNIANKKMKTLLHTCAMLSNRFVPEIQAYFKRKTEIDGKPKMLVFNAIRSKLVLRVFSCIKQDRLYTKDYDYNREELTQEIRQT

SEQ ID NO: 342583 - protein, 350 aa, unidentified
MKKIVKQVAGIDVSQDELVVQLASMYDDWVPEFGDSKTFPNTQKGFGCFVEWVKGRMVSDVPVRYVMEATGVYHECLAYYLDQNNYEVTIVLPNKISNYVRTLETKTVTDRTASRAIALFGIERKLDRWSRPPGLYKKLRQLTRERAQIVELSTICKNQLHAEQSEAEPHKSSIKRIQKRIELLKKQEKEIKAELALLIKADREMQRLVLLLCSIPGIGLLTAATILGETNGFELIRNKRQLTSYAGLDVQEKQSGTSVKGKPRISKKGNKNLRKAMHFPALTAIRHDERFKAVYVRLVSKHGLKMKAAVAVQRKLLEMTFTVFKKQEKYDRNYFKAQNQEAEQILITNN

SEQ ID NO: 342584 - protein, 343 aa, unidentified
MGEVSTIGLDIAKSIFQIHGVDVDGAVVIRKRISRAKLLEFFATLPACLIGIEACPSAHYWSRRLEALGHAVRLMPPSYVKAYLKRSKNDANDAAAICEAVTRPSMRFVATKSEQQQCGLMLHRSRQLLVCQRTMLSNAIRGHMAELGIISAKGRNGTAELLEIIADEHDDRIPAAARLSLDVLARQYRGVRAEIVAIEKRIHAWHRSSEESRRLEEIPGVGPIVATALVAEVGDWKTFSSGRSLAAWIGLVPRQHSTGGKQRLGGISKQGNRHLRWLLVAGAMAVIRYARQRGTKRPWLARLMDRRPIKVAAVALANKIARMAWAMMVRGERFKEPKLLPAA

SEQ ID NO: 342585 - protein, 420 aa, unidentified
MRNAGIHANSLLEVRRMYNAVGIDVSKGKSTVAVLQPGGTVIRKPFDVSHTSQNLNELADYLSSLDGTTKIVMECTGRYHEPMIKALSEAGLFISIVNPHLIKNFGNNSLRKVKSDPADARKIARYTLDNWTELRQYSGMDNTRTQLKTLNSQFSFFMKQKVAAKANLIALLDNTYPGVNKLFDSPTREDGSEKWVDYAYSFWHADCVRKIGLKAFTERYMSFCKKHHYIFQQDKPEKLFNASKELVAVFPKEKTYKLLIQQSIQQLNLASEHVERLRREMNELASTLPEYSTVMGIYGVGKTYGPQLIAEIGDVSRFTHREALTAFAGVDPGVDESGQHKSKSNRASKVGSARLRKTLYQIMTTLLQNAPEADPVYRFLDKKRSQGKPYYVYMTAGANKFLRIYYGKVKECLRNLEQTE

SEQ ID NO: 342586 - protein, 384 aa, unidentified
MDQLNIQKTKVYAHFIGIDVSAYELDFAVMKGSKFLFHKEIKNSPQEILAFIAELKELPSFRVSKAVFCMEHTGIYANHLLNTLKRVKADIVYDNPLQIKNSFGLTRGKWDKVDAMRIAQYVFMNRDNLSLYNPKRPMLQQLANLFSLRNRLLGIQTALQTPLTSQLTFIKKEDHSLTVKACRKSMAAIKEDLLNIDRMIDQIIADDENFSRLIRMITSVPSVGRITAIQIIISTNEFKSISSPRKFACYAGVAPFKKESGGVKYRAKVSPIANRKMKALLHTCAMISLRSIPEIREYYDRKVAEGKSKMSVLNAIRNKLILRIFSCVNQERLYNREYMSKMADNEPTDNGSMAYEALPCLSSLQNIRQTKESKGHVSKSYEGL

SEQ ID NO: 342587 - protein, 409 aa, unidentified
METMIARCCGLDVHQGSVVACVVITETRRKVRREIRTFGTMTRDLEALRDWLTAEGVTHVAMESTGVYWRPVHNLLHGSFVLVVANAHHIKNVPGRKTDAKDAEWIADLLRYGLINPSYVPTPEIAELRDLTRYRRKLVGGASAERNRTLKLLETANIKLASVAADVFGVSGLSMLRALASGQSTVAEMASLARGRLRRKLAPLALALDGRMTDHHRFLLTVQLHRLEAIDHDIALLDRRITEKTAPFERQIALLTQIPGVDRLSAIAIVAEVGIDMSHWPTAQKLAAWAGLCPGNYESAGRSKGAGLRRGNVHLKAALYVAASAAARQRGSYLKNKYHRLKSRRGARRAGIAIAHKILVSAYRMLTGDLPYQELGETYLDRLAERRVTHNLTRRLRALGYEVTLTKPA

SEQ ID NO: 342588 - protein, 350 aa, unidentified
MVVVGADVHKRTHTFVAVDEVGRKLGEKVVPATTAGHHDAVAWVRTQFGSDVRWGIEDCRHLSARLERDLLTCGQQVVRVPPKLMAQTRACARTRGKSDPIDALAVARAVLREPDLPVASHDEVSRELKLLVDRREDLVGQRTSTINRLLWRVHELDPAHAPKAGSLDRAKHRQLLGAWLATQPGLVAELARDELADITRLTEQINALAARIGDRVRLAAPALLSMPGCGELTAAKIVGEAAGITRFKSEAAFARHSGVAPIPVWSGNTRGRVRMTRSGNRQLNAALHRIAVTQIRLDGLGRTYYRHRLAEGDSTTEALRCLKRRLARVAFGHLHTDHQNRQPACQTAAA

SEQ ID NO: 342589 - protein, 398 aa, unidentified
MTESSDYESVQIFIGVDVGKDTHHAVAVNRSGKRLFDKALPNDEAKLRSLISDLKQHGQILLVVDQPATIGALPVAVARSEGILVGYLPGLAMRRIADLHAGEAKTDARDAAIIAEAARTLPHALRTLKLADEQIAELSMLCGFDDDLAAQTTQASNRIRGLLTQIHPALERVLGPRLDHPAVLELLQRYPSPEKLASLGEKKLATQLCKLAPRLGKRLAADITQALTEQTVVVPGTNAAVVVLPRLALQLITLRKQRDEVALEVEQRVLAHPLYPVLTSMPGVGVRTAARLLTEVACRAFASAAHLAAYAGLAPVTRRSGSSIRGEHPSRRGNKTLKRALFLSAFAALRDPISRAYYTRKMSQGKRHNQALIALARRRCDVLFAMMRDGTFYTPTAS

SEQ ID NO: 342590 - protein, 350 aa, unidentified
MKTTHPVIIGIDTHKVTHVAVAIDTQGTRLAALSIPTNPKGYLELERWSRSLGKVLAFGIEGTGSYGAGLSRSLLAQGHNVIEVTRPNRQLRYTQGKTDSLDAEGAARSVLSGQATARPKTQTGSSEMIRHLKIARDTGVKSRSQAMVTLKTLIINAPADLRNALDQIRGKVALIRHIAAFRPGDIDSPLTSAKAAMRALARRWLWLHEEIIAHDKELERLVTKRAPNLMASHGIATLTVAEMLILVGDDPTRIRSEAAFAKLCGVCPIPASSGKTHRFRLNRGGNRQANAALYRVAIVRMRSHAPTMAYVKKRTKDGKSKSEIIRCLKRYIVREIYSQLCVPKSTNITA

SEQ ID NO: 342591 - protein, 391 aa, unidentified
MPEDAPRPAQAAIRTDLGAIFVSLELSRRTWLITSLSPGAGEKMSKHSVPASDVSGLLRRFAELRRKAVARTGRDFPIIVIQEAGLDGFWIHRVLQSEGIESHVVDAASILTSRRGRRAKTDRIDGETLVRTLMAFKRGEPRVCSMARAPTPQEEDRRRVCRERRTLVGERVRHVNRIKGLLFAQGVFGYEPLRKGRRERLEDLRTGDGRPLPVHLKAQIIRELDRLEVVLEQLKTVEAERDALLKPANDEMPSPAAMLAQLKGIGSETAVLLWSEGLFRRFDNRRQVAAYAGLAPTPWQSGSIDHEQGVSKAGNPRLRATMVELAWLWLQNQPTSTLSLWFHERVQRLGGRMRKTIIVALARKLLIALWRYTTAGIVIEGAMMKPSPATT

SEQ ID NO: 342592 - protein, 287 aa, unidentified
MKKISTARIKNQAANKKVTIGMDLGDRSSRYCLLDEEGMVIAEGSTPTTKAGIAKVSGGMARCRIALETGCHSPWVSRQLQGFGHEVIVANPRNVRLIGENTRKDDRLDARTLARLARIDPNLLSPMRHRGAEAHADLAVIRARRVLVRARTMLVNAARGLTKSFGERLRKCGAGQVGPKLAAELSPEIRAAVLPLLAEVEVLNQRIAAYDRQIEQLAKEHYPEVARLKQVKGVGTLIALTFVLTVDDPNRFQRSREVGCYMGLRPGRRNSGKSAPQLHISKKATAT

SEQ ID NO: 342593 - protein, 361 aa, unidentified
MIKLGSDLHARQLTECRQLDGSTPKPAQKWAPWKLLDQVEEWVKSGIKIYSCYEAGACGYWYHRELITRGAVNFVVVPRRLENHYSKRQKTDRLDARGLLNNLESYLRGNHNAMSMVAVPSPEQEQQRSVVRHREQLMRNRRRAEARGRALTLSQGIVAPMGWWRPGAWKEFKTQVPEWMVSQLEHWQQEALSLDAKERQVRQQLEKMVSINLPIGVGALSWITLELEIRGWARFGNRRQIASYTGLCPGIHNSNGRGMEGSINRCGNSVVRYTLIEMVWRMLRYQPDYPPIKKLRGTVSKRGKRRFVVAAARRLAIDLWRWATGRASAEKLGLALPDRRPADARIHQSRGRCAVIDACSA

SEQ ID NO: 342594 - protein, 343 aa, unidentified
MLYTGLDLHRSFSYITTMNEKGEIVGQKKLPSNGEVVEFLKEFDDTMEVAIEATPSWYWLYDHLEDEGFKVKLSHPLKTKAIAYAKVKTDKVDSATLAHLLRSDLLPLSYVPEKPVRLNRELLRYRARLVRVQTRIKNNIHTILAKNNVSHSYSDLFGKEGMAFLYSLSLPENYKIALEGYLSVLETLRHEIRLASKRVQALAEENQDAVLLMTIPGVGYYSALMIKSEIGDVKRFPSAKQLCSYAGLVPSTYASGNTCYHGHITKQGSRWLRWILIEAAIHAVKRPGPLRRFYFKVERKKGGKVAKVATARKLLEWIYHMMRDNKSFKEVERLAELQVRVSP

SEQ ID NO: 342595 - protein, 418 aa, unidentified
MDIDRDFCEVAIAEGGELRLAGRVQTEPEALALFAQGLGGDDEVALEATGNALEIARIIEPHVGRVVLANPKAVKGITRAGPKTDKIDARTLAQLLAGGFLPAVWLPDEQTRILRRRISARAQLVRQRTRAKNQVHATLMRNLKGKPPVSDLFGARGRRWLAAQDLPADEQETVAACLRQIGFLDGEIGLVERTLAEQVLASAELRRLLTLPGVNFVTAAALLAAIGDIRRFPSARQLVSYLGLDPRVSQSGVEPARHGRISKQGPGETRHVLVEAAWHAARTAGPLRAFHQRVAARRGGNVATVAVARKLAVIAWHMLSRGQDYAFARPSLTREKIRKLELATGAERQKGKRIGVWVTKEQHRLDKELAAQAELAYRRLVQDWQPAIKGTGAAPGRASCGPSSGQAARQETAPTPAL

SEQ ID NO: 342596 - protein, 400 aa, unidentified
MRAVFGIDVSKASSEVVILVNSEKVHDYSMPNDAIGFSRLLKDLNTVSNPEIIFEATGVYSRRLQAFLEENGYAYTRLNPLEAKKQLDSLRVRKTDKIDAEKLAESQFILNRKPTYGQEEVYQNLRDLSRFYQNLTEDMVRTKNRLHKTLQVTFPELEQLLAAPTGEQYWNLVSSFPSKDFVLDLSPSELAEVIRQSTSKRISEKRVTLLSDKLTELAKQSYCAVKKTSPMIEEVKYYAQELLRLTKRRQVILDEMVRLAQPLPEYEILLSIPGIAETTATSIIGELGDVRRFQSANQINAFIGIDLRHYESGNFLAQEHITKRGNPYARKILFKCIHNIAAASHTNPCHIADFYEKRKRQSQTTSTKPHTIAAVHRLIRTMYYLITHNKLYDYTATQSH

SEQ ID NO: 342597 - protein, 351 aa, unidentified
MWIIGVDYYPSVQQIAFVNTDTGECGERRLSHSDGEAEKFYRELKAAGCSVRVGMEATGHSRWFERLLAELGFELWIGDPAQIKARRVRKQKTDRQDAALLLQLLLEDRFPRVWVPSAENRDLRQLLWHRHRLVQMRTRIMNQLQAVAMNEAVRRKQALWSKSGRAQLESLPLAPWAARRRHDLLELLDRLNPTIEELSAAVEQEAKQRPEVLRLMRHPGVGPVTALAFALIIGSAERFACGKQIASYVGLIPCEDSSADRRRLGHITKQGNSLLRFLLVEAAQAAVRCDPDWRRRYTHLAMRRERRIAKVAMARKLAVSLYWMWRTQRDYQQTMKFGSHAGESDYVHGVQ

SEQ ID NO: 342598 - protein, 389 aa, unidentified
MRFYTKQHPFYCGLDLHARTLYVCILNQEGEIRCHRQVTASPEALLKVITPYRDGMVIAVECLFTWYWLADLCAQEGMPFVLGHALSMKAIHGGKATNDRLDAHKIAVLLRGGMLPQASVYPAEMRATRARLRRRMHCMRTRAALLPHIHHTQSQYKLPEIGKTIAYKANREGVAERFRDPAVHKSIAVDLALLGHYDHLLRDMALSILNTAREHHAHTLYLLRTVPGIGASLSLGLLDELPDIARCPRVQDFVSYCRLVQCSKESAGKRYGTWGAKSGTASLKWAFSEAAVLFLRDNPAGQKSLARLEKKPGQGKALTVLAHTWARAVYDMLQRAVAFDTQKFFHGSGRGAGEPRASLDDSRMRLRGVRWTGCCLAWLNADEPIGRDP

SEQ ID NO: 342599 - protein, 453 aa, unidentified
MGQCKRKICFKPGKSREALTITHPNAAGVDIGSSSHYVAVPPDRDDVPVREFPSFTVDLNALADWLDACGVDTVAMESTGVYWIPLFELLESRGFKVLLVNARHVKNVSGRKSDVLDCQWLQQLMTYGLLSGAFRPADDVCVLRALWRQRGMLLKSQARHVQHMQKALTQMNIQLTNVISDVTGETGQKILRAIVAGERDGQVLSAMKNARIRATADEIAKSLQGNWRTEHLFALKQALDMFDFIGAQLAECDREIEQQLQSLQVHDGEPAKGKKRGHARNAPKFDLRTQLFRMCGVDLTRINGIDVTTALAVISETGTDMSRFPSVGHFTSWLGLCPGTKITGGKVMSGKTKRVANRAAQALRLAAAALRSSQSALGAYFRRMCGRMDKPKAVTAAAHKLARLIYTMLTKGEEYTDQGQDYYEERYRERVLRQLAQRAEKMGMKIVVNEQPV

SEQ ID NO: 342600 - protein, 411 aa, unidentified
MDVIVERAAGLDVHQASIVACVLIGRPGQKPRKEIRHFGTMTADLEALRDWLRELGVTHVGMESTGVYWKPVHTILEGHFTLIVANAHHIKAVPGRKTDVKDAEWIADLVRHGLVRPSFVPPLEIRELRDLVRHRRTLAETLASERNRTLKLLETANIKLSSVATDVFGVSGTAMLRALAEGDMAPEAMAELAKGRLRTKLEPLVKALQGRVSEHHRFLLRLHLRRLDEIERDLAELETRIAERMRPYRRQVGLLKRIPGVDEIGAAEILAETGIDMTVFGNARRLAAWAGVCPGNHESAGRSRKTSTRKGNPHLKAALFRAATCAAKAKGTYYKEKYYRLKARLGAKRAAMAIAHKILLAVFHVLAGDTEFRELGAAHLDQQNKHRVTKGLVRRLDALGYEVILRPKLAA

SEQ ID NO: 342601 - protein, 350 aa, unidentified
MTEAYDGRQVVGMDLHRRRSVLVRMTADGKRLETARITNSAAELRREIAKAGEHPQVVLEATYGWYWAADELAAAGAEVHLAHRLGVRAFTYRRVKNDEKDAADLADLLRMGRLAEAWIAPPEVRELRELTRYRIKLVRMRSSGKEQVHAVLAKLGIPVTCSDLSGTWGSAWLDGLDLPQPYAGKVASLRELTGWLSAETGLLDVVIADLLGSCQPYHAVRALPGLGPVLAAVTVAEIGDISRFPAPGQLCSWAGLTPRHRESDLKVARGHLTKQGSPILRWAMVEAIQHQPDGSPPRELRDRIIARRGAQARNIARAAAARKLLTCVFYAMRDGQVRSLAARSQAAEAG

SEQ ID NO: 342602 - protein, 315 aa, unidentified
MEQSPITPSFVGIDVSKDRLDVHVRPSGRAFAVTRDGNGLEQLVDDLRTLAPALIVLEATGGFEIVAAAALAGAALPLAVVNPRQIRDFARATGRLAKTDALDAQVIALFAERIRPEPRPISNADSQTLAELVARRRQVVEMIGMETNRLHQARNPRVQRMLKATLKTLKTQLAELDRDIDDTIKQSPVWRAADDLLTSVPGVGDVTAHTLIADLPELGQLGRRRIAALVGVAPVNRDSGQMRGRRTIAGGRVDVRTALYMATLSATRWNPVISQHYRSLVERGRPKKVALVACMRRLLGILNAIIRTKTSWQCA

SEQ ID NO: 342603 - protein, 334 aa, unidentified
MEGPIVSIDVSNGNSHYMCFIKNNKRFGKVKKIDHDIEGFKRLLEDIQKLEAETNEKVCAVFEATGVYTKPLERFLSKNSIKTYIINPLESARKRKEEIHNKKTDKLDPISISKVYYDKEEMMELKKKDETYNWLRKKNRLYEDQLNHLRKYKVTFQNQLSICFPGYLDLFRDGYSDIPMTILKKYPHPDLLKNKKAETVASTLEEYRYISSIDGIGPNLAARIIAEIGDIEEFKSREALVAYAGLDPHIYQSGDQDGKHLKISKKGNKYLRCLLFLAVGCSIRGAKDNPVNRFYQKKKQQSNPLNSKAAKTACTAKLLKIIYGICKNKTTYKR

SEQ ID NO: 342604 - protein, 348 aa, unidentified
MTGRDSSMDIAVLGIDLGKNSCSMVGLDGSGKVILRRRMQRKTIVTLAAKLSPCIIAMEACCGAHHLGRLLAAQGHTIRLMSPEYVRPYVKAQKNDDRDAEAIAEAATRPTMRFVVLKSEEQLDMQTLHRVRDRAVCERTSLMNQLRAMLLERGVIVPQGRAKLLLRVTELLQQRAGELSSRIQLLMEDMLTRWMALDERIAAFDAEFAAEVKRDEAARRLMSIPGIGPLNATALVAAVGDAETFARGRNLAAWLGLVPRQATTGGKPRLLGITKRGSKYLRKMLIQGARAALPTLSRSNTRLGQWLRGLLARAHSNTVVVALAAKMARIVWALLRYGTTFEPRAIAI

SEQ ID NO: 342605 - protein, 362 aa, unidentified
MDLAKRVIQVHAVDAAGRRVVARPLKRDQFIAWCATLPPGCLVAMEACSSAHHWARRLRAMGLDARLIAANFVTPYRMEGQGGKNDATDAAAICEAASRPSMRFVPVKSCEQQGVMSLHRVREGLKEERTACVNRIRGVLAEFGLVFGRSPKVLRAVLADVLEDASNELSTTARRVLQRAFEHWRELDAHLKWCDQQVGQHVRDTPAAQRAARIIGIGELGASALVAGVGEFRQFKNGEQFGAWLGIVPRQDSSGGKIRLGRITKRGDDYLRTLLIQGAKTAVMSAGRRDDPISRWLVQLTARVGWQKACVAMANKNARILWAVMTRDADFDARHVSVKPDAKRPAKERAAPVPVQPMPCIA

SEQ ID NO: 342606 - protein, 343 aa, unidentified
MQSISTVGLDIAKSVFQVHGVDAAGQVVIRRQLRRQHVLAFFQKLPPCLVGIEACASSHHWSRELQALGHTVRLMPPAYVKPYVKRQKNDSTDAEAICEAVTRPNMRFVPTKTVEQQSCLMLHRARHLFIRQQTAVINSIRAYLAELGIVAPVGRRGVEQLLEVVADTADYRLSEVARACLGALGSQLRALKAQILEFDRRIIAWHRSSATSKRLDAIPGVGPALATALVASIADPKAFRSGRDFSAWVGLVPKQNSSGGKDKLGSISKQGDRYLRSLFTAGALAVIRYAKIHGTGHRPWLTALLARRPTKVAAIALANKLARMAWAMMARNERYKEPAALAA

SEQ ID NO: 342607 - protein, 355 aa, unidentified
MDSKKYIGMDVHKESISIAVMNGLGKIVMECVIETKASMILQFVDGLRGDLQVTFEEGTSAAWLYDLLKPHVTKLVVCDPRKNASMKEGNKSDKIDARRLAELLRLNHLNPVYHGEHGLRSLKELVRSYLTITKDLGRVMTRVKAIYRSWAIPCTGKQVYAPRHRAEWLGKIGEPGVRRRAEFYYQQLDALRTVRLEVRRELLAESKKHQTWKRLCQIPSIGPIRAAVLLGILQTPHRFRTKRQLWTYSGFGIETHSSADHRKVDGQLRRAKKPISIRGLNRNCNHDLKNLFKGAAIVASSKPGPFQEFYTALLTKGIRPEMARLTLARKIATIVLIVWKRGASFDAQHLKPQTA

SEQ ID NO: 342608 - protein, 474 aa, unidentified
MSTQRFTKSKGSRVRVADSDLRITNPHAAGIDVHARAHWVCVPAASMPYRAQDQPANLPANVRVFGTCTPDLEQLADWLFVCGVTTIAMEATGVYWIALFELLERRGFKVILVDPRQTRQVAGRPQSDLLSCQWIQRLHSYGLLSASFRPDDQTCVLRGYLRQRQLLIADAGRSTQHMQKALEQMNVKLAETLSDITGVTGMLILKAIVRGTRDPQELAKYRNEHCKCTPAEMARALQGNWREEHLFALRQALKTYQHLRRQLAECDACIRTCLKSLPDNSGGEVLPKKTPRRSTKATEPTFDARRLLFRWSGRDLTVIEGIDQSTALSVLAEIGIDMSKWLTERHFVSWLGLCPQHRGSAGRIKNRRLRGGANRAARAFRLAAQGCHHANNALGAFYRRVQARAGSGKAVIATARKIACRVYRLLKFGEPYVRQDMAAYEAQFHLKRMKGLARKARALGYQLVPVTEAETQPT

SEQ ID NO: 342609 - protein, 318 aa, unidentified
MDTRINQPEINVGVDTGKYQLDIYIRPLGIFFSVSNDEEGIKEALCEIKKHSPQRIIIEATGRLEHAFIVACSKANLPFVVANPLQVKRFSGAIGRIAKTDPLDAQLIAHYGEAVKPKLSQLKPENISLMSDLLSRRRQLITMQTMEKNRLKIMPKALACAIKPILTAIKNQIEKVDKKLLKIIEECPEYQLKNDILQSMPGIGNIVAFSLLSDMPELGTISNKQAAALVGVAPFNRESGSYKGQRRIRGGRYQVRTVMFMAMMSAIQCNPLFKAKYEQLVAQGKPKKLAIIACVRKMIVILNSMLRDGVKWEVDYAK

SEQ ID NO: 342610 - protein, 345 aa, unidentified
MQDVTLIGIDLGKHSFHVHGQDRNGKALLRKKFSRKQLIEFLATFQACTVVMEACAGAHHMARLLADYGHEVKLISPQFVRPFVKSNKNDFIDAEAICEAACRPSMRFVTPKTESQQCLSALHRVRESLVRERVKASNQIHGFLLEFGISLPVGHAVIRRLPSVLAEHALPARLVTLLERLHSHFKYLDEQIADIEKELSRQLQEDDLGQRLMSIPGVGPITASVLAAEVGDGKQYRCGRDFAASIGLVPRQYSTGGKNKLLGISKRGDKNIRRLLVQCARAYMQRLERQSDRLAQWVRSMLMRRHSNVVACALANKLARTAWAIAAHHTEFKRQEAVMVGMTAS

SEQ ID NO: 342611 - protein, 366 aa, unidentified
MSVSIINIKRKSNLPMKTNTPLNPETQARIQQLKIGVDWHVDHFRVVRMCDGQSPQPAQRFTPATFLLFVEKQRTLADQVFVVYEAGPGGFHLHRQLAGLGVRAFVVHPHKLDPLHKGVVTDKTDARELTLNLDRYLRGNLRAMSVVRVPTEAEEQRRALSRQREQLRRERQRLAAQGRSLCLTQGIRLRGEWWSQTLSLPAWLTPRLDVWRHLITAVEAQLAALTKQVEALAPKARPKGLGPLTLGMLIAELCDWSRFKNRKQIGSYTGLCGGVSSSGQSHCDLSITKAGNARVRWSLIELAWRMVLYQPQSKAVQRWKHILLNPQAAARQKKRALVALARQLAVDLWRWQTGKITPEQLGWIMV

SEQ ID NO: 342612 - protein, 418 aa, unidentified
MKYFVGIDISKEFHVVNIINEEEKRVLKNFKFLNSKDGFDSFKLKLSTLSKDKDSFVLGLEATGVYGENLYDFLSSNGYNIKLLNPFQTSRYRQNYTMKSVKNDNIDSLYIALLLKDDRFSSGYVADEEYMALRVLYRNRSSCLKESKEIQKRVLSILTVTFPEFEKFINPFSVSGLALLKKYPTATHYKGVSAKAILKLFRHIKGNNFSYDKATKLLELVNSSVYSGKAKDQRAIALNSLIRLYEKYQEEIATLDKEIDSLLNSDSLSSDDKTAIKEAKQRAKSIIKNLHTIPGVSTKTISAILAECGDLSRFPTISKLLGFIGLHPTQDSSGKKEAFGHLSKRGNSTVKHALYLASVSCIRHNSELRKLYNDKRAAGKSKKEALIIVSRKLITIIYAIFKNNEPYNPSRVFAMVRQ

SEQ ID NO: 342613 - protein, 338 aa, unidentified
MNPSQTVETYELFVGVDIAAKTAMASTLRPGGKTSRSFTIDQTPEGYSSLLHTLQATGHAPSEVLVVMEATGSYWISLATRLVHKGFAVSVINPAQAHHFAKALLKRAKTDAIDAQTLAQLAMVLRPEPWALPPPIYYALQQRLAQRDDLLNLRQQVRNQLHALVQHPEVIAEVRARMESLLATFEAQLTEVESEITAALSQDSAWAAAAERLQSIKGVGWVTAAWTLVTTLNFSSCDTIDALTAYAGLAPMPRQSGSSVWHRPSIGHTGNGRLRTALYMATLSSAQHNPVIKAFYTRLREAGKPEKVARCAAARKLLHIAWAVVKKDQPFDPNYALG

SEQ ID NO: 342614 - protein, 358 aa, unidentified
MRIIGVDFHVRQQTIAMFDTETKELVKKTLKHDGEEVREFYSGLPRPVQVGIEATGSMYWFLELMDELGIDRQVGHPAAIRAAEPRKQKYDGRDALLLLQLQIENRFPSIWVPSRELRDLHALLRHRHQWVRIRTRVQNALQAIALSHGLRRGPALWSQTGQHAIASLPLAPHAACRRDELQTLYRKLSTKIDELDERVQDQALERSGAKLLLSHPGVGPVTALATDVFLGDPARFEDSKALTSYIGIIPSEYSTGGRQRLGGLSKQGNPLLRFLWCEAGMHAVRRDPELKRFYRRKLHQKGLGKVRVAVARKLGIRLWIMLRDQIDYQEFCRRGQLRQKSGAACAGMPEGVHSPATS

SEQ ID NO: 342615 - protein, 371 aa, unidentified
MFMMLRATVQDKQDVQVTLGVDTHADVHVAAALDQLGRLLGTHAAPTTPAGYAALVGWAEQFGTVVQVGIEGTGSYGAGLARWLRARGQVVVEVERPKRQPRRRRGKSDPIDAAAAARAVQAGTATGRPKDGDGPIEMIRTLQAVRRSALKARTQTANQLHALVITAPDALRSALRRRTLPHLVATAAAFRPSVRLTTPTAATKLALKSLAVRYQQLCAEIETLDAQLDGLVAQAAPELLAVKGVSTVTAACLLVTAGDNPERLRSEAAFAHLCGVAPIPASSGKTTRHRLNRGGDREANKALYLLAVRRMGWDPATRAYVARRTTEGLSKLEIIRCLKRYLARELFPLWPRIRPLPRCRRRRLVCPSLYD

SEQ ID NO: 342616 - protein, 350 aa, unidentified
MVVVGADVHKRTHTFVAVDDVGRKIGEKVVKATTAGHAEAVMWARERFGAEVVWAIEDCRHLSARLERDLMGFGQSVVRVPPKLMARTRASARTRGKSDPIDALAVARGFLREPDLPIASHDEVSRELKLLVDRREVLVAQRTATINRLLWRVHELDPERAPKSRSLDLAKHRRILSDWLDSVPGLVAELARDELADITRLTETINALAKRIGERVRDVAPVLLSLPGCGELTAAKLVGEAAGVTRFKSEAAFARHAGVAPVPVWSGNTAGRVRMTRSGNRQLNAALHRIAVTQIRLDGLGQVYYRHRIAAGDSTTEALRCLKRRLARVVFSHLHTDHQNTIQPCQPAAA

SEQ ID NO: 342617 - protein, 335 aa, unidentified
MKCYKRVIGIDISTERLDIADSQLGIDSEVEYSVDAIQSKITKRIKEPSETLVVCEATGGLEYILVDALHDANVDVVVANPARVRDFAKGHGYFEKSDKLDARMLQLYGQQVKVSLAKPRTMEERNFIALTRRRTQLLQLISQESNRLCRCMDAQTITFVKDMLQLLKSQLKSVNSAIETSLEKQSGTNPTIDIIRSVPGVGVVMTSTLIAELPELGSLSRAKIAKLVGVAPMIKQSGKSDGKRRARGGRGNVRRILYMAALVATQNNSVIKRFYVKLLASGKPKKLALVACMRKLLTILNDMVRHQKKWDDTKKSVAGSIVSKGPAPAHVLDNN

SEQ ID NO: 342618 - protein, 351 aa, unidentified
MKDLMAGIDLHSNNIMVGIVDREGKRLAQQKLPCELKRIGEFLSPYKDRLEKLAVESTYNWYWLVDGLQGQGYPVVLANPARITQYSGIKHADDKNDAFFLAELLRLGILPTGYVYDAERRPVRDLLRRRMSLVHQRTALMLSFKSLFTRTTGEQMSLSRLKALDVKEAQKLYEHPANQLIAGLQIQHIEQLTASIDRLEKAVLSVARHLPCYPKLKTLPGVGIILGLTITMEIGDIKRFAGPGQFASYCRTVAAQCTSNGKLKGENNRKCGNKYLAWAFVEAANFARRYDEPCRKWYERKAAKTSKVIATKALACKLAKAAWYLAAEETDYEPGRVFPQMATTKNQIMKT

SEQ ID NO: 342619 - protein, 320 aa, unidentified
MAIIGVDVSKLSLVAVRTSSTGIVKESFEIQNTEVEIGTWLDKLQSKHKYLLVASEATAEYHNILAKACLAKAIKFRLLNPILTKQFNRATIRKRKTDLTDALIIAKLAIQGEGSIVTPASLSPAKVVHRTAIRLVKVEQTLESMCRRFSESLPEEKTVNQQLLDCMQLLKTSCEVLRSRARESTDPKLTKLLMSIPGVSERIVVTLINEIENIHRFPSPKSLVAYAGLDPRVRQSGTSLKRNTHVTKRGSIYLRRDLYIAATIAARWDSEVHEYCEKKLGEGKRYREAMMACSRKLLNRVYAVWKRGTPYERRLATTGT

SEQ ID NO: 342620 - protein, 407 aa, unidentified
MEVVYRCCCGIDVHKKVIVACLVNGGEQELREFGTTTSEIKTLANWLTESGCEMIAMESTGVFWKPLYNLFELMDLDAMIVNAAHMKALPGRKTDVKDAEWIADLLRHGLLKASYIPNREQRELREITRYRKSLTEERCREVNRLQKILEGANIKLDSVVKDITGKSARKLLQRIIDDDIPDSDEVSKLVHGRMRPKLEQIVASIEGITTPLQRKLLAQIIDHIDDLNRRIGELNKLVQEYMAEYEAAIEAIDEIPGIARRSAEVILAEIGLDMGRFPSAAHLCSWAGVCPGNYQSAGRRKHGKTTKGNKALKTILTQCAKSAKTVKSSYFFAQYQRISARRGKNRATLAVAHSMLIAIYHILKNKTAFHDLGSDYYDSFNRDRKINSYLKRLKALGWEPDAIPSSA

SEQ ID NO: 342621 - protein, 334 aa, unidentified
MHKADRREDAAEDPVTHEPLGIDIAKASFDVSLHRRDGKRRNKQFANTSAGQAALVAWIGRYAAGAVHACLEATGTYGEALATALVDAGHVVSVINPAAVKAYAQSQLRRTKTDAVDADVLADFCAAHQPPPWTPWPVEVRELQGLIRRREALLDMLTQEKNRYAAGGLTPAVRASLERHIVMLEAELAALDLAISQHVDTHPGLRQQRDLLVTIPGIGDTTAARLLAECRAITDFDSARAYAAFAGLVPREHTSGTLRGRARLSKLGSSRLRLALYFPALVAMRFNPPLAAFAARLRAGGKHKMVVVAAVMRKLLHMAYGVLKHQRPFDPQLA

SEQ ID NO: 342622 - protein, 342 aa, unidentified
MLLIGCDYHPSVQQIAFVDTETGDSGEQRLSHSDGAAEKFYRDQKLSGGSVRVGMEATGHARWFERLMAELNFELWIGDPAQIRTQRVRKQKTDRQDAQLLRRLLVEDRFPRIWVPSPENRDLRQLLWHRHRLVQMRTRIMNQLQAVAMNEGIRRKSGLWSKSGRTQLESLLLAPWATRRRQDLLELVDRLDASIKPLSSAIEQEAKQRPEALRLMTHPGIGPITALAFVLIIGSPERFRCGKQVGSYVGLIPCEDSSAGYQRLGHISKQGNALLRFLLVEAAQAAVRCNANWRRQFLRLAMRRERRIAKVALARKLAVGLYWMWRKGWDYQKTLEFGSHAG

SEQ ID NO: 342623 - protein, 371 aa, unidentified
MKKFSKYVGLDVHMETIAVSVAEANGGEVRYFGEIANTPEAIEKLVKQLRKGGAELSFCYEAGPCGYGIHRQLSDLGWDCQVVAPSLIPKKAGDRVKTDRRDSLMLARLHRAGELTAVWVPDGAQEALRDLTRAREDMKHLQRQAKQRLLAFLLRHGRRFGGKANWTQAHYRWLELVKFNHPVQQIVFQEYIDTVKAMTKRVEALDKQIESASKESVFWPVIEGLMALRGVSVLTATTIVAEIGDLRRFASAPQLMAYLGVVPSEHSSGATKSRGGITKTGNGHVRRVLVEAAWTYRHPARKTAILQRRAERTSEVVQEIAWKGQKRMCSRYRLLEARGKLKVQVCTAIARELAGFIWAIGQAIPQPATKL

SEQ ID NO: 342624 - protein, 361 aa, unidentified
MAKVRSWAGLDVHARSVLAVTLDAESGELRSARLSGETAKVVEFLAKLPGPTRAAYEAGPTGYGLARALIAAGIGCVVAAPGKIERAAQDKLKTDQRDAERVLRLLMIDALHPVRVPTVEEEALRDLIRAREDVRGDLMRARQRLSKLLLRHDILYEDSASTWTQRHRSWLRAQQLGGGAQATLLDYLGAIDTLELRRGTLEKTIGELVPASSYAQAVARLRCLRGIDTLSAAGLCAEIGDFTRFERPGKLMSYVGLVPSENSSGESRRQGPITKTGSRHARRLLVEASWHYRKTPSRGITLQRRQDGQPANIIAISWQAQQRLHRVWQRLAEQRGKRRTIVAVAVARELAGFVCAIATTD

SEQ ID NO: 342625 - protein, 386 aa, unidentified
MKKQYARIAGAGVDVHLRFSSVTFRDSHQKIVRRERLDHTDRQQLRHRLAQWPKGLPVVVESSFGWPWLTDLMREAGLNVCLANCLKVEKMRRLRAEAKSNRKDADLLSHLLFEHSRWWKVWPPPPAVRQVREWTRHRSQLVKLQTGTKNRIHAILHRHGIFHDFSDLFGTRGRAFLEQLCVHGDQRLSAGGHWALCADLRVLRQVRAELASILRELRRQLKDRPVVRLLQTIPGVGLLLAYVLYAEIGRIDRFGSTKALASYALLAPRASDSGEADPTRAPIGRRLGTRGNRTLKWAMLTAARGAVCRGGRWRQIYDRYTNGGKVNRNRGYIKVGRILIGVVRAVWRSGQAYRPDGQAEQAGGNGPAKQTSRSGTGEPSPAMVGA

SEQ ID NO: 342626 - protein, 423 aa, unidentified
MKYVGVDLHKHLIVLCVVVLVDGRPKVVRRARFGCEESEAIREFFQDLGPFQVVVEATAAYEWFFLLIENLADRLVLAHPKKLRVIAESTRKSDKIDAEVLATFLARDMIPQAYRPTPRIRQHRVLVRHRCWLQRRITSLKCKLRNVLGHYNADIDGLFTRRGEQYLASVPLAPADRFTVQALQEQWGLFQRQLREADRQLQQFAASGPLAEQEARTLLDTIPQVGPVTIDVVLSELGDWRRFRSQKAVTAFAGLDPGFRKSADKCLELHISKEGSRLLRWALIQAAWRLVVRSPRWRRLLEQLQINTGSKKKAIVGVARHLLCTMFAMLQTGRTYELHGVPNGNRSMIVVRRPESAPNIRRQHPRRSLPGHFQTGGLRHSSSGQRSSIRRSSRSAAKGLTPPYSDHDQPACNSREFLGRQSS

SEQ ID NO: 342627 - protein, 316 aa, unidentified
MKREQFITDVAGVDIGKLRLDVAFARSEDHQSIANRPEAFPALIAWLHEHGVHRVGMEASGNYERDVRDALEAAGFEVVVHQPQEIKAYARFRRVLAKSDKMDARVIAQATQHWEGVVARRDPALVELAEMLTLYEFLSGKVAEAKTLAEHQRLTEVKALNTETIRHLLQQKQKILVKVLQRLRARPDLRQRFELLQSLPGIGPVIAAVLVVRMPELGSLQHGQAASLLGVAPFDRDSGMMAGKRFIKGGRQRPRDFVYLAALAAKRWGSHFKIFADRLIANGKLPKVAIVAVMRKLIEAANLILKRQTPWIHAKT

SEQ ID NO: 342628 - protein, 412 aa, unidentified
MFYVGIDIAKRSHVACVMRDDNSLEIRPFEFSSTKSGFEKLRAQLSSLACDISEVLIGMEATGLLFDNLYRFLQSLGYRVVLLNPYQTAKFREMDTMKRVKNDNIDAQMIAALIKSGRFSEGYVNDDQLQSLKTLYRHRASLDDQLKAIKRQTQTILNVVFPELEQVISDPFNITGLALLEKYPTAKHYEYASEKRILKTFRSIKGNNFNEAKAKKLLALAKDSIYSGAGKEGYETTIVSNISLMRLLKKQMQSVEEAMLALFEVKEATHEEQEEMTELIDNLRTIPGVSDKTILALFAECGNLDRFHNAKALTGYLGLYPTLEQSGDNQKNGRLAKRGAKLAKKAIYLAAIAAIRHNKELKQVYMNYRSKGRAKKECIIITARKLLAIIYAIYTHNTPYNPNRVFVAQQHT

SEQ ID NO: 342629 - protein, 405 aa, unidentified
MFYFGIDWSEDHHNLAIKNEAGSLITLIEFKHTVQGFEQIEVERRKLGVPAGECLVAIETSHSLLVDFLLDRGYIVYIVPPQSTDGYRNRQRSSGAHTDDSDATLLSSIMRTDRDSHRRLRPNTPLTQQMLAQVRLIELLRCSIQRQANQLRAVLFRVYPQALGLFGDLTAQISLQFLITYPTAQAAQTLSLGAFEAFCRAHHYSRTDLISQRYAHLIEPAPQAAPAAVQAYRDQVCILAGLLLPQVRRRNEALAQLGRLFAQHPDASIFDSLPGAGDLLAPSLLVKFGDHRDRFPTPASVQALAGTCPVTKRSGKRKKIIHFRRGCDKEFRRITQQFARSSARRSGWARAYLKEIHARCASNSHAYRCLANRWLAVIWRMWQDSKPYDEEYHLQQRARRRRPKP

SEQ ID NO: 342630 - protein, 275 aa, unidentified
MGEVNTIGLDIAKSVFQVHGVDAAGAVVIRKRISRAKVLEYFGELPPCLVGIEACPSAHHWGRELQGLGHTVRLIPPSYVKAYLKRGKNDANDAAAICEAVTRPSMRFVPIKTKEQQTALMLHRARQLLVRQRTMLSNALRGHLAELGIVSAKGRNGTAELLRIIADGRVSPAVCGILKVLTRQYGAIGTEIASIDKSIMALHRGCEASRRLAEIPGIGPIGATALVAEIGDWKTFSSGRSVAAWIGLVPKQNTTGGKDRLGSITKQGIDICGGC

SEQ ID NO: 342631 - protein, 378 aa, unidentified
MSTVIYIGIDVHKDTYTLSSFLFSTNRVFGQSTIANSSNLVKKYVEKIQKEYPGSDVLCGYEAGPTGYGLYRDLERYGIPCVIMAPTTLPKASGDRVKNDRLDAQLLSKQLAFGTYSAVYVPTTKDEAVKNFTRLRNTRKIALKKAKQNLLAFLLLVGDCYSDGSYWTLKHYAWLRRQVFGDQVDQQTFNEYLQEVIDQQEKVNRYDEKIEEMAAQDGYREQVARLRCFRGIETHTALSLVTEIGDFSRFAQAPQFSAFLGLVPSEDSSGKRERRGAITKAGNSRLRLLLIEAANSTLRSRTYGKKSKRLLARQKGQDPDVIAYADRANRRLHKVQDRLISRGVVPNKAKVAAARELSCFIWGMMTGNIEGRTAQAAR

SEQ ID NO: 342632 - protein, 392 aa, unidentified
MDITSAASDTWHDDRNRTPPPIHVGLDVHKETIAIAAAVRSRSGDALQVIDYGQVSNTAAAMNRKVKRLVDEFGRDLHFVYEAGPCGYALLRRLRDGGWSCELVAPTSIPKKPGDRVKTDRRDAQALARLSAVGYFEPLWVPDPGQEALRNLIRDRLDIKEYIRRQRQRVQHFLLRHERRYHSTMWTAKHRAWLHDLKFAESADQISLRIKTDIMGDLERRLAELERDIEHELQTRPWLPVVASLRALRGVDRLTAVTLMAELGDLRRFPTARQFMAYLGLTPSEHSSGGKRKTGAITKTGNGTIRRLLTESAWTYRFPARDTHHLQRKAVDASDYAKARAWAAQKRLCQRYRTMLEQGKQVKTVVTAIARELAGYVWDIACHEMPEVVTHE

SEQ ID NO: 342633 - protein, 403 aa, unidentified
MNNVAGIDVSKGKSMVSVLRPFGEVVAKPFSVGHTGSELKELADYLKSLDGETRVVMEHTGRYYEPVARFLHEEGVFVSAVNPKLIKDYGNNTLRKVKTDKADSRKIARYGIDNWAELRQHTPMDTIRMQLKTLNRQQSLYTKTKTMMKNNLIALLDQTYPGVNALFDSPVREDGSQKWVDFATTFWHVDCVRNMSLTAFAERYRKWCKRHGYNFRQSKAVEVHTGAQDLIAMLPKDALTKTMVRQAIDALNAVSASLERLKAEMQALAAQLPEYPVVMAMHGVGDSLGPQLMAELGDVTRFTHRNAITAFAGVDPGADQSGTHEAKSTRVSKSGPPELRRALFLVMDCLLKTQPQDDPVYRFMDKKRAEGKPYLVYMTAGANKFLRIYYGRVKEYLASLEGN

SEQ ID NO: 342634 - protein, 416 aa, unidentified
MRNGRILECCCGLDIHKESIVACLLIGPIEGGLKPRSEIREFGTQLKDLIALRQWLEEHHCRYVAMESTGIYWQPVYAVLETSLSDEMHLLVVNARHMRNVPGKKTDMRDAEWIVTLLRAGLLKGSFIPEHDIRDLRQYTRYRKALIRDITSQKNRIEKLLQSSGFRLSSFLSDIFGSSGLAIMQQLVRVGCISEETLKVCLKGRARQKTAEILSSLNGTLSLPQRQLLKMQLAHLKDLQDNLHEVEEQIRKDFSQFEGPRNLLDSIPGIDLIAAYAILAEIGNKMDAFPTAQHICSWVGLAPGNHESAGKKKKQRATPGNNYLKTILCEVAWVIASHREHYLSGWYWRLKQRTDSKRAIVALARKLLVIIYTMLKTNQPFDEQKFLERKETSDRKRVNRMVSELTRLGYAVSVPA

SEQ ID NO: 342635 - protein, 418 aa, unidentified
MAKSKSNPTISVVNPVCCGLDVHKDFVSACLMSSDDHGREQVVIRKFGAFTDELQKLRDWLIEHECPIVSMESTGVYWQPVHNVLEEAVRVVLINARHFHQLPGKKTDLADCQWLAGLLRHGLLKGSFIPPRQVRDWRDLVRMRKTCVEMMADTKRRVQKLFESANIKIDSVVTDLFGASGRNLMQLLQDSENITLEEVRGCLRGSLQNKADELYRAVQGFFRDHHRFILQGYLGIIQDLEREISRINQRLVQIMSDHEELVERLTEIPGIQDVAARAILSQVGPSLAEFPTSGQLASWCGLCPGNNESAGKRKTGKSSVRGHPLKSLLVEVSWAAVKTKGSYYKEKYYRLKARRGAKRAIVAVAHRILRAIYQIVKNGRRYEELGEDHLLQRNREVTLFRLRKQAEYLGYQLVPVTT

SEQ ID NO: 342636 - protein, 428 aa, unidentified
MSEIDLIRLEEFRQLKKEIRGSKIHLIVGIDVAKDKHTAFFGTATGKTLLKRLVFENRIEGFEKLLVQVKALKIQEGLEKVVFGLEPTANYHKPLGEFLIKSGYQVVLVSNGAVKNNRQLLDGRWDKHDTKDSANVADLISQGKCLYYEYPCVELRDLRTLLSLKRRLKKQEHGIKVRIRNHLLAQYFPELDRHFGNGGTYSLAVVRWFLDPSVIAGLEFDEFERKVLPGNRNLGRWQRLRSIWKDATGSIGCEVGEAAEYEAKVMVESLKEVREVIKATEDKIEEICLKFPEYINLLTIPGFGPDVSSKVLGAIGNPYRFNSGKQVIKLAGFDLSASRSGKKYDGVIPVISKKGKAELRYALYQAAMIASIKNRRFMIYFTNKVNGREKERGIKTRMRVKLAAKLLIIAWTLMKKKEPFDPEYIEMK

SEQ ID NO: 342637 - protein, 370 aa, unidentified
MRIIGCDLHARQQTLAMLDTTTGEVVNLTLMHESDKVREFYSQLPRPVLVGIEATGSMHWFLNLMEELGIECRVGHPAQIRAAEPRKQKHDRRDADLILKLLAENRFPAIWLPSKELLDLRALLLHRHQWVRMRVRMQNALQAIALANGLRRGPSLWSYDGQAKIAFLPLLPHAAYRRNRLQAMYKTMESEIESLNKQVAKQAGNRPGAQRLMTHPGVGPVTALATEVFLGDPQRFADGKALASYVGIIPREYSSGGQQRLGAVTKQGSPLLRFLWGEAGAHAARHDPELKRFYRRKLVHKGLGKARVAVARKLGIRLWIMLRDEIDYQEFCRRGQIQQKTVRPVVGMPETGNGAKSHRPSDEATRLPES

SEQ ID NO: 342638 - protein, 350 aa, unidentified
MTTIQHKQIDHESTPSLFAGIDVGAEELILVIRKNGKPFDPQKFANTPADRDRLVKKLVKLPGIIVCLEATGVYHFDLSLALHDAGVLLMVVNPKAAHNFAKVLMKNSKTDAVDANTLAEYAARMDFVAWTRPSNETIALRSFARRIDALTSQKAAAKNHLHALTATSETPKAVLKDVKLAIAQLEKRIDRLTTGALILIGKHPDLERILTLLIGIKGIGNTSAIALMGELLLLPPDLSHREWVKFAGLDPRAFDSGKSVHKKTRISKAGNRHIRSALYMPALSAKQHDPHVKAYFQHLVANGKKPLQAVCAIMRKLLHAIHGMLNTMKLSTTLVFMQFRHLPNSYKSMK

SEQ ID NO: 342639 - protein, 425 aa, unidentified
MNYKQNEKINQVKESTLVVGIDSGITKQYARAFDWRGIELGKIFTFSNSREGFEAFKAWMRHLQDKYRKSDVIVGIEPTGHYWFDLGAYLEDEGILLVMVNPYAVKQTKELDDNSQSKNDRKDPKVIAKLVTEGRYSAPYTPDGVYADLRIMVTNRKRLIREMTQIKNRFARWFAIYFPEYTDVFGDYEAQSSMLLLKKVCTPEAIVELGAEKINKIWRDAKLRAVGMKRATTLCETAKRSIGLKKGSSAARYEMKLLLEDYEYKKAQLDAVMEEIEKLCRKIPESEQMLAIKGIGVITVAGFLAEVGDVRRFESPRQIQKLAGLSLRENSSGKHKGQTTISKRGRSNLRAVLFNAAIPLIATNPEFKSLHEYYTTRANNPLKKKQSVIAISCKLIRVFYAILANGVTYDAQKMLSDIHRQPQAA

SEQ ID NO: 342640 - protein, 428 aa, unidentified
MNYNTQNAKIASITEKTLIVGIDVGSEIHFARAFDWRNYEYSKKPLEFSNSESGFATFKAWVQDIAEEHGKDVVIPGMEPTGHYWFNLGAYLQDNGMKPVHVNPHHVKKSKELDDNNPNKNDRKDPKTIAALVNEGRFLYPYIPTGIYAEIRSLSNLRLQAQEEITRIKNRIARWFSIYFPEIKDVYKKPDSVSGLMVLKEAPLPQDIVKLGVDGINKIWRDAKLRAAGPKRAQTLLTAAEHSIGSQEAPDSARIELKNLLNDYEIYRKREEELMEMLEQKLSEIPYIDKLLEIKGIGLKTVSGFIAEAGDITRFDNPKQLQKLAGYAIVECSSGKHKGESHISYRGRKRLRYVLYEAAISLIARNDEFKKVHRYYRTRKENPLKKMQSVIAVACKALRIFYTILRKGVTYDGAKMLQDIKRPQILAA

SEQ ID NO: 342641 - protein, 459 aa, unidentified
MQGRGKQDGSRKHVQGLPVVLQDAAGIDLGSQQHWVCAAAADGTGREISNFGATTPELIRMADWMKQRKVRSVAMESTGVYWVAPHEVLESQGFEVLLVSTRQLAQVPGRDRKSDPADCEWIQRLHSCGLLSGSFRPKEAVCMVRTLVRDKGNLVAEAGDWLRRMQKSLDQMNVRVHRAVSDIDGSTGMAILRAIASGERDAVQLAKLRDPHCKKSEQEIAEQLTGHWREDHVFSLRQSLKMYDAIQQRIAEYEQEILRKLGEMEREELRGQPMPPAANAVKQRTLRRRGQEPMREAWYRMSGVDLTEIDSVGVESVQVVLTEYGPDLSRFPTEKQFVAHATLAPRRATSGGKRVKKNKRQSASTRVAAVLRMAALSQRHSQTALGAYYRKLASRLGADIAVFATARRLATYIYRLLRWGKKYVDEGAEAFEKRYQQNALKILTAKAKKLGYQLQPMLT

SEQ ID NO: 342642 - protein, 402 aa, unidentified
MLPDHLNNPTAIRMQFGAIFVSLELSRKTWLITSLSPGKGEKMSKHSVTAGDIAGLLARFSELQRKAAVRTGKSFPLIVIQEAGLDGFWVHRVRQQEGIESHVVDPASIAIPRRRRRAKTDKIDGEALLRALLAYKRGEPRVCSMVVAPSPEEEDQRRLCRERDTLTAERVRHVNRIKGLLFAQGIADYMPLSRNRRKRLDELCTGDGRPLPQYGKAQISRELDRLELVLEQIKVVEKERDRVLLSLAPVVVSMGPEAVCDQPRRASGVRMLTALRGFAANGATKLWSEGLSRHFSNRRQVAAYAGLAPTPWQSGGISHEQGVSKAGNPRLRTTMVQIAWLWLRHQPQSALARWYFARVGVVATKARKKVAITALARKLLVALWKYVSAGELIEGAIMKPVA

SEQ ID NO: 342643 - protein, 312 aa, unidentified
MTPSIIGIDIAKDRLDVHRLPDGAAKRFTNDMAGHAALLDWLAQTRVARIVYEPTGAYHRALEQALAAKGLPLAKVNPRQARRFAEATGKLAKTDRADAAMLARMGLALAPDTRPLPSQILRDLKELHLARQALMKDWTAAKNREKSLRLPLLKRQNQKRQRQIETQIAAVEAEIASRIAANAELAERLAILESIPGIAKITACALLIEMPELGTLDGKQAASLAGLAPLARQSGRWTGRAFIRGGRASLRQALYMPALVATRFNPQLKAKYHQLITAGKPTKVALTAIMRKLIVLANALLRQRRNWDENPA

SEQ ID NO: 342644 - protein, 345 aa, unidentified
MPVAEVDTFAGIDVSAHELSVALRRGQGHDKPAMAKFPNHPSGHKALVAYLLRGGGRVRVCLEASGNYSLDLALTLQAHRQVEISVINPRRARRFAESLGERSKTDPVDARVLCEYAARMPWVQWQPPSPVALHLRALTRAIADLGVIHTQQNNRAYAAAASQALPVLVVKEMQRHKKYLEQRMTRLRREAVRLIACDPELDRRFRLMLTTIGIAETSALQILGELAVLPDMLDARQWVAFSGLDPRLFKSGKSVEKRPRISRSGSRHLRRALYMPALVALRRDPYLRVFYQNLLARGKARLQAVVAVMRKLLHALFAMFRSNQPYDGSKLCAVNLAVHAIAACA

SEQ ID NO: 342645 - protein, 414 aa, unidentified
MNTQAEAREIQRYIALDIHKEYVMIGAMNAAQEWIIRPRRIEMAQFRTWAGNNLRAGDAVVIETTTNVWDLYDIVAPLVTRTVVANAGAVRQIAEARVKTDGEDIKRLLRLLIADIVPDVWVPPAHVRELRGLISYRNRLVKTGTMIRNRLHSLIHRHNLLLGEDGLRSSAWWDQQPLSSLEKLQVRQELGMLENVEQNKAEVDQELQKLSVGSLWGQSATRLLQLSGVGVVVAMTILGAIGDIRRFEDAAHLVGYSGLGAGVHRSGKEHIDKSITKSGRKELRWALIEAAWKAVQMSAFWKQRYEELKQRRGACKAIVAIARKLLVTIWHVLADEETDRNASEEDLAWKMLLWSWSLKDEIRLGLTPKQFAKYSLMRLGVEKDVTEFMRGKVLRRISPAKEVQARISELGLPA

SEQ ID NO: 342646 - protein, 353 aa, unidentified
MVAALPKRHRNVPRLWCSTLREKEDGETKDMMIGVDRAKAVFQIHGAHRTGEAQFRTQLMRPQFPAFMAQQEPCLVIFEACGSAHNWAREMEALGQEVKQFAPQYMRPFVKRQKNDAADAEAIVIAARQPEMRFVAPKTVEQHCRAAVFRGRERLVHQRTAEVNALRALLYEHGHVFPAGIGHLDRVATLLEDEASDLPALIRGECRDLQPQIAEQTARIIERTTKRKMLAAQSDRARRLQTMPGVGPLTAIAVEAFGPDLAEFKTGRAFAAWLGLVPKQHSSGGKQRLGCMTKAGQADIRRLLIIGALPRLNWLGHPMDRIEDPPALEIPRGVKPRGVDDRVSSKIRLETLA

SEQ ID NO: 342647 - protein, 313 aa, unidentified
MTTSGAWIGVDVCKKYLDVAATTGTPVRVANDADGRIALARRLKCESVRGVIVEATGGLERALMQALDAEGVPASIVNPARVRKFAEGTGQLAKTDKIDALILARFGDYMKPAPTSLADAPRQKLRDLIAYRAQVTREITARSAQVRLYTAPGLLARANTAIAALRSERKVLEREIEALIKSQDAMLAVYKRLLTVPGVGLIGAATLIAELPELGRLSRRQIAALVGVAPFPNESGDRKGYRAIRGGREQVRQALFNCARVAIQHNPVAKSFYERLRARGKRHKVAVVATMRKLLTILNAMLKTNTDWTCKSA

SEQ ID NO: 342648 - protein, 482 aa, unidentified
MKKPSIYPDRSQELLALFERAGNPSKLMCVPIDYAKKDHLVMFCNGNGEVLRKPFSVKNSVDGVKYLIDQVNRSCRHRHIQSGHVFFGGEDVNSYAENFANTIRTNGWLVANVNAHDAKKQRENLQASTDRLDLMGIATMLLNRRANCCPAQTGVYRNLRTLVRHRKKLVKMKTEVRNRIHTIVDRLFPGFLNEKKSGILPFSNSSLYLMQERFSAPQIRRRQRKALIRNIEKRGTKKAEQVAAKLQEYASQVLTTPDEYTATLQISLASHVTHYRCLFEGAQQLVNEMAQLLAQTRGAFLTSIKGIGIVLAAGVTAEIGDPLAQRSTDQLASYAGIVPKVKQTGGSQGPSITSHVSKRSNHVLKDFVVQSAFHIGRYGPKDLQDDFSRREAAGQHADFGIARRFVRLAMCMMRTSQVYLPPEMRSTHIKPERRADYYLAMWPYLRDKWSKANSLRVSFAKDNPLGQWRNIVQEIYGIKLKM

SEQ ID NO: 342649 - protein, 327 aa, unidentified
MAVIIGIDPHKLSHAACAIDSNEHELAQLHVRAGQRQLELGLGWAQPFSERRWAIESAGGLGYLLAQQLVGAGECVVDVPATLSSRVRLLGTGWSNKNDPNDARAVAIAALRAPALAPVRREDHVTVLRLLAKAHLDAGRARNRACCRLHALARELVAGGIRKEVVVSQVESLLAEVEPVGVAQRQRLELAYELVDEIRALDAKLRRSKARITTAVVASATTVTDLYGVGPIVAATVIGYSGDVRRFPTAGHYAAYNGTAPIELSSAGRTVHRLSRTRQPRVEPRDPHGRRHPDPQPPKRGPRLLRHESRGRPDQTRSDTRAETTSQ

SEQ ID NO: 342650 - protein, 330 aa, unidentified
MKKWNVILGVDVSKLTLDISSFELGIHIKIDNCSAGFKVFQKWCKTHNINLQETLIVMEHTGGYEYRFIQFCEAFSIAYRRVPGLEIKSSMGITRGKSDESDSFRISEYGEQRIKTIEPSKPLDKNFLTLKQLLSFRKRLIRERAGLKSTVSERRHMYEIKTADAITHISKAKIKSNTKYIDQVEKEITEIIRSNEAMLLNYRIITSIKGIGKVNAWMTIAYTENFTSFPDGRTYAVYVGVLPFGHRSGTSIKRRTKVSKLANKELKQELNQAGKTAMTHDPEIRAYAQRKLKNKCFSVVLNNVKFKLILRMFSLVKRQELFVENYRRAA

SEQ ID NO: 342651 - protein, 341 aa, unidentified
MSELTLVGIDLGKHSFHLHGQDKPGRELFRKKLSRQQMMRFFSNLPACTVVMEACAGAHFVARQLLGMGHQAKLISPQFVRPFVKGNKNDFVDAEAICEAASRPSMRFVSPKTEAQQTLSVLHRLRESLVRDRTKSVNQLHGLLLEFGVSLPKGLAVMKRLSSVLAEHELPVRLTVLLQRLHEHFVYLDEQIKALDKELAGQLAEDDLGRRLLGMPCVGPITASLLAVEMGDGKQYGCSRDFAASVGLVPRQYSTGGKANLLGISKRGDKNLRRLLVQCARVYMQRLEQQTRALADWVRSLLMRRHSNVVACALANKLARIAWAMSVRHTEFAAGPGTLNA

SEQ ID NO: 342652 - protein, 341 aa, unidentified
MGKVYIGLDVGSSTCHLVAMTADRTVIADRKFNTSEANLIEAIEAIKGERHVHLESTELAGWIRGVLKPRVAKVVVGHAKSSAWIAKDPLKHDRLDATKLADLLRMGMVHEVYYSDDEDRAVFKQIVQHYDDMTGQVVRLKNKIKARLRVQGVIVRGEELYERKSRRSVVAQVRSSASREAIGQLGALLDDAIKAQGRALNLMKRQSRAYTEIKRFVEVPGVGIVGACRFSGYLQTPHRFSNKRKLWRYCRLGITDRSSDGKPLGRQSLDINGNGRLKDVSCRAFLGAMRCRDDNRFKRAYRASLSRTNDKTHARLNVQRTILATLLAMWKGGTPYQDDKG

SEQ ID NO: 342653 - protein, 268 aa, unidentified
MEHYAGLDVSLKETSLCIVDGAGKIIGETKVASEPDALVGYFSSLTIKVVRIGLEAGPLSQWLHAALVQACYEVALLETRHVKAALSAMTVKTDRRDARGIAQLLRMGWYRPVHCKTLPSQEVRAILTARKTLLGKLLDIELSMRGILRGFGLKIGTVTRKSFEIRVRKLTEGQATLTAIIEGLLNARTTLVAEVAKLHRKLLTIARADGVCVRLMTVPGVGALTALTFKTAIDDPTRIAKSRDVGPLFGLTPGRYQSGVYRDGADCE

SEQ ID NO: 342654 - protein, 392 aa, unidentified
MRFAGIDIAAETHFVAVVDEGSGTVVKPTRFTEDATGYEKLFQLVGGPGDVLVAMEATGHYWQNLFAALAAAGYAVALLNPLRTRRFAGEDLERTKTDAIDALGIARFAAQKRPAATRLPDSATQELRELVRFRDRLMQDFGDRVRQLHRLVDLGFPEFTRYVRSLDSELAAAILHEYPTAEAFLGLPWKRLAKLCYDGRHKVGEEIAKGLVEAANTSVGRHHGPAYRVQIRCACEDLDLLRRRLREIDSDIERTLKDHEVGTLLTTLDGIGPTTAARLVAELGDIASFRSAAAIAAYVGAVPGLRQSGKRQTTRAGLTPHGNARLRAKLWMPTLTAVKKNPWLRAYYEGLLRRGKLPKVALVAAMRKLLIAIYFVAKHRKPFVPILAEARA

SEQ ID NO: 342655 - protein, 410 aa, unidentified
MEVLYPHCAGLDVHKETVVACVRHMKEGKVSQAVKTFPTTTQELMALSEWLSAESITHIAMEATGVYWKPVWHILSDGEFELILANAAHVKNVPGRKTDVNDATWLADLMAHGLIKASFVPAEPTQQMRDLLRTRKQFVRERTSHQQRIQKTLEEANIKIDSVISDVLGISGRRMIEALIAGQTEPQALAALADGRIRATAQQLEAALRGRVRAHHRFMLKLHLDHLDAVDAAIAHIDKEVDSQVEPFRVAVEMLSAIPGLSSLSAQVIVAEIGTDMSRFETAGHLISWAGLCPRNDESAGKRRSTRMKKGAQWLKTTLIQCAWAAARKKGCYLQAQFLRLRSRRGPKKAIGAVAASILTAVYHMLKNGTLYQDLGGNHFDYRTKTQQISRLVLRLKDLGYAVEITPLAA

SEQ ID NO: 342656 - protein, 407 aa, unidentified
MTGLLRELPAGRVIVAIDPGKVLNRVWITTGEGLLGEPVSLPTSRAGLDRLGRLVAGGGSPVFALEATGSLHRAWAAELERRWPGSLRLFAPSQTQAARTQLGTRRFKTDDRDCAALVWLARQGAGQPASASAVDALRSAVSHRRQLVLAVKPLRQRLHDQLNALAPGLSAPKGHGRALDLETSTGRAVLACAVDFAGRPPAIRSLRARAGGRLSDATAAFWLARWRDCLPPPPDAELRAARMGRDLTRLDAMREDIAFVDGQIEQLLAESAGQILTTLPGVWTTRAAAFAAHTLPVERFATPGQLYSATGLAPASYASSTVRRRGGISRTGLPEHRDALMGIAWGLGQFAPAFQQRLSELRARGKTPLEARVALARHACRLCWRILHTQQPYDDRRYDRARRDRGR

SEQ ID NO: 342657 - protein, 443 aa, unidentified
MSKKRVSHLRGERGQAFAELIRGIPAEQILCVSIDISKYFHVAMIHNGLGEIVMSPFDVDIYQSGFDQLCQAIDQAKAHTQAQVVLVGMEPTSHYFENLARHLLVRPDLVKLVNSFAVKQNREQQLMRREKSDQIDVAAIGDLLRRGEGTPYQPAQGIYLQLQQLDRVRLGKVKIAGILKNQILGHLDRIFPGLVLIDENAKERYTSLFNVDFWKCQTLQDLIRVCPNPHELVQLSPQALVQAFHAQGRRLGPVKATKIIAQAHKTLLPDPELAAIRCELLQLDLALLGHVQILIDQLEQRLTALVAQTPFQVWIRLKGLSKVQVASLAAAIGAPTHYTSAAQIFRRSGLVSGRNDSGSHQRRGKGSHVLKTGDVYLRRALMNAVATLLLHQPALIRYSKHLQLTKHPGVARVATARKTIGILWAVLRDQSSNTLIACKGTEM

SEQ ID NO: 342658 - protein, 412 aa, unidentified
MQTLVECGCGLDVHQATVVACLLMVRKDGRVQKQMRTFGTTTRELVCLREWLLSEGCTHLAMESTGVYWKPVYAILEGALEIVVANAQHVKKVPGRKTDVKDAEWLADLLCHGLLRPSFVPPKPIRELRDLTRYRRKLVESQAAERNRLLKLLETANIKLSSVATDVFGVSGRLMLRALIEGKATPQEMAELAKRRLRNKIPELELALEGRVEEHHRFLLKLQLERLESVEKDLETLEQRIQEKLKPYAPQLALLKEIPGVDWTLAAVIIAELGVDMSVFANVSQLTSWAGVCPGNNESAGKRKSSRIPKGNVYLKTALVEAANCAAKAKGTYLRDKFYRLKARRGYKRAAVAIAHKILVAIYHMLSQQVSYNDLGDLYLDKLNKNHLTRNLVHRLERLGYQVTLTLQEKAA

SEQ ID NO: 342659 - protein, 340 aa, unidentified
MTQSSTITIDLAKTVFQVAFFNKFGVLKSNEKMTEHKMLSFIVNHPEALICMEACSSAHYYGRKFEGQGHKVKLLPPHIVAKYRAGNKNDANDALAIYEALKRPNLYSVAVKSISQQDLASLLKLRKGYIKQRTQVSNRARGLGAEYGVKLPEGITSLKKRLPDILEDDGNQLTPASRFILADLLEEVHRLDSKIKHATAQLVELAKSTSECELLTSLPGVQWITASALYARLGNGSEYKYGRNASASVGLVPSHSGSGGKNKLHGITKRGDKYLRSLITHGARAVVSNIRDKQDKLSCWIRALSSKHHFNKITIAVANKLVRMALAMLKSATPYRADLA

SEQ ID NO: 342660 - protein, 402 aa, unidentified
MNAVGIDVSKGKSMVAIMRPFGEIVSAPFEIKHTASDINSLVELINSVEGESRIVMEHTGRYYEVLAHQLLEANLFVSAINPKLIKDFDNDSLRKVKSDKADAVKIARYALDKWQNLKQYNVMDELRNQLKTMNRQFGFYMKHKTAMKNNLIGILDQTYPGVNTYFDSPARSDGSQKWVDFASTYWHVDCVRKMSLNAFIDHYQNWCKRKKYNFSQSKAEEIYGKAKELVPVLPKDALTKLIIKQAVDQLNSASTTVESLRTLMNETASKLPEYPVVMAMKGVGTSLGPQLMAEIGDVSRFTHKSAITAFAGVDPGVNESGTYEQKSVPTSKRGSADLRKTLFQVMDVLIKTHPQDDPVYQFLDKKRAQGKPYYVYMTAGANKFLRIYYGRVKEYLSSLSES

SEQ ID NO: 342661 - protein, 404 aa, unidentified
MIDTGDIDVFLGLDVDKGEHHATAVTPAGKKAFDKRLPNTEPKLRELFAKLQAKHGTVLVVVDQPASIGALPLAVARDMDCPVAYLPGLTIRRISGLYPGEAKTDAKDAFIIADAARAMPHTLRAIDGQDETIAELEMIVGFDNDLAGEATRVANRLHGLLTQIHPSLERVLGPRLQHPAVLTLLERFGSPAQIRKAGRRRLVTLSWPKAPRMAERLVEEIFAALDEQTVTVPGTDAAALIVPSLAGSLAAVLDQRKLLAGRIKELLEDHPLSKILTSMPGIGVRTGARILIEVGDGSTFPAAGHLAAYAGLAPATRSSGSSIRGEQPSRRGNKQFKRAFFLSAFAALGDPASRAYYDKKITQGKHHTQALLCPARRRADVLFAMLRDGTFYEPQPVRAVALQT

SEQ ID NO: 342662 - protein, 354 aa, unidentified
MLAEMVDHVVGIDPDRDWITAAVLEAGTAGGVATGRFPANAAGYQGAVAWADQYSTDTERAWAIEGTSSYGRGMATALARCGEWVIEFDRAKEKPAKDGSKTDELDAIRAGRETLGRTKLASPRTPGGFREALWVHTVARDSAVRARTAAINELKAFVVTADDTLRSELRGLRTKGLVKRCAGFRPSTNRSIDQQCTRAAMRAVARRITHLNDEITTHEQALTGLVDQAAPQLVAEVGIGPITAAALYIAWSHPGRCRNEAAYARLAGASPIPATSGQTQNRHRLNRRGDRQLNKALHQIAVTRLRCHPPTQAYKQRRSAEGKTDREIRRCLKRYIARQVWRLLEHQTPAQTTT

SEQ ID NO: 342663 - protein, 454 aa, unidentified
MEKKSSTDDQLMSLEVLHPNAAGIDIGNAAHYVAVPPDRDTEPVRKFACFTQDVRAIADWLKQCGIVTVAMQSTGVYWLPVYEVLVERGFEVFLVNARHTKNLPGRKSDVQECQWLMKLHTYGLLNNSFRPTEEICVLRTYWRQRDEHVKAASAVIQRMQKVLTEMNVQIANVISDISGVTGMAILDAILKGERDRYQLADLANPRIQASKEEIARSLEGNWRPELLFVLRQQRDLYHEYQKRIGECDEVIQLHLRTLEDKAQPENKPENPKRGKRAGGNAPRFDLRGELYRITGVDLTRIDGIHVMIAQTILSEVGLDMSRWPTEAHFASWLGLCPDNKITGGKIYHRGSRHVENRAATALRMAATSLWRSKSYLGAKFKRLRTKLGAPKAITAMAHHLARLVYRMLKYGQEYIDKGMEYYQQRYQNQQIKWLEKKAKDLGLTITLAPASVAR

SEQ ID NO: 342664 - protein, 445 aa, unidentified
MKKEVKNEFQLVHPNAAGIDIAKNVHYVSVPADRDETPVKHFGSYTEDLHELAQWLKRCMIDTVAMESTGIYWVQLYLILEEYGFDVFLVNARHVKNVTGRKSDVLDCQWIQQLHSFGLLNKSFQPENEIRELRAYMRHRKNLTQSYASQIQLMQKAFEQMNIKLQNVLTDICGKSGQLIIKAILAGERNPKVLAELADHQVKASKEEIMKSLVGNWRAEHLFELRQAYDLYLFFKEKISECDVQIENVLRRLESGELNQDENKKAPRGVYTKNKFNFNATNYLKSVIGVDITKIFGISEVLALEIISETGIDMTKWPTKKHFTSWLNLVPNNRISGGKLLKPKKVKKKNKAGQAFLMAAYALQRSNHWLGSFYRRVKAKQGPGVANKATARKLALIFYDMIKFHKEFNPINNEDYNKHYEENKIKFIQSQAIKLGFQLVPAIVS

SEQ ID NO: 342665 - protein, 370 aa, unidentified
MSVRRILAKTIDTDLEYEAIGIDLAKNCVSAALLTTDGEVVCIDRLDYSELEKSAQALSPTTFAMEPCTEMNYLVQKLEAWGHRCLVIGGKNVQNYVENHYSGQKTDLNDAQALAFLAQDTQLRTIKAKDVEQQKYASLTTLREQYIKQYRQTIVSLKGICQAWGLNISKGISGKARLKDLIENHAAFPEELKESLVDMVTHAQTAQKALNKITKTLEELAKSDKVCQLIQTIPGLGSICSCRLRATVGDIKRFKSPKDFPAYYGLVPRSIATGHNERKGKITHRGDRTMRSLMVQAAGSLVNMATKGKLKSKQLTKWILKKQKEKMSWGKLVCAVAAKLLRIVRAVLISNKPYNSKIAGVAKCSLPKGS

SEQ ID NO: 342666 - protein, 416 aa, unidentified
MNVILSRIFECYIAVDLHKNYVVVGGVNIRQEVVLPPRRLELKDWSRWAERHLKKTDALVVESTSNAWDFYDQVEPLVGQAVVANPRLVKVIASSGVKTDKVDTLALARLLAANLIPAVWVPPVFVREVRGLLAHRRRLVKSRTMVSGRLQSLLLRHNLPGPEGGLFSSANRAWWEALEISPTERLRVRQDLNSLTHLDGQLAELEAEVNRLSTTPPWAEWVPFVMQLPGFSVLLTMIILAAIGDITRFGSPKKLVGYAGLGASVHNSGKTHRTGHITKTGRRELRWALVEAAWCAVRYSPYWKAEFKRLAGRKPENVAIVAIARKLLVVIWHVLTKQVADKHADQERVATKFMRWSWALTEQQRDGLPTRLFVRRQLMRLQLGHDLTHLTYGGMPRRIASVDELLVVCSELVAPD

SEQ ID NO: 342667 - protein, 372 aa, unidentified
MNPLYVGIDVSSKSNVVYLMLPNGDKLSNFELKNSQDGSSQLVKRILSALTSHSLDTVLIGLEATSVYGDNLVYFLREDATLDPFNRKIHVINPKQVNKFKESYNDLPKNDYVDSFVIADCLRFGRINKEVYLGDYRYLALKNLTRARYYAVCNLVKEKQRFMNVLFKKYSTMTQEKVFSDNFSTTALSVYEEFESAEALAKMDLQALTDFIMEKGKNRFPDPDSAAKAIQKAARSSYRLPKTVNDSVNQVLSISITSMKALESQIKEFDKAIAAQMELLPNVLTSIPGIGPVFSAGIMAEIGDINRFGNHAQLAKYAGLAWKQHQSEGFEAQTTRLINSGNRFLKYYLCEAAFSLVRCDKEYSDFYHLKYK

SEQ ID NO: 342668 - protein, 338 aa, unidentified
MKTYAGIDLHSSNNYIGVINAKDKRLYGKRHDNRIEDVLKVLGKFKASLQGVVIESTYNWYWLVDGLMDQGYTVHLANPNAIQTYNGLKHTDDRWDSFWLAHMLRLGLLPEGYIYPKHQRPIRDLLRRRLMFVRQRTSQILSLQSMITRNRGLNFSGAQIKRFRDEFIEKLFSDRHLVFTAKKNIATIRFLDQIVSEVEAEVSSQIKLKKEFISLLTTPGIGNILGLTIMLEVGNIGRFPKAGNYSSYSRCVESKKTSNGKKKGENNKKNGNRYLAWAYVEAANHAIRYCPKAQKFFQRKMAKSERVLATKALANKLTKATYYIMRDQVAFDEDKLFG

SEQ ID NO: 342669 - protein, 283 aa, unidentified
MNKGHLRKAVSWIKEQKPTLIVLEATGGYERLLVAELAAAKLPVAIVNPRYIRNFAKATGELAKTDAIDAAIIAHYAEAIMPEVRPLLSKQQEKLSALTSRRRQLVAARAAEKNHKEQAFLPEIIASVEAVIQKLTSEIESIETMITDLMSTEPDMKDKIDRISSVPGIGKTTAAVIISDLPELGTLNRRQVAALIGVAPMNRDSGQFRGKRMTGSGRKTVRTALFMAMLSIIQYNKKIKAFYEHLVTKGKPKMIALVAAMRKLVIILNTMLKNNESWRLQNT

SEQ ID NO: 342670 - protein, 404 aa, unidentified
MKNNIKATKMQLAKKHAVRPQINDAQTKKVSIEREQVSERMKHSLRNRGRRARAVKQVSCYVGMDLGDKNSNYCFIDAKGNIFAEGTLATAQAELNELFSSIPKCRIAIEVGTHSPWICALLKSHGHEVIVANPRKVEAIHKNKRKNDKIDARTLARLVRVDPELLYPIQHRGDPARQDLVLLRAREGLISARTKLINCVRGQVKSLGGRLPHCSAESFHYTVVEKIPDSVKESLLPLVHQIGEMSQTIRTFDAQVIRMSEQKYPETERLRQVRGVGPITSLTYVLTLEKPERFEKSRDVGCYLGLVPRQDESGEISKQLRITKTGDSMLRQLLVSCGQYILGPFGEDCDLQRFGLKLAERGGKNAKKRAVVAVARKLAVLLHRLWLSGEKYSHYTILNCRQRH

SEQ ID NO: 342671 - protein, 372 aa, unidentified
MIDRPKELTATRIIGLNLSKKTLVGCTLSRDSGFQKKSFFNEKMNEQGRNNLISRFKVGDAIFMEGGTSSFNLARYLLEHTASNVYVLNPMKLHIIFESICKTDKQDAAKIAKYARDANPENWVLIPIPTKEESADRALIKLHIAYSQLQTKLINKLHAIFTGMGYPDLKKSDLKNPEKRQSCVDKLLKEDLAIFSANLLVHNIEVVESQKEQIHSKIIQILLNHPKEALAWLSIPGIGDITAATLVAFIGNGERFSKADQLRNYIGLIPRKDQSGSVDKQLSVSHFGCMPVRRHIIQAAWSIKNFNHNCSLTRYWQKLEKRGKFGQKTAVATANKMISIGFALLKNGEIYNMVDDEYLFKKLKRYKLEALI

SEQ ID NO: 342672 - protein, 367 aa, unidentified
MRGNLICVREFTVKEKITQRKETKMKDTIYNHYIAIDWSIENMAIARMTKKSNKITAIDVPSDIADLQTYLKNLKGTKMLAIEETTTSQWLYTELKDYVDRILICDPNRNKLLNEGPKTDKIDATKLVQLLKAGLMKEVYHSTDKFLYLRRFVSGYEDLVKAGVRLKNQRYSLLRACGKRGFERAGTKLDSKDDQFVLDCIDRQIGAHKQEKEGYEKEFERLTKDYPEIRHQKSLPGIGPIHAVKIVARVVTPYRFADKGHYLSYTGLIKLEKISGGRSYGRKNSRYCRQLKSVYKTSTWAAIGGNNPINDYYEYLIQEKRYPEHNARHKACRKLAILSLGVFKSGKKYQPYRRDHVKGYQELKSGL

SEQ ID NO: 342673 - protein, 333 aa, unidentified
MKDVAAFCGIDIAKHLISVHLENEDRKVISQKNMRRDSVLTFLSNMPPCLIGIESCGGSQHWARELRKFGHDVRLMNAKYIIPYRRKGKNDLNDAEAICEAVSRPSMKFVAVKTEQQQSILMVHRLRQQCISHRTSLSNQLHAYLLEFGISLPKGAKAIHKNLSAFFGNCELHPLVVEMLHELLAAIAREEEREAYFNKRIADWVKHDERAKALLKLGGIGPLSASAIVATAGDPSSFENGRQFAAWLGLVPRQYSSGGKSKLGGITKAGDRYLRTLLIHGAPSVLLMASRGKGQQREWVNQLRTRRPENVVAVAMAAKQARMTWAIMAGKVV

SEQ ID NO: 342674 - protein, 389 aa, unidentified
MALFVGIDVSKEKFDACGIGDDGTKVFSVTCPMNREGFEKLVLHLPETALIGMESTASYHIALFSYLTAQGYRVAIINPLLIANFAKLSLRKTKTDKKAASTIAEFLLLKKEALAMETEPPRLGELKDLSRRRERLADQMTALKNDMLRILSVTFPELETITGVFTKSTLRFLVQFPSAHAIREAGYDAVATIVTSHSRGRKSAASVKTLMDTATTSVGVASPSKDLILTQEASLLLHVQEQAEEIMKVIVRLSDEKMKRDTEILTSMKGIGDKTALNFLIELGGDIKVFENDKKLIAAVGIDPTVYESGKYRGQSKISKRGNRHLRRVIWLMTTKVIISNEVFRAYYFKRRKDGLIYKMAVLATAHKLIRVMFSMLTNERYFEPERRK

SEQ ID NO: 342675 - protein, 306 aa, unidentified
MDVCVGLDESRTTNDHEGWVKIIEKFRQAEVDLVVVEATGGYEKGVVVALQHAQITVARVNPRQARDFAKSMGALAKTDKVDARMLRDFGDVLSRHKDRSKYVTPMFDPARELLHELVTRRRQLVEMRVAEGNHLEHATKATRRGILSVVKLLDKQIAQIEKEVDNYLDDHFKSQKELLDSFKGVGPATIMTLVADLPELGKLDRRAIAKIVGVAPLANDSGERRGKRSIWGGRSKVRSTVYMAALVAMRHNPVIKTFYDRLVAAGKPKKVALVACIRKLLTILNAMLRDGQMWRAAADLNSVATA

SEQ ID NO: 342676 - protein, 351 aa, unidentified
MSHKTAATAAQTIGIDTGKNTLHLIGLDDKGAIVLREKIARGRITARFANVPRCLIGIEAGMATHYVARELSALGHDVRQVPPAYAKPFRQGHKNDFRDAHAIAEAVQRPSTRCVPVKTDDQLDLQALHRVRSRLVGQRTAVINQIRGFLLEHGIAVRQGLRFLRQQLPDILAKRGDVLSPRMTRIMEDLSGDWRHLDERIKHITEEIEVLAHGSESCRQLMTAPGIGPLIASAMVAAIGNGTAFAKGRDFAAWLGLVPKQMSTGDRTILGRISKRGNRYLRTMLMQGARVILLRPKNWAKHSFGLWLTAAAQCLHHNVLATALANKLARIAWTVLAQGRSYEARVEPKVA

SEQ ID NO: 342677 - protein, 345 aa, unidentified
MTHFVGLDVSVKETSVCVVDDAGQVILEQKVATEPADIIAVLVSLSGICGRIGIEAGPLSQWLVNALTLADLPVICVETRHMKALLTAQQINKTDRNDARGIAQMMRVGLFKPVHVKTLVAQEQRMLLTSRKLLQRKLLDLESELRGTLRNFGLKVGVVGGGRYEARVRELVAGFPGLAAIAEPLLNVRRVMRQQLAVLHKMLLDTVRGDRVCRRLMTAPGVGAVVALTYRATIDQPQRFVHSRAVGAHVGLTPKRYQSGEVDYDGRVSKCGDALLRTMLYEAAHSLLIQSRKWSWLKAWGMRVAQRRGIRRAIVAVARRLAVVLHRMWVDGSEFRWSKDSIAIV

SEQ ID NO: 342678 - protein, 277 aa, unidentified
MAKHTTICAGIDTGKRKLDIAIDGRAEQLQVNNTAHGHEKLIAWLRQHRVKRIGIEASGGYERAVVAALRRNRFVVVVFQPAQVRAYAAFHLQRAKNDKIDAALIASCTAAVKKIHAPPDPRLEPFADHLTMIDQISEDIARLKTRREPCRDPRIRQLWKEEIARLKKLEKTELKSLVAAIRQHRDLAQRLDLIYSIDGIGLRTAVAILVRMPEIGRITREQAAALAGLAPYDDDSAISSASVTSQAVASVCGERFMLPPSRRRSTGIRSSLRSTNG

SEQ ID NO: 342679 - protein, 358 aa, unidentified
MVQRKELNFEGQNIYIGIDVHLKTWHVSILTESGCLKKHSQQSSAQALFEHLKKHYPNGNYLSAYEAGFSGFSTYYSLLDFGIECLPVHAADIPTGQYESVMKTDAIDSTKIARALKSGLLRGIYIPKKEVLDDRNVMRLRITLKRQLSGYKSRVKHLLYNNGVIYPECFQNSKSHWSKRYLKWVHEDVQLLSESRNSLDLLLRQVELFRKSLLEITSLVRTLSRNGRYGEAYENIVSIPGIGMITGMCLLTEIGDIHRFRNERQFASYLGLVPTSHSSGEKTSHGEMTFRGNKRLGPLLVESALVAIRQDRALAAAYGEYCKRMLPQEAIIRITRKLSNRILIILKSGKKYEHDRCY

SEQ ID NO: 342680 - protein, 325 aa, unidentified
MRYIGLDVHKDFCEVAVLEDGVFRSGPRVATTPQDLEVFAQSLAPEDEVALEATGGAFAVARIIEPYVCRVVVANPTAVRAIAWAKVKTDRLDARTLASLLAAGYLPGVWVGDERTQVLRRLTARRAQLVRQRTRAKNQIHAVLQRTLKGRPPVSDLFGKGGRAWLAEQVLPPDERQTVDSCLRQMDFLDGELATVDRSIAEEVLPWGEVRRIMTIPGMGAPTAAAFMAAIGDIQRFPSPRHLVGYLGLDPRVRQSGSSPARHGAISKQGSSEARHLLIEAALGGHEDPRAAARLRRADPRAPRGERRYRGGGPKARRALLAPAD

SEQ ID NO: 342681 - protein, 336 aa, unidentified
MRSIGVDLHKRSMTCCFLSERGKRFKEYSVSDLGLLRRDLQKTDRLAVEATGNARWFADQVRDSVEEIAVVNPRQFKVISESVRKTDETDAELLAFFLSKGMLPEIRMRDELSNEIKSLCVTRDKLVKLRTALKNKIHNILNAHGIQSNREDYSSEKGLRKVFEYPIRSIAKVELEVIVDQIRHLNEGIKRLDREIEDKGQGLRGFENITSIKGIGPKGGAILLSVIGDIEDFESSKKLESYFGIVPRTRISGDRVCQGRITKQGSKLGRTTLVQCTLVAIKYSPYLRKFYLRLKQKKGSGKAIIATSRKMLGIIYQTLRQGWVFEDFSNFVIRTT

SEQ ID NO: 342682 - protein, 370 aa, unidentified
MSQSSTLFIGMDVHKDTIAVAYVAQEHGAEVTYLGTIGTRQCDIDQLVRKMQSKAKHLIFVYEAGPCGYWLYRYLTKKDYDCWVVAPSLIPKKPGDRVKTDRRDALQLARLARSGDLTVVYVPKVDDEAIRDLTRAREDALSDCKDAKFRLKAFLLRHDIRYTGRANWGPAHLRWLSEVICPTPAQQIVFQEYVRAVTEHTERLQRLDQELQEHVHAWRLHPVVEALQALRGVQFTVAVTMVAEIGDLTRFDTPRELMKFLGLIPSEYSSGERRQQGSITKAGNTHARRALVEGAWAYRYPAKVSRHLQLRLEKQPKSIQDISWKAQVRLCKRYRQLVARGKHANIVTVAIARELAGFMWAIAKQLPVAA

SEQ ID NO: 342683 - protein, 334 aa, unidentified
MENIALIGIDLGKNSFHIHCQDHRGKAVYRKKFTRPKLIEFLATCPATTIAMEACGGSHFMARKLAELGHFPKLISPQFVRPFVKSNKNDFVDAEAICEAASRPSMRFVQPRTEYQQAMRALHRVRESLVQDKVKTTNQMHAFLLEFGISVPRGAAVISRLSTLLEDSSLPLYLSQLLLKLQQHYHYLVEQIKDLESQLKRKLDEDEVGQRLLSIPCVGTLTASTISTEIGDGKQYASSRDFAAATGLVPRQYSTGGRTTLLGISKRGNKKIRTLLVQCARVFIQKLEHQSGKLADWVRELLCRKSNFVVTCALANKLARIAWALTARQQTYEA

SEQ ID NO: 342684 - protein, 281 aa, unidentified
MQSMYYIGLDVHKRTISYCVKEVSGRIYAEGSVPATRLDLNRWMKTLPQPWTAAMEATVFSGWIYDHLRPHAVDLKVAHPLMLRAIAAAKKKNDRIDAGKICDCLRCDFLPECYMASTAIRERRRTLRYRNLLVRQMVQMKNKIAVLLMEAGVSYNKQRLHKAGYFRELVASNPDIDEGLCSLLRVCREMVVRLERTESALVRSLERDALLRDRVERLMTIPAVGPITALTWALEVGEVQRFSSIKKAVSYCGLCGEEKSSATACSAPRCRNNATSIYRRR

SEQ ID NO: 342685 - protein, 326 aa, unidentified
MNLSAAALGVDIAKLKFDVCLIKENGKAKHKVFANTTSGFEQLVAWLSSHQVGSLHVCLEATGSYGDALATHLFDAGFIVSVVNPAQVKAFAASRLTRTKTDKVDAELIARFCLAHEPQTWQPPAPAVRELQALVRQLESLIEMRISEDNRLSSGVSIEAVRHSLQEHIKYLVAEIKQTELMIREHTGNHPDLKEQSDLLDSISGIGATTAALLLAEITDFTQYKSARQVAAYAGLVPRERRSGSSVRGRTCLSKIGNARLRKALYFPAITALRSSSFFQQWASGMRTRGKSKMAVIGAAMRKLIHLAYGVLKTRKPFDPNWAKTA

SEQ ID NO: 342686 - protein, 354 aa, unidentified
MAYATAAQPITVGVDTHLDSHVAHANDQLGRRVGTRSVPTTPTGYQDLLAWARGLGQPITWGVEGTGSYGAALARFLAANGQVVVEVNRPDRQARRRRGKSDPLDAEAAARAVQAGQATVAPKAGTGQVEMIRSLRVARQTAIRARTQAINALKALLVTAPAELREQLRDLPTATLVAAAAGLVPGPITSPLAAALLALGTLARRHQALNLEIKALTAELDRLTTTAAPKLVALFGIGQDNAGALLVAAGDNPQRLRSEACFAMLCGSSPIQASSGKTVRHRLNRGGDRQANAALYRIVLVRLRYHQPTKDYLTRRLAEGKPKNEIIRCLKRYIAREVFAALQPLRHEFLTPPT

SEQ ID NO: 342687 - protein, 390 aa, unidentified
MEEPSISETRETPRKANTQKDGKVRRGRRKPLKLEPSAGDGRRTATVTGLDVSEKHIQICEIDVDDVVSEGRIATSDKKLREYFEGRAARRIVIEMSSHTRWITELLRSFGHEVLVVDPRRMKLVSGTLYKDDTLDAQTLAMLARDAPRLLKTVPLRDIEHQRLLTMVRARATAVEGRTRIINAIRGMLKPYGYRVPRSSHSVLATYLWSEVEAPILRLIEPLMVLLETFDGQIARYDQEAERILPQLPPNARQLRKLPGVGPLTVLYFVAIIGDPNRFAKSRDVGPYLGLCRRRDDSGEYQSELGITKAGDRYMRALLANCVSHIMGPFGKDGDLRDWGLKKLGGATRVEKKKMKVALARKLAVLLLTLWKSGKPYDRHHQKRGERKAA

SEQ ID NO: 342688 - protein, 372 aa, unidentified
MRHHTEAFVGIDTSKSRNAIAIADGGRGGEVRYLGEFPATAAAIRKLVAKLAAKFSKLTFCYEAGPTGYGLYRLIKSLGHECIVVAPSLIPKKPGDRVKTNRRDAVSLAKLSRAGELTAVWVPDERHEAMRDLSRARQAAKKDLQGKRQQISSLMLRLGRIYPGKTTWGPAHMRWLMAQKLEHREQRMVLEELLQGVRQEDERIERLEQAIREAMPDWSLAEVVTALQAMRGIDLIAAVGVLAEIGDLSRFQNPRELMGYLGLVPSESSTGDKVNRGGITKAGNGRARRILIEAAWAYRHPARVGRAKQPKVAAAPRRVREIAWKAQTRLCGRFRSLLRKSKNPPVAAAAIARELAGFVWAINREVMASRTA

SEQ ID NO: 342689 - protein, 347 aa, unidentified
MLIIGCDFHPGFQQVAIFDNLTGEIQEKRLQHREEAEQFYRSLTGQQVLVGMEACGHYPWFERLLEELSFELWFGDAARVRAAVVRQQKTDRRDAEHLLDLLRQDRFPRIWVPSLEVRDVRQLLVHRHKQVQARTRAKNQLQAMALSQGVQKKRKLWTKAGREQLEQLPLLPYAAERRKRLLEALDELDIEISELDRRVAEETQQRPEAVRLMTHPGVGPVTALAMVLTLGPAERFGSGKQVGSYFGLIPREESSGGKQRLGKISKQGSSFLRFLLVEAGQTAARLDPQLKRFYRRLAVRKNRSVAKVAVARKLATRLYLMLREDWTYAQLCQAVMQVSPSHSVAGE

SEQ ID NO: 342690 - protein, 371 aa, unidentified
MQETSRVFVGLDISKLKISVALAEEGRQGEVRFLGDIDNTPDAMKRLVRKLSGKYLQLLFCYEAGPTGYGLHRQITALGHDCSVIAPSLIRKRSGEHVKTNRRDALTLARLHRAGELTTIWVPDLGHEAIRDLVRAREAAMEDLREKRQQLQSFLLRHGRLYPGLRSWTLVHARWLSSLIFEHPAQYLVLREYRQAIEDAEARLKRLTQQVADVVSTWSMAPVVEAYQAMRGVAFLTAVTFVAEIGDVRRFETPRQLMAYLGLVPSERSTGEQVRRGSITKAGNPRARRVLIEGAWTYRYPARLSRPLQVRQESLPDVVRAIAWKAQVRLCARYRRLMAAGKRQTLITTAIAREMAAFLWAIGHEVQPCSA

SEQ ID NO: 342691 - protein, 404 aa, unidentified
MIGLDAHPDSFTAAVLRGATPAAAILEKLFNKLPMAQLKTWASKNTSDKDLIVLEASGNSFQIVRTLASIGRKALVLESCQLGKLKEAHANNDKISAIRIGKAYLAGTAKPVWVPDGLTQERRDWFHAHRKAVKRTTQMNNRLLSYLSDNGVRLKAATALNEEDLQKVNSWTPRQWQVIQGFLLEIRHAEQQREHWRTLIAQEVSSDPVLLSLVRLCGVRDMVAFAIGAIIGDIKRFSTPPKLVRYVGLNPAFDDSGNEQWSGGIGGHGRKDLRSLLIEAAQSIFRSKSDLAAWGKKLLARKGSLNLAVAAVARKLLTAIWYLMMGRWTPLEEVDQRLKNKLGKIVTHVGPEALKILGKTRKAFREELHQSLKTGRIYQLDSHREYEPKPTPKHGSLAQEYGIP

SEQ ID NO: 342692 - protein, 338 aa, unidentified
MSKRSIQVQQTMYCGIDVSAKSLTVAMQRVHQAVEQRSFPNTSVGHKALIVWLRKEKSPVRVSLEATGIYSLDLAFALDAAEGIEVAVLNPKVANRFAQTIRRSKTDAADAEVLAEYARRMPFTAWIAPTPRSMRLRSIVRHVESLSVQSAQNQNRLHAAHGSTSTPGCIVQDLKRSVASLELRIHKLRREAMALVRQDDLLRKRFELLVSIPGIAQVSAMQLLAELSTLPSGLTVREWVAHSGLDPAHEISGSSVRKASRISRAGNRHLRRALCRRWSHLVAIPAQKPFFESLLARNKSRLQVLIAVARKLLHAIYGIFRSGLKYEGAKLFPRISLS

SEQ ID NO: 342693 - protein, 448 aa, unidentified
MAKKVSYRAVPIERVTSASLAAMLVGASKLIVAIDVAKLKMMAGFGSEDGSVVRLVRFESPMQTREFVELVVATGQALRVPVEALMEPTGTYGDGLRALLVSRGVSVFMQSPKRVHDAREVFDGVPSLHDAKSCVVMAQLHRQGVSRAHSPLSEDRVRLRALVRRREVFEKPLQMHLSELEGLLGRHWPELLIDMDVWRRKTPLELLVAYPCPAEVALHREEAREVMRRASRNTIKHDEIERVLDSASRSIGTSASDEEREVIRAVAREALHVRGSIATIDKLIEKTAEEHEATRGIAKVVGRVTAVVLVAYLGPLSEYASPATLEKACGLNLKIKSSGNVVGRPSITKRGSSEARAWLYLAAVRLVKNDPLIAAWYRARGGYRGDRKLTALIAVMRKLARALWHVARGATFDATKLVDGRALDVTPRTPLASSTSSPTSHVAPPPMG

SEQ ID NO: 342694 - protein, 424 aa, unidentified
MDNRPVAGVDVSKYFSDMCILAPNNEIAGELHFEHDFNGMTKAKVLLESVEARYGVKPVIVMEATSHYHRLFFYFLKNNGFEAIVINPLQSHAIKNISIRKVKSDRADAYRIALLYRLKELRLTNAPIDTLFDIRNLTRQHSDLIKTRTMYTNRLIADLDQIFPSFHKTFFSLWSATSLAVLEQYPSPQAILSANPDELGALIVKVSRRGPAYARQKVCALCEYARNDAKLNIQCSSGLVLIKTNLQVIQVVNQNLKTLDDEINRMVNCDPVIAENVVLLDSIPGISLFSAAAILAEIGDFSAFNKPAQLTAYFGLDPSTRQSGQFKGVKNKISKRGCRYLRQILNMVAIASISRNTTGKTNNPVLEAYYRKKAANKPHKVALCAVMNKLVHIIFAVLRDRKPFELRQPEDHAAWLKEKNKPAA

SEQ ID NO: 342695 - protein, 391 aa, unidentified
MLEDAPQPPQAAIRTDLGAIFVSIELSRRTWLITSLSPGAGEKMSKHSVPASDVSGLLHRFAELRRKAAARTGRDFPIIVIQEAGLDGFWIHRVLQSEGIESHVVDPASILTSRRRRRAKTDRIDGETLVRTLMAFKRGEPRVCSMARAPTPQEEDRRRVCRERRTLVGERVRHVNRIKGLLFAQGVFGYEPLRKGRRERLEDLRTGDGRPLPVHLKAQIIRELDRLELVLAQLKSVAAERDALLKPATDEAASPPAMLVQLKGIGPEIAAVLWSEGLFRRFDNRRQVAAYAGLAPTPWQSGSIDHEQGVSKSGNPRLRTTMVELAWLWLQNQPTSALSLWFHERVERLGGRMRKAIIVALARKLLVALWRYTTAGVVIEGAVMKAVPATI

SEQ ID NO: 342696 - protein, 355 aa, unidentified
MSLEKYIGMDVHAATISAAVKNAEGKLLMECVLETKAATILEFIQGLRGTLALTFEEGTLATWLHDLLKPHVSRLVVCDPRKNALMRDGNQNDRVDARNLAELLRTNQVHPVYHGKHGTRALKELGRSYLTLTKDSTRVMNRIKSVYRSWAIPCAGTSVYSRRHRAEWLAKLEEPGVRIRAEHLYEQLDCLQPVRQAARHELLRESRKHAAVKLLRQIPAIGPIRSALLVALLQTPHRFRTKRQLWAYSGFAVQTYDSGEYRFVRGKLQRNRERITVRGLNHNHNHDLKNLLKGVAISAIERRGPLQDFYVALVDKGMRPSMARLTLARKIAAITLTMWKKGVSFDPKQLQRQAA

SEQ ID NO: 342697 - protein, 342 aa, unidentified
MKFYCGIDLSARDCHVCVIDQQLKIGVQQKLRNELPKICQLLAPYKANLKIVVESTFNWYWLIDGLQAEGFEVVLAHTLGLYLITGAKVKTDRRDAYSLAKLLLVGAVPAAYIYPPETRPVRDLLRRRLHLVQMRAGEYGSLRRLLLRQGILSSKQQEIKTATEAELEQWLEHPLVRLHASQELQRIELYSQQIGELEKSILQIAVTNQSYELLRQLPGVGQTIALTILYEVGELSRFANVKVFSSYCRVIPGIAQSGQVTRRGRGSKQGNHYLKAAFSQAAVHAVRCYPQVRRYYERQLKRHQGPGRKLVCYNIIAHKLAQAAFHILKEQTEYRAELLFGP

SEQ ID NO: 342698 - protein, 478 aa, unidentified
MTPPKDSCLDAPCPPTPLLPPLPVLSDALQVCHPHAAGIDIGEAEHWVAVPPGRDPQPVRRFGTFTADLDALADWLLDCGITTVAMESTGVYWIPLFELLEARGVQVLLIDPRQAKRAPGRPKTDRLDCQWLQRLPAYGLLAGAFRPDDQVCVLRGSLRHRQMLLTSAAHHIQHMQKALQQMNLKLTQVVSDITGVTGMAIIKAIVAGERDPVTLATLRNPHCQHNEDEIAKALQGTWRAEHLFALRQAVELYQCYHQHVALCDRQITAHLETFADKSAGQPLPPKARRHKKTNEPRFDARTPLYHMAGVDLTTIEGIEEGTALVILSEIGTDMHRWPSVKHFCSWLGLCPQHKISGGKVLSRRVRPGAHRVTVALRLAARSLPHSQSALGAFFRRMKARLGTPKAITATAHKLARLVYSLLQHGSAYVQQGLDAYEAQYRERKVKAMARQAQALGYTLVALATPEVQGMGAVPEPTP

SEQ ID NO: 342699 - protein, 444 aa, unidentified
MAYSGMILIREVADAPVIMGISKPAGLNSPCGEVKIVNPLFVGIDVSSRSNVAYLMKPDGSKHSSFSVQNNLGGAKLLSEKIVSALNSMKLERVVIGLEATSIYGDSLVYALREDGSLGQFQRKIHILNPKQVRKFKEAYPDLPKNDWVDAFVIADHLRFGRINREVYMDDYRYKALQTLTRARFDVIQNLTREKQRFANYLFLKCSGMAQDKGIQNTSATTIALMEQFETVDDLANADLEELTAFVAETGRGRFVDPESTAKAVQAAARGSYRLPKTVNDTVNQAMAVSIASMRALKEQVKILDKAIEQQFEIIPNTLTSIPGIGKVYSAGIIAEIGDIHRFSSQASVAKFAGLVWHKDQSGEFEAEHSRMIKSGNRYLRYYLLEAANSVRRCDSEFRRYYDLKFKEVNMHQHKRALALTARKLVRLVFRLLKDNRLYIPPEG

SEQ ID NO: 342700 - protein, 453 aa, unidentified
MLPLSTRFRLVVSLMAPAGGPFRNSVNTGGTIVVEEVSEEPAELVERVAALDIGKAMLVACVRVPHDAKPGRRRQEVRTFATTTRSLLAMADWLHGLGVTRVVMESTSTYWKPPFYLLEEGCECWLVNARDVKHVPGRPKTDAQDAVWLAKLAERGMLRPSFVPPPWQRELRDLTRYRRTLNHERTREKQRVEKLLEDAQIKLSVVVADMFGVSGRQMLEALIAGQRDPKVLAQLAQGRMRSKISDLEEALTGHFRAHHGYLLQMMLDRIDTLGAQIDQLTSRIEELLAPFAHQVAQLDEIPGVGRIGAQELIAEIGIEMGRFPSAAHLVSWAKFAPTTKASAGKTKSSATGKGNPWIGATIGEAAMGASRTTTFLGARYRRIVKRRGKKRALVAVGNSILTIAYWLLSDPDARFVDLGVDFHDRLHPQRRTRQLIRELEHLSGKQVTLHDAA

SEQ ID NO: 342701 - protein, 375 aa, unidentified
MLSKRINQNEQSLRALFSAFSAHDHKVLVVVDQPNNIGRLTVAVAQDIGIDVRYLPGLAMRQLSRIHAGNAKTDIRDAYIIAHAAKNLPESLRSVDRVEEAFLQLKVLNGIDEDLARSYTRLINQIRSALVGCYPQFEQALRGQIIHRKWVLHLLARYGGPTKIKRLGKAKAAAFARRYKARNPEPVLDAIFAAISEQTVTIAGAHYAEMGVAMSAKDALLKLEHRQQIEKEVIELINDIPHTQFLLSMPGIGPKTAAQILMTAGDMSDFPSAGHLASYAGLSPRTNQSGTSIMSNSLNRAGNKKLKNALWQSSFASIRSHERSRQFYERKRREGKRHNAAVVALARRRLNVLYAMMRNHEHYHDPAPSQEDLAA

SEQ ID NO: 342702 - protein, 355 aa, unidentified
MKQGTQLDFSGQTIFVGMDVHKRSWKVCIRSEHMELKTFSQEPSAKLLINHLKHNYPSATYKVVYEAGFCGFGYQREFSEAGINCIIVHPADVPTTDKEKQRKSDTVDCRKLGNTLSKGDLTGIFVPSVEQQDDRGIIRVYLQMVKDRTRFKNRIKGWLNFQGITIPGDDDYKYWSNNFTKWLKALSLTPSARVNLDILIQGYEQARAMVLTATRQVRVLSRQERYKKKIELIRTIPGIGEIAALLFKTEIGDMNRFKDLDQLCDYLGLVPKIHGSGDKETVLGLTHRGHHQLRETLIEASWVAIRLDPVMTMFFNDCCKRMKKNKAIIKVARKMLNRIRFVMKNQREYVPAVLI

SEQ ID NO: 342703 - protein, 353 aa, unidentified
MHTHQQSTEPVATIGLDIGKNTFHLVGLDRRGAIAMRIKVSRNQLVRRLVNLPPCLIGLEAGSGSHHIARQIQSLGHDVRLIPAQYVKPFLKGHKNDYRDAEAIAEAVQRPTMNFVAIKTPEQSDLLSLHRVRSRLVRQRTAIINQIRGFLIERGITVRQGPGPLRKVLPEVLSSPPEALSPRLLHLISELDHDWRHLDDRLEVLSGEIESLSENDAACQRLMTVPGIGPIISSAVVAAIGTGSGFKQGRDFAAWLGLVPKQESTGDRTKLGRISKRGNKYLRTLFVQAAHVVLERRPAAAMRALWPWIAQASKRLAHRNLLAIALANKLARIAWAVLARGRDYQPRITPNAA

SEQ ID NO: 342704 - protein, 362 aa, unidentified
MEQIIRVGMDTSKHFFQLHGVNAAEQPVLRKKLRRKEMVAFFEKLPPTVVGIEACGGSHHWARLLGSLGHEVKLLPPQYVKPYVKRGKNDAADAEAVCEAMSRPTMRFVPIKSAESQATLMLFGMRDRLIRNRTQLANAIRGYAAEFGLTAAKGMYKVESLLERIAADENLPELARALFALHAKEYAQLQAELETIEAKLMAWHRENECSRRLAQIPAVGPIVASLLTMKTPAPELFRSGRDFAAWIGLTPRDHSTAGKPRLGVITRAGDEALRTAMVVGATSLLRQVRAGRGKNALPWLVNLLKRKPPKLAAVALANKIARIAWKMMVTGENYRKPAVQRPGMCSLSDQSVTVSGETKLPC

SEQ ID NO: 342705 - protein, 418 aa, unidentified
MIKIQNKKRIFNQKTLLVTVDIGKETNFGYMRCPDGTEIQPFKFSNTFRGFNKIWKNVQSIKKETGLTHVVVGIESTGAYGIPFLHFLKDKDVESVYVNPCHTKRVKEIQDNSPNKTDKKDPKVIADIIELGRWLRVVIPEGAAAELRELVHSRDDDITERTSLYNKLNDLMFKIFPEFGQVMKNVKTKTAQHIIQHYSTPESIVELGVEKLSEIIHKISRGKMNSERALQLYNAAKQSIGIKEAQKRIVNKIQNILEIISTHNQFIEQYELDISIELQNITYSSYILSIKGIGEVTAAGIIGEMADFENFKNFAEVEKFAGLNLYEISSGKRKGQKRISKRGRPLLRKLLYFAALNVVREGGIYHDKYQSYLKRGMPKMKALIAICRKLLRLIFVLVRNHSEFDINYLKNQKTRKAA

SEQ ID NO: 342706 - protein, 354 aa, unidentified
MGEISRIGIDISRTVFQLHAVRSDGSVVWRKRVCRSEFISTIQDVPSCMIAMEACSGSHYWAREFQKMGHEVMLIPPQYVKPFVKRNKNDAADAEAIAEAASRPTMRTIPVKSALQQELGQLHRARELMVKHRTALINEIKGFMHEHGVLLTSRREKLYGEYLEKLEVHGDRLGLVFKRLMSQLFEQLREAEAAISKHEKEIEGLHKQSEVSLRLATIPGVGVLTATAVVAAVGNASHFSSCRDFAASLGVVPRQHSSGKTERLQGVSKRGDPYIRKLLTQGGQSVVLAASKAKGSRGDWLRALITRRGKCKAVMAVANRNARVMWKLMMSGEIYKHDYSAVSLSKGACNSLSR

SEQ ID NO: 342707 - protein, 342 aa, unidentified
MKTITTIGIDLAKNSFSVYGVNAQGKPVLQRTLTRAGVIRFFANLPACLVGMEACASSEDWTRTIESMGHTVRRIHPRYVKAYLLGAKNDVNDAAAICEAVQRPNMRFVPHKSPEQTDIQCVHRIRQGFVRSRTALVNQIRGLLGEYGIIMRQGVSTVRTQLPALIADEANDLSSIMRRNLSSLYESLRFLDDRILDQEKILKDIARENEACKRLMQVPGIGLLTATLLLSVGGVTSNFKNGREFAAFLGLVPRQNSSGGKTKLLGITKRGDSYARTLLIHGSRAVLHALIAGRTPQARQNAWLAELAARRGNNRACVALANKTARIAWSMLSQGTAYKLAA

SEQ ID NO: 342708 - protein, 468 aa, unidentified
MSARFQKKVRPSPRAEPLRVTHAHAAGIDIHAGVHWVAVPPGDAPPPAHDHPPHVPAHVRSFGTCTADLIALADWLAQCSVTSIAMESTGIYWIPLFELLEARGFEVYLVEPRQARHAPGRPKSDVLDCQWLQRLHSYGLLTPSFRPAEQVVVLRSYLRQRQMLIRYAGQHVQHMQKALEQMNVKLTEVVSSITGVTGMAIIQAILGGQRDPLELAKLRNDKCKRTQAEIARALYGNWRAEHLFALKQALQLYEFYRQQMQECDAQLQACLGTFADQRKGRPRPRRQRRHTQKANEPKFDVGSALYRMSGQDLTVLEGVDANTALVLLSEVGPDVSRFPTVKHFTSWLGLSPQHQGSAGKIRSRRIRRGMNRAGRALRLAVQGCYHAQHALGAFYRRIRARAGAPKAIVATARKLAERVYRLLKYGAEYVCQEIEAYEAAYRARLVKGLARKAAELGYRLEPETMAGT

SEQ ID NO: 342709 - protein, 394 aa, unidentified
MILVGIDIGKNKHTFSIIDKNSGEILLSPSDFSNNLKGFLFLIQKLSSYTKSKLLIGMEDTGHYHFALLKYLLDRRYTVALINPTTTDLTRKLQGGITKNDPLDSLTICDVISSNHRNKPYRVTTLNRFDLYEQKQLTRHHHNLKEELNTYKNRLQKCIDIVFPEFNSLFHSKYGIVYMNILKAFSSAKAIANADIRSIRKCFEFKGQGKRISLSAEQLKLTAKSSIGIPSVAEEIQIRHLVSQIELLEKQLSEIDKRIEEFSLKNNSPILTIPGISHFSGTSIISELGDICNYTKASQIIKFAGVAPYHYESSQFTAQHTAITKKGSKYLRKTLYQIILPVISNNEVFYAYYTKKLNEGKGHRCAQGHCIRKLLRVIYHLLSTRQPFNPKLLV

SEQ ID NO: 342710 - protein, 371 aa, unidentified
MEKNTIFVGLDVHKNTIDVGLADAGRDSEVRFYGSIGGDLDSLHKVIRKIQSTGATLRVVYEAGPCGYDIYRSLTRRGVECVVVAPSKIPRKSGDRIKNDRRDALNLARLHRAGELTPVYVPTVEDEAMRDLTRGREDAVKAHRTGRQVLLAFLLRHGYRYSGVSYWSKAHWNWIGDIKMPHPAQQITLQEYVHAVHEQSARVQRLTQQIQELVAQWDLALLVQGVQGLRGVSLIVAATTVAELGDLTRFASAKQIMAYLGLVPSEHSSGDSVKRGGITKTGNSHVRRALTEAAQAYSHPARESRVLLGRLAGLPEEVRKIAWKAQVRLCDRFRRLTARGKNRNTVITAIARELAAFMWAIANELRPMRKA

SEQ ID NO: 342711 - protein, 351 aa, unidentified
MHMLAEVVELVIGVDTHKQTHTAAVVVAATGAMITQVTVPATPAGYRQLLQLARQQPGQRVWAIEGTGGYGAGLTRFLHGHAEQVVELDRPKRAARRHGAKSDPLDATRAAREALGRDHLAQPRAAGPRAALQARLTARRSAVQAAGDAQRQLHALVVAAPDALRDRLRGLTTRGLVTACGRLRLRADWDIETSATAASLRALARRIQLLNVEIAEHTGAITTLVRTWRPDLLNRCGVGPIVAATVLCAWSHPGRCRTDAAFAMLGGAAPIPASSGQTVRVRLNRSGDRQLNQALHLIVLTRLRYDPATRAYAQRRRAQGKTNREIRRCLVRYVARQLYRLLEANPCFDPT

SEQ ID NO: 342712 - protein, 346 aa, unidentified
MRFYNRQHHHYCGIDLHVKTMYVCILDTAGQVLVHRNVPSTPEAFLEVVAPYRDDLVVAAECMFTWYWLADLCAAEGIAFVLGHALAMKAIHGGKAKNDKIDSHKITVLLRGGMLPQAYVYPAAMRSTRDLIRRRLHLVRKRGQLLAHIQNTRAQYNLPVFGRKLAYKANREGVVEHFSDPSVQKSIAVDLALIDQYDVLIIDLELTIVREAKRHNADAFHRLRSVPGIGKVLALTILYEIHDITRFDRVQEFASYARLVKCQKQSGGKTLGTGGAKMGNVHLKWAFSEAAVLFLRHNEGKKLIARIEKQHGKGKALSILAHKIGRAVFYMLSRGTVFSMEKFRAA

SEQ ID NO: 342713 - protein, 394 aa, unidentified
MILAGIDIGKDSHFFSLVRKEDGEVLAQPRKFANTSEGFKTLTDSFIPYDKESILIGMEDTGHYHFVLLKYLLDRKFNVALINPTATDFTRKANGSISKNDRLDTLTICDVLSSNKPKKPYRISKFSSFDLYEQRGLTRHHHNLKEEINVYTNRLQKCIDIVFPEYNSLFPSKYGRVYISVLKTYGSAANIAKADIRSLRKCFEYKGKGKRISLTAEKLKEAAKASIGIDSACEVIQIRHLIEQIELLNKQIKEIDKKIEEYSLANDSPILSIPGISHFSGTSILAELTDINNYNKAAQIIKRAGVAPLVYESSKYQAKHTAITKSGSKYLRKTLYQIILPVIRYNPVFQKYYDLKISQGKSHRCACGHCIRKLLRIIFHLLKTNQKFDPALLR

SEQ ID NO: 342714 - protein, 332 aa, unidentified
MKKHFFSGIDMSADSFNVCLLKNGPGGSRIDGAFRNTKAGIQKFLTWLRENGVTCDNSTLVVENTGVYDDLFIYLLQRKGWTVCLLPTTALKRVSPEHRKKTDEYDAFKLAEYAFRFKDTLKPAPVADAEVEQLRILYQTRQILVGDRSRLLAYQKQMKRQIFASKASVLAIETSLKSLSAQILKLEREMWAHIRRHKHIQRRYDLLKSVPGVGKLTGVLLLTLFWNKERLDIKQVASWFGIAPHPRQSGTSLLSKPRTGKTGRKDARSMLKMGTRSVMQTEPEIILYKEQKLKEGKHIRVIENNVANKIVRWVCGVWNSNEPCHFGWKNAA

SEQ ID NO: 342715 - protein, 387 aa, unidentified
MYFVGIDISKFKHDCAIVDEFGDVITPSWSFQNDREGFSLLKELLDALDGEKKIGLEATGHYGQNLKLFLENNDFSFMEFNPLLINRFVHSKSLRKTKTDSIDALMIAQYLMTVEYKPYPPSFYTFEKLKSLTRFRDSLIRQRSRQLVELTNILDKVFPEFKPFFKGRFSATALYILSHYASPEKISNMNSKSYEPLRRLSRGRFSMVDFVELKTLARNTVGSTSDYLLQEMEITIDIYNQLQSKVEEIELQIHDCVLALAPPILTIPGIGAASAAVILSEFGDLSKFNNPSKLLSFAGMEPGYFQSGTSESTGKMVKHGSSHLRYAMMNCAQTVINNEPTFAAYYAKKRAEGKEHRVALTHVTKKLLRVIYTLQTKELSYNPDLVR

SEQ ID NO: 342716 - protein, 369 aa, unidentified
MAEYSEVFVAFDVAKRKHAVAIAEGGRTGEVRFLGEIENSAATIERVIKRLAGRYDRLHVCFEAGPTGYELYRHIRDLGHDCMVVAPALIPKRPGEHVKTNRRDAITLARLHRAGELTAVWVPDAVHEAVRDLVRAREAAADDLRRKRQQLLSFLLRRGRIYSGGGHWTLAHRRWLAKQAFEHTAQQIVFQEGIDAIEDAVQRLHRLEQQLAAIVPSWSMAPAVAAYQAMRGASFLVAVTFAAEIGDVRRFDTPRQLMSFLGLVPAESSTGDTVRRKGLTLAGNRRARRALVEAAWTYRYPARVSETLRARIEGLPKTVRDIAWKAQLRLCARYRRLSAAGKKLPVVVAAIAREMAAFLWAIAREVAAM

SEQ ID NO: 342717 - protein, 430 aa, unidentified
MPTESLPTALANLPSLMRYERFFGLDIHKQYITVVAINREGEVILQVRRVPTIEWPQWAAKNLGHTDAVVLESTTNAWTVFGQTVDHVGRCVVAHPDRKRRVKTDIQDAKGWAERLLVNDIKEVLVPPQHVRDLRGLISYRIRQITVRVRLKNRLQSIVHSNQLIPPEGALFAAKNRVWWKNLALSQIERFRVQQDLASLDLIELQIKEIDHKLAGFSQDEQWREEFPYFMQLPGVGLIVGMTVLGAIGDISRFESPQQLVGYSGLGASIEQSGDKHRNGGITKTGRKDLRFVMVEAARVAVRQNGRWKKQYERLEPRIGSNKAVVAVARKMLVVIWHLLTKKVVDQFANPDLVAGKIMKLAWQLTEEQRGGMKLKEFIRYYLTILGLGKHVKKLFRGGRNRPIATLEELIARFPELTDLPEFEAALAEP

SEQ ID NO: 342718 - protein, 351 aa, unidentified
MKELMAGIDLHSNNIMVGIMNQEGGRVAHQKLPCKMESILSFLAPYKERLERLAVESTYNWYWLVDGLQAAGYPVVLANPAGFSPYQGLKHADDKSDAFFLAEMLRLKILPLGYVYAAEQRPVRDLLRRRMSLVQQRTALMLSFKSLFTRTTGGALSLSRLKELEVREAQELYEHPANQLIAGLQIEHIEQLDASIDRLEKAVLPVAKALPCYPRLKTLSGVGVVLGLTITMEIGDIKRFAGPGEFASYCRTVRSQRTSNDKKKGENNRKCGNRYLAWAFVEAANFARRYDAASRQWFDRKAAKTNSIMATKALACKLAKAAWYLVAEDADDDGRRVFPQLAAGQAKNMKP

SEQ ID NO: 342719 - protein, 482 aa, unidentified
MKKRNIYQNQSQELLHLFEDAGSSEKVMCVPLDYAKRDHLAMFCNGHGDILRKPFSVKNTPEGLAYIDEQVTRSCRRRGIKKKHVFFGGEDANSFAKNFVSTLRGKGFLVANVNAHDAKKQRGSVQASTDRIDLMGIATMLLNCRANCRPAQSGIYRNLRTLVRHRRKLVQMLTEVKNRVHGIVDEIFPGFLNEKNSGIIPFTQSSLYLMEDRFSPKQIRRRRRQTLIEILRRFGTTTADKTAAKLQQYAAKVLHAPVEYVDTMQLSLTQHVKHIRCLKESVAQMDKEIALNLAKTQGAFLTSVRGIGIVLAAGVTAEIGDLNEQKPLNNLASYSGIVPRVKQSGGMDGKTYTGPVAKRCNRILKDYVVKSAYHLGLHGPQDLMADYKRRDASGQHADFGMGRRYLRMAINLMRTSQVYLPPNLRKGDFTLEERAGYYLMNWLYLREKWKKIGVLEAAFANNRPLGQWRQIVQELYDIKLKL

SEQ ID NO: 342720 - protein, 355 aa, unidentified
MNCEKYIGLDVHQATISVAVMDPMGKLIMESILETKASTILEFLGGLRGTLSVTFEEGTWAAWLYDLLKPHVAHVLACNPRKNAMLNQGNRSDKIDARELANRLRLNDLKSVYHGENGIRMLRELSRSYLTIVKDLSRVMNRLKALYRSWAIPCAGRDVYYTRHRSQWLEKIREAGPRRRAEHLYQQLDMLQHVRQQARRELLAESRKHSITAKLRQIPSLGPIRSALAVALIQTPHRFRSKRQLWKYSGLALETRITGEYVYVHGERRRSKKQISIRGLNKDHNHDLKGLFKGAATRASVMPGPFREFYQRSLAKGIKPTMVRLTLARKIAAITLTLWKKGENFDVEKLKSQAA

SEQ ID NO: 342721 - protein, 403 aa, unidentified
MNAVGIDVSKGKSMVAILRPYGELVEAPFEVKHTSSEIQSLIQTVQSIDGESRIVMEHTGRYYEPLFCQLAGAGLFVTAVNPKLIKDFGTNSLRKVKSDKADAIKIAKYALDSWSDLKQYSVMDEIRKQLKTMNRQLDFYMKHKTSMKNNFIGLLDQTFPGVNNYFSSPAREDGSQKWVDFATTYWHVDCVRNMSRSAFISHYQNWCKRKEYNFSQSKAEEIYEAAKELVSVLPKDDVTKFIVKQAAGQLADASERVAQLKVKMDETASKLPEYPIVMAMYGVGSSLGPQLMAEIGDVSRFTHKGALTAFAGVDPGVNESGIYEQKSVPVSKRGSAPLRKALFQVMDCLIKHMPQDDPVYLFMDKKRTEGKPYYVYMTAGANKFLRIYYGRVKEYLLSLKQPE

SEQ ID NO: 342722 - protein, 344 aa, unidentified
MDHFAGLDVSVKETSVCIVDDTGRIVREVKVASEPEDLLQILSNPAYHFKRIGLEAGPLSQWLFSTLAEAGLPVICVETRHMRAVLKAQINKTDRNDARGMAQMMRVGLYRPVHVKTLRSQKLRMLLTHRKLLQSKAIAIDNDLRGTLRNFGLKVGMVGTVKFEARIKELVENLPDLAALVEPLLVVRRVLREQLGILHRRLLAIVRDDEVCRRLMTVPGVGPVVALTYRATVDIPARFRRSKAVGAVFGLTPTQHQSGESKRPGAISKCGDEMMRVMLYEAAQIMLVRSTKWSWLKAWAMKIARHRGMKKAIVALARRLAVIMHRIWVDGTEFQWTREEAAMA

SEQ ID NO: 342723 - protein, 411 aa, unidentified
MIPITTLFVGIDVGKKSNHIHVLDSNGETLSRFAAPNNLDGAEKIKEKLRRIILDTDFTKVIIGMESTSIYADHLAAFFRNDEFLKTWQCKVYILNAKQVRKFKDSYPELPKMDDVDAFIVAERLRFGRLPIEVRQDEKYIALRNLTRARFQAAQSLSREKSRFLETLFFKFSSLDSSGVFSDTFGSTSLAVVTDFLSVDDIIYTPLEELAAFINEKGKSHFVDPENIAKELQAAARSSYRLPKTVNDSVNQLLAIRLVGIRAIQSQIKELDKAIESFMSLFPNGLTSVPGIGPVYSAGLLAEIGDVTRFKKHASLAKYGGLAWGKHQSGGFEAANTKMILTGNKYLKYYLLEAANKVRMHDAEFKRFYQSKFKEVPKHQHKRALALTARKLVRLVYSLLSANRLYTPPTV

SEQ ID NO: 342724 - protein, 323 aa, unidentified
MQGKALPDQSAQAQVYVGVDVCKDWLDVYFHPLGKALRIANDRHGLKRLKRACEGVAIARLVLEATGKYHRHAHRSLHAAGLPVAVVNPLRSRLFAEAVGALAKTDRIDARMLALLGAPLVPPAAPPAGEAMDGLQELVRARQSAVADKTALSNRAGEAETDFLRVELAQLIAEAERHIARLDEEIGRRIDSDERLAERFRILLSIKGVGPIAAMTLLSCLGEIGACSGKGAAMLAGLAPIARDSGDKNGQRRIRGGRAHVRTALYMAAVAAARWNPDLAAFYKRLRENGKAAKIAITAVMRKIVVLANVLIRENRQWTPTRP

SEQ ID NO: 342725 - protein, 429 aa, unidentified
MKYNTQNAKIASITEKTLIVGIDVGSETHYARAFSWRNYEYSKKPFAFSNDEDGFASFKAWMDDIAEKHEMEKVIPGMEPTGHYWLNLGAYLQGQGMRPVHVNPHHVKKSKELDDNNPNKNDRKDPKTIAGLVNEGRFSYPYIPTGIYAEIRNLSNLRIQTQEEIIRIKNRIARWFSIYFPEIKDVYRNPDAVSGLMVIKQAPLPCDIKGLGVDGVNKIWRDARLKGAGLKRAKTLVTAAEHSIGNTEAPRSARKEIRNLLNDYEIYKSRMDELMEEIEELLSEIPYIDKLMGICGIGIKTVSCFIAEVGDIERFDNPKQVQKLAGYAIVADSSGKHNGESRISHRGRKRLRYALYEAAISVIGKNKEFKEIHHYYRTREKNPLKKMQSVIAVSCKLIRIFYTILTKGIDYDGQKMLRDIVRPGMQSAA

SEQ ID NO: 342726 - protein, 403 aa, unidentified
MNNVAGIDVSKGKSMVSVLRPFGEVVAKPFSVGHTGSELKELADYLKSLDGETRVVMEHTGRYYEPVARFLHEEGVFVSAVNPKLIKDYGNNTLRKVKTDKADSRKIARYGIDNWAELRQHTPMDTIRMQLKTLNRQQSLYAKTKTMMKNNLIALLDQTYPGVNALFDSPVREDGSQKWVDFATAFWHVDCVRSMSLTAFAERYRKWCKRHGYNFSQSKAVEVHAGAQDLIVMLPKDALTKTMVRQAIDALNAVSASLERLKAEMRTLAAQLPEYPVVMAMHGAGDSLGPQLMAELGDVTRFTHRNAITAFAGVDPGADQSGTHEAKSTRVSKSGPPELRRALFLVMDCLLKTQPQDDPVYRFMDKKRAEGKPYLVYMTAGANKFLRIYYGRVKEYLASLEGN

SEQ ID NO: 342727 - protein, 317 aa, unidentified
MAAASPQVFVGIDVSKDWLDIAVRPAGTEWRAAQDEAGNTALVRQLRKLHPQLVVLEATGGYETLLVVALGSAGVPVAVVNPRQVRDFARAMGKLAKTDRLDASVIAHFGEVSGAVAQPLVAADARELEALVARRRQVTQMRSAERQRRQQALPVVQRRIARVLAVLEQELKDIDQDLSGRLWESPLWRERENLLRSVPGIGPAVTFALLADLPELGSLTRKQVAALVGVAPLARDSGKFHGKRTCWGGRATVRAALYMAALVASRFNPVIRLFYQRLCAAGKPKKLALTACMRKLATILNAMLKHRSAWQAMPQNA

SEQ ID NO: 342728 - protein, 345 aa, unidentified
MPIVGGLDIHRKQITFDYLDTVTGEVKRGQVAPADRAHLRAWLARFAGWDDVTFAVEGCAGWRYVTEELAAAGIAAHLGEPADTAALRGRKRHAKTDKTDARHLRTLLAEARLPECWIPPEHILECRALLETYHDLRREHTAWVQRVHAVFFHQGAPPLGEGALRTEQGLTKLRAAAAAHLSAAGQQQVATALDMLAATEAQLGPLRHQLRDAAGRLTGAKVLAARLYGVGPVTALALTCWLGGAGRFSSSAKAVRFTGLDITVHSSDRKGPPGRLSRQGPPVLRWAVYEAGKTHARTSAPDHAYYAAVADRKNTKRAALSEARKIVRQACHILTELGDDALTAA

SEQ ID NO: 342729 - protein, 406 aa, unidentified
MELTTIYKIVIGLDVHQAQITACAIIQESDGITRIEQRQFGTFKRDRRELAEWAASLKPDQVVMESTGIYWKSPYAALEAVGIRALVVNARHVKNVPGRKTDVGDAQWLATLARAGLLRGSFVPPAKLRELRLVTRQRQKLVGQLSSEKNRLHKILTDSGVRLGVVVSDIHGQSARAMVKAIITGQQPHEVIHLASRRLKATREELFDALQGELTDNHRFVLDEIMRHIEEIEARIARFDARLLEELKDERNKLVLLQTLPGVDLIGAAMLLVEIGTDMTAFGNADRLASWVGICPGNNESAGKRKSGRVRKGNLYVRRLLCEFAHAASRTKSVFQSKFQSLLVRRGYKRSIVAIAHKLLRTIYFMLSRGEYYRDSATDYEALSVQRNASRWIKNLVKFGFIPKPA

SEQ ID NO: 342730 - protein, 342 aa, unidentified
MTQPAPARITVGVDTHAEVHVAVAKDNFGRRLDAISVPTTPAGYGELLGWARRLGQIEGWGIEGTGSFGAGLTRFLHRHGQVVVEVNRPDRQTRRRRGKSDPLDAEAAARAVQAREGVIPKAGDGQVEMIRSLRVARATAMKARTQAINALKALVVTAPDELREQLRALSAVRLVQTAAELEPGPVTTPAAAARLGLRSLARRYQALSAELTILDTELDRLTVTAAPKLLALFGVGSDSAGALLVAAGDNPDRLRSNACFSMLCGASPIPASSGKTQRHRLNRGGDRQANAALHRIVIARLRHDQQTKDYLDRRIREGKSKKEAIRCLKRYVAREVFAALQP

SEQ ID NO: 342731 - protein, 384 aa, unidentified
MNNLPPAGTHDDAVRCVLAIELSKKSWIVAVNTSLSDKVSRHTLKPCDVKELLDLCERIRTRVARETKKRMEIVSCYEAGYDGFWLHRLLEAHGIRNYVIDPASLQVDRRARRAKTDHVDVERLLRSLMAYLRGEPKVWSVVRVPSVAEEDDRRLHRERGRLINERIQHVNRIKGLLAIHGIYDYQPLRCDRMQQLERFRTADGRTLPPRLKAEILRELQRLELAIGMIKTIEAERDAIASAKTETEHTSEKKIQDLAKIKCIGPEFANTLVGEVFYRSFDNRKQLASYVGLTPAHFQSGAMCHDQGISKAGNAKARTVMIELAWLWLRHQPDSPLSIWFRDRVGKLKGRIRRVTVVAVARKLLIALWRYLETGLVPEGAALKV

SEQ ID NO: 342732 - protein, 324 aa, unidentified
MKTKLNNFIGIDVSKKKLDVFDGRKSYQIQNNLTGFNRLIQKTKPEDHFVMEATGSYHVKLAYYLHNKGIKVSVVNPLSVKRFSQMKFLRAKTDKVDAILLRDYALINKPEIWKVPQGYVFTIKQIQTAIDLLIKGKTSFQRQLEAFDQLPICDVEVIKLIKNQISQMDMKIRQLEDKAEQLVIKNAGEQYRVLKSIPGIGNKAAIMFIAITNEFKNFSNSKQLSSYIGICPRIYQSGTSVNGKGHICKMGGARMRSLLFMCSLTAKSCNQACKQLYDRLIQKGKSKKLALVAVMNKLVKQAFAIATKLVKYDKSKYNCELNAE

SEQ ID NO: 342733 - protein, 334 aa, unidentified
MKNRYFMGIDVAKATFDFCLLSSSGAALWRGQFSNDACGIERFLAQLPARSWKLCQIHFALEATGVYGKALIAALHQAGLAVSVLNPAQVKYFALSVLRRTKNDTVDAEIIARFCRERKPLATRPLRPIEEQLKVLVHERESRVGEQTRERNRAKKDPFQIELPTLISRQRQQRLKQLAKEMAQLDAAIASLIASDECLKNHSQLLCSIPGIAAVTAAKLLAELAAKEFQSARQLAAYAGLTPAEYRSGCYLYGKTRISKIGNAFLRKALYLPAAVARRWCKPLKPWIAMLESRKLHALAIRGAIMRKLLHIVFGVLKHQKPFNPLLVSSPKTV

SEQ ID NO: 342734 - protein, 399 aa, unidentified
MIAVGVDVSKSKSTVAIISDTGEIIQSPKEYCHTYSQLQPLIALLKKHCDEVKIVMEATGHYHYPILKIFLENHFFVSVVNPYIIKKYNDNTLRKVKTDKQDALRFAFYALEKSHCLTAYTAREAKYADLKFLYQQYTQRLHTIQKEKVNLCHILEESMPGLYDVLATSVRNPEKNLLYAVVKTFKSFEYIKQMSQERFFNRYSKLATAIGSRKRKNYALLIYEMAQNSICTRGNDPYTSIALEECLNSLILAEKAANRLCEQMNFIANTLPEYITVRAMHGVGDKLAPQLIALIGDVRKFKSGKALNAYAGNDAPPYQSGQFESKNRHISKRGSTELRKICFEIMCCIKVHKTKEDPIYCFMKKKEEEGKAKKVAIMAGVNKFLRTYYAKVMEVYKDI

SEQ ID NO: 342735 - protein, 343 aa, unidentified
MQTITTIGLDIAKSVFQVHGVDADGRVVVRRQLKRRYVLAFFQKLPPCLVGIEACASAHHWARELQALGHTAKLMPPAYVKPYVKRHKNDAADAEAICEAVARANMRFVATKTPEQQSCLTLHRTRHLLMRQQTSVINAIRSHLAEFGIVAPVGRNGVEQLLGVVADSNDRRLPEVARACVAALGAQLRVLKVQILEFDRMIRAWHRSSEASMRLDQVPGVGPVLATALIASVADPKAFRSGRDFSAWIGLVPKQNSSGGKERLGNISKRGDRYLRSLFTTGALAVIRYAKIHGTKHRPWLTALLARRPTKVAAIALANKLARMAWAMMAKGERYKEPAALAA

SEQ ID NO: 342736 - protein, 454 aa, unidentified
MGRSIGLDVHRDFCQVAIADGGRARSAGRIATTPQQLELFAQSLAPTDRVVLEATGNALAIARILEPHVAEVVLAHAKQVRAISHARIKTDKVDAKVLADLLAAGLIPAVWIGDERVRMLRRLVSRRRGLVKRRTQVKNEISAVLHRNLKGRNPASDPFGKKGRAWIAAQQLPIDERLSVDGCLRQLDFLTGELAQVDAIIAEHALGDEDVRRLITIPGIDVVTAVTLAAVIGDVRRFPTARHLVGYLGLHPTVRQSGSGPARHGRVSKEGPAAARHVLVEAAWSAAKSPGPLRAFAQRTAARRGRHVATVAVARKLAVLAWNLLTRGEDYAFARPSLVRRKLRTLELKAGATRAKPGPSATPIWNTTRDAAEKHLAEQAEIAYRRLVADWQASGAKAGAGATPERASQRPSKDKAARQATNSCRLHFATSVTRTHTAAFHKNPERAKQFDFHP

SEQ ID NO: 342737 - protein, 429 aa, unidentified
MNYTQNEKIEQVTDSTMVVGVDIGSQIHYARAFDNRGRELTKRIFSFHNDLEGFNSFNLWAETLKTENKKTAVLIGCEPTGHYWFAFAKYVNDHQKRLVMVNPFSVKKIKELDDNSPKKTDSKDPKIIAKLVVDGRYSIPYMPEGIYAEIRDLVYSRDRIMKQHNISANRIQRWLAIHFPEYLGLYTRFDAISGLAVLEKAPLPKDVIALGVNGIRKIWHDKKMRGRGVTEDRAKTLVEAAHNSVGLDGGIGTKSELYMLLEEHRLWTSQLEAVNKVLEEMILKVPHVEKLLAIKGVGSITIAGFIAEVGDIRRFDSPKQIQKYAGLELLENSSGKHKGRTRISKRGRRKLRKILYQVMVPLLARNKEFRGIYDYYVTRVKNPLKRRQAMVAVSCKLIRVFYAVLTKGVEYDRFKMMSDIHRKSDIIAV

SEQ ID NO: 342738 - protein, 433 aa, unidentified
MLKLNYMSTLFVGIDVSSKTNAVYAMDFEENKYISSSFGNNQPGADQLVNMIAECMQKHKNLDTVLIVLESTSVYSVHISNFLSASEVLMPYRPYVFCVNPKAASNYRKSYIGMEKTDPTDAYLIADFGRVGRTKKLEPWRGGQFISLKRLTRHRMHLSECITREKTYMVSNLYLKFSELQLLEGDDKPFGSLYGATSSAVLTEFLSPQEIIDMPEEELLTFLAGKSRNRISDLSKTSELLRKAARDSYRLDKCMYEPLNVSLASSFNCIHAYQKEIKLIEQAIEKCINGMNPNALIILQSIPGIGPIWASGILSEIGDITVFHSSDALAKYAGLYWPKGDSGDFTSEDNKMSKAGNPYLRCYLGEAANSVRKHIPEYADFYARKYAEVTKHQHKRALALTSRKLVRLVFGLLVKNQLYTGEKLDTEYNIESN

SEQ ID NO: 342739 - protein, 370 aa, unidentified
MENRSMFVGLDVHKETIDVSIAEGHRNGEVRHYGVIASDLEPLDKVVRALRAPNRRLHFVYEAGPCGFGIYRHLTKRGEACVVVSPSMVPKRSGDRVKTDRRDSVTLARLHRAGELRAIYVPNDVDEAMRDLVRAREDAVVLGTQAKYRLKAFLLRQGRRYPGREGWTQPYRRWLTDLSFPTAPQHITLQEYRDTIDETERRIARLTEQLRQLAPTWRWAPVVAALQALRGVSFITAVALVAELGDLTRFGHPRELMAYLGLVPSEYSSGPSVRRGAITKAGNPHVRRLLAEAAWAYQGIPRVGRQHAYRQEALPKVVCDIAWKAQLRLTTRFRRLVARGKAKPKVATAIARELTGFIWAIAQEVSPASP

SEQ ID NO: 342740 - protein, 490 aa, unidentified
MNDLKLHRVIGLDLGVASQHSAVVLDGTGRVAARRRVSSTAASLGELERVALTGAAEGTTLIVVIEPTGPMWLPIAVYFGRRGHTVVRVSSAKAADLRRFLSRHAKSNGIDAETLARMPMVAPSGLHPVELSGADRASLDRRVRTVARLTREIGQRKVRIRALAQTAIPTIGAALGDDLNRTDLAVLERYAHPRALLAAGPARLTRLVHTESRGKLGAAKVEALRTAARQALELWAGDTAIALSDLAEEIATEIRLLRLTETERARHEQARDAAHAQVDPAGLATSLPGLGPVGSTQLLAAMGRPGRFRSAAAFKAFTGLAPKASETGNTDRKSQPMSKAGNRALRTQLIQSANTARQLDPQLAAIYHAQMTERGANHLKALCVVAARLAERAWLTLSRGEPYTIRDLQDRPVTPAEARALIDEQFTVPAAVRRRRRSKKQAGRAPQHCTMQEESQPTAGHEATRPSTTITSTPAAVNPDPTEVLTALPT

SEQ ID NO: 342741 - protein, 340 aa, unidentified
MSEYDGHQYVGIDLHRRRSVIVRQTDDGVQLSAVRILNDPVALGLQIEQAGRDPDVVLEATYGWYWAADVLQAAGARVHLAHPLGVKGFAYRRVKNDIRDAADLADLLRMGRLPEAWIASPQVRELRELVRYRAKLVALRSGLKAQVHAVLAKAGVLIPASDLFGIDGRAQLEQTALAGPYAQRVALLLKLIDELDAEEALFNGRIAERLRDHAGYRAIQQLPGIGTTLAAVLVAEIGDVHRFASADRLCSWAGLTPRHYESDTVVRRGHVTKQGSKLVRWAVVEAIQRKTTPKITEDRARIEARRGRNIAKIAAARKLLTLVYYGLRDGQIRALARQAA

SEQ ID NO: 342742 - protein, 367 aa, unidentified
MKKVSTAAVKQIRNFSQQKLTIGLDLGDRSSWYCLLDEAGSVRLEQRVSTTAKAMREVFGRIPRSRIALETGVHSPWVSRLLSELGHEVIVAHARNVRLIGESRRKDDRLDAQTLARLARIDPQLLCPVRHRSAKAQADLTVIRARAGLVRARTALVNTARGLAKSYGERLRGCNVRNMNPEKAEGLSPELQTALQPLLAGIEMLSEQIREYNERIERLAQQSYPQVALLKQVKGVGTLIALTFLLTLEDGHRFRKSRDVGCYLGLQPGRRNSGQSEPQMHISKEGDPYLRTLLVQGAQHILGPFGANSDLRRWGLKLAERGGRNGKKRAIIAVARKLAVLLHRLWVSGEVYDPLRNSNQRALSAAA

SEQ ID NO: 342743 - protein, 358 aa, unidentified
MDYGAIDLHKKDSQIRIVTEGGEVLDRRIATTHDRLTAVFEGRRRMRILLEASTESEWVAQHLETLGHEVIVADPTFAPMYSERSRRVKTDRRDVAALADACHRGCYRAAHRRSAAQRTVQAHLNVRRELTDSRTRAISLARAITRGAGLRIRSGSTGSFLVRVAALDVPSAIAATLAPLQRVIAVLNDELVTADDRFASIAAQDPVVARLTTVPGIGPITATAYVAALDDAARFGRAAQVASYLGLVPREYSSGEQQRRGRVLRSAHPYVQSLLVQAGWRVWLSKDPRTAGLRRWAQGIAHRRGKTIAVVALARRLARILFAIWRDGVPYDAVRTQPTRAHGGAAIRETAAPSAGPS

SEQ ID NO: 342744 - protein, 349 aa, unidentified
MDTIGLDLHKRESQLCILADDGTIAERRIATARERFTAVLGGRPPARVLLEASTESEWVARHLEALGHTVIVADPTYAPMYATRSRRVKTDKRDARTLAEACRLGAYRPAHRLSDAQRHVRAELAVRDALVRTRTRYVAVLKALVRRDGLRLAQGTPEHTATKFAVLDASGAVSDALRAEVAPLLAVLAPLNAQIAAADRRIVALAAADPRVQRLVTAPGVGPITATAFVATLDDVGRFRHAHQVMSYLGLVPSERSSGERQHRGRITKAGSPRVRWLLVEAAWRILRSRQPEAAPLKAWAARVALRRGTRVAVVALARRLAGVLYVLWRDEVDYCTARVRTKEVVVTA

SEQ ID NO: 342745 - protein, 483 aa, unidentified
MAKRKMSTFERLRSGQMNRKQRKQWQLRLNAADPGLAVVHADAAGIDVGNASHFVAVPPDRDEQPIQEFGSCTADLRRMAKWLKGCGIRTVAMQSTGVYWVAVQEVLEQEGLEVYLVNARGTKNLPGRKSDVQECQWLMKLHTYGLLRNSFHPPEEIRAVRTIWRQRDRLVKEAGRAVQQMQKALTTMNVQLANAISDVSGVTGMAIIRAILRGERDPQKLAELRDERIQATEAEIAHSLEGNWREDVLFELRQVVEAYDFHQKQMRACDEQLKKYMKVLPERALPGAEEAEAAKATSGKPRKRRKSKPRRKNQPGFDLAAELQRTMGVDMTAIDGIDVMTIQTVLSELGPDLGQYFPSEDHFASWLELAPRRDVSGGKVIRQRPRKSNNRVANALRMAAESLSRSDSYLGARYRNLRARLGGQKAVKAMARYLACLVYRLLTKGQAYVDRGAAYFEHKRTERDMAILKRKAVELGMQLVPAT

SEQ ID NO: 342746 - protein, 320 aa, unidentified
MSQNTSAIMHDQKTSVYTGLDIAKASLQLHLQSKSYDLPNTAEGHAQLTKRLAAIPSVRVICEATGGYERAVVAALHAAAIPVSVINPARVRQFARASGELAKTDPIDAAILTAFGQAFAPEPTPPRTPTEIKMAALVARRVQLLELRIAEAQRADTCADADLRKLFTSWLAQFKKQIAKVEALIDALLKEQAPLAHQVQRLDEIMGVGRLTAVMVLSTMPELGQLNRRQAAALAGLCPYNRDSGQWAGKRCISGGRAEVRRALYMAALSASRSNHVLKPFYDRLLAAGKPAKVALTAVMRKLIVLMNHVLKNPNFSLAH

SEQ ID NO: 342747 - protein, 397 aa, unidentified
MIAVGIDVSKSKSTVAILNGDGSIRAKPFDVHHVADELQALVDYIKRTSEPPTILMEPTSHYHYPLLKAFQKAGLPVCLINPYQMKKYGDTALRKAKTDKRDALRIAQYALEKSYSLVPYTPQDQKYEDLRFLSRQYSQRISTLTVAKVQLLSLLDETMPGITTILPLISRDPDNCVLLRFIKRFKSFDIIRKMGKTRFLDSYQVLVKKTKDRFAGSKGLAIYELVLNSITTRGENPLTAMTQDQCADLVSTSQKAADEINLQMRIIAETIPEYKVLRSMAGVGDRLGPIILGEIGDIRRFHSGKALNAYAGNDAPPYQSGQFESRNRHISKRGNPALRKACFEVMQALKLTKPQDDPVYLFLLKKEQEGKPYNVAKMAAVNKFLRIYYARAMELYK

SEQ ID NO: 342748 - protein, 342 aa, unidentified
METAVTIGLDLGKSVFQVHGVSAAGTVVVQRRLTRSKVLTFFAKQAPCLVGMEACAAAHHWGRELSKLGHRVRLMPPRYVKPYVKRQKNDAADAEAICEAVTRPTMRFVEIKTCEQQGTLVLHRVRLMLTRQRTQLSNAIRGHMAEYGLVAPVGRNGLQRLIAILGNPDDERVPAVARASLAPLVSQFGLLNDQVLDNDRRVRASARSTALGCRLMEVPGVGPVLASAMVATVPDPTAFKSGRDLAAWIGLVPRQNSSGGKEKLGAITKQGDRYLRQLLVAGTLAVIRYAQRHGTKRPWLVHLLARRSPKIAAIALANKMARMIWAMMMTGERYREPRVAAA

SEQ ID NO: 342749 - protein, 407 aa, unidentified
MLFVGDDWAEEHHDVHLMDDAGAVLARRRLPEGVAGIALLHELIADHAETPGEVVIGIETDRGLWVQALVAAGYALYAINPLAVARYRDRHNVAGAKSDAGDAKVLADLVRTDRHNHRRIAGDSADAEGVKVLARGHQSLIWSRNRQTNAPRSALREYYPAALVAFDDLAHRDCLAVLAKAPSPVDGARLSIGQITAALKRGGRQRNLARRAEEIHTAVRGEQLEAPTAIVDAYASTTKAAVAIIAELNRQIEQIEASLADRFNQHPDADIYRSLPGLGVVLGARALGEFGDDPDRYANAKSRKNYAGTSPITIASGKKHAVLARHVRNRRLYDAIDQWAFCTLTHSPGCRSYNDELRKAGDLHHQALRALGNRLVGILHGCLKHRAHYDEHTAWAHRTPTENQQAA

SEQ ID NO: 342750 - protein, 316 aa, unidentified
MTKAERFVGIDVAQATLEIAVRPTGESWQVANDEVAFGALVDRLHELAPTLIVLEATGGIQLPVVGALAAAGLPVVAMNPRQVRDFAKATGKLAKTDRIDAQVLAHFADAVRPEVRPLPDAATQELAILVARRRQLLEMRVAEQNRSRGVPPRIRAQIREHIIWLNRGLADLDRELGQLVRSSPVWRERVDLLRSTPGVGPVLSATMLADLPELGTLSHKQIAALVGLAPLNQDSGKKRGKRVVWGGRASVRGALYMATLVATRRNPVISAFYQRLLGTHKPKKLALTACMHKLLTILNAMVRRQTRWAPPLALVA

SEQ ID NO: 342751 - protein, 424 aa, unidentified
MKVTYQTCCGVDVHKSFLVATIVKTTGGIEPSYQKKRFSTFNNSILEFKQWLINNNCHDVCMESTGKYWIPVFNLLEDQINVTIANPKWVKAVKGNKDDTKDSKWIGDLFRLGLVKGSYIPCKAIRILREYTRYRYKLVSCRSSEKNRYQNALTVCNVALDSVVSDIFGKSSTSIIDYLLEQSGTSINHEEIASKLLRSLKSKEDAVIESVEGYQMTDAQKYRMRLVRAHMDYITAEINDVDKMIENMISSNPDFENAVQFLCTIPGVKRDSAITIISEIGTDMSQFSSSKRLCCWAGLTPDSNESAGKKKSVRITRAGVYLKPALVQCAHAAVKSDKSPYYKKKYEALVKRRGKKRAIIAIARMILTAIYQMLSTGEQWNPSDLYKIDMPVALVEKQKAKAIKQAKKLLQREGLLPPDEPLAS

SEQ ID NO: 342752 - protein, 388 aa, unidentified
MRASSMSGRELLTHHNKTMQTIHRSQMLFVGVDVHKDTHTAVGLTPFGEKVFEMTIGNEAADFISLVEKTKVEAEKSGLVPSFGLEDVHSWGERLSSFLVEVGMPVRAVAPILVDHRRQKATHPEKNDSLDAQGVAEVMIQRTDTLPTYTLSEEAQKAKQIRELSLEREWLVKERSRLKNQLHILLHRIHNTGYRMKFKDPFSKKALRYWMRSAPKDIDVILEQRMKRAVRRLLDLGEEIQEIEEELDALMKDNGQTLSTASGCGTVIAAEIVGEIGDIARFHSPGALAKYAGCAPREHSSGKTVRWRKTRSGNRRLNRAFHRMALSQISRSGNDAARAYFKRKISEGKTKAQALVCLRRQLVNVVCMMLKHKTEYRYPQEKVVDFSS

SEQ ID NO: 342753 - protein, 373 aa, unidentified
MGEIFNKHFTIPNSMEGYKKLLSEINLAKEFFNDSQVRIGLESTGHYSRNILHFLILKGYSVTLINPLLTNMDRKASSVRKTKTDSIDAKAICMFLLRNQNDFKPYTLLSYHIDELKILVRQRKSLKKQLNRTMNQLHAFIDQAFPEYYKVFKKINSISSLKLLAHYASISEFKRVRVNTLAQLVKKASKGHHGLNKAQLIKSFIKDSIGIDSCALSLSIKHSVNMIEEINYQINQINISIKDHIDNSNTTLLSIPGIGYQTGAIILAEIGDIHRFKSDDELLAYAGLDPSVYQSGNYNGSFKISKRGSSILRWAIFQAAKIAVIHDPVFNDYYLKKLSEGKHYLTVIGHVTKKLLRVVRSILKNNSVYSISH

SEQ ID NO: 342754 - protein, 387 aa, unidentified
MQASTVDTPTAGQFGTIFVATELSQKSWLVTLHSPDRERMSRHQLEGGDHVELLALISRVRERAARALGGVPAVASCYEAGYDGFWLHRLLLAAGITNYVFDPASIAVDQRARRVKTDRIDGEKMLRTLMAYLRGEPRVVRIVRVPAPEQEDARRASRDRGRLVKEQTAHTTRIKALLRLLGMAVGNPRRRDWLSWLAAQRDWQGQAVPPRMLTEIKYEHARLMLVREQLEALAQASAQADPAPAAAQMAERSELLLRLKCLGPAFATTLASEVFYKDFRNRREVASYFGLTPSPWQSGGIDRDQGISKAGNPRARCAAIELSWLWLRHQPESALTRWYRSRTHNNASKRNKRIAIVALARKLMVALWRYLTTGLLPEGALLKAVKA

SEQ ID NO: 342755 - protein, 453 aa, unidentified
MKVLYRCCAGLDIHRDSVSACIRRRGRGQAEATIEEQVFGTFTQELERLRSWLKKYKVRQVAMESTGVYWMPVWNVLERGFTLMLVNPATVRALQGQKTDRIDARRIAEYLQYGLLRGSFIPPRPIRQLRELTRMRVHIQQDRNRVVNRIARLLETVNIKLASVASNIVGKSGMAMLRLLASGVGDPGQLADQALGHLRPKIPELILALDGKPDDHFRWLLVELLNKLDWLAEELRRLDAQIAASSGPYADVLHRLATIPGVDRTTALILVAEFGVDMTCFPTAGHLASWAGLCPGNAESAGKRFSGRTRKGDRYIRRILVQSAWAASHTKDCFLATLFFRLAHRRGLKKAAVAVAHRIAVIAWCILAEQGVEYHERGGDHFDRRHPERTARKLTKRLDNLGFQVTLVRKKYAAERPPKPTVDPLECPRCARWGLPRCIHLLKRKHKPIPPPQ

SEQ ID NO: 342756 - protein, 350 aa, unidentified
MIIIGADYHPGFQQIAFVDTETGELQERRLEHSEEAEKFYRDLGAQGACVRIGMEASGHARWFERLLSELKFELWIGDAAEIATKRVRKQKTDRQDAELILQLLMENRFPQIWVPSWENRDLRQLLWHRHRMVQARTRIMNQLQAMALNEGLLCKKRLWREAGRKQLESFPLAPWASRRRQDLLELLDRLTPTIAELTQAIEREVDKCPEARRLQTHPGVGPLTALAFVLIIGKADRFQCGKQIASYLGLVPLEDSSGKRRRLGHITKQGNSLLRFLLVEAAQVTVRSDPEWRSKYFHLALRRGRKIAKVAMARRLAVRMYWMWRKGWDYEQLKKFGSHAGQPGTGDGVR

SEQ ID NO: 342757 - protein, 345 aa, unidentified
MTEAYDGRQVVGMDLHRRRSVLVRMTEDGRKLETVRIENSPAALRAVIARAGNNPRVVVEATYGWYWAVDVLEAAGAEVHLAHPLGVKAFSYRRVKNDERDCADLADLLRLGRLPEAWIAPVEVRALREVTRYRHKLVQQRTSCKDQVHAVLAKSGIPVTRSDIFGRGGGIWLDGLPLPQPYAGKIASLRALIAVLDGEIARLEEQAAAMLAGDRGYAAIRQLPGIGPVLGAVIAAEIGDITRFRNPGQLASWAGLTPRHYESDTRVIRGRVSKQGSRMLRWALVEAIQRQPAGTRPRQVKDAIIARRGPDVRGIAKTAAARVMLTQVFYGMRDGYIRRATSQAA

SEQ ID NO: 342758 - protein, 411 aa, unidentified
MKIVNPLFVGIDVSSKNNVAYLMKPDGSKHSSFSVQNNLGGAKLLSERIVSALGSMQLERVVIGLEATSIYGDSLVYALREDGRLGRFQRKIHVLNPKQVRKFKEAYSDLPKNDWVDAFVIADHLRFGRINREVYMDDYRYKALQTLTRARFDVIQNLTREKQRFANYLFLKCSGMAQDKDIQNTSATTIALMEHFETVDDLANADLEELTAFITETGRGKFADPDATAKAVRAAAKGSYRLPKTVNDTVNQAMAVSIASMRALKGQVKVLDKAIEQQFEIIPNTLTSIPGIGKVYSAGIIAEIGDIHRFDSQASVAKYAGLVWNRSQSGDFEAEHSRMIKSGNRYLRYYLLEAANSVRRCDSEFRRYYDLKFKEVNKYQHKRALALTARKLVRLVFRLLKDNRLYIPPEG

SEQ ID NO: 342759 - protein, 368 aa, unidentified
MNKSSKYVGLDVHQETIAVAVAQASGEVRYVGEIVNTPEAVKKLVTQLKRDGSRLSFCYEAGPGGYVLYRQLNELKQDCQVVAPSLIPRKPGERVKTDRRDSLSLARLHRAGELTAVWIPGEAQEALRDLTRAREDMKHLQRQAKQRLLSFLSRHGHRYSGKCRWTQAHWRWLEGVKFAQPVQQIVLQEYMDTVMACSQRVASLEQEIERAVQDCPVWTVIEALMALRGISLIAAVTVVAELGDLRRFSDAPQLMAYLGLVPSEHSSGKRERRGGITKTGNSHVRRVLVEAAWTYRHPARKTAILQRRAERTTEQVQEIAWSAQKRLCQRFRHLTARGKLPVQVCTAIARELTGFIWAIGQQAEIGGT

SEQ ID NO: 342760 - protein, 375 aa, unidentified
MKEKLRFLGLDVHAETIAVAIAESDGEVRSLGTIPNRLESIRKLIKKLGPAEKLRACYEAGPTGYVVYWQLAELGVKCDVVAPTLVPVKAGDRVKTDRRDAEKLARSHRSGDLTAVWVPDEGSEALRDLVRTREAAKQDQLRARHRLSKFLLRSGQRPPTGIRPWTRPYLIWVAQLRFTQMAQEATRLDYLHEVEHMRERVERLERAITEAVKLASPALQQVINDLQALRGIADISAVTIAAELGQVSRFDGARQLMGYCGAVPSEDSSGKRTRRGSITKTGNAHLRRIVVEAAWSYHRPPCIWYGLRKRQESISEEVKEIAWKAQHRLHKRYMRLAAAGKDKRKITTAVARELLGFIWSIGTRAETTVRQRIAA

SEQ ID NO: 342761 - protein, 381 aa, unidentified
MEKACGLDVHKDSVFACILDEQGEKKFEKRFGTLTPELTTLRDTLISHGCGRVAMESTSIYWMPVWHVLESDFELTLANPYFIRQLPGRKTDAKDAAWIGECLQKNQIKGSFVAGDLLQRMRQYTRQCHRLTKNRARLEQQMDNQLQRCNIRFSNYISNQGNNVSQRKIIRAIIKGERDPSALCSLVHGRTLNRHGRDVILHSLDGIIGQADVEMLRQCMEQLDLLENQQATCLTHLEELANIHFAEEISLLCSIPGIKLFSALCILAEIGNDMSQFQKATHLIGWAGLKPRNDETAGKIRSRKTLHGNKYLRQMLVECSWSVTRSNKTFLGRKYRYLSKRMKSQKALLAITRKLLVIIYNVLKTRRPFDPEKNIQALLPD

SEQ ID NO: 342762 - protein, 358 aa, unidentified
MTAYPAETHVIGGVDTHKDLHVAAVVDHRDRVLGTESFPTTRHGYRLMLAWMRSFGDLRRVGVECSGSYGAGLLRYLQAAGVEVLEVTAPDKLDRRRRGKNDDYDAESAAHAAFAERHTVTPRSRDGMVESLRVLRVCRKTAVQARRIALQMIQMTIVCAPDKIREPLRSMTRMQLIRTLAAWRPDLTAYRQVEEAYRISLKSLARRYLELHDEVADLDDMIEAIVKDLAPELLAQTAIGLNSAAQLLLTAGDNPDRLRSEASFAALCGVSPVPASSGKTVRHRLNRGGDRAANSAIHIIAIGRLRLDPRSQDYVAKLIAAGHSKLEAIRCLKRYIAREVFGLIMRRHREINRSQIAA

SEQ ID NO: 342763 - protein, 334 aa, unidentified
MKQVSQVGVDVDSEELVCMMKRAGQPVPLATFANSAAGHKKFIRWTTKGGRSARVCLEATGIYSLEFALALHHAKNVEVMVVNPRAIKDFTRACMQRAKTDAVDAGGILEYLERMPFVAWQPPAPEVLQLQAINRRIVQLNTELTREKNRRHAAEFAGASAEAIAHDIEVNIHHLERRIERMHDSGLQLVRRVPALATKLAHLVSTKGIGENSAMRLLAELLVLPDDLAAPQWVAHAGLDPRPYESGTSVHRPRRISKVGNRHLRAALYMPALVAIQHEPNVKAFYNKLLTEGKKPMQAVVAVMRKLLHAIWGMLKHDQDFDGNKFFKLTEKIA

SEQ ID NO: 342764 - protein, 343 aa, unidentified
MIHYAGIDVSLKSSSVAVVDARGKIVREAKVESDPAPLIEWFGACGLEMERIGLEAGPLSQWLYKTMKEAGLAVDLLETRHVRNAFKTMAVKTDRKDARGIAELVRVGWYRPVHCKSMNAQETRTMLATRKLIDQKLRDIEMSLRGLLRGYGLKVGKTTPTRFADRIKELVGANATLQIVAESLLAVHKVLLREFKNLEKRVRLMARDSAEARLLMTTTGVGPIIALTVASGIDDPGRFKNSKAVGAYFGLTQKKYQSGETDITGRISKAGDAGVRTAFYQAAHIMLTKPVKSSALKTWALRLAKRVGMSKAKVALARKLAVVTHRMLVEGKPFNPAAGAAAA

SEQ ID NO: 342765 - protein, 399 aa, unidentified
MYKTNYGGDTMYLIGIDISKYKHDCFIATETGEIIKDVFTFTNNQQGFTEFLDVLQDLDLNQTKRIGLEATGHYGRNLKVFLDKHGYTYMEFNPFLVKKFSSGLTLRKTKTDKVDSRLLSLILLSVEYKVYPVKSYHIEEIKSLTRYYKTLVKKRSKEITNLTNILDYIFPEFKPFFNNKFSKTALFIIENYQTPEKISNMNSKSHEKLNGISRGKFSYARFIKLKILATETIGSSSVVLNTLLQSSLRVYKSIDQEISITFDNLLELSKTINSPVLTIRGVGPISALSIISEYKNFTSFNSPAAMLSYAGLEPSVIQSGTIERPGKMVKRGSGYLRETIMNVAPFFYMYNPKIYDYYHKKRNEGKSHRVALTHVAKKLIRIIFHLVKNNESFDEDKLK

SEQ ID NO: 342766 - protein, 361 aa, unidentified
MVIIGVDAHKATHTMVAVDGVGAKLGQRTVPARTEGHREALRWAHSAFGSEITWAVEDVRPVTRLLEQELVDAGQTVVRVPTWLMARVRGKGRQSPGKSDPIDALAVARSVLQEFELPTAHHDEVSRECKLLGSHRDRLVSQRNGAISRLFWYMHELNPDYDLVARRLYTRRNRDALHAWLLLQHGPVARLALDELSEVGRLTDAARHLEIDLADIAEKAAPSLLTLPGCGPVLAARIVGIAANVTRFRDESAFARFAGVGPKPNWSGSSYGRMRPYIGGNRQLNAALHHIAMVQIRDGHAGDRYFRKRIDEGDSAAKARRSLKRRLARAVFTRLRTDYLARNPSEKVRSQPPHKGQRSGP

SEQ ID NO: 342767 - protein, 337 aa, unidentified
MEYFAGLDVSMAETQICVMGRNGAVIHKAKVPSTPADIAAELAQLPTCRRIVFETGRMAPMLYHGLRQLGLPVICVESRQAYQALKLLATHKTDHNDARGLAHLARTGFFKPVHVKSLPAHAVRSLIIARKKLVGQRVTLENQIRGLAVVFGVRLPRALSSTFIRQALQASEGIPGLSAAMQGLVAARTAVLAAIVAIDGDIRRMVRASDACRRLMSIPGVGQLTAVAFTAAVDDPKRFRRSRDIGAYLGLVPRRHQSGEIDYTGSISKCGDRRVRTLLYEAANVMLTRYKGALKLKEWAFAVAKRSTMRKARIALARRLAIIMHAMLRHGTEFKAA

SEQ ID NO: 342768 - protein, 375 aa, unidentified
MAEATMPKNSMLLKPVRSVVEVTGGVDTHGDTHAVAALDQVGGLLGTVIVPATGAGYRQALDWLSGFGPVGRVGVEGTGSYGAGLTRVLLDAGVGVVEVNRPNRAVRRGRGKSDPIDAEQAARAVLAGTATAPPKSRDGVVESIRLIHGVRRGAVKAKTAAINEFHAVLVTAPDRLRAALAGRSWVEQLATAAGYRPGEVSDSGQAVKCVLRRLARRIEALQAEIDEADVELAGLTAQAAPTLLAERGVGADSAAQLLITAGDNPERLGSEASFAALCGVSPIPASSGKTSRHRLSRGGDRQANRALHTIAMSRMRWDQRTRDFIAGIQARGKSKRDAIRILKRYLARRIYRILTTSRADSGVAPSTLTPSLPIG

SEQ ID NO: 342769 - protein, 358 aa, unidentified
MKKKTYRLQDYVARSKEIFVGLEDSKKTWKLAVRSEKMLIHQVSMEARYPVLIGYLRSKFPECVIHLMYEAGFKGFNLYDQLIGDGIDCVVIPPHVVTEPKVNRIKTDKRDARRLAKVLENHDFKDSCYVPDKERREDRQVSRTLIALQKDVIRTRNRIRKFLQFHGIEVDFPDRWGRNEFRALKKVEMSEPLRISLDIFLTQLEELWAHQVALRAALKKLCKKERYHKAYTIARSLPGIGWFTAIRLVLELGEDLSRFGSGKKIASFVGLTPSENSSGETERRGRITGMGPGFIRAILIENSWIAIRKDPVLLAKFNRVWHASGNRKKGIVAVARMLIVRLRTCVMSGTPYRVGIAA

SEQ ID NO: 342770 - protein, 339 aa, unidentified
MMYGAIDLHLRYSEIRVVEADGRVVRERRVVTSRATLTAAFAGLGVLRVLLETGTESEWVAQTLEAAGHAVVVADPNYAPMYGEVRRRVKTDRRDVAALAEANRRGWYRATHRRSRAQRTLQQILRSRRQLVAMRTGSISVVRALLRQEGYRLPSGSAAQVPARLARVPLPDELAATLAPLRQVIDTVTRELAAIDTRVRTTAAADPVVTRLQTVPGVGPVVALTFRATLDEVTRFQAAGQVSAFLGLVPREDSSAERRHRGHITKAGSGELRSLLIQAAWACWKSRGSGTLRAWAERLAGRRGRRIAVVALARRLSRILYAVWRDGTTFDGARVAAGA

SEQ ID NO: 342771 - protein, 331 aa, unidentified
MINKTAPFAGIDVGAEELVLVVRKNATSMKAQKFANTPAERARLVAKLLKLPGVSVCLEATGAYHLDLAVALHDAGVRLNVLNPKAAHNFAKALMKHSKTDAIDADTLAQYAERMPFTAWVRPTPQAFTLRSFARRINALTRQKAMTKNHLHALCFGPDLPQAVLDDAKLAIGQLEKRIACLSSKAQAFISKHEDLKRIFTLLLGIKGIAQISAIALMGELLLLPKGLTHKQWVRYAGLDPRVFDSGKSVHKAPRLSKAGNRQIRQALYMPALSAKQHDPYVKAFFQHLIEKGKKPLQALCAVMRKLLHAIHGMLRDNRAFNNTRFYATAA

SEQ ID NO: 342772 - protein, 317 aa, unidentified
MSFVGIDVSKTQLDIAERPGNKRWSAVNAEADIGKVVERVGALSPQVIVIEATGGMEVPLVAALSQARLPVVVVNPRQVRDFAKAVGRLAKTDRIDAEILAHFGEAVKPAVRALKDEDTQTLTALVMRRRQVIEMLTAEKNRLGISPKVVHKDIQQHIAWLQARLEDIDRHLESAIRKSPVWREKDDLLRSVPGVGQVLSVSLITGLPELGTLSRRQIAALVGVAPLSCDSGLFRGKRTVWGGRSHLRSVLYMATLSASRFNQAISRFYRRLVEAGKKPKVALIACMRKLLVILNAIMKNRIPWQADYSTCPTPQIP

SEQ ID NO: 342773 - protein, 343 aa, unidentified
MQLVTTIGLDIAKSVFQVHGVDAAGQVVIRRQLKRRYVLMFFQKLPPCLVGIEACASAHHWSRELKALGHRTRLIPPAYVKPYVKRHKNDAADAEAICEAVSRPNMRFVATKTPEQQGCLTLHRTRHLFIRQLTSVINAIRAHLAEFGIVAPVGRNGIEELLYVVSDASDRRLPEVARACVAALGTQLRMLKAQILQFDRMIMAWHKSNEASRRLDDIPGIGPVLATALVASVADPKMFRSGRDFSAWIGLVPTQNSSGGKDRLGSISKRGDRYLRNLFTTGALAVIRYAKIHGTRRRPWLTALLARRPTKVAAIALANKIARMAWAIMAKDERYKVPAALAA

SEQ ID NO: 342774 - protein, 577 aa, unidentified
MSTSHCIGVGIDTSRYGHRVSFLRPDRKPAAPPLTVLENAAGYQALQQRLQQLQQQHPQVHFRIRIDAAGQYAANLEGFLRGLDLPISLSIGEPKRNKDYQKAHFAKRTTDDTESQAMARFAVVEEPDATLPVTPQMALLREVASRLQAQVKQTTQAVNRLHNLLARVFPELATLTDNLAARWVLQLLKLYPTAPRIAQARLASLEKIPFLPKDKAQPLQQAAQQSVGSLCGDVAEALVRNLVTQVCQSQQAVHKTRALLAAAFAELPASGHLQVVTIPGIGVTTAAILVAKIVDIDRFATPDHLVGYFGIFPEENRSGVDKFGKPLPPGTLTMSFKGNDLVRGYLWNAARVGLRFNPALRALYRRLKAKGKRGDVALGHCMRKLLHLVFAVWKTNHPFDEHHFPWEPTTDTEMSSTTAAESPVTQPARANEKAVGHKREAPAEQVVTTAGSNVDSRPAPVNAVSPPSARPRVDFPFLRQQITFEQVLRHLGLFDQLRGRGEQRRACCPLHSPATVRERTLSVHLGRNIFQCFHPQCGAHGNVLDFWAAIHNLPLYEAALHLAETFRLRRNREESNP

SEQ ID NO: 342775 - protein, 436 aa, unidentified
MSQKLDSKVAVIGIDIGKNSFHIVGQDRRGALVLRQKWSRGQVEARLANLPPCLIGMEACTGAHHLSRKLQALGHDARLMPAKYVRPYSKGEKNDYRDAEAIAEAVQRPTMKFVATKTADQLDLQALHRVRERLVSQRTGIINQIRAFLLERGIAVRQGLHLLRAELPSILGTRTDVLSPRMLRVIEDLAGDWRRLDERIEDLSGEIDALAHHDKGCERLMTVPGVGPIISSAIVAAIGTGDAFSKGRDFGAWLGLVPKQMSTGDRTILGSISRRGNRYLRKLFVQAAWVVLVKLGPEQWERYGLKSWIEAAKKRLHHNVLAIALANKLARIASPTLDETAGSSMNLGRTPTDLDDRVARAGGLSDIELMGVAIGSGQTLPRLLNPRRDQRYQGTRAATPVSRRLPHLAPSLTDRLPLVFFEARCRPTRRTGAKRH

SEQ ID NO: 342776 - protein, 418 aa, unidentified
MEPNRFRHYIGIDWATEAHRICLLDQDGRLCGKTSIPHSGGGLAQLGDWLAARGVVSALAAVGIETPRGAVVETLVERGFAVFAINPKQLDRFRDRYTTGGAKDDDRDAWCIASALHTDRAAFRPVSIDLPEIIALRELYRTHLELGVDSQRQTSRLREQLRRYYPQMLTLCPAGDQPFLWDMVELAPLPEVAHQITADQVAVILQRRRIRRLTAEQVLAKLRATPLTLAPGAPKAASEHALVLIEELRALQRLHSQTLQHLHRLLRQMRASHPDPQRPSDVEIIDSLPGAGTLTVAAVLTEASQAVADRRGDTLRTYAGLAPVTRQSGKYRAVGMRYACNQRLRDAFHHFTLASLRDPIARRHYAELRHQGHTPARALRGVGDRWVSVLIAMLRAGQRYDPTRRKAWRTTDAQEQTV

SEQ ID NO: 342777 - protein, 345 aa, unidentified
MEHIGIDVHKNSCQICILTEDGELIERRIKTDSSSLDALFKDRPCARILIESSTESEWVARCLEQLGHEVIVADPNFAQMYATRSKKVKTDKRDARTLCEACRLGAYRPAHRTSDKQRDVRAHLAVRETMVRTRAKYISLIGALARREGCRIKSGVSRSFATRVEQAGIPQHVLIQVEPLLIMLKSLNEQIKMADEKLAEIVKEDEVVKRLTSVPGVGPVTATTYAATLDGAARFQGARQVRSYLGLVPREHSSGEKQHRGRISKAGNCRARSLMVEAAWALLRCKTPKNQALHDWALRIAARRGKATAVVALARKMAGIMFAIWRDGTEFNPDHLTSNVVAAAT

SEQ ID NO: 342778 - protein, 403 aa, unidentified
MNNVAGIDVSKGKSMVSVLRPFGEVVAKPFSIGHTGSELKELADYLKSLDGETRVVMEHTGRYYEPVARFLHDEGVFVSAVNPKLIKDYGNNTLRKVKTDKADSRKIARYGIDNWAELRQHTPMDTIRMQLKTLNRQQSLYTKTKTMMKNNLIALLDQTYPGVNALFDSPVREDGSQKWVDFATAFWHVDCVRNMSLAAFAERYRKWCKRHGYNFSQSKAVEVHAGAQDLIAMLPRDALTKTMVRQAIDALNAVSASLGRLKAEMRTLAAQLPEYPVVMAMHGVGDSLGPQLMAELGDVTRFTHRNAITAFAGVDPGADQSGTHEAKSTRVSKSGPPELRRALFLVMDCLLKTQPQDDPVYRFMDKKRAEGKPYLVYMTAGANKFLRIYYGRVKEYLASLEGN

SEQ ID NO: 342779 - protein, 312 aa, unidentified
MAPTIFVGIDVSKDTLDIAVRPSALRWQLANDDAGIRDLVSRLAELSATLVVLEATGGYEHPAAAALAGAGAGVVIANPRQIRDFARATGQLAKTDAIDAGILALFAERVRPEPRALPDEARQMLEALVTRRRQVTEMLVAEKNRLGHARRPVRRGITAHIRWLERQLSDVDRDLDEAIRQSPLWRSQDDLLQSVPGGGPITSRTLLAQLPELGLLDRKEIAALVGVAPLARDSGTLRGRRTIWGGRATVRAVLYMATVAAARCNPLIRIFYQRLRAAGKPAKVALIACMRKLLTILNAMARTHTPWRPAHA

SEQ ID NO: 342780 - protein, 332 aa, unidentified
MPELLGSLYKAGSMKMTKSSMTTAGIDTAKSKLDIAIHKQSRRWQVKNDLSGWQALAETLTKAGVDRVGIEATGAYERGVVAHLRKAGFIVLVLQPAQVKAYARFRLRRAKSDAIDAALIAACAADLDKPLVGPDDRLTQLADLLTFIEQIEEDITRWKVRLEHIGEQRLRETVAEDIARLKARRIAELANIAAALHSHEDLGRRLDLVLSVQGIGKRTAIAIVVRMPELGQVSREEITALAGLAPFDNDSGKYKGQRHIAGGRDRVRRSLYAAALAAAFRWNPAIKDLYQRLTTRGKPHKLALVACARKLLIFANAVIQKQTPWQTNEPAT

SEQ ID NO: 342781 - protein, 352 aa, unidentified
MIIIGVDFHPEFQQIASVDTDTGEFQEKRLGHREDAEAFYRALAGQKVRVGMEASGHARWFERLVAELQFELWIGDAAEIRTKRVRKQKTDRQDAQLILRLLLEDRFPQIWVPSWENRDLRQLLWHRHRKVQARTRIMNQLQAVALNEGLRCKKRLWREHGRQQLESFRLAPWASRRRRDLLELLDRLNPTIAELSQAIEQEVEKCPEAERLSTHPGVGALTALAFVLIIGRTERFHCGKQVASYLGLVPLEESSGNRRRLGHITKQGSSMLRFLLVEAAQVTVRSVPEWRSKYLHLMMRRGRKTAKVAMARKLAVRLYGMWRKGWDYEQVKKFGSHAGQPGNRDGVPSNTE

SEQ ID NO: 342782 - protein, 437 aa, unidentified
MITQTVIHPDAAGIDLASEVHYVAVPADRDPQPVRNFGPTTEHLNVMADWLQKCGIRTVAMEATGVYWIPLFELLEARGLEVCLVNAQHVRHVPGRKSDVQDCQWLQFLHSVGLLHASFRPALEVCAVRTLLRHRDSLVQGASAHLLRLQKALDQMNVLLHRAVTDITGTTGLAILDAIVAGERDPQNLAAHRDHRCKKSVAEIAAALKGDWKVEQLFTLRQSLAAWRFHHQLADECLQEVHRLAAKLESCTEEAPPPPTKRGRQPDAEVRTLLFQKFGVDVTAVDGVNTHVGYTFLTEVGPDLSRFASPENFASWLGLCPNNKVSGNHKLSVSTRPVSNRLATALRMAAQSLNRVESSLGDWFRRMRAKLGPAGAVTAAAHKLARILYTMIKTGTAFDPSKLGNPALIRQRKERSLRKQAALLGFSLQPAKAGAVS

SEQ ID NO: 342783 - protein, 315 aa, unidentified
MLHVGLDLSRRRLDFDVLCEDGSRLERGAVPPDADGLRGLARRVDVFGEPVCAAIESMNGARFVHDRLEELGWQVEIADAQKAKGLAPLACKTDRIDAWVLAELSRRELVPSIWLPDPAVRAERERARFRLHLVRHRTALKNRIHATLLAFGKPCPVSDLFGVAGRELLDRLEVPQPWRGTIDASLELIEDLDGQVRSCERELRDLGADHEYVPLLMSAPGIAWVLGYTIAAEVGDIKRFDSPSKLCGYTGLCPRVHRSGERDHRGSLAKTGPKYLRWGTCSPATNPSLRQAPRLLWPHGGPCPRCAADASSDQT

SEQ ID NO: 342784 - protein, 341 aa, unidentified
MQVTTIGLDLAKHVFQIHGIDAAEKVVVRKQLRRGQVMKFFEGLSRCLIGMEACATAHYWARELTKLGHEVRLMPAKDVKAYVKRNKNDAADAEAICEAVRRPTIRFVQVKSAEQQGRLMQHRTRDLLMRQRTQVINALRAHMAELGIVAAQGREGTKALLAIIADDGDERLPVDARASLIVLAAQLQALQTLVGSIEKRIIAQHRASEASKRLATIPGIGVLGAGAITATATDPNAFRSGRDFAAWVGLVPRQDSTGGKQKLGPISKQGDRYLRRILVVGAHAVLRRARQHPEKYPWLTQLLARRPFKVVAVALANKMARIAWALLAKGGSYRVPRLAAA

SEQ ID NO: 342785 - protein, 341 aa, unidentified
MSSLVCGLDVHKDSVYATVMSYGGEVVERRKLLDKDEVVSFLGRYPIDKVAMESSTSIVPVYRALRGKGYNVLVSHPKKTRLIAESRIKTDRVDSWALTELARLDALPLSYVPPDDIAALREKVRRRAFMVRMRSKLKVKIKAHLTINGLTPPSEYGLFTRKGLEWLHGLQSDAVESYLPVLSTLTLQIERLSKELRRMAPEDEDVRLLMTIPGVGYYSALLVKSEIGTIDRFPDGEKLCSYAGLVPSVSSSGAHKRYGSITKEGSRWLRWIMVESVRIHLKYDTGITRAYHAIAERKGSGIAKVAAARRLLMCCYAVLRNHEPYHDPAGHYQPSRSGRGE

SEQ ID NO: 342786 - protein, 355 aa, unidentified
MNDAKYIGLDVHQATISVAVLDSAGKLVMEAIVETKAETILQCIDGLRGSLHVTLEEGTWAAWLHDLLKPHVSRVLVSDPRKNDLGRDGNRNDRRDARELAELLYRNKVKAVYHGEHGLRTLKELARSYLTITRDLTRVMTRIKAIYRSWAIPCAGPQVYALGHRAEWLAKLSEPGVRRRAEFYYQQLDALAPLRQQARCELLAESRKHSAVKLLRQIPSIGPIRAALLVALLQTPFRFRTKRQLWAYIGLALKTHTSGEYRFERGHLQRSRNAPAIRGLNRNHNHDLKNIFKGAATWAASNSGPFKNFYEARVARGMKPHMARLTLARKIAAITLLIWKKAVRFDPEHLKPQAA

SEQ ID NO: 342787 - protein, 348 aa, unidentified
MRTDQAYTGTEERVLAVSLELATAKWKVALHDGQREQPAIHTVAQPQAATRLQAVLDLIEYQKRKWSLPAGVRLAVSYEAGQDAFWIYRALQARGIDCYVVDPASIPVERHQRRAKTDRLDAIKLVINLRAWLRGERDRMHVVHVPSSQDEASRQMMRDRGALQKEVLQHRDRMRKLLATLGCWDDVDSKAFANRLARDEVLCHDGEPLPPELRERLLRECERLALAEKQLAVLEKTRQAILPAPARKRIDALARLKGIGEVGASRLALELFWREFSNRCQVGACVGLVPQPYDSGESQVDQGISKQGNRRVRALLVEMAWCWLRYQPDSALTQWFIRLARQYVADTV

SEQ ID NO: 342788 - protein, 396 aa, unidentified
MLTIGIDIGGKQHVVARCRGSQTRADREILRVRQDRAGFDALDAWLARQPEAVDLVTMESSGHYWMALASHLGRQGIPIAVVNPLAAKYFAKSRLGRTKSDPADARSLALMAMRDQPAARDPLAGVELRQAARFAMTLVTEQARVCQRLIRLVELGFPELGGLFDDPTCRTAREVLRVAPTASEARRRRVGTLADANKGPGHRRLGPARAERLKAAAAHSIAVPELDDEVAFEIGLLLDQYDLLEAQIAQADAHVAALLDGELARRLRTIPGVGPSTCAALIAEIGDIERFDDVDQLLAYAGVHPAERSSGRKGSSPETSWHMSKAGNAHLRAAAYRLAVVGIQHNPVIAAHYARKRAAGKTKMNAIGHCMAKALSLVWGVWRNGIDFDPNWQKGA

SEQ ID NO: 342789 - protein, 339 aa, unidentified
MREVSTIGLDLAKKVFQVHGVDAAGEPVVRRVLRRARVLAYFAQLPPCLIGMEACATAHYWARELGKLGHRVKLIPPAYAKAYVRRNKNDAADAAAICEAVSRPSMRFVEIKSEAQQAAAGIHKVRDMLMKQRTMLINALRGLMAEFGIVVGAGTRHVGELTAILVDPEEHRIPALLQDGLRRMAEMLRGLERQLEGIDKQIVNWGRGNATCRHLITAPGYGPILSSAMAAIVVNPAVFRSGRDFSASLGLVPRQDGTGGKVKLGPISKRGNGYLRRLLVNGAMSVLNSKRAKQDPWLVKLLASKERKVAAVALANKMARIGWALMTRQEDFRATSAAA

SEQ ID NO: 342790 - protein, 338 aa, unidentified
MKTTTIGLDLAKNVFQVHGVDEADRVLRKKLRRAEVLTFFGSLPPALVGIEACGGAHHWARELSKLGHDVRLMPPAYVKPYVKRGKTDALDAEAICEAVTRPTMRFVAPKSEEQQSSGVELKVRQLLQQRTRCVNALRGHLAEFGIVAAKGMGKVSELVAVVRDMEDNRLPLAAREALLDLARQIEAADDGIRRLETRLVRRSRTDERARRLATIPGVGAITAAALQATAVDPSAFRSARHFAAWLGLTPRANSSGGKERRGGISKQGNRMLRSLLVLGATAQLRYLRTAPERAEWASRLLARRPFKVVAVALANKMARIAWALLVRGGTYRMAASAS

SEQ ID NO: 342791 - protein, 399 aa, unidentified
MLNPQALQLRVGVDVGSQCHSVAVGLTDGSLLEEFEIPHTAAGFGDFFARVEEHATRHPYPIAVAMEGYNGHVRPLDSLVKARGWRLFNVNNLKLARFKEIFPAAAKSDRIDSAKTLELFQLRDHLPMAGDVLQEVMATPEENDVLKRLSRRRRRLVNERGRVINSLQADLQAVVPGLLQITRDVGNLWFLNFLTCRKGLLKLARVRRASLLKVPGIGATYADAIQAWQSRAYFAPDARLVGDMIQQDAVRILELKQQIKALEEQMARIAESSSIAGQLASIPGYGAICSAELAGEIGTVERFRGEASLALYLGMATLDNSSGKYRGSKAPKHVNARAKAAMMIAVDHHRKRVPQSQRYYEKKRAEGKRHNQAIRALARHLCRVIFKMLSQERPYWIDP

SEQ ID NO: 342792 - protein, 376 aa, unidentified
MTKIIRIGVDTSKSVFVLHGVDEAERPVLRKRLRRKQVLEFFAGVEPTKGGLEAGGAAQYWARELRALGHEVVLLPPQYVKPYVKRNKNDAADAEAICEAMSRPTMRFVAVKTAEQQAALMLVGTRDALVRRRTQLTNAIRGYAAEFGLIAARGLDKIEPLLARIAAHGSLPRLAQELFETHAREYARLKAEIRTIEAELTGWHKRNELSRRLAEVPGIGPIGATLAVMKVPNPEAFRCGRDLSAWIGLTPKDHSTAGKMRLGVITRAGDEALRSALVAGATAVIRHVKQGKGHPSPWLIELVRRKPAKLAAVALANKNARVAWKLMVSGERYNPTHSLAGPASGGRGTALRGAPRRAPRSHPHDKSRETTAMTLA

SEQ ID NO: 342793 - protein, 438 aa, unidentified
MIETIHPGYGAIDIGQEKIFVACGETVEVRSFHTFSADLEVAAAYLKERGVRRVAMEATGVYWIPLHDLLQAKGLEVTVFNGAHARNMPGRKSDVQDCQWHAMLHSHGLLVSCFIPTEEIRQLRCFYRLREDHLSIAGAHIQHMQRALDLMNIRLHVVISQLHGVSGLRVIRAILEGERDPEVLSALCDAQILKRKREQVIKSLQGQWQDHHLFALRQALEAYDFCLQQVRDCDKQIEALLQRINRDLPPQTPEAGRKIKVTRHNAPEIDNLHGQLLTMCGGRDATKLPGIGPLGFMKLLGETGTDLKKFPTEKHFSSWVGAAPGSNRSGKRAGRVRRKKTVVGQIFREAVLSIAKSKHLALGAAYRKLRARRGAAIAVTAIARKLAVLYYRLMTKGLDYVEEGIKRYEERHREHTMRFLKKTAQAYGFTLTPNPQIQ

SEQ ID NO: 342794 - protein, 416 aa, unidentified
MQEMEALYERVCGLDVHKKSVVACRRRLMSSGRVKKEVATFGTTTSQLLALLAWLQEWEVTHVAMESTGVYWKPVWNILEGHVELLLVNARHLKTVPGRKTDVKDCEWIAQLMQYGLLRGSFVPSPQVRQWRDLTRHRTKLTGQRTSVVNRIHKVLEDANVKLSSVISDILGVSGLRMLRAIVEGETDAVTLSRLGDPKLRASQEALQESLQGKLSEHHRFMLEGLLDQVTFLDGQISRLDARLEEQMRPFEEQIKRLDTIDGIDRVGAQSLLAELGPDMAQFPDADHLSSWAGMSPGNDESAGKRRSGKTTKGNKWLRRTLSQAAWASTKRKEGYLSAQYRRLASRRGKNRAIVAVGHTILVAAYYILKDEVEYHDLGGDHFDRLRRERTVSNLVSRLQRLGYNVALEAIEPEAA

SEQ ID NO: 342795 - protein, 340 aa, unidentified
MRKYIRIGVDIAKNSFQVHALESEDCSATKRKLSRSGIVKFLADVEPCAIGMEACGSAHYWARQFRAMGHEVKLTPPIYVKAYVKRGKNDAADAAAICEAMSRPNMRFVAVKSEDQQATLMAHKTRELLIKQRTMSVNALRGHLAEFGVIAAKGIGHVEELIERAAAADLPAMVQATLGVLLAQLRSLDAAIDELERAIAADHRRDPVSRLAASVPGVGALAASAILASAPDPQAFKSGRDFAAWLGATPKQNSTGGKEKFGSITKQGNRYIRRLLVLGAISVLRAAPKRKGALCDWLAALRARKPAKVVAVALANKLARIVWAIITTGEAFRTSIYAKA

SEQ ID NO: 342796 - protein, 403 aa, unidentified
MEGPLISLDVSKGKSKYRFFENGTDRKGKKGVIRHDIRGFDSIRDEAEKMEERLRIKPSVIFESTGVYSDVVEKYFTDKGFDVYVISPLLSASMRKEGVRPAKNDSLDTLSIAKVFYSRDDLRKCSENDKKAERLREMSYELDMMNRRIRPMKCQFLRLLDKVWPCLDEVSDYSSRFMLDFIIAFGHPENIKTVKGVLSVIRKSEMGTAGRKDKIAQDLFDYCHTHLSAVSKDSSYVELLKRMAIELKAMAKKKSELIDRMAEEARNKDEFVRLLTIPAVAKTTALKIMARVGDISRFRNAEALVAYCGLDPRVYQSGKMTGEHRTITKKGDCILRSTLFLAVKLMVMLYPDTKVARFVAAKAKNGLSYKQAVVAGSAKLARIIYSMLTHHENYVEFNADIVA

SEQ ID NO: 342797 - protein, 341 aa, unidentified
MNLRMIGLDLAKTVFQVHGTDGAGRVVVKKQLRRSQVLPFFANVPNCRVAMEACASAHYWARKLQALGHTVQLIPPQYVKPFGKRNKNDAADAEAICEAMGRPNMPSVPVKNVEQQAILSVHRARQGLVKARTAQANQIRGLLAEYGYVLPKGIAQISKRVPAIIENGENELPGCFRLLMQRLVEHLKELGRQVGELTLEIQRWHRENAASQKLSKIPGLGPISATALAASVGDARSFKNGRQLAAWLGIVPRQHSSGGKPTLLGISKRGDCYLRTLLIHGARAVIKAAEHRADADPWIKRLIARRNKNIATVALANKNARTIWALLARDREYEPSYRMTS

SEQ ID NO: 342798 - protein, 411 aa, unidentified
MEDYKVAGIDVHKRMLAVVITNAAAVGEFRFEQRKFGAAETDLEELKQWFTSQGVREVVMESTAQYWKPVWQSLEDDFELHLAQAQSNKGPKGRKRDFTDAQRLVRRYIAGELILSFVPDGEQRMWRTLTRTRKQLIRDRVQLQNQLEGYLEQIRIKLSGHVSDLLGLSGRRMLAALAEGEADAGRIADLAAKGLKATREDLVRALAAARSLSAMERNILRLYLERLELLERQIETLERATAEALREHEDAVCRLAEVPGLGAESAHQIIAEVGPKAASFSSAAQMASWVGCCPGREESAGISASDASPKGNRYVREVLVQAANAAVKAKGSVFEVLYRRLAARRGHFKALWAVAHRICRIAWKILREGVHYEERGVRTNPQAARKRANRLVLTLRRLGYKVEITPMTGPA

SEQ ID NO: 342799 - protein, 345 aa, unidentified
MELHTIGIDLGKTVFHLVGLNPRGEVVVRKKFSRKQLLHFTANLQVELIGMEACGGSHFLGRGLREQGHEVRLMPAQYVKPYVKTNKSDYIDAEAIAEAVGRPKMRFVPIKSDDQLDLQSLHRVRERWVMRRTAAINQIRGLLLERGITVRQGRRHIDAALPGILEDASAKLSGAVRLLLAQLRLELDHLQMRIDEADVMINKAAGENEACRRLVAIPGIGPVTATAIIAAIGNGAAFKKGRGFSAWLGIVPGEYTTGGKQKLLGISKRGNSYLRRLLVQGARAVLQQKAKQSSGLSAWLAQLTTRVHGNVAAVALANKLARMAWAVLAKNEPYRPPIVVSAATA

SEQ ID NO: 342800 - protein, 342 aa, unidentified
MIVASTFIGPGWLPEQHGSLHKAGSTKMIKTSTLTAGIDTSKAKLDIAVDGRTQRWQVDNTSRGWRRLAADLAKADIVRVGIEATGGYERGVVGYLREKGFTVLVLQPIQVKAYARVHLRRAKNDALDAMLIAACAATIDRPRIEPDLRLAELAGHLTFVEQIEGDIARLKVRLEHVDELRRMVVADIARLKARRSAELLRIVTALRAHDDLARRLDLVLSVPGLGERTALALIIRMPELGRISREEATALAGLAPYDDDSGKHKGQRHIAGGRGRLRRSLYAAALPAAFRWNTALIELYARLIARGKAHNAALIACARKLLIYANTVVQRGTPWTERTLSA

SEQ ID NO: 342801 - protein, 318 aa, unidentified
MNSHHKTELSEPVHYVGLDVSKARLDYVTETGTPASVPNTSVGHATLIARLREVPGARVVCEASGGYERALLAALWAAQLGACRVPPGRVRHYARAEGLWAKTDRIDAALLGRYARSMQPRLEQPVPTECLTLRELLDYRRQLSEQHTATRNRLEQAGPTLRELLTAQLEHLAAGLAQAEAAIQAHLHAHPGLQAKAERLRQLQGVGPILATTLLAYLPELGREDDKRIAALVGVAPYAHDSGETSRPRHARGGRIEVRNVLYMAAVSAAQHNPVLSAFYQRLRESGKPAKVCLTAVMRKMIVVLNRMLRDPQFPLVS

SEQ ID NO: 342802 - protein, 359 aa, unidentified
MNKHKYVGLDVDQATIVAAVEDASGNFLMETFLPTRAADLRDFFKGLKGTIHTAFEEGAQATWLYDLIEPLAEEVVVCDPRRNKLIQTGNKGDRPDARKLARLLRLGELHAVYHGERGTRGLKELVHGYDYLVGDLTRAKNRLKGAFRSRAICCRGTKVYSADERKEWLEKVDLPAVRTRVSSLYEQLDYLRKLRDQAHKEMIREARKHPAYKLLVKVAGLGPVRTSQIIAAVGSPHRFRTKRQFWPYCGLAVVTHNSSEYEIVDGQRRRRNKPVQTRGLNRNFNRTMKQVFKGAAKTAITAEPFRQYYQRMIDEKMRPEMALLTVARKISAITLAIWKKGENFDPERVNQAARDSGDQ

SEQ ID NO: 342803 - protein, 449 aa, unidentified
MKQTKTPKKRPMRLPKHLVHLNACAAGIDVGSRSHFVAVPEGVTPEPVREFSTFTDDLEHLADWLISCGVTTVAMESTGIYWIPVFEILESRGIEVKLVNARHVKNVPGRKSDVLDCQWLQQLHTYGLLRGAFRPADQVCALRAYVRQRATLVKVSGSHIQHMQKAMAQMNLQLHNVVSDITGVTGMRIIKAILAGERDPKKLAAFRDKRCKNDAKTIARSLHGNFRPEHLFSLQQAVELYEFYLAKIDECDRQILAQLQAFDAKDTEGGSGGGKPPASVEEALMRMSGIDLTDIDGIDTASALKIIAEIGIDMSRWKTDKHFTSWMSLSPGAKISGGKVLNSATKKNANRAAQAFRMAAFSLTRSKSYLGGYFRRMKARLGAPKAITATARKLATIVYAMLKNGTSYVDLGQDYYEERYQSRILQNLKRKAKHLGFELVPTGDQVAAS

SEQ ID NO: 342804 - protein, 370 aa, unidentified
MTRVAKFVGLDVHKDTICIAWAEGGPLQVPTLVGTVPHDVPRLVKQLLRIAPAEHLWVVYEAGPTGFGLARTLMEGGIRCMVVAPNRVPHEPGNRVKTDKRDARDLARALRAGNLRGIALPEVEQEAVRDLLRAREDCVRALRSVRQQLQGFLLRNGVIWKGGSSWTGKYLEWLRGLRFSAEAQSETFKHYLGEVDRLVLSREYLTAEVGRLVLTLAQAPLYRALQALRGVSTIVAATVVCEIGDLRRFPSASRLMSFVGLTPSEYSSGGKHSRGSITKAGNGHVRRALVEAAWAGRLLPNRTLQLQRRQVGLDPAVIDIAWKAQHRLHKRYLRLRARGRPQNLTIVALARELAGFIWAIGQEVKLPAAV

SEQ ID NO: 342805 - protein, 332 aa, unidentified
MISNLYIGSDISEEWFDVCALVGKKPAVKRFDNTEQGHQAFLAWARSFEARNIHVAMEHTGGCEMALALICHAENLKVSLLDGLQVSKFRESESRTMAKTDQQDARLIAKFLKQKRPAIWSPRPEEYRILGELIRHRQDLIDSRKAWICRTRKASMSPLIAAQRECQIAVHTEQLKALEEEILNHLKNNPNLQADVERLCSLPGIDTVSAVRILAEMGSVANYKTPRDLALYAGLCPIAKQSGKSKPKGVLFPYGNRQLRNALYMPVIVAMRLKSPLLKFAQRIQANGAKSSKTVITAAMRKLIQVIHGMLTHQTNFEPERFLKDMNKPGKA

SEQ ID NO: 342806 - protein, 336 aa, unidentified
MRYIGVDLHTTQITVCYLKAEEDFEIRKYQLCEMEKFVASLTKTDELAVEATGNTRWFAEQVAEKVRRVVVVNPRQFEVVKNSCKKTDKNDALNLARFLRADLLPEVRAKREAAMRVQSLVQTRTKLVRLKTSLINKIHALYVANGWKLKKTSLASEKGLEKVLLSEWSAMERIELEIIIEQIRALKVSIKKLDTAIAAESGKLNGFASLVSMSGIGSLSAGILLSVIGEIKDFATADKLASYFGIVPRVSNSNETVNHGRITKRGNKTGRTTLVQCSLAAIKKSEYLKNYYEQVKARRGHGKAKIALARKYLGIFYNTLTNNWVFADFNNFELAE

SEQ ID NO: 342807 - protein, 350 aa, unidentified
MNIKHYIGFDVHKKSISYCVETADGKIIEEGKLRATHQVLREWAQKRTEPWHGAMEATLFSSWIYDVLKPYAAELQMGNPSMMKAIGAAKKKNDQLDARKIADLVRCNLLPACYVAPVEMRELRRLLRYRNTVVAHAVRMKNKMSGLLMEVGVEYSKQQLHGKKYFTELMGQLEEVPESVKDMLRLSRSALEMFETTQRQLLNRLQKEPTLVKRLELLRSIGGVGEVTSLTWALEVCDPRRFPSIGDAVSYCGLTSALVSSADKQQRGPISKQRNAHLQTVLIEAAKLAPRWNKQLAELHERELKRGNRNRATLAVARKMVAYLLAVDRSGKPFEVRNSPTKEMEAEKVA

SEQ ID NO: 342808 - protein, 378 aa, unidentified
MSNCTRYLGLDVHAETITAAIAEGRGKIRSLGKFPNRPEAVRKLIEKLGGGKNLKVCYEAGPTGYALYWQLTKLGVDCEVIAPSLIPKKAGDKVKTDRRDAEKLAQSYQSGDLTPVWVPTPEHEALRDLVRQRAAAKADESRAKHRLVKHLLRRGLREPDESGAWTHPWWRWVQSLKFEQEAQQVAFADCIAEVLHMGERLARLDKAIDRLVESAPAHMRAVIEALQALRGVAKLTAVTIVTEVGTFKRFRRPTEMMGYTGFVPSEYSSGGRESKGRLTRTGNAHLRHVLGEAAWHARHRPWLNLRMKKVLPTLPAGVAEIAWKAQERLHRKFTKMTYCRKPAGKVAAAVARELVGFIWAIGTLVESGLESNSKARAA

SEQ ID NO: 342809 - protein, 458 aa, unidentified
MEEPQEVPADEEHERAWERVAAVDIAKASGVVCTRLPDEDRPGKRKTHLWTVQATTGAVIELGDYLRARQVQVVTLESTSDYWRIWFVLLEAAGLRVQLVNARAVKNAPGRAKTDKKDAVWLAKLTEKGLLQPSFVPPYEIRRLRELTRLRAELVHDKSRYWARLEKLLERALIKISAVLSTLDTDTARAMTEALIAGQRNPRVLADLAIGKARAKRAELTLALDGRWEDHHSIQARILLDNIDALNRQIEQLAGTAGELISQIPAAWGVDADGSTGPHAGTGPDSPVLPAVAQLDAITGCGIIAAQAVIAEIGLDMTVFGTPGRLVSWAKRCPQTRQSGKKTSGGKAGKGNPWLNGILGEIAASAARTDTFLGERYRRLARRRGKRKAMVAISRSILVIIFCLLSDRSARFRDLGPDFYDTQVNRDRKIRNHIRQLQALGVDPEDLAALLTKNPPAA

SEQ ID NO: 342810 - protein, 341 aa, unidentified
MKHEMHVLGIDIAKHVFHAVGMDDRGNVVYRKRVSRHDLMPCIAKLPPVRIGIEACGGAHYWARRFRAYGHEVKLMAPQFVKPYVKSNKNDSRDAEAIAEAVTRPTMRFVPIKDVDQQDIQALHRVRERLIGERTALVNEVHGLMHEYGIVMPKGVSKFRQAVVGKLEAEKDKLTPLSQEMFWKLVEEFAALEAQLAYYQEKLDTLAQHHPECQRLMTIPGIGPLTATALVAAVSDASAFKNGRQFAAWLGLVPRQHSTGGKERLLGISKRGDSYLRKLLVHGARATIRWVGRKTDRRSQWMRQLIERRGKNRTAVAVANKNARIVWALLTSHQAYDLAKG

SEQ ID NO: 342811 - protein, 343 aa, unidentified
MTQRQPVVEVFAGLDVSAREIKVARVQGQDQNPTLATFANHASGHQALLAFLLEKTERVRVCLEASGNYSLDLALSLHAQRQVEVSVINPRRARKFAESLGERSKSDPVDARALCQYAARMPWESWKPPSATALRLRAIPRAMESLGVMHTQESNRGHALASSQALPALVLRERQRHQRYLENRMKQLRREARRLIARDAELDRRYRLMLTVPGIGETSALQILGELVVLSDTADARQWVAFAGLDPCIFTSGSSVEKRPRISRGGSRHLRRALYMPALVALRREPHLKRFYERLLSRGTARFQAVVALMRKLLHALFAMFRANQPYDGSKLCPSELITKAAA

SEQ ID NO: 342812 - protein, 425 aa, unidentified
MRFIALDVHRDFCEVAIAENGQVRLAGRVETKPSALELFAGSLGADDQVVLEATGNALAIARILEPHVGRVVLANPKAVKGATQTAKTDKLDARTLAKLLAAGFLPEVWRPDEQTGALRRRIARRAQLVRQRTREKNQVHAILIRNLSERAPVTDLFGAAGRRWLAAERLPVDEREMVEACLRGVDFLDGEIAAIDRALAELVLASEEMRRLLTLPGVNFVTAAALMAAIGDVTRFPTAGHLVSYLGLDPRVRQSGAEPARHGRISKQGPGEARHVLVEAAWHAARTTGPLRAFHERIAGRRGANVATVAVARKLVVIAWHMLSRDQDYAFARPSLVREKIRKLELLSGAERRKGKRNPVRIFATAEQHRLDKELGAQAEIAYRRLVQDWQPAIKKGTGAATGHASSGPSSGQAARQETAPPPAL

SEQ ID NO: 342813 - protein, 311 aa, unidentified
MQGVNVGIDVGKAQLDIFIYERGVYFSVENNVQGIRKGLGRLGRYSVERIVIEATGRYEHAFVDMALDKDLPVVIANPLQVRRYAGAIGQLAKTDEIDSRLIAEYAAIIQPQVRKHKSKIILKIKDLLARRRQLIEMMTMEKNRRQIMPAFLKADIQRVIDHLQRQLEKVDKQLNLLVEKEEAWRQKRTILLSMPGIGPVVVNTLLGDLPELGALTNKQIAALTGVAPYNRDSGSLRGKRRIRGGRSTVRTTLFMAVLTSVQHNPVIKHFYQRLVAAGKHKKVALTACIRKMVIMLNAMIRDGKMWQENIA

SEQ ID NO: 342814 - protein, 337 aa, unidentified
MSEVKVIAIDLAKNVFQVCGMTAERKILFNRQLRRQQLPIFMTQQPPVEVAMEACYSSHYWGRCFQEMGHRVKLIPAQHVAPFVRGNKSDHNDAIAIAEAAHRPRLLPVPVKSVEQQDIQCLHRFRERYVAQRTSLSNQVRGLLSEYGIVAPQGHRALCQLLLESRDCAQLSDRLQAQLRQVADEYTALNQRIKGLDQALAEIAKTNPLCQLLLTIPGIGVINATALVSAIGNGSQFANGRELAVWLGLTPRQSSSGERFHSAGITKRGNRYLRKQLVHGARALLLSCRRKTDRLSNWVNQLVARRGINRACVALAARLARLSWVLLQRQTPYRASA

SEQ ID NO: 342815 - protein, 411 aa, unidentified
MSSLLQEPLPAETLVVAIDPGKVANRVWLVSGERGLVHDPLSLPTLRTGVDELVRLIGASGSAGEPLIAVEATGSLHRPWTAELERRFPGRVRLLAPSETQAARAQLGSRRFKSDDRDCAALVWLARQGLGRLPDDPATEALLGVVRHRRQLVAELKVLRQRLHDQLNRLCPGLSAPQGHGRALDLLRPSGRAVLACAVAFTGRAPSLRSLLARAPGRLARSNAEYWLQRWQTCLAPPADAELRAQRLGFDLERLDALLGALANADDQLTTLLAQTPGQVLTSLPGVAVVRAAAFAAHSLPIDRFPTAERLYSATGLAPASYESASVSRRRGISRQGLPDHRDALMAIAWGLSQSAPAFQERAREYRARGFAPIQTRVALARHACRLCHALLRNQEPYDEARYRQARRRGR

SEQ ID NO: 342816 - protein, 357 aa, unidentified
MLSSNVKYIGLDVHKEAITVAVRNSAGKLVMESIVETKASTLLDFLHGLRGELHVTLEEGTWAAWLYDVLKPHVREIVVCNPRRNALLKEGSKNDRVDARKLSELLHGGLLRAVYHGEHGLRTLRELARSYEVISKDLKRVMNRIKALYRSWGIPCTGTQVYSRRHREQWLQKINQAGVHRRAELFYQQLDGLQALRRTVRGELLAESRKHQAVKVLRQIPFIGPLRAAQLVALMQTPHRFRSKRQLWTYSGLAVETHDSAQYRYVDGQLQRSKKPQQVRGLNQNHNHAMKEIFKSAALSAALRAGPFQDFYEALLTKGIKPELARLTLARKIAAITLTLWKKGEHFDAKYVKSQAA

SEQ ID NO: 342817 - protein, 448 aa, unidentified
MGKPQVIDDQEHERVFDRAAAVDVAKASGVVCTRLPHPSRPGGRQAAVWTVPATMSAVAGLAARLAADQVQMVTLESTSDYWRIWYYVLEAAGLRVQLVTASQARNLPGRPKTDRLDAMWLARLTENGLLRPSFVPPAPVRVLRHYCRARTHLVQDRTRCWQRLEKLLEDALIKVSSVASKLTTLSAQDMIKAMIAGERDPQVLAGLARGRMRAKHAALADALAGMFADHHAELAGLLLDQIAFLDTRVNRLNILISEQLATISAAWGIDAGGATGPGAGTGPDAPVLGAAARLDEIPGITAELAASIMSETGLDMTRFPTASHLVSWAGLCPRTHQSGTRARHGKGTGNTYLRGYLGQAATRATGTATFLGERHARIARRRGPAKAQVAVARSLLVIIWHLLRDPQARYADLGPGHYQNRIDKTRKARNHIRQLEALGYTVTLTQAA

SEQ ID NO: 342818 - protein, 339 aa, unidentified
MEVLIGIDPHKRSHHAVAINREEVKLAELSVRAAKDQTQHLLAWAARFPERRWAIESAAGLGYLLSQQLVDAGEEVLDVPATLAARVRVLGSGRSQKNDPNDALSTAIAALRHRGLREVHADDHRAILRMLATRHHDLGSLRTQAACRLHAALAALIPGGFSGRLSAKTAAGLLRSVRPTDGVTAERKAQAADLLADVRRLDVAIAAVKKRIAVAVDAAKTSTTDVYGVGPIVAAIIVGHTGDVRRFATRHHYASYNGTAPIEASSGPKKRHRLNPRGNRQLNHAVHMAAVTQIRNDTPGRAYYERKIAEGKTKKEALRALKRRVSDAVYRQLVLDAER

SEQ ID NO: 342819 - protein, 419 aa, unidentified
MSFKILKNNCCGLDVHKTWIYACIGITDSFKRTEYKQARFSSFTKGLQELCLWLAKYNCIDVCMESTGKYWIPVFNVLEKNNIFVTLSHPKYTKPQKGNKTDRKDAKWICDLYMCGMVKPSFIPPADIRQLRDLVRYRFKLTCMITGEKNRAHNCLTVSNLKLDDVFSDIFGKSSRSITEQILQHPGEVFDVAPFVDSRCKTPIEEIQAAVDGAISHEQAVKLRQCLKHIDELEMHKAEIEREIFRLSQKYESVLGLIRTIPGFDKNPLTAIQVLSEIGADMSVFPTAKNLVSWAGCCPRNDQSSRKIKSTRISRAGSYFKPVLVQIANALIKSKKHPEFTTRYRRIKARRGHKKAIIAICRMILTAIWHILTDLKPYTPEGFLESRPVNKEKVLTISQALNLIKQRGYIIKDDVGPVT

SEQ ID NO: 342820 - protein, 367 aa, unidentified
MSRMKRLTVQQLDVSMDYLVIGLDLAKTDTAVIAITTDGELYAIDRLKYLDLLNQAKQLGPTVFAMEPCNGMTYLVHELEELGHECRVINGEAVKDYVKSHFAGQKNDLNDAQAIAFLAQDEMLKFIRVKAKSEMTMQTLQVVRQQLIKQRTCSVVCIKGICQNYGLVISKSIMSEAKIRPIIEETQKLPDEIKEPLKRLLRNAARFTIDIKQIDKAIEQGLKGNETTERLLEVPGLGPQCVSRLLTTIGDINRFEGPKNLAAYYGLVPRSHITGHNEKMGKITKHGDRLMRAFLVQGAHAVLIQHTKGRLPKSALKKWIDKKLSAGMPCSKLSIALAAKLLRIAFAVLKYKKKFDIKKAGVARCSL

SEQ ID NO: 342821 - protein, 343 aa, unidentified
MPHYVGLDVSQKTTAICVVDAQGKRLWRGVCATDPGPISARISQHAGVDAKVGIETGSMTPWLVHGLRAAGLDVACLDARRVKAALQMQLNKTDENDAEGLAQIMRTGWYRAVHVKSLDAHRARALLGARAQLVGMTTRLSNMIRGVLKTFGLLPGAGRGLRFDRKVEALLEGAPEIALVVRPLLATWRQLRQQIAVFDKAVLQQVRADPICRLLMTVPGIGALSSLMYVSTVENPSRFSRSRAVGAHLGLTPRRYQSGETDRSGHISRCGDGLARTLMYEAAIVILHRVKRSLHLKDWAEAIERRSGSGKARVALARKLSVILHSVWRSGEPFRWAAPAMTA

SEQ ID NO: 342822 - protein, 423 aa, unidentified
MTLSSDQPFTAFVGIDWADTKHDICVQAAGSKLREFACIAHEAAQIEAWAYSLRERFGGPIAVALELSKGPIVYALQKYDFIVLFPINPATLARYRAAFKPSGAKDDPTDAELALDLLLCHRDKFTPLHPQSAPMRTLIYLVEQRRQLVNDKIRFTNRLGNALKQYYPQALAWFEQRDTPLFCDFLARWPTLTQVKRARRASLERFFWDHNVRFPQVVQKRVCAIKAATALTEDQAVISAYRLQVEVLTEQLRTTLQAIDRFDRQIAQLAPTLPDYALFSALPGAGPHLAPRLLVAFGEQRERFRNADELQRYSGIAPVTERSGKKNWVHWRWQCPTFLRQTFVEWASQTINKSFWAGAFYHQHRDQGSTHQAAVRALAYKWIRILHRCWQTRTPYDEVTYLKALQRRGSPLLKQLALSTEST

SEQ ID NO: 342823 - protein, 367 aa, unidentified
MKKVSTRAAAQSRNISQQKLTIGLDLGDRNSWYCVVDEAGQIQLEQRVSTTARALHEVFGRMPRSRIALEIGTHSPWISRLLSELGHEVIVANARKVRLIGESRKKDDRLDAQTLARLARIDPELLYPVKHRSAKAQADLTLIRARAGLVRARTGLVNTARGLAKSYGERLRSCNVRNLNPEKAESLSPELQAALEPLLNAIESLSERIVEYNERLENLAQQSYPQVALLKQIKGVGTLIALTFLLTLEDPHRFGKSRDVGCYLGLQPGRRNSGQSEPQMHISKEGDPYLRTLLVQGAQHILGPFGVDCDLRRWGLKLAERGGRNGKKRAIVATARKLAVLLHHLWVSGEAYEPLHNSSRTTVAAAA

SEQ ID NO: 342824 - protein, 426 aa, unidentified
MNFNTQNAKITAITEKTLVIGIDVGSETHFARAFNWRGYEFSRKPLEFGNTEEGFETLRTWIMELKEKHGMDKVIPGMEPTGHYWFNLGKFLQDEGMKPVHVNPHHVKKSKEMDDNDPSKNDRKDPRVIAGLVNEGRYFYPYIPDGIYAEIRALSGLQVLAQSEITRLKNRIARWFSIYFPNYKDVYGNVGAVSGLMVLKEAPLPEDIVKLGVEGVNRIWRDAKLRGVGLKRARTLVTAAEHSIGSREAQEAARIELRILLADYERYTAREKDLMALIEEKIAEVPYVDKLLEIRGIGLKTVIGFVAEVGDIKRFDDPKQLQKLAGYAIVRSQSGKHKGESHISYRGRKRLRYVLYEAAVSVVGHSPEFRSIHRYYTTRDKNPLKKMQSLIAVACKLIRVFYLILKTGATYNAEKMMEDIRRPVEI

SEQ ID NO: 342825 - protein, 335 aa, unidentified
MKHYAGIDLSMETSHVCIVDADGRKVAAQCVDSTPEAIAALLEGHGPVERAVIETGRMTPWVARGLHELGIAIVCIDARQAHQSLKAMKANKTDPHDAAGLAQLARTGFFKEVHVKSPTAHGVRSVITARSHLVEARVRLDNTIRGLCAIFGIRPGAGQGERFLARVQAAAAVPGLGEAVASLLRARIGLVDEIRRMDRELKAISAASPSCQALMSIPGVGVQTSAAFAAAVDEADRFKRSRTAGAYFGLVPRRHQSGELDWTGRITKQGDGTVRKLLYEAANSILTRTKQPFALKTWALKIAKRRGLKKARVALARRLAVIMHAMLRDGTLFEA

SEQ ID NO: 342826 - protein, 343 aa, unidentified
MGRSIGVDLHKTSFTNCFYKTDTDYETKTYKVSPKGIADFKKHLQPDDEVAVESTGNTAYFVREIESGVKRVRIVNPIRFKVIAESVKKTDKIDAFTIAQFLSKDLIPEVRMRTKEESQTSSLIGTRDKFVKLRTSLKNKLHNILNANGIVTKPEVFSAEKGLDKILTLPLEEAYRFEMELIVAEIKNLNQTIEKINEELKRRGQKLEGHKNLTSIKGIGDTSAAIFLNTIGNINDFKDEKALASYFGIVPRVYVSNQTVQHGRITKMGNKIARTALVQTTLVAIRYSPYLRAFYEKIKARKGAGKAIIAASRKMLGIIYNTLKNNWVFEDFTKFKLAPQGAA

SEQ ID NO: 342827 - protein, 360 aa, unidentified
MTMIGAERPDAKAEVTLGVDTHLDTHVAVALDHLGRRLGELSVPTTAKGYESLLRWAEGFGTVRCAGVEGTSSYGAGIARYLRTAAIPVTEVERPKRRHLHRSSKSDSRDAESAARTVLAGETAGEPKSADGCVEMIRALRVARRSAMKARTQAANQLQGLRVTAPDKLRHRLRNLSTKELVAVAARFRLGDDPHDVLAATKFALRSVARRYEALSAEIAELDAQLDRLVIQVAPELVSLAGIGTDHAATLLIVAGDNPQRLRSEASFASLCGVSPVEASSGKVVRHRLNRGGNRDANRALYMICLARMRRDLRTKEYVARRTAEGKSKREIIRCLKRYVAREAYRVLVSCGACSSLIRP

SEQ ID NO: 342828 - protein, 432 aa, unidentified
MKFNQSNKQNQRISRISETTLVIGTDIAKHNHVARAFNYRGIELGKRCLFQNDDNGLLNLLAWAESIKQEHGLTDVLLGVEPTGHYWFPLFHFLRQRSIEVVLVNPHHVKKSKELDDNSPTKNDIKDAKVVAKLVIDGRYTQPQLPEGVYADLRVLMNQRDRLCGDLNRVKGRIHNWLDRFFPEYRQVFKNWEGKASLITLTNFPLPQDVVAAGETTVVAIWKKNDVKRAVGPKRAELLYRKARKSIGLTEGTTAAKHELAMYLEQYAMLCRQIEQLMELVAGLVEQIPGATHMMSIPCIGLITVAGFLAEVGDLSGYDHSQQIVRHAGLSLRENSSGLHKGETTISKRGRCRLRALLFRAALTMVAKNPEFRALHLYFTTRRDNPLKKKQSMIAISSKLIRVLFELGRKQKEYDANKVLGPHREAQLQAAA

SEQ ID NO: 342829 - protein, 412 aa, unidentified
MSYERNAVGIDVSNGRSTVSVLRPFGEVVLLPFEVKHTTEELSALADKLTAINGETRVVMEHTGRYYESIEKVLHEKGLFVSSVNPLLIKQYGNNSLRNVKTDKADSMKIARYALDNWADLRDYTPMDKIRYDLKTLHRQFNLASKQKTATNNNLVSLTEQVFPGIRKIFESPVRRDGTQKWVDFIFTFWHADCVRKHSLKAFTERYQKWCKRHGYNFNAVKAEEVYAHAKTVVVLIPKDSITKTIVQEAARQLTSISRSVETYRAEMNRLASMLPEYEVVMKMYGAGESTGPQLMAEIGDVTRFERKQSLVAFAGVDPVPKDSGDKTSRSNKSSKRGSPYLRKTLFIVMSTILQNMPEDEPVYQFLDKKRAEGKPYYVYMTAGANKFLRRYYAKVMEYLKEKEKAETDSTQ

SEQ ID NO: 342830 - protein, 340 aa, unidentified
MDTTMTPHLPETGASETTCFLGIDVGKEQLDLALLTPDGRTHAKTARNDDAGHAALLRWLGRFTDTLSGVHACLEASGGYEDAAAVALHEAGLAVSVVNPRRTAAYADVQLRRSKTDRGDAALLARFCERERPALWTPPSDEARVLRQLTRGLDAIKRDRDRTRARRRRMPEGRPRDAMDAVLVTYKEQIKAIEAAIEAHLAEHPELARQRDLLVTIPGVAAQTAAIVIAELGDASAFKSARSVAAYAGLVPRHYQSGTSVRRHPRLSKVGNARLRRAMYFPAISAMRHNDAVRALAERMQAKGKSKMSVVGASMRKLVQICYGVLVSERPFDASLHPAP

SEQ ID NO: 342831 - protein, 322 aa, unidentified
MNKYKETFGVDISKDVFDVHGSTTGHNQYKNDESGFKKFLKRLPDDCLVAMEATGYYHYRLAQFLYKNAVVVSVINPLSIKRFIQMKLAKVKTDKSDSKAICEYALINEVPIYSALTDLQSECLQLFRLLDVYIKQRTAIKNKMHGEQTLGIPSNFVYRSLKRHRKWLDKEIKSIEEKLLSLVKEDQQQQLSLLKFVPGIGPKTALFLIVITDGFSKFETASQLCSYAGITPTTRESGSSVRVSPRISKVGNKKLRNLLFLCSFNACKHNKACRELYERIVNKGKSKKLALIAVANKLLKQCFAIAKSGRPYDESYVSVLPK

SEQ ID NO: 342832 - protein, 338 aa, unidentified
MNVTTIGIDLAKNVFQIHGVDADEQPVLRKRLSRNKLLPFFANLPPALIGIEACSSSNHWARELQRLGHQVRQISPQYVKPYVKSNKNDYNDAEAICEAVSRPGMRFVPTKSLTQQDIQALHRVRERLVRDRTALVNQTRGLLREYGVFIPVGIRALRRQIPEVLGNTHNQLTPLAREVVADQYQRLREIDRHVIDYDRRIDSVFRNNELCQRLTEVEGVGPLTATALVAAVGDANEFGNGRHLAAWLGLVPRQHSSGARTRLLGISKRGNTYLRTLLIHGARSVVRRCGSNSDARGHWIQGIKTRRGFNRACVAVANKNARILWALMAKAEPYRQAA

SEQ ID NO: 342833 - protein, 456 aa, unidentified
MGHARARKISAQLVEDEEYQLRYERVAGTDVAKAKADVCTRLPPAREGGRRVSRVEEVPATAREVLALAGRLLADGVQLVVMEATSDYWRIWSCLLEAAGLRVQLVNSRHARQLAGRPKTGQKDAQWIARLAEMGLLRPSFVPPPEIRALRDLTRTRLMLARDRTREWQRLEKLLEGALVKLSSAVHSMARTKTARNILEAIAGGERDPEKLAALAHGGVKGGHAAVRQALDGMTLGGHHPRLIRVHLDHITLLDRSVAAIEDEIEAALDAIPGAWGISADGVPSPAPGPDAAALDAVARLAEIPGVSPDLARAVIAETGLDMTRFPTPAHLAAWAGLAPVARQSGPRARKPAKGHGDAYLKDYCTQASLGASNTDTFLGERFRRLSRRIGGIRAQCAVGRSILVIIWHLLSDPGARFTDLGPGWHERKTDRDRKIRTHLRQLQALGLDVTITPAA

SEQ ID NO: 342834 - protein, 343 aa, unidentified
MSEISTIGLDLAKNVFQVHGVDRSGAVVLRRQLRRGAVEKFFAQLSPCTVGVEACGTAHHWARVIGRYGHQVRLMPPAYVKPYLKRNKNDGRDAEAICEAVSRPTMRFVVVKSIEQQATLAVHTTRALLVRQRTMIANSLRAALGELGIVAAPGFEGLRQLMTGLEAPNEEVPEIMRGALLLLAKHWQALDADERVIERQITKAARADGEARRLMQVPCVGPIIASTVLAKVPDARVFRSGRNFAAWIGLTGRDHGTGGKHRPGRISKQGDQMLRALLITGASAYLRQQRMRGVSDPWLRDLLARRPYKVVMVALAAKTARIIWAMLAKGEPYRGRASALAAA

SEQ ID NO: 342835 - protein, 345 aa, unidentified
MKYYFIGIDVSKEKLDATLIHYESESDSEQQLAYTTVENNPKGFRSLVSWSKKNAGRGVKTDAMLFCCETTGGYDRALCDWLYGNGLNIWRESALQIKRSMGLRKGKDDKTDSEMIAYYALRFRSKATLYKPLDGNMRNLRNLFLYRQSLVVERRAKMVSAKEKQHISSKSKVDNFIYRDAQKAIDILTKSIKECERRMLEIIKEDEEMYRNYLHLTSCKGVGLVTSVMLIIYTDNFKGWNAKKMASYCGIAPFYESSGSSVFHKANTSGYSNRRLKGILTQAARSAITHNPTLRQYYLRMKAQGKPYGVILNNVNNKLVHILFSLVLHDCDFELDHETKRAARA

SEQ ID NO: 342836 - protein, 461 aa, unidentified
MKKQKRRAAAKVDQGSKLSVIQPDVAGIDIGSREMFVCGPADQEGRREMRVFATTTEQIQECVGWLKQQEVRSVAMESTGVYWIPVLEIMESSGLEVLLVDTRPLSRVPGRKTDAEDCQWLQTLHSHGLLRGAYRPSEQISELRTIVRQKAVLVRQQADWIRRMHKCLDQMNVRVHHAVKDTQGVTGMAMLRAIVAGERDPRNLAKLRDPGCQKSEAEMVELLTGNWRSDHLFNLKQHLAMYDSAASQIAVYEEEIQRRMQEVTPAGRKDVKAPPLANIEKRKTMKRRDQEGKRQALYRVMGADLTTIDGIGVETVEVIMSEYGTEMSKFPTEGEFVKHVGLAPHRPVSGGKVLKNKRKKQKGTRTAEVLRNAASSLKHSRSALGAYYRRIARRKDAGVAVFATARKLGELVYRMLRYGQQYVDVGQAEYEKRYQQTRIRALQSTANQMGYNLIKQEAVSA

SEQ ID NO: 342837 - protein, 353 aa, unidentified
MKPNTETTAAPLAVIGVDIGKEVFHLVGFGTDGKIAFRKKIRRLDLKGAFEQLPPCIVGMEACLSAHFVSRTLRALGHEPRIIPAIYVKPFLKGQKNDYNDAEAIAEAALRPNLRLVKEKSQDQLDLQACHRVRSRLVSRRTATINQIRAFLIEQGIAVRAGARALRNSLFAILENRKDEISPRTAKLILGLYEEWCHLDERIESVTEEIESLGKAEAKCQRLISVPGVGPLISTGIVAAIGSGEAFERGRDFAAWLGLVPRQHSTGGRSILGRISKRGSKYLRTLLIQAARVLLMRPHNWPRFSFGAWLKTASERLHRNKLAVALANKLARIAWSVLRHDKAFDTHLEVAAI

SEQ ID NO: 342838 - protein, 333 aa, unidentified
MKRIAVDLAKSVYQVAESARSGQVVQRKRLNREAFRRYIQEQAEPVEWVMEACGTAHYWGRLAQSLGHQVKLIHARYVRPYRRRNKTDRNDCDAMLEAARCKDIYPVPVKSHEQQLLQQLHGLRETWKKSRTQCINLLRGILREAGIEAPASTVAFMRAAHELVDRAELAPLRHQLHIVLAEINLYEQCMAECEQQLKRWHADDEVVRKLDEVSGIGLLTASALTTAVGKPERFANGRQLSAWLGMTPSEYSSGERRRLGRISCKGNIYVRTLFIHGSRAALLAASAMPGTHARKTDRVTALGRRDSSPYWPQQSGCGAGQQIGQDLLGGVVS

SEQ ID NO: 342839 - protein, 425 aa, unidentified
MNQDNQSFAAFIGLDKSDKKINVTLQRCSTARSERSIIQGSAEALHAWVAALCARFPHQRVAICVEQPAAGLIHALMGYDFVVLFPINPVTLARYREAFIPSRAKDDPTDADLLCELVAQHREQLKVWQPDDICTRKLRHLTQARRSSVNMRTRLSNQLKALLKGYFPQALELCGDDLTTPLACAFLQKWSSLQQLKKARPETIRRFYYAQNARRGDVIEKRLTLIAQAVALSNDPALIESSIVTVQALTLGLRAVHTAIARFDREIARSFTQHPDASLFAALPGSGTVYSARLLAAFGSRRERFESAEALLNFSGIAPVVKRSGQATKIHRRYARPIFLHQSFIEYANESIRHSLWARAFYQMHKAAQQSHWVIIRALAYKWIRILFRCWKEHTPYDELRYLKSLQKRGSPLLQYLAQPNTQTV

SEQ ID NO: 342840 - protein, 376 aa, unidentified
MNTTLHCQNYSIKPTLYMAMELADKSWKLLFSNGVKQRNKTVNALDQNQLMFEIRQSKERLNLPADSDVIACYEAGWEGAWLARWLRDKGVTVHVVDSSAIEVNRRYRRAKTDRVDAKKLLLLLWRYLQGEKDALHVVNLPTIEDEDARRLHRERDVLVKERGRHWVRIKSLLRAQGLRIETKRDFLAQLDALRCWNGEPVPTELRTEIEREWARHELVDEQIRVLERQQKARVNDRQLVAMDQVRGLMALKSIGWQSAWLLVHELFAWRQFRNRRELASLVGLTPTPYSSGDSEREQGISKTGNRRVRTAMIELAWMWLTHQPDSALSQWFENRFAGGGKRLRRIGIVALARKLLVALWRYLTLGLVPEGAVLKH

SEQ ID NO: 342841 - protein, 333 aa, unidentified
MFFLGIDVSKAKLNCALVGAEGDKRKTKVVANTVAGIQALLGWCAKQGAQPEQLHVVLEPTGPYHEQAGTALHEAGATVSMINPAQARDFAGALAVRTKNDELDSYVLARYGQALCPPAWQPAPLHARQLRALLARHEALARHEALAKDLQRELNRQEKAQFGQSPEPVTGSIDKSVAFLTEQIKRLERAINDHIDRHPDLKEDRDLLTSIPAVGPQTGNALLSIMHNRHIESPQALAAYLGLVPVQRQSGTSLNGRPRLSKTGPARVRATLYMAAVVAVRHNPHIQALYARLLAAGKSKMAALGAAMRKLAHLCFGVLKNRTPYRSDYALPA

SEQ ID NO: 342842 - protein, 401 aa, unidentified
MLQEPLNRATVKGDKAMKDFITHVGLDTDSHGIDVAIAEGFGSENWEVRNWGRIAADLEAIDKLIKQLKRKGYRRLRFSYEAGPTGYGIYRHLQKCDDVECIVAAPSMIPSKPGDKIKTNRRDAMKLARLDRAGDLTAVHVPDEEDEAMRDLSRSRTTGVDGVTRIKLQIKSMLLRHGIKYNGVGENWSYRYRTWLRSVKFGHQAQNQVLQEWLVALEEAEARVKRFTDQIEELLPQWKMNEVVLALQALRGVAMITAVEMVAEVGDLTRFKNPREIMSYLGLVPREHSTGEKRRQGSITKTGNGNVRRALVESAWAYSRGPCLTRALQKRQQGLPKEVKEISWRAQVRLTSRYRKLVSRGKSTRNAVVAVARELCAFMWAIAMAVEESKNSAGREKQAIA

SEQ ID NO: 342843 - protein, 391 aa, unidentified
MSMYFIGIDISKYKHDCCIISAADQKVVSKVTIKNNKAGFNELLTIIHSLANPADIRIGFESTAHYALNLELFLENANHSFMEINPVLIKDFKKSQTLRRTKTDSIDCELIARWLMTVEYKPHSKGFYHAYSLKSLTRLRDKLIRQRSFYLIKITNVLDHTFPEFKPFFNERLSKTALYLLENYGSAEKMARMNSASYEKLRSVSRGKFSPQQFLRLKELAANTVGVNNSIFDVELNSLLSLYKSLVKEINTIEKEINKLIEEVHPHYMSVPGIGPLSAAVIYSEYGDISNFTNPGQMLAFAGIEPGINESGTESHGGKMVKRGSSQLRYTLINCCLPLIRFDMTFATYYAKKRGEGKPHRVAITHVAKKLIRVIYALERQDIDFNAQKLR

SEQ ID NO: 342844 - protein, 376 aa, unidentified
MKKIRFVGLDVHAETIAVAVAEPDGEVRSLGTIPNREESIRKLVKKLGPPHQLRACYEAGPTGYVLYWLLTSLGVKCDVVAPTLIPVKAGDRVKTDRRDGQKLARLHRSNDLTAVWVPDEAHEALRDLVRAREAAKQDQLRARHRLSKFLLRHGRRFPEAGKTWTLKYMTWIKQLHFAQPAQEFTLLDYLHEVEHMNERVLRLEQAIEEAVKLAPSWMQEVVQALQALRGVAKITAATLVSELGEISRFDNPRKLMAYSGAVPGENSSGERVRRGAITKTGNAHLRRVVIEAAWSYRLRPGVGPGLRQRQKGVSEEVKEIAWKAQHRLHKKYQRLSAAGKDPRKIVTAVGRELLGFIWAIGRATETRCRQQSAMTA

SEQ ID NO: 342845 - protein, 412 aa, unidentified
MEVVFERCCGLDVHKATVVACLWMRDQSGKIHKEIQTFGTMMVDLLVLYDWLKAKEVTHVAMESTGVFWKPIYNLLEDGFQVLLVNAEHIKRVPGRKTDVTDCEWIADLLAHGLLKGSFIPPQPIRELRDLTRYRKSLIDERVREVNRLHKLLQAANLKLSSVASDVMGMSGRRMLEALLEGKTDPEVLADLARGKLRKKLPELKKALHGRFSTHHRFILEHILGHLDFLDGTIEKISEEVAARTAPFDELIQLMDTIPGVDRKAAEGTIAEIGLDMERFPTHRHLASWTGLCPGNNESAGKRKKGKTRKGDLWFRRYAIEMALAASRTKGTYLNALYHRLVRRKGHKKAIVAVAHAILVIIYHVLKHRVPYRELGADYFDKLNVTYIKRHHVRRLESLGFKVILEPLEAAA

SEQ ID NO: 342846 - protein, 574 aa, unidentified
MRPKKHKTTGSNDLFRARLDQIINMKHELVLLAGKVDWDWIDGEIAPLYSEDGRPGIATRFMIGLLLLKHIYGLSDEGVCERWVHDPYFQFFTGEEFFQHVFPHERSDLSHWRKRLGDKLDLLLAESLRVAHEAGALRGQDLKRVTVDTTVQPKAISFPTDAKLLHAAIRGLNRLVRKHGVRLRQSYARVAKSATMMAGRYAHAKQMGWMPAFSDGIAMCHVCVETARQGKAGSMTEVTIVGVDLAKNVFQLHGAAADGSVVFRRKLTRLQFRKFMAGHPTCVVAMEACGSSHYWAREMIRLGHQPKLIAPGYVKAFIKRQKNDAADAEAIVEAALRPTMRFVAPKTEGQQSRAIVFRTREQLVNQRTEVVNALRAYLYEFGYIAPQGIGHLRSLTEIVENENTELPDLVREICRGLLDQIAQMTGRLDALKKTIDALSREGETSRRLQTMPGVGPIAALAIETFAPPMETFKCSRDFAAWLGLVPLQKSTGGKQRLGKTSKMGQRDIRRLLILGAMAVVQWASRKGPRESSWLARMISRKPRMLVAVALANKMARGVWAMLTKQEDYRNPAMV

SEQ ID NO: 342847 - protein, 313 aa, unidentified
MTNKQEYVGIDVSKDTLDVACNESKAFRQFKNTSRGISKLIEWMETIQPKLIVLEATGGLELPCVAELSHADLPIAVVNPGRVRGFAKSIGQLAKTDKLDAMVIAHFGQATNPVPRKRPTEQEERLSALITRRRQLIEMLTAEKNRRHSARFNTRSLIEKHIDWLKAELSDLDGEISAYIHQCPAWKHKADLLMSVPGVGKVTVATLLALLPELGTINRQRIAALVGVAPVNKDSGKRSRKRRVFGGRANVRSVLYMAALSASIHNPRIKAFYDHLLENGKEKKVALTACMRKLLVMLNAIIRSDTYFEVLMS

SEQ ID NO: 342848 - protein, 358 aa, unidentified
MAKASMAHRQATRVIVGVDTHRDVHVARAKDTLGRALGEMAIPASAKGYRALLSWSRGLGEIEAFGVEGTGCYGAGLARHLRSEGEVVIEVIRPNRQARRRRGKSDPADAEAAASAVLSGEASGIPKAGDATVEMIRALRVARSTANRARTQAINALHALVVTAPEELREDLRGLPGPRLVRTCASFRPGELIDPLSATKTALRSLARRHEALTAEVRGLGRELRRLTVKACPQLLDIYGTGPDTAGALLLAAGDNAERLRSEAAFAKLCGVSPVEASSGMTTRHRLNRGGDRHANAALHRIVLVRLRWRHPPTIDYVARRTAEGKSKREIVRCLKRYVAREVYRALTEVNGATSSAA

SEQ ID NO: 342849 - protein, 348 aa, unidentified
MTNYVGLDVSLKSVFICILNEKGKIVKEGEVSSTPEAIGCFLQGTSLKIEKIGLESGCLTHYLKKGLMNMGYDVVGMESRKMAAILSTIINKTDKNDARGIAEALRVGHYRECVHRNDEMVEIRTILHARRTAVESRTHSITSIKGHLKVYGIKLGKGTGKSFREKVETGIAFLNPRVQKVIKSLLNILDTMEKEITELDKEVKDIGKTNEKVKLLQTVDGVGPITALAFVAEIDDPKRFEDSKDVAAYVGLTPTQYSSGEIHRQGGISKKGSKHTRCLLVEAATVLLTRCQVWSKLKAWGLKLMKKIGKKKAIIAVARKLAVIMHRMLITQKPFERSSKKKEILHAA

SEQ ID NO: 342850 - protein, 318 aa, unidentified
MSDSVFVGIDVSSQTLEVANSAEAKTWQVANDGSGIEHLVSQMQALTPALIVLEATGGYEFEAACAMQAAGLMVAVVNPRMARDFARAMGALAKTDALDARMLALFARALHQRPDRDRFVKPLADAELQRLQALVLRRRQLVQMLTSERQRMRLAHAAAKPSIERVIEFLARELKDSDGDVARHVENHHADLAAALSSVPGIGAASVAVLLAELPELGKLDRRRIAALVGVAPLNRDSGQMRGQRAIWGGRHDVRRTLYMATLVAVRHCSVFRRCYEAMLARGKRKKVALVAIMRKLITVLNSIAHHGSRWNPMLHDA

SEQ ID NO: 342851 - protein, 331 aa, unidentified
METDQYIGIDLHKASFQVCVIAKTGDRVWEGRFPRDPEGIATFVARCTPRMAVAVEATSPTWSFVDAIEHHVGRVCVVDTRKTKLKAGYAAKTDRLDARRLADALRRESVVSIYVPPPAIREQRELARHRLMLTQMRTRVLQRIRALLLRQGLGDPPTKRLRTRAGQAWLDGLVLPPQAQRALTTLRQIERDLSAQLVPVEADVVREALADPIVQRLQTVHGIGPVLGLMLRAEIGDVDRFPTPGHLASYAGLVPQVDSSASRTRYGRITKDGSPWLRWALVEVGVQTLRRRDPLGRWGRKLAVRKGAMTAHVALAREMCREIMTTWRHAA

SEQ ID NO: 342852 - protein, 355 aa, unidentified
MNPEKYIGMDVHQATISVAVMDSSGKVIMECILETKAATILEFVDGLRGTLSVTFEEGTSAAWLHDLLKPPVSHLVVCDPRRNALLKDGSKSDRIDARKLAELLHANKLHAVYHGEHGVRTLKELGRSYLTITKDLTRVMSRIKALYRGWAIPCSGATVYAPRHRDEWLAKIPHPGVRLRAERLYQQLDVLEPVRQEARRDLLVESHKHHAVKLLHQVPSIGPIRAALLVALLQTPHRFRTKRQLWAYSGFAVETHDSGEYRLVRGKLVRNRERITVRGLNHNHNHDLKNLFKGAAISASTRPGPLCDFYVALVEKGMRPTMARLTLARKLAALTLAIWKKGVDFDAKQLNRQAA

SEQ ID NO: 342853 - protein, 343 aa, unidentified
MDYFAGLDVSVKDTSVCVVDDTGKITREVRVASEPDALLAVLRNPTYRFKRIGLEAGPLSQWLFSALAEADLPVICVETRHMRAVLKAQINKTDRNDARGIAQMMRVGLYRPVHVKTLRSQRLRMLLTHRKLLQSKAIAIENDLRATLRNFGLKVGMVGTIKFEARVKELVENFPDLAALVEPLLVVRRVLREQISILHRRVLAAVRNDEVCHRLMTVPGVGPVVALTYRATVDVPARFRKSKSVGAVFGLTPAKDQSGERDRPGAISRCGDEMMRTTLYEAAQVMLLRSAKWSWLKAWAMKIARHRGMKKAIVALARRLAVIMHRIWTDGTEFRWTREAAAA

SEQ ID NO: 342854 - protein, 424 aa, unidentified
MKNNAARKRKQVPEGYLVIGVDPHKKRHAAVAITQDFTTQAKFKFDNTGEGLEMMLNRARGEMVKSCCRGVIFAIETGGHYWRNIAYYLDERGIPFRFINQYTLKRRREGKDLNRRKNDYRDSEVAAQLLCTGEFVESVIPQGVYAELRISHNTYQRLVKERTRITNLVKGLLDALFPEFTQVFKDPCGLTAQSVLSTCPIPRVIAGMTEDKFIAMIEAHHKGRRLMRKKLRALHYSAQTSIGIDAGARSVSAEIMFLVDKLELIKRQIRIMEMTLIKLVDETEEGKYLLSIRGLNYIAVAGLLAELGSSKLYRSAKQMIKMAGSNPTESESAGKRRSKTPMSKQGRPLLRYCAWTAVIPMLRFNADFRAWAKQRRERPAHANPLNGREIVGAALNRLLRLAFALVKSQTYYQDARPAPIPVAV

SEQ ID NO: 342855 - protein, 343 aa, unidentified
MKLHVLGIDLGKTVFHLVGLDSTDRVVIRKKCSRTQLLAFTANLQVQWIGMESCSGSHFLGRALREQGHEVRLMPAQYVKPYVQTNKSDFLDAEAIAEAVQRPRMRFVPIKSEEQLDLQALHRVRERWVMRRTAVVNQIRSLLLERGLTRPKGRGYVDRQLPRILEDAELRLSGCFRILLAQLKLELEQLTARIEEMDRVIQKTAKENEDCQRLTEIPGVGPVTATALIAAVGNASAFQKGRNLAAWMGIVPGEYSTGGKQKLLGISKRGNKYLRTLFIQGARSVVQQRHKQAPGLSHWLEQLLGRTHQNVVIVALANKLVRMAWAVLCKNERYRAPVLAVTT

SEQ ID NO: 342856 - protein, 308 aa, unidentified
MIAQNYVGCDISKQWLDFFDETSGRLRRIDNQADAIAAYVAGLDPSRDFVVMEATGVHDRLLRHALAKAGVPFSRHNPAHTHHYSKSTRRRAKTDPLDARMLSGYGRRYNPEAEPAPSEEVEQLQSLAGHRDQLVGMRATLKKQLSEAFEEIVITSLEDLIADLDTRIKAFESQIAAVIRQNQDTARDHALMVSVPGVSKGGALSLLALLPELGQRSPKAIAALVGLAPFDNKSGKLNRRSQIQGGRSRVRRALYMAALTAIRTCERFKTFYTALAARSGSKKLAIIAVARKLLVVLNAIIRDKTAFA

SEQ ID NO: 342857 - protein, 430 aa, unidentified
MKSNTQNTKIEAVTEKTLVVGIDVGSEFHYARAFDWRGIEFSKKPFKFSNTEPGFIEFKAWILHIQTEHDKDAVVPGMEPTGHYWFNLGKFLQDNGMKPVLVNPHHVKKSKELDDNNPTKNDRKDPKVIAGLIKDGRYSYPYLPDGVYADLRTASNLRFQMQSELTRIQNRISRWFSIYFPEYKDVYGNPDAKSGMMILKVAPLPEDIVTLGVEGVNRIWREAKLKGVGLKRAKTLYEAAEHSIGSREGATAARLEIRMLLEDYESRATRLQEIMTLIESLVKQIPMAEKLMEIKGVGIKTVSGFLAEVGDISRFDNPKQLQKLAGLAIKENSSGKHKGETTITKRGRKRLRYLLFEVAMSLVSKNPEFSQLHQYYTTRRINPLKKMQSLMAVACKLIRIFYAMLTKQVDYDPQKMISDIRRPETYLQAA

SEQ ID NO: 342858 - protein, 311 aa, unidentified
MSISHHYIGCDVSKCWLDVFDPRTGRVQHLDNTAEAISVFVSSLQGQNAFVLFEATGTYDSVLRTSLHEAGIACARLNPTMVRRYAQARGRKAKTDALDAIILADMGERLRPDPDPAPCPHRARLAGLAARRDQLVAMRACEKTRLCELTDPFLRQDLEETICHLSRAVARIEAEIERQIQENDALRDQARILASAPGVGPVTAQILLALMPELGNSNPKRLAALAGLAPFNHDSGKLKGIRCISGGRARVRRALFMAALRAARINPTLKAFADRITSASKVRKIAIIATARKLLTILNAMLRENATFRHQ

SEQ ID NO: 342859 - protein, 402 aa, unidentified
MVFVGIDWADSEHEIYLLSRDGTELACFRVPHTRQGLETLKKRLLQHVNVPEEALCFLETSQGLLVQFLLENGFPVYPLNPKVVDYRRKPSGAKSDAIDARLLADIGRSDFRRLRRLNPDSEHIQELKTLCRDQDALLEDVTRLTNRLTACLKEYYPVALELFSRLTLPVTLAFLRTYPTLEAARKASISELVSFLKAHRHPQPELAAQRIYAKLEAPQLEARPAVARAKSRFMLVLVAQLEPLLEAVKEYDEEITRLFKSHPDSPIFASLPGAGIRLAPRLLAGWGDDRSRYENAAAVQALAGTSPVLYQSGKYRFARQRRACVKFLRRALHLFAFQSARLVPWAQDYYQRKRAAGKTHHEALRALANIWVRIIFAMWLNRRPYDESVFLAAKAKHAPLVA

SEQ ID NO: 342860 - protein, 347 aa, unidentified
MPQYIGIDLHKATSFITRMDQRGRILEQLQLRNDAPTLQGYLTRLRPDTRIAVEATGNWTYLYELIEDRHPDLVLAHPLKTKAIASARIKTDKIDATTLAHLLRADLLPAAYIPPRPVRDTREVLRTRASLVRLQTQVKNKVHAILAKTGLRTPTKNAFGKKAQRFLAQVPVRPCYRLALDGYLRLLAALTTELATVTATIEAQVQRDPQAQLLCTMPGIGPYSALLILSEIGDVRRFPDARRLCSYAGLVPSVHASGGTTRHGRLTKQGSKWLRWILVEVSVHAITGAPQFRSLYHRVAKKHGANVGRVAVARAMLKTIYAMLRKGEAFRSIGTGTTGQRRGVMAG

SEQ ID NO: 342861 - protein, 347 aa, unidentified
MKYYVGLDVSLNTVFVCIVNEKGKVLKENEIPSTPEAIGSFLMGTGLEIEKIGLESGNLTHYLKKGLKAMGYEVVGMESRKMAAILATIINKTDKNDARGIAEALRVGHYRECVHRSDEAIEIRTILHARQTAVEERTHLLSSIKGHVKMYGIKLGKGKSKTFRTKVEEAISILKPRVQRVIKNLLNILDALEKEIRELDREVQALAKEDKEVQLLQTIDGVGPITALAFKAEIDDPKRFEDSKDVAAYIGLTPSQYSSGETQRQGSISKKGPKRMRCLLVESATSLLTRCQAWSKLKAWGMKLMKKKGKKKAIIAVARKLAVMMHRMLITQKSFERTDKTQELKVA

SEQ ID NO: 342862 - protein, 404 aa, unidentified
MYNAVGIDVSKGKSTVAVLQPGGTVIRKPFDVAHTSLSLNELADYLGTLDGDTRIVMECTGRYHEPVLKALSEAGLFVSVVNPHLIKNFGNNSLRKVKSDPADAKKIARYTLDNWADLRQYSSMDNTRTQLKVLNSQFSFFMKQKVAAKANLIALLDNTYPGVNKLFDSPVRDDGSEKWVDYAYSFWHADCVRKIGLKTFTERYKAFCKKHHYIFQPDKPEELFAASKELVAVFPKEKTYKLLIQQSIQQLNLASEHVERLRREMNELASTLPEYNTVMGIYGVGKTYGPQLIAEIGDVSRFTHREALTAFAGVDPGVDESGQHKSKSNKASKVGSARLRKTLFQIMTTLFQNAPEDDPVYRFLDKKRSQGKPYYVYMTAGANKFLRIYYGKVKECLRNLEQDS

SEQ ID NO: 342863 - protein, 405 aa, unidentified
MVTVGVDWAEAHHDVAIHDPQGRSLRTGRIDTGPAGFSELLAMIADCGAAPETTAVAVETDKNLLVVALQGAGFEVFAINPRAVARYRERVGQAGAKSDARDAAILADILRTDRHLHRVLPHPSEQARAVKALARQHQEAIWALHQTLSRLRSLLLEFYPAAVTTFPQLKHHTALAVLAAAPTPAQGRRLTRRQVVTILHRVGRRNDAGLAEQITAGLRGPALVQPQPVEDALGVSVAALVAVAQTMTAGIEALEAQLAVVFDAHPWAPVLRSAPGLGPVLAARVLAEIGDDPTRFATTANLRSFAGTAPVTRASGKARWVQARRVRNKRLADACHWWAFAALTRSPGARAHYDRRRAAGDHHNAALRHLANTLLSKIWHCLQHRQAWNEHHAWLTPANPPAVAA

SEQ ID NO: 342864 - protein, 503 aa, unidentified
MAKRKKSTFERLTKGKLNHKERKEFQRRLQSDDPGLEVVHPHAAGIDIGNESHFVAVAPGRDPEPVREFGSWTADLLRMAAWLKSCGVQDVVMQSTGVYWIAAYEVLEEAGFKVCLANARDTKNLPGRKTDVQESQWLLKLHTYGLLRNSFRPPEEIRHVRTIWRLRGRHVQEAARAIQHMQKALITMNVQLSNTISDLSGTTGQTIIRAILKGERNPYKLAEMKDYRVRASNEEIARSLEGNWQEDVLFELQQAVDAYDFMQQQIAKCDRQLKKYLAVLPDRPMAQAEEVKSATVGPVSEPEVSANGNQHKSKNQNRKKAQIDAMLTKSGKKSAKNAPKFDLRNELTRICGVDLTTIDGVDVMTVQTFVSELGTDMTRWATENHLVSWLKLAPNRGVSGGKLIKHERIKVKTEALRMAASSLEHSESYLGARYRHLKSRLGPKKAIKAMAAHLARLFYRMLTQGQAWVDRGAQEHERKRTERETRSLQRKATALGFRLEPAA

SEQ ID NO: 342865 - protein, 424 aa, unidentified
MKFKMQDKQNQLIERITDKHLVVGVDIAQQFHVARAVNFRGIVVGDPITFPNNEEGFSSLLIWINSIKRLHKLEAAIVGMEPTGHYWINLSKWLMKQDIEVVTVNPYLVKRNKENRDNTQSKSDKKDALVIADMVKNGYYAFVRDTSESFEKLRVLMSNRDVIVKRLVSSINQLNRWVDIVFPELRQVFKDITAKGAIATLRLFPSPMELGSMKPEEIVAGWKLLMKRQPGLKKAYLLLNVARKSVGTRQALEAYKFHLEQLLEEYDLAVQQLERVELAIKDELPKIPFANKLLMIKGISEISLAGILGEAGDLSGFSHGNSLLRHAGLHLAEASSGKWKGQIIISKRGRSRLRRFLYLATMSLVMNNPEFKALHSNNVKVKKMKKMKSIMKLIGKLARIFVGIARKNEAYCAKKVQPLTELAA

SEQ ID NO: 342866 - protein, 391 aa, unidentified
MSMYFVGIDISKYKHDCCIISAADQQIISKFTITNDKDGFEQLLTALNSLSNPEDIKIGFESTAHYALNLELFLENAHHSFMEVNPVLIKEYKKSTTLRRTKTDSVDCESIARWLITVEYKPHSKGFYHAYSLKSLTRLRDRLIRQRSFYLVKITNVLDHTFPEFKPFFNERLSKTALYLLENYGSAEKMARMNSASYDKLRCISRGKFSIQQFLRLKELAANTVGVNNSIFDLELNTLLTLYKSLSDEINTLETEIIKLIEEVHPHYMSIPGIGSISAAVIYAEYGDISNFSNPGQMLAFAGIEPGINDSGTESHGGRMVKHGSSQLRYVLLNACLPLIRFDLTFATYYEKKRAEGKKHRVAITHVAKKLIRVIYALERQDVDFNAQKLR

SEQ ID NO: 342867 - protein, 330 aa, unidentified
MSDYVGIDIGAKSVIVSVRRAGRTLVSQEFRQTPEGHNALIEKLGRQVACVVLEATGVYYLDLAMTLHRAGLPVAVINPRSFHHFANLKLNSSKTDAVDAALLAEYGECIKPALWQAPDEALMGLRDIGRQINRLTAARTQAKNRLHALRSKSNTLALLIEDEADGIERLDLRIERLSKAALELINQQPHIKQQLANITCAKGIGQTSAIAMLAELCVLPRELKAPQVSRYAGLDVRLCQSGTSVNRPGRLSKAGNAYLRSAFFMPALSAVRHDPNAKAFYEALQQRGKKKIQALCAVMRKYLTGVWACLKLDVPFDSSKLFSIEHLENA

SEQ ID NO: 342868 - protein, 347 aa, unidentified
MKVLIGVDPHKASIAVAAVDEDLGELLEGASFLQDRAGLRSLERWAKRFPERRWAIENAGGLGRHLAVRLAASGESVVDVPPKLSARVRALSTGNARKNDGVDALATALAASRNERLAAVDPEAASEVLRLLSERREDLVAERTRALNRLHGLLRDLVPGGVARTLSADRAARILRGIRSCGDASARLRRQLASEVLRDVRTLDRKIADLNGRIEAEVEASGTTLTEIFGIGPILAARIIGTVGDVGRFPTKAHFASYAGTAPLEASSGEVVRHRLSLAGNRKLNYALHMVAVCQARSATRGGTYYQKKMEEGKSRKEALRCLKRRVSDAVFRSLMADSQAPSRSAA

SEQ ID NO: 342869 - protein, 417 aa, unidentified
MAEEIEWFGGIDWASQTHQVCLVDAHGECLGERAVAHGGPGIEELCDWLITRTGATPEVIGVAIEMTQGPIVEALLERGFCVYGINPKQLDRFRDRFTVAGAKDDRRDAHVLGDSLRTDRHAFRRLSNDEPVIVKLREWSRMADDLQQERNRLASRMREQLWRYYPQMLELADDLAADWFLDLWSRAPTPAMAVRLRETTIERFVKAHRLRRWQASEVLSILKQKPLSVAPGVVEAASDHIRTLTVRIRLVNQQLKAAHRKLDELCAQLIPSEEDEPGQQCEQRDVVILRSMPGLGRIILAVLLAEVWQPLRRRDYHALRSLSGVAPVTRRSGKTRVVVRRYACNKRLANALYHWARLATQHDALSRRRYAALRRRGHSHGRALRTVADRLLSVACTLLEQQTLFDPTYEVRDAASG

SEQ ID NO: 342870 - protein, 446 aa, unidentified
MKKSSRMSVIHSHAAGVDIGAEFHVVAVPPDADAEPVRTFQSFTGDLHRMSDWLKTCHITTIAMESTGVYWLPAFEILEAAGFNVILVNARDAKNVPGRKTDVNDAQWLQKLHSFGLLRASFRPEHDISVLRSYLRQRERLTEYRAAHIQHMQKALMQMNVQLHHAVSDITGVTGLSIVRAIVSGERDPSVLIQYRDVRCKKTPEVLQQALTGNWQPEHLFALEQSVAFFDFYQEKIRECDDQIETSLLQLSTGTEEPEGVLPSARHRTKQPNQLSFDVRPLLWKITGADLTQIHGFGPYLALKFVAECGTDMNRWPDASHFTSWLCLSPGNKISGGKVLSSKTRRSSSRIAAALRLAATTIGRSDTALGAFYRRLSSRIGKAKAVTATARKLAILFYNALKYGQKYVDPGADYYEERYRNRVLDGLKRRAKSLGYSLQQDPELCV

SEQ ID NO: 342871 - protein, 356 aa, unidentified
MSTLETVHSGHVVIGVDTHKHIHVAAVLDTIGGILATLTVPTDTGGFKQLLTWADSFGKVLAFGIEGTGSYGATLTSFLRRHGHKVVEAGRPDRRQRRMNGKSDTLDAENAARSVLAGFATVIPKTADSSVEMIRQLKIAHDSAVTDRSAAMISMKAMLVHADDTLRRETNRMTPIKLARHLAALRPRNLETPADSLRHALRSLARRWQHLDSEAKELRASIEALVIRTAPQLLEQFGIGVDTAAEILIVAGDNPERIHSEAAFAKLAGISPVPTGSGMTSGRHRINHGGHRQLNAAIYRTVIVRMRFHEPTIAYVARRTAEGKSKRDIIRCLKRYVIREVYHLIKVNPRTGEIAG

SEQ ID NO: 342872 - protein, 387 aa, unidentified
MARKRTLSTLDTSIAYEAVGLDLAKTDVALAAFDSDHKEPYLIDRIPYDKLYELLADMAPTLVAMEPCSGAHQIAEQIQELGHEVMMISGRHVQAWVKDHCNGQKTDLNDAFAILNLAYDRWLTPIRGKTREECRLLALQASYRQLKGQRTKTMVHVKATLHAWGFPIRAGSFNQKALHELIDANREAFGDEVVETLHLMINRVHDLDHDIATVLKLLTEATKRDPRASLLRSIPGFGILTMSRWCAVIGDIARFDSPKQTMAFVGLVPNNRITGHHTETSSGREARGQGKMSKRGDKMLRSLCILGAASLCLMVRNDRLPDCPFVASIKERLASPRPWFKVLVYVAAKLVRIATALLKYGETFSFEKAGISKAVLKQWELEQAKAA

SEQ ID NO: 342873 - protein, 394 aa, unidentified
MKLVGIDVGKNSHHFCVMDKETGEFNVAPSSFSNNKEGFDFLINYLKPYSKKSILIGMEDTGHYHVALLKFLLSNGYTVALINPKTTDLTRKMEGGITKNDKLDTITICDVLDTPERKKQYRITKVDRFDLYEQRQLTRHHHNLKEELNVYCNRLQKSIDLVFPEFNTLFSSKYSIVYMNLLKTFGSAEAIASTDIRTIRKCFEIKGRGNRISLTPEKLKECAKNSIGISSEVETIQIKHLVSQITLIKEQIAEIDKKIEEFSITNNSPILSIPGISHFSGTSILAELGDIGNYSKPSQIIKFAGVAPYHYESSQYNAQHTGITKKGSKYLRKTLYQIILTVINNNPVFKKYYRLKISQGKGHRCAQGHCIRKLLRIIYHLLETGQSFDPALLR

SEQ ID NO: 342874 - protein, 416 aa, unidentified
MNAVGIDVSSRKSTVAVLRPLGEVVCLPFDVTHDIAGLASLVEKLKALDGETRVVMEHTGRYYEAVAKALHEAGLFVCAVNPLLIKEYGANSLRRVKTDKADAVKIARYALDNWADLRDFTPMDAIRYDLKTLNRQFQLASKQRTASANNLIALLEQSFPGIRKCFDSPVRSDGTQKWVDFAHSFWHVDCVRKQPFAAFCERYRKWCKRHAYLFKLSNAEEVYALAKRAVVLTPKSKVVKVLVQEAANQLSSISRSVEVYRAEMDRLAAMLPEYPVVMAMYGVGKSYGPQLMAEIGDVRRFERKQALVAFAGIDPMPNQSGDKNVRSNKSSKRGSPYLRKTLFNVIRTYLQCAPQDEPVFQFLNRKRAEGKPFYVYMLAAANKFLRRYYAKLRDYFASLDTLQPVAPIPTILKATL

SEQ ID NO: 342875 - protein, 423 aa, unidentified
METQRNKVCGADIHKNFLIATILSRDGAKIVKRFGMTIDDLLRFKIWVMENQCEKVAVESTGTYWIPIHAVLEGTIDLIVANAYKIKHTPGRKTDISDSEWLAELCLNGMIEPSRIFPKADRELRRLTRAREGYVNDITREKNRIHHSLESCGIKLSSVLADIFGKSGRYLMNSLMDGVGIEEILEGIPVNRIRKKADQIKESIRGSLDTTQIILIRGSLEQIESIQKRISELDKEIKIRIASRKEDLNIAMSIPGIGFTSAAIILAEIGDFRDFDKPEQLASWAGLIPAVYQSADKLVTGRITKHGSRHIRRILVEVAQVIARTNKSKLKRLFLRVQAKKGHNVAAVALARKVPCILHHLLMNREMYQEEGIKTKKTKSVDIDSSSEQPKMSLEEMIRSLVMAGYEVRDRKVARNRRVDTGG

SEQ ID NO: 342876 - protein, 278 aa, unidentified
MNILGIDVSNKTLDCCLLIQNEPYYHTFTNNDEGFYNLLSLYNNFKVNSLGFESTGNYHKKLESYFVNNGVLPYILKPISVSSFRKALAIHGKTDKTDSYAIAQFLLKGDLTEYLHYPTRDFFKPLLSSIVLLDKQIRQTKNSLHAIDLYPETTFITQELKDTYKYLQITKGRIEKKSIDLLFENCPEAKLIKNEIGGVGDKLLICLIPAIYDNFDKFTLKQINAFFGLNPLSFQSGTSVYKKEHISKKGNPLVLKMLYMASVSAVRNNEILRENILD

SEQ ID NO: 342877 - protein, 346 aa, unidentified
MKPDSQIVLGKYFRQCVGIDVSKEKFVACLEMYDIASDVGCNTACIEFKNTKTGFNQLVKWSRKECLKDYPLTFLMEFTGIYHEPLAYHLHKLGMTIFVVVPNKARDFARYEGIRTKTDEMDARSLALLGCYCRKLRPWFPPKPIYKELRQMTRFAVDITKIRTQIVNHIEALNHGQTPQKSVVGFYERFIADIDRRLKENEKNIIAKVDTDKELSETVSRLETIKGVRFLTIVSILAETDGFSMITNRKQLTSYAGLDVVAKQSGPQDPKHRISKAGNARIRAALYWPAITACHYNKQIQLSYGRICERNPNVKMIGVTAAMRRLLLLIYTLWKNGETYDPEKMK

SEQ ID NO: 342878 - protein, 381 aa, unidentified
MQRATSTATVSANTLNCALELSKKTWLLAIQFPDREQPSVYTIKGGDGAALVAQLIAARDRWAEVSGSPPSILICYEVGYDAFWLARFLMAHGIECLVIDPGSLEVKRRSRRVKTDRVDLKKLLRTLSAWCRGERHVWSVVRIPTVEEEDLRRSHRERSRLISERTAHSNRIKGLLFAQGIRVDNIKTLALEKLVTGDGRRLLPRLADEIARQMKRLAVVQEQIDEIERERDTAPTPCKETEKKRHLLLQLKSIGPTNAAVLSREVYYRHFDNQRQLGSFLGLTPSPFKSGEEERCQGISRAGSGRVRAAMIEAAWLWVQHQPKSALTIWFLKRTAGQSKRVRKIMIVALARKLAIALWRFVELGLVPDGAIFHPRVTAQA

SEQ ID NO: 342879 - protein, 414 aa, unidentified
MFYVGIDIAKRSHVACVMKEDNTLEIKPFSFASSRNGFKKLLIQLQSLSCDPSEVIIGMEATGLLFENLYRYLKEFAYRVVLLNPYQSAKFREMDTMKRVKNDNIDSVMIAALIKSGRFSEGYVSEEQLQTLRALYRHRASLDHQIKSIKRQVSTLLNVVFPEYEQIVSDPFSVTSLALLEKYPTAKHYEYASVDRILKTFRGIKGNNFNADKAQRLLDLARESIYSGAAKEGRALMIRSNITLIRTLRQQMQETQAAMVALFEENASEVLPEDQKVMADIIDNLRTIPGVSDKTILALLAECGNLDRFHSAKGLNSYLGLYPTLEQSGNATKHGRLAKRGANLAKKAIYLAAVAAIRHNAQLRQIYMNYRSKGRAKKECIIIVARKLLQIIYVIYTRNVPYDPQRVFVARPNQ

SEQ ID NO: 342880 - protein, 486 aa, unidentified
MKDTIARRAAEVTPDTLIVGVDMARRAAHAAVFVTRDGQRVSRLSFHTTSAGFAALKDGAQAAAQRVGAERILVGIEPAGSAWRLLAQFLDGAGIAYRLVNSFTLRRQREGDDLHHRKSDYRDAEMVTQLVRDGRYLRTQRHVGPYARLMVFQREYRRQQNVLYAETNTLLDLVDQLFPEFHVAFKDVLGVTARAVLRTGLTPAKIARLPLSALRARVRRAAQGRQAWLIRLSALQEVARGSVGLRDEAEQLARRVQQVLQRVDLLLAQCELSKGRLTAEVMALPEGRRLAALPGLGPVLAAGLLAEAGPLTRFSNIKQLPKLAGVIPVEHQSGMYRGRYTPMGKKGRPGLRWVCYRAALCLLRHNEVFREAYQRWTGRAERPLTPMQALGACMHKLLRVAYALARQEAATLPATNPILPGGPRSRSGEALRGSVIPTMTAGGTPACDELRTKYEGTAPRIPDVATWWELAENGGGNGEDGALEGS

SEQ ID NO: 342881 - protein, 381 aa, unidentified
MRWHAMILIQVSSAAMCSDMVAVPKIHPHKEETWMNFYTQQHKHYCGIDLHARAMYVCILDQHGTKLVHKNLPTTPEAFLRLIAPYREDLVVGVECMFTWYWLADLCQKEGIAFVLGHALYMKAIHGGKAKNDKIDAHKIAVLLRGGMFPLAYVYPSEMRATRDLLRRRCHLARKRAELLAHIHNTNSQYNLPEIGKRLANKANREDVADHFPDPSVRKTIEVDVSLIDHYDQLLGEVELYLTRSAKVHDVQTFARRQSVPGIGQILALVILYEIQDIARFPRVQDFVSYCRLVKCAKESNHKRLGTSGKKIGNVHLRWAFAETAVLFIRQSQPGKAYFAKLEHKHGKAKALTVLAHKLGRAVYYMLTREQAFDLTRFVTA

SEQ ID NO: 342882 - protein, 356 aa, unidentified
MSRDIQYIGMDVHKEAIVIAVLNGSGKLVMESIVETKASSILQFIHGLRGELHVTWEEGTWAAWLYDLLKPHVQQVLVCDPRRNALLKEGNKSDKIDARKLADLLRTGMLRSVYHGEHGLRTLRELGRSYRTISQDLNRVMNRIKALYRGWSIPCAGTQVYAPRYREEWLHKIEHAGVRRRAELLYQQLDGLQTLRRTLRPELLAESRKHKASKLLRQIPCIGPIRAARLIALMQTPHRFRSKRQLWTYSGLGIETRDSAQYRFVRGQLQHAKKPQQIRGLNQNHNHEMKEIFKGTATRASCGVGPLRDFYLSLQAKGMKPEMARLTLARKIAAIALTLWKKEERFDAEQLKPQAA

SEQ ID NO: 342883 - protein, 328 aa, unidentified
MQMVGIDVSAKTLSVRLSDVPEPLVFDNSPEGHQKLIRRLTKKGRRARVALEASGLYGLDLALALHRHPKSEVMVLNPRTVRDFARARLRRSKTDTVDAGVLREFVQRMPFQPWQPPAPERLELRALTRRLTDLTQLRTQEKNRLHAASVSNLLGAALRQDIAEHIAELDRRIEALQQHIRALIRQSPILQEDFRIITSAPGFADLSTQRLLGELCTLPPDMAGSQWVAHSGLDPRQEQSGTSLNKPGRISRQGNPHLRAILYLPALAAIRHDPHVRAFYQQLLARGKKPLQAVVAVMRKLLLCLHGMLRHRATFQGEKFRALTPQSP

SEQ ID NO: 342884 - protein, 330 aa, unidentified
MTSMGQEKMTQTLPPVAGCVTIGIDVGKDNLDAHLLPDNVHRRFPNSEAGCAALIAWVAPRQPSRVVFEATGAYHRGLEQALGRAGLAAVKVNPWQARRFAEATGTRLKTDTVDAAMLARFGATLQPPIPPARSAAIDVLQELQTARDALVKDRTAALNRAKTLTLPLLVAQNRARLQAIDDQLHAIDQERQRHLDADPDLQQRCAILTSIPGLAMLSALRLITEMPELGSLGAKQAASLAGLAPVTRQSGQWQGKSRIQGGRAGLRRALYMPALVAVRFNPDMKATYQALRRVGKPGKVAIVAVMRKLVVLANTLLRSRRCWTKAAPVG

SEQ ID NO: 342885 - protein, 349 aa, unidentified
MSMVCGLDLHRQQITFDALETVSGEVWKGRVWQPDRERFRRWLRHDVAGRANGEPVTMAVEGCTGWRYVAEEIVAAGFEVHVAEPADTQAARGNKHRAKTDRSDALLLRELLRRGELPESWVPPMVVLEWRERVRLYKSLLDQRRVWIQRIHAELFQHGVAVPQAEIGTPATRARLASDEVMLTAAARQRIAVSYAMIDATDAHLVPLRAQLQRFARRQPACRALIEAHYGIGPLTAVAVWSELGDCRRFTRSLQAVRHSGLDVVVDSSDQHRAGGYLSRQGPATLRWALFEAGMCASRPRSPDHAYYTTVKQRHDGKLAAISVARQLARRCYHTLRSLDPDLVYAIPA

SEQ ID NO: 342886 - protein, 352 aa, unidentified
MNQITTVGVELAKDVIVVCAADPAGRTVFFKQFGFQGFASWAANLPPCTIAMQACSSAHYWARTLSSLGHHAKLLAPDLVKPFRKSQAAKNDRNDAQAILITALQPDMRFVSVKSVEQQSILACHRMREGWKIERTALINRVRGLRAEFGIWLGRSPQNLARSLPRLIQDEQLPARVQGLLVQAQGHLQQLEALMEQGERDICEHARHSEAAQRLCALNGIGPITASALVVSVGDARDFRNGRQMAAWTGLVPKQSSSGGKDRLGKITKRGDTYLRGLLTQGARSALNAALTRAPDKRSRLEHWIVALRHRVGYHKSLVAIANKHARICWAMLARHESYAPQAGRHHTATAA

SEQ ID NO: 342887 - protein, 417 aa, unidentified
MSEHMTVVGIDVSKRSLEVATDSESFSVGNHEQGLEQLIARLLPLKPELVVLEASGGYEKAAWVALWAAGIKVARVNPRDAYHFAQASRQLAKTDRLDAQGLRRFGQHLQPAPTPVPSEADQELQELVRRRQQLVTIITAERNRQQPTRNSTIRQSIGRTIGNLEREKGAIEHAIEQKLEQQPSKRVALLESVPGVGRVTSAILIARWPELGTLSPREVAALVGVAPFTHHSGQWRGESHSFGGRADLRSALYMAAHNAVRCAGLLRDFYQRLRSAGKARPQALTACIRKLIVILNAMVKHNPHWSPPCPTPAGKNIRVSAASTSPQAGYSTRSLRLWTLWTPRRRLTFNTVALWLVSEGAPHRARARSPFADPKTGCVASTSLPTGRGKSDAAGCARFGRASSAEARINYKNQYAR

SEQ ID NO: 342888 - protein, 315 aa, unidentified
MTRMRHMENTPNLICVDVAKSELVLFDGKKIWAIPNEKEAINSVLKEFPKHRIVCEPTSIYHLELATLAFKNRNEVSLVNPKEIKNYRDCRAFRAKTDRIDACAIYEFSIRHYEALRLWKPPAKQLEKLYKLISQRSCVVRNRVTLRQVFGQDQAIKPVISETTTLVEVLESQISEIAKSYEDYLRFSPMPGVGPLVCATLVYLFNRYEFADDDAAVAFVGIDLRVSDSGKYKGSRRLSKRGDPLIRNILIQGGFGLMISKAASQAKRKFDAAGRHRTEQGVIAARKILRTAYVLHNTKTDFDLSKWHWMVDNET

SEQ ID NO: 342889 - protein, 481 aa, unidentified
MAKKSGQPVKSAASSAAPVSPSSRTRRVPAPRFSARFPQEDLHVINRHAAGIDLSGRNGHFLAVEVSETELEVLEVGGMTPDLVQWIPYLLDHGVTTAAMEATSIYWMPVADALEHVGIEVNLVNPCHAKNVPGRPKDDKLDARWLQKLHKYGLLTASFRPSEEIRPLQSMWRQRTYLVRRCADAIRHQQKALDQMNLHPHQVLSDLDGVTGQLIVRAILDGERDPARLAAFRDKRCACSEEELQAAMTGFYQDHLVFALKQAYERYQFYHQQIAEIDAQIETLLTTLIPQEPEAIQEAVAHDKHPLPHGKHAPAFNVTALLVMILGVDPTMLPGIAAQIALGLFAELGADLTRWATDRRFGAFLGIAPVKRISGGKVLSSKTRPGIHPAGVLFLQAAAAVAKTDTALGAFYRRLAIRIGKPKALTATAYKIARMYYHLLCDGQEYVELGVQQYEERYQARQLALLRKKAKSMGFELTPAA

SEQ ID NO: 342890 - protein, 342 aa, unidentified
MTDVHLIGIDIAKRVFQAHAINEKGETLWQKKLSRTQFDKFIREIPATLVAMETCGGAHHWGRVAQSVGHEVQLIPPQYVKPYVRRHKSDAIDAAAIAEAATRPSMKFVAVKSETQQSRSARFRTRELFVRQRTQLINALGGHLLEFGIALPQGQNSVQPLLRNAEAAVQTQVPRPMQPIARTYIRQIIALTEQITAYEKALRKEARENTEMKRMQSMPAIGPITALAVEAFCPPMQDFKTGRNFAAWLGLVPRQNSTGGKRKYGRITKMGQRDIRRLLIIGAMSQIAASKRAPERADPWLLDMLKRKPRLVAGVALANRMARRLWAMLKTKRDYEIQGAAA

SEQ ID NO: 342891 - protein, 497 aa, unidentified
MSTASQQEQEEKGSDAQRSASKRKARGGHCPQGKGSRRRSTRSKLAQSKLTITNPDAGGIDVGSRVHYVAVPEGRAEVSVRSFGAYTAQLDELAQWLKDCGITTVAMESTGVYWVSLYQKLEEAGFEVLLVDAHQAKHVPGRKSDVQDCQWLQQLHTYGLLRAAFRPEDSICRLRTLQRHRKNLVESAGMFVQHMQKALNEMNLHLHHVLSDISGYSGLAILDAILAGERDPRKLASLADYRVKKSQAQIEAALTGDYRPELLFVLDQSLQDYRQIQQQLTQCDLRIEKQLAQIADCTNPSQDCGPRPQGPESVGGKRGKIKPKDALEVSLAGHLKRILGVDLTTIPGLNVLAILTLISEIGTNMAKWRNEKAFVSWLGLSPNNKISGQRVLSSRTRKVVNRAATTLRLAAMVLGHTNTPLGSFYRRKRAQFGAPKAITATARKLGCLIYRLIKNGQDYQAPDLHVYELKYKDQILNSLRKRANSFGFNLVEVPKAA

SEQ ID NO: 342892 - protein, 400 aa, unidentified
MECVFGIDVSKENANVAVLVDNVVIKQFKIGLDRLGFSLLSDELNSFNAPLIIYEATAMYSRRLRAFLQRDGWKYTELNPLAAKKVMEEFRHTKTDALDAVGLARAMIKNHFRPTYQESPVYTELHDLERTYQQFNKDIVTNKNRLHRALQLTFPEIEHFMSSTDGVLYWHIVQRFPHPAIVLSHEENELTEIILTETSKKIGLKRAMKLANHLLALAQNSAPAKEPQSHAVRAVIALAKEVERINQLKAQIIVEMTTLGENLSEVPLLVSIPGIGIKTALCLIAELGDVRRFHSANAINAYIGIDLIRYESGQYEAKMHIRKRGNPYARKILYRAILNIISVSQYQPTLISANYKRKKQSAQSHGTKKIAIAAMSQFNRLMHHLILNNELYDSTTFMPE

SEQ ID NO: 342893 - protein, 318 aa, unidentified
MPQGTCVVGLDVAKSKVDACIRSMGLRLSRPSTAEGEAELLAWVRANRVGRAVMEASGGYERRWAKALRAAGVEVRIVDPKRIRHFAKAAGRLAKNDPIDAETIAWFAEAFPDADPQPHDAAREELDRLVQARTALKDEEDRIKQQREHRPPPIVAQALAAVAKAIRAERRKLEAAIAARIKANPTFARRAEIIDSVPGLGDQTVAGVIAWLPELGHVANEAAAALLGAAPYDDDSGSRKGQRHIRGGRRKLRNLLYMPVMGAATRHNPVLKAYYQRLRARGKEAKVALIACMRKLIVILNTMLARDETWNPPARAAA

SEQ ID NO: 342894 - protein, 341 aa, unidentified
MKPEMSILGIDIAKRVFHAVGMDERGKIVLRKRLSRHDLMPFLAKLPAVRIGMEACGGAHYWARRFREHGHEVKLMAPQFVKPYVKSNKNDSRDAEAIAEAVTRPTRRFVPIKDVDQQDIQALHRVRERLIGERTALINEVHGLMHEYGIVMPKGVSKFRQAVVEKLESEKDKLTALSQEMFWKLVEEFAALEKQLAYYQEKLDTLATTHPECQRLMTIPGIGPLTATALVAAVSDASAFKNGRQFAAWLGLVPRQHSTGGKERLLGISKRGDSYLRKLLVHGARTTIRWVGHKTDRRSQWMRQLVERRGTNRTAVAVANKNARIVWALLTSHQDYQLTTG

SEQ ID NO: 342895 - protein, 339 aa, unidentified
MNCTVIGLDLAKRIFQLHWVDMETGEICRQQLKRHQMTAFFANRKACTIAMEACGSAHYWGRKFTSQGHTIRLIAAQFVRPFVKSNKTDAADAQAIWEAAQRPDMKFVALKTEEQQSVLTLHRIREQLVKVRTMQINQMRGLLYEFGVDLPQGRQKVMVRVTEELAKLEDRVSGLVIDAIQQQIRRIKTLDQDIDEIEKKLLLWKKENNACQKLMNIPGVGILSATAAVATIGDAKTFKSGREFAAFLGLVPRQSGTGGRVKLLGISKRGDVYMRTLLIHGARSVIQHQKKNSPWLEKLLLRKPHNVVAVALANKMARIIWALLAHDRTFEKDYAAGTA

SEQ ID NO: 342896 - protein, 397 aa, unidentified
MNRPCISIDVSKGSSHVCGFTGYKEKFESVFEIKHDKDGLEKLDKLYDELNSEEQPIFIFESTGIYHRPLRFYLEKKKYPYVECSPLLAAKHRKNASIRSAKTDSRDTRALANLYYEVGLKESNQNLEVYYELKQLDRYYVSLTDYLIKSKVHFNEKLDVIFPNFRKEVSGNIYKNYYLELLLNYSHPDILSKTRIDAIENLLIKNGIQKSRSKNHALKIKEFSKNCFPGTMINSIDVMIFKDQLKDVMMYIKRREDIIEKMTSLGEVLPLYNLLLSIPGIGPVLAIRLVSELGDLSNFSTSKQLTAYAGLDPIIYQSGNYDGKGLKISKKGNKHLRTLLYQVVTICVYLKNDNSIKSYFEIKKQTVSTQSAYIACSDKLLRIIFGMNRTGELYKYQ

SEQ ID NO: 342897 - protein, 402 aa, unidentified
MNSVGIDISKGRSMVAVMRPFGEVVVSPFEVRHTDSELSELAKLLKSLDGETRVVMEATGNYHTPVAWLLHGAGLYVSVVNAKLVHGYGNNDLRRVKTDRKDAVKLANYGLDRWLTLPRYIPEEDTRLLLKNCYRQYQQYSKVQTMLKNNLISLLDTTFPGMNRLFNTPARADGSEKWVDFAADFWHCGCVCECSEKVFMNKYQRWCRKHGYNFSERKALDIYTEASGHIGVMPMSDTTKLLVAQAVSQLRATSAALAVLKQEMQTLASQLPEYPIVMEMFGVGPALGPQLMAEIGDVRRFHSKKALVAYAGIDAPPNDSGDVTGRHKGMSKVGAPSLRRTLFLVMSVYLQNAPLDEPIYQFMDRKRAEGKPYRVYMMASANKFLRIYYASVKAYLETLERF

SEQ ID NO: 342898 - protein, 343 aa, unidentified
MQAITTIGLDIAKSVFQVHGVDADGNVVIRRQLKRRYVLAFFQKLPPCLIGIEACASSHHWSRELEALGHTVRLMPPAYVKPYVKRHKNDAVDAEAICEAVTRANMRFVATKTPEQQSCLTLHRTRHLFIRQQTSVINAIRAHLAEFGIVAPVGRRGVEQLLGVVSDASDKRLPDVARACVAALGAQLQTLKVQILEFDRMIRAWHRSSEASRRLDDIPGVGPALATALVASVADPKVFRSGRDFSAWIGLVPKQNSSGGKDRLGSISKRGDRYLRSLFTTGALAVIRYAKIHGTRHRPWLTALLARRPTKVAAIALANKIARMAWAMMAKGERYKEPAALAA

SEQ ID NO: 342899 - protein, 338 aa, unidentified
MNIVFLGIDLAKNVFQLCGLNQAGKPVYTKRTGRKELLQTLANIPACLIGIEASTGAFYWQREFEKLGHKVKVISPQYVKPFVRGQKNDGNDAQAIAVALMQPTMQFVPPKSPEQQDIQALHRARQRIVNHRTATVCQIRGLLLDRGIPIGSAVSRARRAIPLILEDAENGLSSRMRRTIAELYDLFNDLERRIHFFDKEIETVFRQSEACQRIAKVKGIGPKTATAVVAAIGKGTEFKNGRHFAAWLGLVPRQHSSGDRQVLMNMTKKGDKHLRTLFIHGARAVVRVATNNNDGHMNQWVNQLKERRGFNKTTVAVANKNARIIWSMLRNDTGYQVV

SEQ ID NO: 342900 - protein, 345 aa, unidentified
MTNHPLNTTAESIPRLFAGVDVGADELVLVIRKNGKPFDPQKYANTRSDRARLVNKLIKLPGIKVCLEATGIYHFDLAIALHDVGVPVMVVNPKASHHFAKVLMKNSKTDAVDANTLAEYVERMDFVAWTRPSNQALALRGYARRIDALTGQKAAAKNHLHALSATEETPKALLRDAKLAISQLEKRIDTLAGEALALIDQHPELQRIFDLLTGIKGIAQTSAIALMGELLLLPPNLSHREWVKFAGLDPKAFESGKSVHKKMRLYKAGNRHIRSALYMPALSAKQHDPHVRAYFQHLIDNGTKPLQAVCAVMRKLLHAIHGMLKHDQPFDNTRFYAIPESIIAE

SEQ ID NO: 342901 - protein, 306 aa, unidentified
MVIGVDPHKASHTAVAIDEAEDELSSVKVRATRRQVEQLVSWAEPFEKRTWAIESAGGLGYLLAQQLVARGEEVLDVPATLASRIRVLATGRSNKNDPNDAHSVAIAALRAPNLRSVEAANHCEVLRLLAKRNRDLGSHRTRVICRLHALLAELAPGGIAKELYVSDAERLIAKITPETPAEQVRYDLALELLDDVRRLDAQTKESHRRIRIAVKASGTSLTDLYGVGPIIAAQIIGYAGDVGRFANRDAFASYNGTAPIEWSSGGRVVHRLSRRGNRRLNHALHMAAITQIRNPGTNGRCGLLRV

SEQ ID NO: 342902 - protein, 501 aa, unidentified
MKTKRSKAKIQAERKSTAVAYSEPAQELQVLRPDAGGIDCGAQEHYVAVPPDRVKAGQPTVRSFSAFTEGLDAAVEWLKACRVSTVAMESTGVYWIPLYQKLEAAGIEVYLVNAGHVRHVPGRKSDVQDPQWLRQLHRCGLLNASFRPEGIICQLRSLNRHRDNLVKSSASEIQHMQKALQQMNLHLHHVVSDITGLTGLRIIDAILAGQRDPEQLVKLRDKRVHKSTPQQMQAALVGDYRAEHLFVLNQSLQAYRFYQARIEECDRETEPLLEKLAQQVEAASARLKLDALKAADAQHGVRLPESPHESKASASSLKAKRHRKPRANEPKMELAGLLERICGVDLTRVVGLNVLSVLLIVSEIGVDMSKWRSAKAFCSWLGLCPGNKISGGKVLDSRTRQVVNRVANALRMAAQSAGRTETCLGIFYRRKQAHLGAPKATTATARKLACLVYHLLKYKQPYQEPDLALYQLRLQKAALTKLQRQATALGYTLLATAPAAA

SEQ ID NO: 342903 - protein, 443 aa, unidentified
MEMDAYQKGTILMSKANQPFISVGIDVGADISWMSIALPNQQIVGKPYKITHNNLHSLEKAVQTIKEAEEAHSLESHIFLESTGVYHYPLFCYLRDKGLKIAIINPIITKNSTNINIRKVHNDKFDSKKLALVGLKPDLKTSVIPTGLILDLRNLMREYYRLTDARSAYANKLQGQLRMVFPQYNKVFSKVTVNTSLTILEKYTTPEAFLSAEKDEVVTIIRKTARFGLAYAEKKYMAIMDAATAALTFGHSVPSNFTLIRLYISFIRLYDKEIALILAAMNELVVFNETELFVKQIRLIQTVKGAGFLTAVTLMCEIGDFSAFSSPKQLFAYFGLDPSVKQSGNFTGTKNKMSKRGSALARRAIHTIALTNIGRNKKGAPHNHVIYAYYQAKCKSKPKMVALGAVMHKVCNIIFAILRDEKEFAILTEEEHNARYRNSVFTA

SEQ ID NO: 342904 - protein, 486 aa, unidentified
MNCVGIDVSKGKSMIAVMRPLGEVVIPPFEVGHTESELCELSKLLGNLDGETRVVMETTGNYHFPVASFLYDSGFYVSVVNAMLVHSYGNNSLRRAKTDKKDAIKLANYGLDHWLTLPRYIPEDDVRLMLKTTYRQYQQCAKVQTMLKNNLISLLDTAFPDANRLFASPARADGSEKWVDFVAAFPHCECVCGLPERVFTAKYQKWCRKHGYNFNQDKALDIYASACGHFSVMPRTDTAKLLVVQAVSQLRAASASLAALRNEMQSLAASLPEYPVVMGMFGVGPALGPQLMAEIGDVRRFHSKKALVAFAGIDAPPYQSGQLEVRSRSISKRGSSALRRTLFLVMSVVLQRSPADEPVYQFMDRKRAEGKPYRVYGRDQQAHGYAYPYMIFANMQKLGVTSVRTVVKVGDTISDVKEGVNAGVWTVGVVEGSSELGLSQEEFEALTPQEREAACRKVEESFREAGAQFVIKNLSQLPELVCALGN

SEQ ID NO: 342905 - protein, 295 aa, unidentified
MGQVCQIGLDIAKEYFQVHGVDKNGKDVFNKKLKRKNVLSFFANLPPCLVGLEACGGAHYWARKIAKLDAGHTVKLISPRHVKPFVLNNKTDAADARAICEVVGRPSTRFVTVKTVEQQDLAAWHRIRERKIKERTALANQAKALLLEQGIVVAKGITRIRKFLPIAVENLENRLSMTARDYLSELYAELVTCDELVEKYESRIISFAKNDEACKRLQKIPGVGPITATAIVVHAADATEYKNGRGFAASLGLTPKEHSSGGKQRLPGISKRGSNTIRKLLIQGARIITRYALAG

SEQ ID NO: 342906 - protein, 347 aa, unidentified
MKRIAVDLAKSVYQVAESVRAGEVIQRKRLSRGAFARYVQEQVEPVEWVMEACGTAHYWGRIAQACGHRVLLLHPRYVRPYRRRNKTDRNDCDAILEAARCQGIHPVPVKSHEQQQLQQLHNLRETWKKSRTQRINLLRGIFREMGIEAPVTTAAFLQSACELLERPEVSALRGALQVILGEINLYEQSMHECEAQLARWHAEDEVVRKLDEVSGIGLLTASALKTAVGNPERFASGRQLSAWLGMTPREHSSGDRRKLGHISRQGNTYVRTLLIHGSRAALLAAQRCQRSTPERMTALQRWATETAARIGQNKAAVALANKLVRICWAVWCHERRFSGNWQSMPPA

SEQ ID NO: 342907 - protein, 408 aa, unidentified
MEVIHWVCCGLDVHQGSVIACLRRVAENGAISVEIREFSTTVQGLIELSEWLIDANCPIAAMESTGVYWKPVFHILSATVETWVVNARDVKHRRGKKKDRVDAKWISELLAHGLIEPSFVPPPQISALRDLIRMRTALVQTRTQIKNRTLGVLEDTNVKLASVVSDPFGVSGRAMMDALAKGNRDPKALAQLAMGVLRRKIPQLEAALEGTFTDHHALLMSLNLDMIDHTNAQIAQLDKRIDELMMPLQKEAERIESIPGVHHTAARIILSEIGTDMSRFGSAPRLASWAGMCPGDNESAGKRKSGKTRKGNRYLRRVLVECAWATRDTNTFLGSTFRRLRARIGGKRAAVAVGHKILVIVYHLLHEGTMYDEGRYNRPKQRQEKRELERALLTLQRLGYQVELTAVA

SEQ ID NO: 342908 - protein, 351 aa, unidentified
MLSQTTAVPKLFIGMDVHKKSWTVHFKTDLFDNKTMTMPADPLSIMRYVEKNFPDHEVSCCYEAGCCGYWIARELKEKGWKVKVVNPADVPRNNKQDWQKTDKIDSRNLCKHLSDGNLKGIYVPGEEQEQLRSLFRRRIHLSRHLRSIKNHIKSQLLYYGIKLPEQYDNPNWSREMKTWIGNIKWKYSSADETMKSRLRQLEFVWYEELHISNELRAYCRKYYRKDYYLYKSIPGIGGITAAAILSELGDIRRFNRLDELAAIVGLVPGIHQSSENKIDLGMTKRSNRQLRSLLVEASWVGVRTDMSLQQYYRKHAHKEPNKAIIKVAHKLLSRMRAVIISEIPYQTGLIK

SEQ ID NO: 342909 - protein, 353 aa, unidentified
MSDYYVGLDVHKASICIAVLNTEGKLVMESIVETSATTVIDFLKSLRGRVEVTFEEGTHAAWLYDILKKTKGHVLVCDPRKNRLLQEGNKSDKVDARKLAQLLRAGLLSSVYHGEHGTRDLKELVRSYEYLVEDATRVMNRIKALYRSRAISCAGADVYKPRQREVWLAKLPEAGARDRAARLFSELDHLTGLRREARQALVVECRRHPASKVLRKVPTLGIIRIAQLIASVVTPHRFRSKRQFWSYCGLAVTTKSSADHRIVGADVRRTRKAATTRGLTQNHNRTLKYVFKGAALTASRCEPFKSWYAELVERGLRPELARVTIARRIAAITLAVWKSGEAFDADKLIKHMA

SEQ ID NO: 342910 - protein, 455 aa, unidentified
MNRKRSKARIDRKMLMVHPNAAAIDVGATMHMAAVRADRTPEPVRSFGTFTTDLHRLVDGFTECGVETVVMESTSVYWIPIFELLDARGFTVFLVNARDAKHVPGRKTDVSDAQWLQRLHSYGLLRASFRPKGQIAELRAYVRQRERLLEYAASHIQHMQKALTQMNLQLHHVVADITGATGLRIIRAILAGDHDPKVLAQLRDYRCHARAETIEKALTGSYRPEHLFALEQALALYDADHEKVSACDVRIEAVLKELSIGRGRRSDSLLSPRRPRTNPVNGLAFDVRAALFALLGKDLTQIDGLGPYLSLKLVAECGDDLSAWASAKHFTSWLGLAPSNKISGGKVLSSRTRRCGSRAAALLRLAAVTVGRTDTALGAFYRRLSARVGKAKAVTATARKIAVLFYNAVRHGMEYVDPGASYYETRYRTRVIDNLHRRAKAFGFVLQPVEPSAVS

SEQ ID NO: 342911 - protein, 348 aa, unidentified
MGIVGGFDVHRAQITFEYLDTATDEIRRGQIKPVTRTDLRTWLERFRGVDDVAFALEATTGWRFVVDELEAAGIRPHLAEPADTRALRGPKRRAKTDRADAHHLRVLLQNGHLPESWIPPHHLQELRTRVRLRKALVEERTGWCQRMQATLFHHGQPRVRDLLSRQHRAWVERVELPPAARETIRVGLSMVDAINAELTPLDRQLRSFARRQGGCWALMAHYGIGELTAPAILAELGDVRRFSSSRHAVRHSGLDITVWDSDGKRPPGKLSRQGPEVLRWAVFEAAQASARERSPDHRYYLDVKARQGHNRAALSVARRILRWAYHTLRELGDEAIAPVDGAWEPRAA

SEQ ID NO: 342912 - protein, 551 aa, unidentified
MRGWGKLEEAQVTEVGRYRSGVVEPEREHGPRFRAPDSGYDPNAVLGLIPFKRVPHLTRPGRCLSRKGKAVSERKQRPEEAGEEQTQVVPKKRGRKRKGMCLEDRPILEPNAAGIDIGAREIFVAVHSDRDEHPVRVFPTFTEDLQKMAEWLVRCGITTVAMESTGVYWIPLYDVLEQYGLKPCLVNARGMKNVPGRRTDWHECQWLQFLHSVGLLRGAFRPEAEVCTVRSLMRHRNELALMANQHIQHMHKALTQMNLQIHHVIDDITGLTGLAIVDAILAGERNPAVLAELRDRRIKASPETIRKSLKGNWRPEHLFTLRQSRHSYQHYQDQIAACDAEIEKLVVRFTPRVDPDNRPLPPDRKQKQRRNKKKTGNPQTGFNLRTESYKLFGVDLTQVPGLAKNVLTLFTQVGRDMSKWPTAAHFASWLGLCPDNDISGGRVLWRGLRNIKHRGGQLFRLAAMGLHHDQTPMGDYLRRMKSKLGPAGATTATAHKIAIIFYTMLKRQVEYDATLWAQSDIAREKRLDEKLNRMAQRRGYKLVPLEEKPAA

SEQ ID NO: 342913 - protein, 443 aa, unidentified
MKELPVLDTRAAFCDVGSEHMHVSIAGGLPKVFGTFTSQLHELRDWLLGEGVHSIAMEATGVYWLSLYGVLEAAGLEVVMVNGRQTRNLPGRKTDMMDCQWGATLHAHGLLKSGFVPPSNIRKLQDYQRLRTDHIASAASQVQHMQKALERMNVKLHNVISSLMGVSGLAIVHAILDGERDPAKLLELCHSMIRNKKAKAVIEALRGTWEPEHLFALKQALQSWEHYQRQIAECDQQIDLLLQRITFNDTQGDGIGEKPKATAVKPPSANAPQIFGLHRMLIDLCQGKDLSILLGHTDYSVLQIISEVGTDLSKWPTEKHFTAWLGLAPGTSQSGKRKSNVKHSRNRVGRYFCMMARSLARSKDMALGGFYRRLAARRGGLIANIALARKLAVLFWRVMVKGTEFVEEGLAAYEAKFLEGKKRSLRRLARELGQTLSPIPVTV

SEQ ID NO: 342914 - protein, 418 aa, unidentified
MNVKARRTKKQVNVENQAINLLSKEELNKKIEVVEKELRSYTWRELETNGKFAKNDKLSFITDDMLIVGCDIGSENHYIRAIDVRGRELSRGAYEFSNTSEGFENAKAWVLALAAKHDKKQIVLGLEPTGHYWFALAAWMISNGISVVQVNPYAVKQSKEIEDNSQLKDDRKDPKLIANLVKDGNYGMPYLPEKVYADMRRLSMFRDQLTEDRIRNINRLHRELKIYFPEYMDAFGKIDGAFTLEVLKVSAIPSDITALGAEGIKNIWHNVKLRGCGYSRANEIVSYAEKSVGLTDGIDAGREAVKWYAEQILKLVACSSGKHKGQTKISHRGRKRLRYWLFQAAKSAVSHADEFKQLHEYYTTRTNNPLKKMQSLVVIACKILRVIYTILKTGTTYDPQKLLEDIKRPTTSQTPMAA

SEQ ID NO: 342915 - protein, 311 aa, unidentified
MKIICGVDVSKAKLDACIEPGAAFASFDNTPAGIAELAAFCRQHGAELAVMEATGGYERLAFLLLSGAGMPCAMTNPRSVRLYAEAMGVLEKTDRIDASVIARFAYAKNLQPTPAPTSAQQRMKALVARLRQVTDDLIVQKQRRSSLDNAEILASLNEVITLLKRQSRSLEGEIASMIDDDPLWAHLSDTFRSIKGVADRTVAWLVADLPEIGTYSNKAIAKLVGVAPIANDSGKRRGKRPVRGGRAGVRSILFLVAATAARYDKSLGDFRDRLLAAGKEKMVVRIALARKLLVRLNAKARDARAQYANAT

SEQ ID NO: 342916 - protein, 341 aa, unidentified
MQIAVLGIDLGKNSCSLVGLDGSGKVVVRRRMRRETVIAFSARLPACIVAMEACCGAHHIGRALAAQGHVVRLMSPEYVRPYVKAQKNDDRDAEGIAEAATRPTMRFVELKTERQLDMQTLHRVRDQLIGERTSLMNQIRSLLLKRGHVVPQGRARLAARLGEIFVDSSVALSQRILELIKDMRERWRALDERIQAFDDEFAEQARNDEHARRLVTIPGIGALNATALVAAIGDARTFARGRDLAAWLGLVPRQATTGGRPKLLGITKRGSKYLRKMLIQGARSAMPTLKKSNTRLGSWLRGLLSRTHGNVAVVALAAKMARIVWALLRHARVYEAIPLAP

SEQ ID NO: 342917 - protein, 403 aa, unidentified
MIFIGDDWAEDHHDVYLMDEAGKRLASRQLPEGLTGVRQLHGLIAEHAEEPDQVVIGIETDRGLWVGALSGAGYQVYAINPLAVARYRDRHHVSGAKSDASDAKLLADLVRTDRHNHRRIAGDSAEAEGIKVLARAHQSLIWARTRHTNALRSTLREYFPAALVAFDDLAHGDALGVLGRAPTPGLAARLDRPTIQSALKRGGRKRNIAARAREIQAALRSEQLAAPAPVATAFGATTRAAVGIIAELNRQIAELETALAEHFDQHPDAGIYRSLPGLGVTLGARVLGEFGDDPNRYTDAKSRRNYAGTSPLTVASGKKRAVLARHARNRRLYDAIDQWAFCALSASPGARAFYDHHRTAGDTHHQALRALGNRLVGILHGCLRHQTFYNEHTAWAHRRPAAA

SEQ ID NO: 342918 - protein, 376 aa, unidentified
MERGSLMLNTTTFVGLDVHARSIKAVALDAMTGEVRSATFGYDAAEVAGWVSSVDPSAKCVYESGVTGFDLQKRLSSMGIDCVVGAVSKMIKPSADRRRKNDRNDAEFLARMLSVGNVVEVWVPDDECEAARDLTRALDDAREDLKRCKQRLSKFLLRHGLVFSETNAKGQRKKNWTAAHWAWIRSISFPDKADDEVLAYYIDAARQAMEDKARLERLVEAEASKPRWKKRVDSVRCLKGIDVTSAADLVFEAGEFSRFKSARSFAAWIGLTPSEHSSGESVRQGGITKAGNKHLRRVLVESAWHYLGCSPRSKDLAKGQVPDPAARRHAAKGVRRLVERRRAMLERGVHKNKANVATARELACWCWAVGRMVENG

SEQ ID NO: 342919 - protein, 412 aa, unidentified
MQVQYPHCCGLDVHKATVVACLLHVDSQGQRSKDIRTFGTTTDELLALGDWLRAGNATHVAMEATGSYWKPVYNLLEGQLTVWVVNAAHIKAVPGHKTDVHDAEWIADLLQHGLLKPSFIPDRFQRELRDLTRTRTNVVDERSAVVNRVQQVLEDANLKVAGVATDIMGVSGRAMLAAIVAGTTDSATLADLAKGKLRNKREQLERALSGRVGAHHRLLLSMHLAHIDFLDEHVAQLNAEIAERLKPFDDELSRLDAIPGVGRATAEVLLAEIGPDMTRFPTAGHLASWAGMCPGNYESAGKRKRGKTRKGSKFMRRALTEAARAAARKRGCYPAAQYRRLVVRRGPGKAAVAVGHTLLITAYYLLLRHDTYRDLDPSLLDERLRTRTRQRALTQLQALGYEVTLTEHPAAA

SEQ ID NO: 342920 - protein, 322 aa, unidentified
MKEDRVLEVTPLFVGIDVSKAQLDVAIRPTGERESVSNDKAGIKALVRRLGKVGPALIVLEATGGFERQATRALVCAELPAVVVNPRQVRDFAKATGQLAKTDSIDAEVLARFGEAGRPAVRPLPDAFTVELRAHTTRRRQITDMMVAERNRLAMASKALTKRINAHIRWLESELEQVNKDLDRSIRHSPICKQNEDLLRSVPSIGPVTSRVLLAELPELGRLNRKQISALVGVAPFNRDSGTLKGRRSIWGGRANVRAALYMAAWVATRRNSVIRKFYTRLLTAGKERKVALVACMHKLLVIVNSMIKHQTRWSEISLQTT

SEQ ID NO: 342921 - protein, 340 aa, unidentified
MAIVGAFDVHRRQITFDYWDSDTGRVQRGRVIACREVLRSWLDRFAQCGEVMFAVEGCTGWRFVVEELRRAGIQAHLAEPADAATARGPKRRAKTDRADAQHLRELLAQGRLPESWIPPEQVLEMRTTLELFKDLREEHTAWVQRLHATLFHQGVPAVAGDVLASAQRHQLETGAGLSPAAHQAVMTTLRVLDGLDAELVVLRRQITTFARRQPGCRALQQQYGVGPITAAAIWAQLGDTRRFSASRKAVHHTGLDVTVYSSDGKRTPGHLSRQGSPTLRWALFEAGTCAAHPSSPDYDYYTRVKDRCGGNRAALSMARKIARRSHHILRALGDQALAPV

SEQ ID NO: 342922 - protein, 396 aa, unidentified
MASMTVPALNPQPNQVTMVVGGVDTHKDLHVAAVVTGDGTMLGTESFSTTRAGYRALLRWMRSFGDLRRVGIEGTGSYGAGLTRHLAEAAVEVLEVDRPDRTDRRRRGKSDTLDAVCAAQAALAGRRASIPKSRDGRVESLRVLKLTRATAIRARTKALQLLRHHIVSAPEELRDQVRNLTRMQLIRTCAAWRPDTVGYRDPVVATRVSLKSLARRILDLNDEIADLDALIQPLVRELAPQLLASCCIGIETAGQLLVTLGDNPARIRSEPAFAMLCGVAPLPASSGMTQRHRLNRGGDRQANRALHMIVISRLRVDERTKAYAAKKTAQGHSKLEIIRCLKRLLAREVYYLLRPAAAQHTAPPDLTDGRFLHPQPTRRRAGAGNLPPNHGPVTQA

SEQ ID NO: 342923 - protein, 446 aa, unidentified
MANLPILDAHAAFIDVGSEQMHGSVAGGAPRVFGTVTAQLHALRDWLKAQDVRSVAMEATGVYWLPLYGVLEAAGFEVCMVNGRQTRNLPGRKSDMQDCQWGATLHAHGLLRAGFVPPADIRRLQDYMRLRADHIEMAAAHVQHMQQALERMNIKLHDVIAKLTGVSGLAVVRSILDGERDPQRLLLLCDTQIQRAKAERVKQSLLGTWTEEHLFALRQALQSWEHYQDQIAECDRRIETLLHDIDPGDPNHTTALAARPSRPGVNAPYIADLRVMLAHMCGGQDLTQLPANTEYSVLQVVAEVGTDLTKWRTEKHFTSWMGLAPGSHQSGKRKRSVKRNRNRAGRIFCVIARSLARSKDIALGGFYRRLAARRGGLVANIALARKLAVLFWRVMVRGMDYVEHGLQQYEAKVLETKQKSLRRLARQLGQQLVPIAIQMPPASPKT

SEQ ID NO: 342924 - protein, 370 aa, unidentified
MQTVRSFVGMDVHKETISISVAEDGRNGPVRFIGVIPNQPDDIAKMAKRLAKHGELDFCYEAGGCGYNIYRQLTALGHSCTVAATSMIPRKPGERIKTDRRDSQKLAILHRSGDLTKVWVPDATHEALRDLVRARVDASMHLMRCRQQLLAFLLRHGRSYPTGKHWTQRHRSWLAGQTFQQEVHRIVFQDYVEAVWTAQERRDALIERIAAMTTVWSLGPLVEALRGLRGIDLLSSATFLATTGDLSRFESPRMLMGYLGLVPSEHSSGGSVRRGGITKTGNREARRMLIEAAWSYRYPARVAKEKAEILVRLPKSVRDIAWKAQTRLCARYRAMIARGKKPTVVVAALARELAGFIWAIGQEMRTPMTT

SEQ ID NO: 342925 - protein, 428 aa, unidentified
MSKLFISVGIDVGADFSFMSLALPNQTFIGKPFKIVHNNLNSLEKAVMAIKEAEELYSMNGRIIMESTGIYHYPLFCYLRDKGFDCAVINPIITKNSTNLNIRKVENDKSASKNLALIGLKPDLKTSVMLSGAVLDLRNLVREYYTLMDCRSAYVNKLLGVLKVSFPRYIGVFSKVTVKTSLALLEKYRSPAAFLSAKKSEIIKIISKTARFGKTYAEKQYHVIIEAAESAGVFGNFVSSNAIQIGLCVSFIKKYDDEIANFLAAMHKFVDSHADETFVKQIRLIETIPGAGFLSAVTVVAEIGDFSVFKSPKQLFAYFGLDPAVKQSGNFKGTNVKMSKRGSAVARRAIFTIALVGVGLKRKGTANNPVLRDYYLKKCQSKLKMVALGAVMHKVCNIIFAVLRDNKAFSFITQEQHIQNYLANSEAA

SEQ ID NO: 342926 - protein, 420 aa, unidentified
MRVVVERCAGLDVHKDSVVACVRTPDAGGGWQTVTRTFGTVTAELLALRDWLVACGVTLVGMEATGVYWKSPFYVIEDRVEVWLLNARHLKKVPGRKTDVQDAEWICEMVAHGLVRSSFVPPKPIRELRELTRYRRVQIEERSREAQRLDKVLQDAGIKLSSVATDILGKSGRDMLAALIAGTRDPEVLAQLARGKLRAKLPALREALVGRFAAQHAVVVSAILSKLDFLDELIGELSAEIDRVIDPFAAQRDLLTTIPGVDRRTAEAIISEIGIDMDRFPSAGHLASWAGMAPGQHESAGKRRSGRARPGNSWLQRHLTTAAMAAARTKGSYLSAQYHRLAPRRGKARARKAVGHSILVAIHHMLSAQTTWHDLGDDWYQRRHNPLVQARRKLHELTTLGCDVAVQPDGTVIVTPPAAA

SEQ ID NO: 342927 - protein, 335 aa, unidentified
MHYLYYVGLDVSKETFDASLVASEDANEMAHRKFANSRKGICSCLHWVEKRHGILLDDVIFCAEDMGSYISEMAVCASDRTLNFNFSLISPLVIKYSMGIARGKTDRVDARRIAEYAITHYRKIALYLPAEKELCQLRTWLILRAHLAKQRVAKLVLLEKLDYKEKFADVSIQRSMLQEEIAYAETHMKTIEREMKELIAADSNICRNYKLLTSIKGVGPITAIVMLCSTLNFTKITDHRKFACYCGLAPFEHSSGTSVRGGCHTSSMANRDIKVQLNRSALIAIRCDPQLKAYYERKVAEGKHKFSVLNAVRAKIAARCFAVVRRGTPYVALQI

SEQ ID NO: 342928 - protein, 451 aa, unidentified
MTKNKIEMDIIHPHCAGIDVGSRSHFVAIGQGDGDVKEFGVYADELIALAQHLQAHGITSVAMESTGNYWQNLYVELVKHGMEVTLCNGKFTKNIKGKKTDVKDARWIQKLHTMGLLSGSFLPDDTTETLRTYCRQRQNMIDLAAEATHKMQKYLKLLNFRLDVVVRDVCGLTGLAIIADICKGNLDPEKLSEHRHGNCRKSKDEIAKALKGNNRKDYLFGLKQEYESYQFYQKKIAECEIQINTLLKRQINTDPEKKKLKTSDKGHKRVNKNAIKGIDLNQASYQYFGGTDLMSIEGVSHSTILTIMSEVGPEGFKKFSTAKEFASWLRLSPNNRISGGKLLSSKTPKGSNRLKIALRNAANAIGNLKDTHLSNFFKRVAYRKGRTVAVSATARKLAVIIWNMVVKQVPYQPPTQYLFLDEKRKLAVIAKMKKQIGKLGLAKEELGFVNT

SEQ ID NO: 342929 - protein, 356 aa, unidentified
MIVIGADTHKSSHTLVAVDSVTGRRVGVCTVASTTAGTLDALSWARRVCGGADRVWAVEDCRHVSGRLERLLISAGEAVVRVAPRLMAGARSSGRERGKSDPIDATAVARAAIREGVEQLPVARLEGAELDVRLLLDHHDDLVKARSQSQQRLRWHLHDLYDDLSIPAGALDRTVWLDRVLGRLRRSPQTTRVRIARDLVCEIRGLTRRIRELEQEIRLLVCELCPQLVAMPGCGPLTAAKLLGEVAGADRFKSDAKLARAAGVAPVPASSGRQDRHRLDRGGNRQLNLALHRLAVNAARHDPTTAAYLARKQAQGMSRMEALRCLKRHLVRRVHKLLTQPAHDQARAPETALALT

SEQ ID NO: 342930 - protein, 347 aa, unidentified
MRFYTQSHRYYCGIDLHARWMYLCILDPEGEVLLHRNLRAGPEAFLKAVEPYRQDLVVAVECIFSWYWLADLCAQHGIEFVLGHALYMKAIHGGKAKNDRIDSQKIAVLLRGGMIPVAYVYPPEMRSTRDLLRRRTYLMRKRAELLVHVQNTNSQYNLPEIGKKIAYRANRSGVAQRFSDPAVQTSIAADLSLIDFYDTLLNRLELFITSQAKQQNHHSFYLLRSVPGIGKILALTLLYEIHDISRFERVQEFVSYCRLVKCSRQSAGKNYGFSGKKIGNVHLKWAFSEAAVLFLRHNPEGQKLLARLERKHGKAKALTILAHKLARAVYFILRREKAFDLTQFLAA

SEQ ID NO: 342931 - protein, 400 aa, unidentified
MNAVGIDVSKGKSTVAIMRPFGEVVAEPFEVSHTDAELRKLACFLENLPGETRIVMEYTGSYWQPIAKVLHDAGLFVSAVNALLIYKYGNNSIRKGKTDKLDAVKIANYCLDRWTDLERYAPADQIRQTLKICRRQYDQYIRLKVNLKNNLIALLDGTFPGLNTLFKSAPRDTDGHEKWVDFAGKFWHCQCVCGNSEKVFANQYRKWCAKAGYRFSAEKAAAIYAHAGSQVDTLPMTSAIQCLITHAVAQLNMIIETISAIQHEMLTLASQLPEYPIVMRMFGVGPVLGPQLMAEIGDVRRFHCKQSLVAFAGVDAPPCQSGTFESKNRHISKRGSPRLRKTLFQVMSTIIQHAPADDPVFQFLDRKRREGKHYYVYMTAAANKFLRIYYGTVMAYLEKL

SEQ ID NO: 342932 - protein, 419 aa, unidentified
MIGTLVVGVDVAKEVHWARFVDYRGVEHGKAMSFRNNRQGYEKIVAKIHEICKMKTLRYPIETIIVGMEPTGHYWKALANYIMIEGYRVVGVNPYHTKKSKELDDNSPTASDKKDAITIARLVKDGRFFDPYLPQEEYAELRGLSNARVSAMKRNNAVKNTITAIIDEYFPEIYTVFKNPLKGKASRQILRSCPFPAFILTMGAEEVLAEIKKAVKKTVGMKKVQELLNVAKDSICVSYGLDAARMRLKWLLDELELLERQISEIEQAMEAVLLKTGYAEQILGIKGIGVVTAASFLGEVGDPLRFQNARQIANYAGYNLTEDSSGKSKSGTVISKRGRKQLRSILYQMAFTMVGANAEMKELYRHLTTRKNNPLKKKQALVVVSKKIITVIYSLLKKQENYKPELVLGTARRELMMAA

SEQ ID NO: 342933 - protein, 361 aa, unidentified
MSYTSAWNNATEMPVVTIGLDLGDRTSRIYEVSATAARLTEASVPTTPAALATYFGKRASCRVVLEVGTHSPWVARTLTELGHEVIVANPSAVYGQGRRRKRNDRMDAEFLARQGRADVKLLHPIRHRSAAAQADLALLRARDQLVQTRTGLINHVRGAVKAIGARLTRCAAEAFPRRVRAEVPEALRPALTPLLEVIGELSQRIAGYDRQLVAAIRDRYPVAMRLQQPAGVGPLTALAYVLLVEDPQRFGRSRDVGAYFGLVPRLDESSDSRPQLRISKAGDGLGRRLLVSAAHYILGPFGPPCDLRRYGEALAARGGKNAKKRAVVAVARKLAVLLHRLWVSETAYDPDYLATRPTRAA

SEQ ID NO: 342934 - protein, 385 aa, unidentified
MRGKAFVPRDYDVFSGLDVSKKSMSVTFTNHQGFIRSLNMPHKAEPLLHYVRKHFPDQKIAFVYEAGPTGYGLYDGLAAQAYPCLIVAPSMIPRAPGQRVKTNRLDSKALSENLRGGQLKSIHVPSPTYRQLRHLTQLRDVLVSELAGMKQRIKSLLLFEGIEFPPAPPGSQWSFMVKDKLRKLSCSGTVRFKLDQLLDSLEFNEKQVLKTITEIRRFCRKDSELSQCIEYLMSLPGIGWITASQLLARIGDWRELNNIRQLAGFLGLVPTEHSTGERIDRGSITRTGDERLRSKLIQGSWSAIRQDGELREFFRSVCRKHPREVASRVAIVAVARKLSVRISVVLMKQRPYEVREKVHSAPLTQEETSPQGTTRRRGEPGEKNS

SEQ ID NO: 342935 - protein, 370 aa, unidentified
MGKSVLYVGLDVHKMSIDVAIAEAGPGAEVRFYGRIGGDLDSLDRVIRKLRATGAQLQFAYEAGPCGYVVYRHLTAQGWPCLVAAPSLIPRRPGDRIKCDRRDALSLARLFRAGELTPVKVPDPDDEAMRDLTRAREDAVSVERRAKQRTGALLLRHGRRYPGKTTWGRGHWRWLVQQVMDHPAQQIVLQEYLDAVRQASARVQRLTGQIQELLPQWRRAPFVVAYQALRGVSLIVAATMTAELGDLSRFNNPKELMAYLGLVPSEHSSGASVRRGRITKTGNGHARRVLVEAAWAYRLRARVTRPLLQRQEGLPENIRQISWKVQLRLCARYRRFLARGKHKNTIVTAIARELAAYIWAIGQAVEPLTA

SEQ ID NO: 342936 - protein, 385 aa, unidentified
MLHANDLSRSLNCLEQDRTIIAVIEMSQSNWLVAGIVPGIERHPLKKLAPNEEDLLRLLIRWRAEATKKGRTIVRIAVAFEAGRDGFWLARWLCARDIEAYVIHPTSVAVSREHRRAKTDRLDTGLLKRVFIGWLRGEPDHCHMAAIPTLEEEDAKRPNREREGLVRERTRIVNRIKSCLVRFGIRNFKPTLRKAPERLSMLCTPEGVPLPPNTLFELRRDMARLRFVIEQIKEIEETRAQRLEQAPQENSHAMVRLIARVIGVGVETADMLVHEVLARNLRDRRAVARYAGLTGSPDESGSRRREKGLAKVGNARVRRGMIQLAWRFLLFQKDSALAQWYRARTEIDGRKRKTMIVALARKLLIALWRLVTTGETPAGVVLRAA

SEQ ID NO: 342937 - protein, 361 aa, unidentified
MKIMTGIDLHSNNALCGLMDESGRRLLHKKLPCDLSSILNLLKPYKKRIATIAVESTFNWYWLVDGLQDHGYHVVLANPAAMQPYSGKKHTDDVSDAYFLAELLRLNLLPTGHLYDRQTRPVRDLLRRRMLLVRQRTTLILSFKSLHERTLGRRVPTYQVKTMKAHEAQACFSHPADQLCSAQQIELVGHFTDAITQLEKHILKAAGKWTTYQRLQTLPGIGKILGLTIALETGPAQRFAQAGNFASYCRCVKSVRQSNNKKKGENNRKCGNKYLAWAFVEAAHFACRHDDQCRRFYDRKKQQTNPVIATKALACKLAKAAWHVMAEDVPYDAARVFGSARKKDFGETGREPAKGSGHKSQ

SEQ ID NO: 342938 - protein, 342 aa, unidentified
MTIIRVGLDTSKHVFQIHGVDENEKPVLQRQLRRSEVEKFFAKLPPTRIGIEACGASHHWARLLRGLGHTVMLMPPQYIKPYVKRGKNDKIDAEAICEAMSRPTMRFVPVKSAEQQAALTMLGVRDVLVKQRTMLINAIRGHAAEFGVTVAKGPKQVSELLQRLANDEGVPTLAREMVSMLASQLDGLDIKLKAIEARLMAWHRQDQTSQCLATIPGIGPIAGVSFALKVADPRAFRSGRHFASWIGITPRENSTAGRQKLGRISRAGDEDLRRLLVIGATAVIRAAKPGRTSPWLLALLARKSKKLAAVALANKMARIIRDGERRDLPPAGAGLNPPTTET

SEQ ID NO: 342939 - protein, 365 aa, unidentified
MWIIGCDFHPGGQQVYTVNEQTGEMVERWLSHGGEEVDEFYSTVPAGSEVGVETSGNMLWFERKLTRYGHKLRIGDAAKIAAKDPRRQKHDRRSAEHIYTLMRKDDFPDLEWVPTLEQRDLRQLLLHRHKLVRMRAQVKNQLPHIALNQGQQKKWQLWTKKGQELLQKLGLEPWTARRRDDLLQLLESLNGYCEGLDAAVEQAAKQRAQARLLMTHPGIGPVISLAAVLTLGAVERFENSRQLVSYLGLNPAEDSSGVRRRLGSISKQGSSFMRMLLIQGAQTAVRGDAELARQYRRLAMKKNKGIAKVMVARKLAVRVFWMLKTNKGYPELVRMRGSSSHPVVAATETDALSERPASRSGRKQS

SEQ ID NO: 342940 - protein, 376 aa, unidentified
MKIVGCDLHARQQSIAMVDTETGEFTEKLLKHEGNAVRDFYASLEGPVVVGIEATGAMQWFLELLEELGIKCRVGHPAKIRAAETRKQKHDRRDAEVILDLLEMKDRFPDIWMPSTEQRDLRTLLRDRHQWVKMRTRLQHTLQAIALNHALREGRALWTAAGQRALRGLALPPCTDQRRDELLSLYTQLDKRIQQLDKQVETEARQRPRARRLLTHPGVGPVTALATEVFLGDPNRFATANQVASYIGMIPCEHSSGKRQRLGKLTKEGNSLLRYLWIEATLHAVVKDAELKRFYRRKLIQKGMGKARVAAARKLGIRLWIMLRDEIDYEEFCRRGKLRQKGEAHAGMPDYNSGPAQAVPGQLNRLPASPKGGEFA

SEQ ID NO: 342941 - protein, 378 aa, unidentified
MKKGSRKRVSEVAGLDLGDKTSELCVLGEDAEILEESRLSTTEEGIRRRFAHVPKMRVAIEAGTHSPWVSRLLEELGHEVIVANPRKLRLVYSNKRKCDRADALYLARLARMDPKLLAPVRHRKEKGQADLALLRSREVLVQTRTRLINHVRGMVKSMGGRLPKGSARSFGSHLADAVPVRLRTALGPVLKTIDEVTERIKAYDRKIEEMANRSYPETARLRQVRGVGALTALAFVLTLEDPARFERSRTVGAYLGLVPGRDSSGESDPQRRITKEGDMYLRKTLVQSAHYLMGPFGEDCDLRRHGERIAERGGKNGKKRATVAVARKLSILLHHLWRSGEEYDPLHNASRQDRSKAVAAGAQLEAASSLMALKKAAK

SEQ ID NO: 342942 - protein, 427 aa, unidentified
MKKADLLSTLFVGIDISSRENVVAVMDFESTKPIATFAVPNNEPGAEKMATHILEFLTPESGLKRLVIGLESTSFYGVHIANYLSTCPMLMPYHTEVYCLNPKSIANYKKSYIGLSKNDCIDAFVIADYARVGRITTKPWRGCQYLALQRLTRHRLHLVKALTREKTYMLSNIFLKFSEFNTLDAEEQPFSNEFGATASAVLTEFLSTEEIVDMPMEKLVEFICEKGRNRFPDPQKTAKLLQAAARNSYRLDKCLYEPITVAIASSFTMISTYYAEIKKVNQAIETTIKGLNPNAFLSLQSIPGLGPVMAAGIMAEIGDISVFKSQESLAKYAGLVWRENQSGQFKADDTSMSKAGNSYLRYYLLEATSHIRLHCPEYSEYYSKKYAEVKTHQHKRALALTARKAIKLIFGLLAKNQLYSGNRVGQA

SEQ ID NO: 342943 - protein, 347 aa, unidentified
MIMVETNRAVTGGVDTHLDVHVAAALDPIGGLLGVAAFDTTGAGYEALLAWLTSFGVVHRVGVEGTGSYGAGLAQFLMGHDVEVIEVDRPNRQARSRTGKSDPVDAVEAARAALSGRATGLAKTKDGPVEAIRALLVARRSARDHRIATLVQMRHLVFTAPQQLRDRFFGLSKTQLVKQAAGLRPRDNGDPVTYATKVALKGLAQRVQLLETQIKQIRSLLRPLITAAAPSLLDVNGVGLDVAAILLVAAGDNAHRIKNEAAFARLCGVAPLEASSGKVVRHRLNRGGNRQANHALYRIILSRLSSDPETKRYVQRRTQEGKSIAEIVRVLKRYAAREVFKHLPHTI

SEQ ID NO: 342944 - protein, 368 aa, unidentified
MKKQTSATIETLIKGRTVTDFSGKTIYVGIDVHQKDYQVAKVLDGICLGNHRMCADSDQLIEHLQSRYAGAAFKCVYESCGWGFNLQRKLEQAGMECIVVHAADVSSSDKEKKRKTDQVDALKLARNLEARQLKGIHVPPEDIQKQRNLVRLRKRFVGDLNRSKNRLKSLLKYQGIDIPEKFGAKNNWSHNFMNWVELEAKKDELLQDSLLLLLEEIKMLRQLLLKAERKLRELMKSKHNDNATLLMSTPGVGATTAMLFLLEIGDIKRFRAFDQLNDFVGFCPDTDSSGDTEHNTGITFRRHKQLRSALIESAWRAIRIDPALLETYQALTKRMKGTDAIVRIARKLLRRMRAVLLSGQPYQIGIVK

SEQ ID NO: 342945 - protein, 434 aa, unidentified
MQQPSEPMNASDPAGSFSQLTHFGGFDWAKDHHNLAVVDSAGEVLLELEFPDTAEGWAKLREKIQPYPRLGVAIETSSGPAVERLLDLGLRVFPLNPKAAERYRDRKAPSGVKSDPLDGWAFADALRTDGRDWRELRPQDPLTTELRLLCRDEIHLIEQRTALVHQFGAALHEYYPAALEAFDDLTSSSAWEFVLAFPTPAALAAAGKRKWEKFFHVHKLYRPEMAEKRIDIFSRATQFASPNPAVIRAKSVLACALARQLRTLETELEKYRRLITELFNQHPDHDCFGSLPGAGEKIAPRLLAELGSDRRVFDSPQALQCYAGTAPVTRKSGKQRFTFLRRGCNKLLRSTVHLWANLSRANCVWAEVYYQHKKAQGLSHAAALRCLGQRWLKILWKMWQENRAYNETKHLKNQLAHGSWVVALMPDKAETLSK

SEQ ID NO: 342946 - protein, 466 aa, unidentified
MSNYAGIDWAAEKHDVRVCDEAGEELLASTFAHDEAGLRSLCGQLLRLEVELVAIERPDGLLVERLLDAGLRVLPLHPNQVAATRPRFRVAGGKSDPFDAFVLSELARTDHHRFRVLEPDSDQTKALRALTRAREDLVHSKVALCNQLRCELERFWPGPIGLFRDLDSQISLAFLQRYPTPADARGLGVVRMQAFLRREQYTGSKKPVELLARLRRAPESRVGEVELAVRRQLVLALVATLNTLMREIKALARQIAAALRAHPDGAIFSSLFRGPKSVICAATLLAEIGDCRARYPTGDALAGDAGQAAVAIESGKRKAACFRWNCNKRLRQAFVTLADTTRQWHPWAQAVYARAIAKGHDHPRAIRTLGRAWCRIVWRCWQDRVPYQLAKHRAAQQYITVTIPNPSGDRIDVAATQRMAGDALDPSLDVGAGQRSLRAAQPSPQKERSGGGQSKAARQGRAKRAA

SEQ ID NO: 342947 - protein, 367 aa, unidentified
MKKVYIGIDAHKESNTVALAFAGTAVPELYGKASADLKAFEAVLRRIMKKYELVKEDVALCYEAGPTGFVLARRLIKLGFECIVVAPSKIPTQSGDRVKTDRRDARKLARLFRAGELTGIHIPDVEDEVIRDVCRGRTDAVDERSRTKKQLLSFMLRNGYRYKGTAHWTAGHMRYLRELALADPAQKMVLEEYLQRIDFAVKQVERIDDQMEKLLQTWSRKPMVDALMGFRGFKQTAAMVIVSEIGDFKRFKHPKQLMGYLGLTPSEDSSGGRRRQGSITKCGNGHARWMLVESAEHYRKPPKISKGLSVRQEGLSREVCAISWHAQNRLNKRSYRLAMRRLHPNKIRVAIARELSSYIWDLAQIVD

SEQ ID NO: 342948 - protein, 349 aa, unidentified
MLKYSLGIDISQKDFHACLSVIDANQQVKVKASHKFSNQSTGYKELLGWISNHRKELNIPLFIVMEATGVYYESCAMYLFKAGFELAVVLPNKAKKYMQALGLKTKNDKIDAIGLARMGAEQCLELWQPMDDFFYTLRALTRHHQSLQEVKTNISNQLHADEHSIYSNKKVTKQLKKLISTIEKEMLEMKQEIDKQVFSDPEIAKKVKHITDIKGLGNITVATILAETNGFTLFRSISQLVSFSGYDVVENQSGKRTGKTRISKKGNSHIRRVLHLPAFNMIRYDVGNFRSFFDRILKRHGQKMKAYVAVQKKLLVLIYTLWKKNEAFKIDKASTQNISGEKETEPSFA

SEQ ID NO: 342949 - protein, 411 aa, unidentified
METIVERPGALDVHKAQVTACVRTPAAGGAREAHFAEFPTTVAGLLTLRDWLAAHGVTQVTMEATGVYWKPVWAILEDEFELLLVNARHVKQVPGRKTDMSDAAWLCQLAEAGLLRASFVPPKPIRVLRNLTRYRKTQIQERAREANRLHKALEDNSIKLDCVASDILGKSGRAMLDALVAGTTDPEVLADLARGRLRAKIPALREALEGRFDRMHALWVGAILAHIDFLDEQIASLTEAIAEQIAPFEKAVELLCTITGVQRRTAEAIIAEIGVDMSIFPTAKELASWAGQCPGNHQSAGKRRSGKTRNGSKWLDWALEEAALAATRSKDTYLAAQYARLRPRRGHKKALGAVKHSIIVAVWHMLTTGEIYNDLGGDYFARRDPVKTTKRLVAQLERLGHTVTLQEANAA

SEQ ID NO: 342950 - protein, 323 aa, unidentified
MKRTIWIGIDVAKDKLDVAVKKTEVGQHPAPPKRAQEAWISSNTDKGVAELIKRVQALEPDRIVMEATGGYEQRVFLALRAAGLPAVIVPPGAVRSFAEGIGRKAKTDRIDALVLAYFAEVRQPEVLPLPTENQRRVTELGGLRSDLVATRTAYKNRLEHASRENRARIERLLEAVQAEIDELDKELAKALEATPEDAAKAALVRSVPGIGPVNAAALVGGLPELGKLHRRQISSLLGVAPMNKDSGKGERKRFVRDGRRALRSLLHMAALSARTHNPAIRAFAQRLEAAGKPFHTIMTACIRKLVVILNAIVASGTPWSPMA

SEQ ID NO: 342951 - protein, 336 aa, unidentified
MDSITYVGLDVHKTTIAVAVADGGRSGEVRQLGVFANRADVVRKMVERLERPGRRLRFCYEAGPCGYGLHRFLNGLGHACTVVAPSLIPIKAGDRIKTDRRDAVMLARLHRAGELTGVWVPDAAHEAMRDLVRARATAMKVLSKARQHLGGFLLRHGRIYSGVRTWTQAYRRWLTTIRFDHPAQQIVLQDYIDAVTDAERRVDRLTLQITEHLPSWSMAPVATAIQAMRGVALINAVTIVAEVGDFSRFGNPRQLMAYLGLVPSEHSSGGAVRRGGITKAGNLHARRALIEGAWTYRMQARVSRKLYDRLEALPQNVRDIAWKAQGHHRPHRRRPT

SEQ ID NO: 342952 - protein, 393 aa, unidentified
MICVGIDVAKDKHDCFILSSEGEVLADVFTIPNNRNGFETLLQCIRSCTLPADKIKVGLEATGHYSYNILRFLLDKGLATYVINPLHTNLYRKSLSLRKTKTDRIDARTIAAMLMSDVDLKSYTDTAYHNEELKSLTRYRFDKVRQRAKLKQSVARLVNILFPELETLVPTLHMASVYALLSELPGAQQIASAHLTHLKTLLDDASKGRYGRDKAVDIREAARRSIGSKMSAKSLELRHTIQLIRELDKEIDEVEAAIEEIMDSIQSPITTIPGMGLRMGAMILAEVGDFANFDSPDKILAYAGLSPSTYESGKLKATGTYAHMEKRGSRYLRYAIFNATKYVCRWDPTFAAYLAKKRAEGKHYNVAISHAAKKLVRVIYSLQKSGQTYRTAA

SEQ ID NO: 342953 - protein, 343 aa, unidentified
MQAITTVGLDIAKSVFQVHGVDADGKVVVRRQLKRRYVLTFFQKLPPCLVGIEACASSHYWSRELQALGHTVRLMPPAYVRPYVKRHKNDAADAEAICEAVTRPNMRFVPTKTPEQQSCLMLHRTRHLFIRQQTAIINSIRAHLAEFGIVAPVGRRGVEQLLKVVADANDTRLPEIARACVAALGTQLLALKAQILAFDRRIMAWHRSNETSKRLDAIPGVGPALATALVASIGDPKAFRSGRDFSAWIGLVPKQNSSGGKDKLGSISKQGDRYLRSLFTAGALAVIRYAKLHGTEHRPWLAALLARRPTKVAAIALANKIARMAWAMMTKGERYKEPVALAA

SEQ ID NO: 342954 - protein, 418 aa, unidentified
MKKHSKSSQRSEPTLKRTKAHGPVQRDAKEVLAEVLGKLTGKLDGRAVSTSAKENRRGNTVGPNRDRLTVGVDLGDRWSQYCILGLEGETLAEGQLRRTQEDVGEFFQALTPARVVIEVGTHSPWVQDVITELGHEVLVANPRLMEGSKRRKRKSDRIDANKLARLGRVDPQSWYPIRHRSREVRQDLVVLRARDALVSVRTELINTTRGLVKSMGTRLPRCSSPSFAEKVKDAIPVEAREALLPLVQLVETVNDCIEKYDQRIEELGRKKYGHTTLLRQVKGVGPITSLAYVLTLEDPQRFSSSREVGPYLGLVPKQEDSGDSQPQLGISKTGDRMLRRLLVGSSQYMLGAFGPDTDLRRYGLRLCERGGKNAKKRAVVAVARKLAVLLHHLWVSGDVYEPLRHTGAGSRTAEAVAA

SEQ ID NO: 342955 - protein, 319 aa, unidentified
MFVGIDVAKAELVVAVHPSHERWTVANDERGVRTLVERLRAAVPTLIVCEATGGYELLGVAALAAAALPVVVVNPRQVRNFARATGQLAKTDRLDADILARFAEQVRPELRAIPGAEAQELEALLTRRRQLIEMLGAERNRLGQIFGKNQRLVKKSLKAHIAFLERELRMADHDLDEAVRHAPLWREQDDLLQSVPGVGPVLSRTMLASLPELGRLSRREIAKLVGIAPLSRDSGTMRGRRFVQGGRAAVRAVLYMGALAATRRNPVIRAFYLRLVAAGKPKKLALVACMRKLLTILNIMVRTKTRWRVDSPTTASQPA

SEQ ID NO: 342956 - protein, 342 aa, unidentified
MTIYAGLDVSDKTTHICVVDGAGKILWRGVCATDPQVLSSTLRRHAAGLARVVLETGSLSAFLYHGLIERDVPAVCICARHAKRVLSARTNKSDVRDAEGLAQLARTGWFKAVHIKDSATHLDRAQLKVREQLIKSHHAMVNQMRGLLKLFGLRMGKVTTPGKRAERLETLYAQKPELRMILAPLAVSLAALEAQIAASSRGLKARAEADPVCVRLMSVPGVGPIVALSFKSTIEDPGRFERAQDAGAYAGLTPRRFQSGERDTKGHISRAGDPMLRSALYEAANNLLSRVKRSSALQTWGQALAASKGAKRARVAVARKLAVLLHRLWQSDTSFRWDPAMG

SEQ ID NO: 342957 - protein, 416 aa, unidentified
MFKIFRFNCCGLDVHKTWIFACIGITDANFRTEYFEARFSSFPKDLRRLAAWLQEYKCEEVCMESAGKYWIPVFNALEATCKVTLAHPKYTKPQKGNKTDRKDAKWICDLFMCNMIKPSFIPPPDIRHLRDLIRYRTKLTNMLTSEKNRAQNCLTVSNLKLDDVFTDVFGKSARSITEYILAHPGEKFDVAPFVNKRCKTPIDQIQDAVDGAICPEQAVKLRECLNHIDELNAHQDHIEQKILTLVEPYSAHLDLIRTVPGMSKDPMTAILILSEIGSDMSVFPTAKNLVSWAGCCPRNDKSAKHVKSTRISQAGSCLKPRLVQVANALLNSKDHPEIHERYRRIKSHRGHKKAIIAVCKMLLTAIWNILSTGEAYNASGYLIQTPRPTEETKILTQKQALELLRLRGYVIKEESA

SEQ ID NO: 342958 - protein, 352 aa, unidentified
MKKYYGCDAHKRYSVFSFMNEEGDHGPSVRIGNDRFTFRCYLRRLPPNSPIALETVGNWYWMIDEMEKAGHAPKLAHAGKAKLMMGQVNKTDKLDARGLALLLRNGTLPAVWIPPGELRDQRELPRMRMALVRVRTMLKNRIHAMLAKYAIEISEVSDIFGVQGRKLMEKRLEELPPRSRESVEVQLKLLDQVKEHIELCEKQIEEVVKKAPAMSLLTTIPGVGPILAVVIALEVGDIDRFPRPENLASYAGTVPRVRSSGDKIFRGRVRQDVNRYLKWALIEAANCIVLHQNRLANRHVVQLYMRIKQKRGHAKAVVAVARHLAEATYWMLKRNEPYKEPKKNESVSSTRK

SEQ ID NO: 342959 - protein, 370 aa, unidentified
MKKHTKLREKGHSEVQDKIAGKLTVGIDLGDKISRVCVLDQEGEIIEESSVKTTDGALRQRFAAMSSTRVAIEAGAHSPWVSRLLEGCGHEVLVANARKMRLIYENDRKCDRVDAESLARLARLDPNLLGPIQHRDADTQADLAMIRARAAVVTARTQLINSMRGMVKAMGGRLPSCSTKSFHVKVEGGIPHSLRPALQPLLTEIGSLTESIRSYDRRIEELAKTKYPETTVLRQVTGVGALTTLSFVLTLEDPHRFGKSRDVGAYLGLRPKQRESGNSAPQLGITKAGDHELRRLLVQSAQYILGPFGPDTDLRRWGLKLAERGGKNAKKRAVVAVARKLAVLLHRLWVSGEVYEPLREANPKQALEAA

SEQ ID NO: 342960 - protein, 350 aa, unidentified
MDATTIGVDLAKTVFELALANAAWRVTGRKRLTRPQFERFLSTATSVHLVMEACGTAHHWARVARAHGHRVTLLPAQYVRPYVRRNKTDRTDAEALLEAVRSGQITPVTVKSVAQQELLALHRVRAEWMATRTARLNAMRGLLQEHGLTIARGARTAVTTIPRLLENADAPIPDRLRAVLSQLFEEVRAVEANLAALEQDLTTIARANPVATRLMTVPGIGLITATALVATVGHIHGFRTGRRFASWLGLTPSERSSAHRRRLGAISKMGDVYLRCLLTHGARSVLLGAHRTRKRETPPARLQQWALGVQARRGHNKATVAVANKLARIVWAVWTRNVDYEARPALPATA

SEQ ID NO: 342961 - protein, 412 aa, unidentified
MKDLLEISCGLDVHKEKIVACILTGPLGKPTRSEIREFSTLIPDMIALRHWIVSKNCHHVAMESTGIYWMPIYEILEDAFSGDITLLVVNARHMKNVPGKKTDMRDSEWISTLLRAGLLNGSFIPEKRIREFRDLNRYRKSVIRDITSQKNRIEKFLQSSGFRLSSFISDIFGASGRNIILHLIEHGQIDKTALDSCLKTKTRNRIDEILMSVNGTLSEHQKAFLRILMTHYDSLKKHLAEIETSLEKDMAPFALQVEQLNSIYGISTTASCAIIAEIGIDMKPFKTAEHICSWAGLCPGNNESAGKRKSTSVTKGNPYIKSMLCEIAWVIAGKRNTYLSAWYWRIKQKKGAKKAIVALARKLLVIIYTMLKQGTLFDESCFETRRKHCEQKQLSRYIRELEKHGYHVEAQS

SEQ ID NO: 342962 - protein, 434 aa, unidentified
MSEFLSDFVVGIDVSSEFSVVAMLEPNGSLIRKPFRIDHNPAGFNKLLIILKKEEERLKQKPIYFVESTGIFHLPLFFFLKSNDLKGFVLNPLCVHSTKNFNLRKVKNDAKDAESIARLAKFQNVKYSLVPEPQILALRMLLREYYSISDMLTELKNRLCTDLYLLFPGYLDVFSDPFGKSSLKILRDYPTPQAILSESPDTLAKMIASTSHKGLIWGQKKVAKLVEMAQLCLSMPMEFSILSRKIQYHLDGIETFQNNLVGLKEQLAGMISDVDFPKTVRESIALLESMPGIGFITAATILAEIGDFSRFHSPKALVAFFGIDPSVNQSGKFNGDRNKISKRGTRFGRRVLFTAALSSIRTTRKGDPINPVLRDYYQKKCQNKKKKVALVAVMNKLLHYIFAVLRDQKPFEFRCPEDHQSWRNSNRSGLTLVA

SEQ ID NO: 342963 - protein, 413 aa, unidentified
MEVLYACCCGLDVHKKSVTACVLWAEAKGKTRKEKRRFSTFTQDLLKLADWLRECGVTHVAMESTGVYWKPVWNILDGQFEQVLLVNAQHIKAVPGRKTDQKDSEWIAELLQHGLLKGSFVPPQATRELRDLTRYRVSLAQECNRIANRIQKVLEDANIKLASVATDALGVSGRAMLDSIIAGQEDVEQLAEMSKGLLRNKRPELKLALQGRVTEHHRFLLKEMLDDLRHVEAKMSVLESEIAKRLLPFQDEVERLRTIPGVDKVTAWGLLSEIGLNMDQFPSAGHLASWAGMCPGNFESAGKRLSGRMRKGSAFLRRHLSQAGWAVSTKRDSYLSALFRRLAARRGKKRATMAVGHAILVIAYNLLKRKQNYHELGVDYFDKKRGDTLKRSLVRRLERLGHLVTLQPAPQMA

SEQ ID NO: 342964 - protein, 339 aa, unidentified
MKCRIIGIDLAKSVFQVCGVNQYLKPLFNKKLARRDFIAFMTQQPPTLVVMEACYSSHYWARELTKLGHTVRLIPAQHVTPFVRGNKNDHNDALAIVEASQRPYIRFVPIKSEAQQEVMALHRIRERLIKNKTALTNQAHGLLSDFGIIFNQGERCFTVMAHIVATSSEVSENIKSLVASQHEEFLELKAKLKIIEKKLKQNLNNFPQAEILLSVPGIGYIIASAFIASIDKGQAFKSAKDFAVWLGITPRQYASGSNSYMGKITKRGNRYLRKQLIHGARAVLNIYKNDKDALKVWGVAVAHRRGFNKAVVAIAHKIARIAWHLLQKNEIYQPQSIKA

SEQ ID NO: 342965 - protein, 362 aa, unidentified
MRIIGCDLHARQQTLAMLDTTTGEVVEVTLQHEGDNVREFYSSLPGPVRVGIEATGSMQWFLNLLEELGIECLVGHPAQIRAAEPRKQKHDRRDADLILKLLVENRFPAIWLPSKELQDLRSLLRHRHQWVRMRTRIQNALQSIALANGLRRGTALWSHDGQSRLASLPLAPHTAYRRSELQALYEKFEAEIEKLNQRVEEQACKRLGARLLMTHPGVGPITALATEVFLGDPARFADSKALASYVGMIPREYSSGGRQRLGGLSKQGNPLLRFLWGEAGAHAARKDPELQRFYRRKLVQKGLGKASVAVARKLGIRLWIMLRDQIEYHEFCRRGQKQQKSSDACAGMPETRYGAKSHRPVD

SEQ ID NO: 342966 - protein, 339 aa, unidentified
MKLYGAIDLHSNNGVTVVSDEQDRVLYSKRLPNDLPTILRAFESHRDGLQGIAVESTFNWYWLVDGLMEAGHKVHLVNTNAVRVYDGLKFTDDEDDARHLAHLLRLGILPTGYIYPKELRAVRDLARKRAQLVRQRTVQILSLENLAQRNAGKILSNRKVEELDEPAIQTLCGGDEHRALAMRSSLAVMRCLTEQILTLEKVILGQVKLRPEFQKLQTVDGIGPILGLTIMLETGDIGRFESAGHYASYCRCVNSRKMSNYKKKGEGNRKNGNKYLAWAYVEAAEHARRHQERVRRFFDRKKANTMGVIARKAIAHKLARACFYVMRDKVDFDVTRAFA

SEQ ID NO: 342967 - protein, 404 aa, unidentified
MNNVAGVDVSKGKSMVTVLRPFGEVVAKPFSVGHTGSELKELADYLKSLDGETRVVMEHTGRYYEPVARFLHDEGVFVSAVNPKLIKDYGNNTLRKVKTDKADSRKIARYGIDNWAELRQHTPMDTIRMQLKTLNRQQSLYSKTKTMMKNNLIALLDQTYPGVNALFDSPVREDGSQKWVDFATAFWHVDCVRNMSLTAFAERYRKWCKRNGYNFSQSRAIKIHTEAQDLIAMLPKDALTKTMVRQAADALNAGSKSLERLKAEMRSLASQLPEYPVVMAMRGVGDSLGPQLMAEIGDVTRFAHRGSITAFAGVDPGSDQSGTHEAKSPRTSKSGPPELRKALFLVMDCLLKTMPADDPVYRFMDKKRSEGKPYLVYMTAGANKFLRIYYGRVKEYLASLENAD

SEQ ID NO: 342968 - protein, 358 aa, unidentified
MKKIVTGIDISKEKIDASAIDVRNTRQGVLKLGYQTFENRPMGFRRMLVWARHLIKGTPLGEVLFCCETTGGYDRSLCDYIYAKDLDIWRESALQIKRSMGVRKGKDDKADSLMIAEYAMRHMDKAVIYETPSSTVRELKALLQYRHKLVQEKTEKKVRMSHLSDTAAKSKSMSFILRDARKSIKALEKSVKQCERQILELIKGDEELARSYGHIVSVSGIGIVNATALIVHSNNFRGITTANRMASYYGIASFRDTSGTSVDKKAYVKCYSNSLLKAYLTQSAEWTIRENGIYHDYYLRLKEKGKPYGIIINNARNKLIHLVFSLVKNDTDYERNYEYIRKLRREKVDFATELENIN

SEQ ID NO: 342969 - protein, 503 aa, unidentified
MRKRKTDAAASAKVGKIADMAKAYRQRRAKAQAKAAAQGEVEVRRVEGLSVLHAHAAGIDIGSRSHWVCVGVSADKDADVIREFSAYTEGLHEIVTYLRHYQVTTVAMESTGIYWIPLYELLEANGFEVLLVDPSYTKQVKGRPKTDRLDCQWIYRLHSVGLLAAAFRPDEKTCQLRSYLRQRANVIRYAGQHIQHMEKALEQMNLKLTEVVADITGMTGTRIIDAILAGERDPKRLAALRDRRCHNDEQTIALALEGSWRDEHLFALKQAVDLYGHYRKMVSEVDQQIEAHLKTFQDKSGGVKLKPVRRTNNAPCFDVRQYLLQITGVDLMSLDGFRSGYHGLDLISEIGTDMSAWPSENHFASWLNLCPGIKKTGGRRLSARRPKRAVRAAKILRLAAYSLVKSKSALGAFLRRLRSRLGMPKAITATAHKLARIVYSMLKYGKSYVDVGAEYYEQRYRERVLTGLKRRASEMGFMLLPTTELELVATGATIKAIELPQTR

SEQ ID NO: 342970 - protein, 465 aa, unidentified
MEKKLDTEAFRSRGRQLEGLPVIRRSAAGIDLGSERHWVCAPTIDGAGREIADFGGTTSELIRMAKWLKERNVDSIAMESTGVYWIAPHEVLEAESFQILLVDTRQLARVPGRDRKTDPTDCEWIQRLHSCGLLKGSFRPREDVCMLRTLVRDKANLVAESGDWVRRMQKSLDQMNVRVHRAVSDIDGVTGIAILQAIANGERDARKLAKLRDPRCHKSEEEIAEQLNGHWREDHLFSLQQALKMHKAIQERIVDYDREILRKLATMQPEEFREQAAPKVKNPQKAKAIKKRGEEPMREALYRMSGVDLTTIDSIGVETVQVVLSEYGPDLSRFPTEKEFVSHLTLAPRVRMSGGKPVKKKQRNTASTRVASALRMAALSLRHSQTALGAYYRSIARRIAGDVAVFATARKLATLIYRLLRWGQRYVDEGMDAFEKRYQESRIRSLQAKAKELGFQLIQNVQSPV

SEQ ID NO: 342971 - protein, 429 aa, unidentified
MNYNTQNAKIASITEKTLIVGIDVGSETHYARAFDWRNYEYSKKPFAFNNDEAGFAAFKAWMEDIAEKHGKEAVIPGMEPTGHYWLNLGAYLQEQGMKPVHVNPHHVKKSKELDDNNPNKNDRKDPKTIAGLVNEGRFSYPYIPTGIYAEIRNLSNLRIQTQEELTRIKNRIARWFSIYFPEIKDVYKNPDAVSGMMVIKKAPLPCDIKELGVDGVNQVWRDAKLKGAGLKRARTLVSAAEHSIGSTEAPGSARIEIRNLLNDYEIYKNRMEDLMREIEAKLSEIPYIDKLMEINGIGLKTVSCFIAEVGDIRRFDNPKQLQKLAGYAIVADSSGKHNGESRISHRGRKRLRYALYEAAISVIGKNKEFREIHDYYRTRKQNPLKKMQSVIAIACKLIRIFYTILTKGVDYDGQKMLSDIVRPGTIMAA

SEQ ID NO: 342972 - protein, 405 aa, unidentified
MNAVGIDVSKGKSTVTIRRPGDVVIMPPCDIPHTQSAINCLIEQLQNLDGDTKVCMEHTGRYYEPVATWLSDAGIFVSAVNPILIRDFGDDSLRTPKTDKADSKKIARYALDRWAKLKQYGNMDKTRNQLKTMNRQFGFYMAQKTAMKNNLIALLDQTYPGANDFFDSPARSDGSQKWVDFVHTYWHVDCVRSKSLNAFTEHYQNWCKRKGYNFSVGKAEKIYHLSADLIAVFSKDDNTKMLIRQAVAMLNNASETVESLRSQMNALAATLPEYPVVMDMNGVGSTLGPQLMAEIGDVTRFTHREALTAFAGVDPGKNDSGQHVQKSVKTSKKGSPYLRKALFQVMDSLIKRSPVDDPVYAFMDKKRAQGKPYYVYMTAGANKFLRIYYGRVKEYFATLPKNEEI

SEQ ID NO: 342973 - protein, 407 aa, unidentified
MIFVGVDWAEAHNDVAVMDEDGRLLGRGRFGVGMAGLAGLHALVADHADEPEQVAVGIEIDHGLLVDSLVGAGYAVYGLNPLSVSRYRGRHVSSGAKSDAGDAKLLADLVRTDRHNHRQIAGDSAEAGAIRVLARGHQGLVWTRQRQVSGLRSALRDYLPAALAALGEDLGSADALAILAIAPTPDRARGLSRAKIAGALARGGRTRNLERRAVQIQAALRGEHPEAAAAVADAFGAATAARVAVLVALNQQIAELERQLGERFERHPDAEILGSLPGLGTVLGARVLGEFGDDPNRFADARGRKAYAGTAPITKASGRSLVVLARVARNRRLADACAWWAFCSLSASPGARGYYGALRARGKTHRQATRQLANRWVGILHACLEQRVSYREELAWPLRPEVLSAAA

SEQ ID NO: 342974 - protein, 423 aa, unidentified
MDVIHDRVAGLDVHKDTVVACLRVMSGAKAERTCRTFGTTTVELGELRDWLDGNGCTEVAMEATGVYWKPVWNILSDGRCGLILANAAHIKAVPGRKTDINDAMWIADLVACGLIRASYVPGERQAELRSLLRTRKQLCREQASHVQRIQKTLEEANIKLASVISDVLGVSGRRMIEAMIAGVRNPHRLAELADRRLKASPKQLYDALHGRLTNHHRFLLQLHLGQYDALGTAIEEIDRQVDTAIAKLDEEVATPQASFRALIALLCTIPGVSSLSATTILAEIGRDMSRFRSAGHLVAWAGLCPGQNESAGKRRSARLRKGAPWLKTMLVQCAWAAKRKKDSYYRAQFHQLSRRRGPQKAICAVAAAILTAIYHMLKDGTVHHDLGANHFDRRPTQAKVKHLVARLAKLGYQVQLQPLPEAA

SEQ ID NO: 342975 - protein, 344 aa, unidentified
MEIITIGLDLAKSVFQVHGVDATGQVVIRRSLRRAQMLPFFTRLPSCLIGMEACGTSHYWARELIKLGHQVRLMPPAYVKPYVKRGKTDAADAEAVCEAVARPTMRFVPVKSAEQQAALSMHRTRDLLVKQRTQLVNMIRGLLAEFGIDIPKGLERALLMARRIVDGEAPDVPMEAARIVSTLSQQALDIHIRLREIDRDLLVWQRGNDVARRLMTIPGIGPIGATALAASITDPRQFRSGRQFAAWLGLTPLQKSSGGKERLGRISKMGDKYLRKLLIVGMTSLVRRAKYNSKTVDLRLADLLARKPVRVATVAMANKTARVVWAVMARGESYRADHRPALAA

SEQ ID NO: 342976 - protein, 421 aa, unidentified
MKRSGLEKASMVQEGTLIVTVDIGVTSNHGYCTAADGRSSKTFKFENTRDGYDALWTMVVASKAAFGCDEIIVGYESTGPYGEPLIHYLKQKPVKIVQVNPMHTKKMKEINDNSPLKTDNKDPRVIADIIRVGHALSVIVPEGDMAYLRRLNNARERHVRERTALLNQLQQFVFLTFPEFTRVLKTIFSKTALYILKKYTTPARIASANRDELGEEMMRLSRNKFRPRDAAALIRFARSTVGIQEGVQGLVMDIQHILLQLEMLHGFIAAIEDEMESTLKRIPYSQSLLGIKGFGIATVAGLIGEIGDFTKFKTQSEITKLAGLNLYEVSSGNSRGQRRISKRGRSLLRKILYYAAVQTVRKNGIMYDYYQRLLGRGMKNMMALIAVARKLLRIVFAMVRDHTEFIMNYSNQPKQIIKEAA

SEQ ID NO: 342977 - protein, 354 aa, unidentified
MIIIGVDFHPEFQQIASVDTDTGEFQEKRLRHCEEAEKFYGAVAASGQKVRVGMEASGHGRWFERLLAELQIEMWIGDAAEIRAKRVRKQKTDRQDAQLILRLLLEDRFPQIWVPSGKNRDLRQLLWHRHRMVQARTRIMNQLQAVALNEGLRCKKRLWRERGRQQLESFRLAPWASRRRRDLLELLDRLNPTIAELSLTIEQEVEKCPEAQRLMTHPGVGPLTALTFVLIIGEANRFQCGKQVASYLGLVPLEDSSGNRRRLGHITKQGSSMLRFLLVEAAQVTARSLPQWRSKYLHRMMRRGRKTAKVAMARRLAVRLYWMMRQGWDYQQWSKFGSHAGQPGNRDGVPSNTE

SEQ ID NO: 342978 - protein, 321 aa, unidentified
MNKDHVIGIDISKQSFDVVDSHEKHQIYTQDLEGFKKFCKAIPKDSICVMEATGIYHLQLANYLFQNNIQVAVINPLRIKRFIQMRLRRNKTDKSDASMIRLYGINQDIDLYKPIDSNLQKSKDNYQTMEQFINIRASLKNKLKELQYKGSDTKLIQIVESQLVTLTESINELDAEITKLLNKNHGPLLSNLKSVVGIGPRTAAILIISSDAFKHFDSAKQLASYYGIAPSERSSGTSLRKKSHISKRGNPLVRKKLYMCSLQAARYNPACLELYQRLIAKGKPKKLALIAVANKLLRIAFAIAKSNIPYDREYRSYRKSA

SEQ ID NO: 342979 - protein, 411 aa, unidentified
MDVVHARCAGLDVHKATVVAGVRMPSPRCGERCGETMTFATTTRGLRELREWLIAHGVTHVALESTGVYWRPVYAVLEGVVEMILVNARHVKMVPGRKTDVRDCEWLAQLLECGLLRGSFVPPAGVRDLRDLTRLRKTLIRERSQHVNRVAKTLELAQLKLGCVVTDIMGKTGRAILQALSTGIDDPVRLADCAQGNLRKKRAALREALVGRLTPHYAFLLQQHLSLIDALDVHIATLDARIAGAMAPFAEAATLVQSMPGIAARAAQAIIAETGIDMSQFPTAAHFASWARLCPGNNESAGKRRPTTTGKGATWLRATLQEAAWAAVRSRKSYYRALYHRLRARRGPKKAIVAVQHAMVVALWHMLKHRVSHRDLGADYFDRQNTDRIRRHHVRRLERLGYDVVLVEKAA

SEQ ID NO: 342980 - protein, 280 aa, unidentified
MAVTIVEAGPVVVGGVDTHLDVHMAAALDGIGGLLGVEPFPATPAGYRMLLAWMGSFGAVARVGVEGTGAYGAGLSRFLRRQGVEVIEVDRSNRQARRQHGKSDPADAIEAARAAHNGRARGLAKSRDGNVEAIRVLLVAKRSARAVRIKSVNQIRQLTFTAPDALRERMRGLGTVPLMVEAASLRPRPDAGTVVYSTKVALQTLGRRAVSVDAEAARIDELLGELVADTAPSLLDVFGVGVDTAATLLVAAGDNPQRLRSEAAWAHLCGVAPIPASSGR

SEQ ID NO: 342981 - protein, 341 aa, unidentified
MQITTIGLDIAKNVFQVHGIDAAEKVVVRKQLRRAQVMKFFAALPPCLVGIEACATAHYWARELTRLGHQVRLMPAKDVKAYVKRNKNDAADAEAICEAVRRPTIRFVGAKSAEQQGRLMQHRTRDLLIRQRTQTINALRAHMAELGIVAAQGREGLKQLLAIIADEKDARLPIDARASLIVLAAQLQALQTMIGSIERRLLVQHRANEASKRLESIPGIGTIGASAIAATVTDPNAFRSGRDFAAWIGLVPRQDSTGGKQKLGPISKQGDRYLRRILVVGAHSVLWLAKKNPEKYPWLTQLLARRPFKVVAIALANKMARVAWVLLARGGTYRTPQLAAA

SEQ ID NO: 342982 - protein, 473 aa, unidentified
MSERTVRRLVGIDLGIASQHTVRVLDGDGNLVKAARCVPAVASLTVLEQAALAGTPAGTVLEVIFEPTGPAWFPIAVFFSARGHRVFRVSSAKASDLRKFFRKHAKSNGIDADTLARLPLVDPAGLRELELAEAGAAALDRRVRACDRLTQAATAHKVRIKDLARQLMPMTPLTADLGQADLAVLERYADPRALVKTGEPRLTRLITKVSHGQQGAERAAQWLSAAVSAIELYGDHPAVPYAELAAEVATEVCLLKAIAAELAAHAREREKAYLLTDTGQLARSLPGFGQIAPALVAGMGRPGRFADGAHFKSYTGLAPRASETGETDRKGEPMSKAGPSLLRTTLIRAADHARKVDPQLARIYWIQMTERGAGHLKACCVTAAHLAERAWAVMHRGTPYVICDNDGNPVTPEQAKKIIAEKWTVPEDVRKRRRSGKQKGKAPQQAPAGPGKRGDLPRPRSSRLPRLPVKRSP

SEQ ID NO: 342983 - protein, 330 aa, unidentified
MGFRYFLGVDVAKAKLDCLLLDSVEQRRRSKVVANTPEGFEQLVKWLTKQGVGCQQVHAVLEPTGVYHERALFALSQAGIAVSLVNPAQLRRFAQGLGIHTKTDACDSAVLARFGEMIKPAHWQPAPSKARALRALLARRDVVAQDLQRERNRCEALVIEDTPERVRQSLTDTITFLEQELQALQKSIDEHIDDDPDLKRIWDLLQSIPGVGQRVADHFTALLAGRDFKSAEQLAAYLGLVPIEWQSGTSIKGRPRMSKAGPASLRQLLYMPAVVATRHNPHIKALYQRLLAKGKAKMSALGAAMHKLAQLCFGVVHTGQPYRADWPGRA

SEQ ID NO: 342984 - protein, 382 aa, unidentified
MTTAAATHNAQSNTTEATLFVAFELSEKTWKLGFTTGHGQKPRERTVTARQQEHVLDEIAQAKLRLGLPETAPVVSCYEAGREGFWLHRFLQGHGITNQVVDSSSIEVNRRRRRAKSDGLDVRKLLSMLIRYHHGERQVWQVVKVPSVEAEDQRHLHRDLETLKQERASTTTRIEGLLSSQGLRVTSLTKLPEQLDALRLWDGSPIPPGLRRRVLRVYAHHTFLSEQIAEVEAERRAQLQTSSEASIDKVRQLMQLKGVGINGAWLLVMEFFGWRAFKNRREVGGLAGFTPTPYQSGESAREQGITKSGNRHVRWMTTELAWSWLRFQPDSALSCWFRERFGGGGKRLRRIGIVAVARKLLIALWRFLETGVLPAGAVLKEA

SEQ ID NO: 342985 - protein, 402 aa, unidentified
MNAVGIDVSKGKSMVAIMRPFGEIVSTPFEIKHTSSDINSLVKLIKSIEGESRIVMEHTGRYYEVLAHQLSEANLFVSAINPKLIKDFDNDSLRKVKTDKADSVKIARYALDKWQNLKQYSVMDELRNQLKTMNRQFGFYMKHKTAMKNNLIGILDQTYPGVNTYFDSPARSDGSQKWVDFASTYWHVDCVRKMSINAFIDHYENWCKRKKYNFSKSKAEEIYGKAKELVPVLPKDDITKLIIKQAVDQLNSASITVESLRTLMNETAFKLPEYPVVMAMKGVGTSLGPQLMAEIGDVSRFTHKGAITAFAGVDPGVNESGSYEQKSVPTSKRGSSDLRKTLFQVMDVLIKTHPQDDPVYQFLDKKRAQKKPYYVYMTAGANKFLRIYYGRVKEYLASLPES

SEQ ID NO: 342986 - protein, 366 aa, unidentified
MKKSSTEQTFRDDILKEQKLTIGMDLGDHWSCYCVLDEAGKIILEQKVAMTPEAMKQTFAKIPPSLIALETGTHSPWVSRVLTELGYKVIVAHAQKVQLITKSNRKDDRHDARTLARLARIDAELLGPVRHRSAQAQIHLTVIRARAQLVHARTALVNAARGLVKSYGQRLPKCGTQQVSRELGAGLHAELREVLEPLLQEVESLNERIQEYEVRMEKIAKENYPHVELLKQVKGVGTQIALTYVLTLDDPQRFPKSREVGCFLGLCPGRRDSGESQPQMRISKEGDRYLRTMLVQGAHYILGPFGEDSDLRRWGLKLAARGGKNAKKRAVVAVARKLAVLLHRLWVSGEVYEPLRNSQKAMRTAA

SEQ ID NO: 342987 - protein, 409 aa, unidentified
MQVMHPRCAGLDLGKDVLAAAVRVQDADGVKRECRTYGTTSHWLGELSAWLHSRGVTHVVMEATGSYWKSVWHALEGQFELTLANPVQIRNVPGRKSDVNDATWMADLLAHGLIRGSFVPSAEIGALRELTRARKQFGREIARHTLRIQKILDIANLKVTGTISQILGVSGRAILKALIAGETDPEKLADLAHPRVRVSRARLVESLRGHLTAQQRQLLKMHMTLIEALEASIEQLDRDIAKAVTPFRQTVQRLKGVPGLSDINVPAMLGEIGVDMTRFKTHRHLVSWARLCPRLDESAGKIHSTRTMKGAAWIKTLMIQAAWCAIRVKDSYPRAQFLRLRARRGTKKAIVAVAASLLTAVYYMVRDETPYKDLGIGYFEKHDRSRVARRFVARLQQLGFNVHLTEAVA

SEQ ID NO: 342988 - protein, 356 aa, unidentified
MKSTIKYIGMDVHQSTISVAVLDGEGKLVMQSILATHAAAILDFVHGVRGTLQVTFEEGTQSAWLYDLLVRHVAKVVVCNPRQNALLKAGNKSDQIDARKLAELLRADLLSPVYHGENSCRILKELVRSYTTLTEDTTRIMARLKALYRSHAISCAGKKPYGKRHRQEWLQQVRQPGLASRAQRLYDQLDAVQTLRRAAKHEMLAESHKYGAYRLLGSIPYLGPVRASILMARAQVPNRFRTKRQFWAYCGLALETRTSAEYRIVQGQVQRSRKPVFIRGLNLNHNHDLKNVFKGAATAASIHDGPLREFYDRLLAKGMKPELARVTLARKIAAMALILWKKGESFDPKYLMLQAA

SEQ ID NO: 342989 - protein, 369 aa, unidentified
MKKNNTSRQSSKRGQKTRARSITIGLDLGDKSSRYCVLDNDGAMVLERTVGSTKKALTQVFGRMRRCRIAMEVGTHSPWVSRLLGGFGHEVIVANPRQLKLISSSSRKSDRVDAQMLARLVRIDPELLRPIRHRSAEAQADLLVIRVREALVKTRTGLVNTARGLAKASGERLPKCDADQLGVERMESLPAWLRERLRPLLEEIESLTKKIKESDVEIEQIGRTKYPETALLKQVWGVGTLIALTFVLTIEDKDRFEKSRDVGCYVGLRPKRSESGERQPQLGITKEGDVYLRKLLVQGAHGVLRRNGPDTDLKRWGLRLAGTSKNAKKRAIVAVARKLAVLLHRLWVTAEVYEPLRNSELRERQQAAA

SEQ ID NO: 342990 - protein, 342 aa, unidentified
MKITTVGIDLAKSVFQVHGVDQQGKPVVQKRLRRQQVLKYFVQLPPCLIGMEACGGAHYWARKLQAQGHTVKLMAPQFVKPYVKANKTDAADAEAICEAVTRPTMRFVPIKNAEQQSILSLHRARQGFVRARTAQANQIRGLLAEYGITMPQGIGHVANRLPDIIVDAENDLPALFCELLERLRVHLIELNRQVQELEALINAWHHKNEGSQKLAQIPGIGPLTASALIASIGDARNFKNGRELAAWLGLVPRQHSSGGKVLLQGISKRGDAYLRTLLIHGARSVIRVAENKATPTNQWATVVLARRNKNIAAVALANKNARVVWALLAHGRHYNAEYKLAA

SEQ ID NO: 342991 - protein, 338 aa, unidentified
MGIHTVGIDIAKTVFHLVAVDEKGSVVVKKKFSRPQLLVYTANLKAEVIGMEACSGAHFLTRALIAQGHNVKLMPAEYVRPYVKSNKNDFIDAEAIAEAVLRPNMRFVPLKTEEQLDLQALHRVRERWIGRKVALTNQLRGFLLERGLPIRVGSEYLRKALPSILEDAENGLTPRARTILSTLREEWTELETKIDTVTNEIGRISRSDEGCKRLMGVPGIGPIISTALVAAVGNATAFKKGRDMASWLGLVPRQHSSGGKTKLLGISKRGNYYIRKLMVEGARAAFARLNRSQHSFGPWMDNLQSGKHSNVAVVALANKMARIAWAVLTTGQQYRAAT

SEQ ID NO: 342992 - protein, 461 aa, unidentified
MKEKKNASVKNEKTQGIGLPVLQPHAAGIDIGSQEHWVCCPPKPDGSVNVRRFGSRSCDLEEMAAWLKSEGIETVAMESTSVYWIPLYELLEVKGFDVLLANAKQLANVPGRKTDMQDCQWIQLLHACGLLRGSFRPGQEICALRALMRECSNLADERRRCVQRMQKALDQMNVQVHRAVSDITGFTGMGIIRAIVDGERDPLVLAGLRDRRCKKDVKAFAEHLRGTWREEHLFNLKMSLELFDKLNEMIDVYKRKVEQLMRELTPEERRHAPKPEHPSKTKARSIRKTGQEETRESLWRFSGVDLTRIDGINTGAANTVLTEIGLDLSDFPTEKHFVSWLRLSPRYSISGGKVLKKKRNAVGATRVATVLRTCATCLERSQTALGAQFRRTSRRKGRAVAVFALARKLAILIYRMLRYGQDYVDQGVEAYEEQFKQKRIQNMISAAKQMGYELTPISIAA

SEQ ID NO: 342993 - protein, 404 aa, unidentified
MNAVGIDVSKGKSMVTIMRPFGEVVASPFEVNHTDSELGDLARSLESLSGETKVIMECTGFYYYPIAFALHEAGLFVSTVHAKLIHDYGNNTIRKVKTDKADAIKIANYGLSNWMSLQKFFPEEDIRRSLKAYSRQYTKYTKLKVSLKNNFISLTDQTFPGVNELFTSPPRKSDGREKWLDFAACFWHCECISTMSENAFIKRYQSWCKRNGYRFSEEKAGDVYIAALGHTLVIPKNDTTKLLVRQAVKQMNAVSESIAIISAEMKRLAALLPEHPVVSAFYGVGEITCPQIMAEVGNIYRFKHKGSLVCFAGLEAPPYQSGKFESTNRSISKKGSPHLRRSLFQVMDCLIRHSPQDDPIYQFLDRKRAEGKHYYNYMTAGCAKFLRIYYARVKEHLDDFYGDE

SEQ ID NO: 342994 - protein, 345 aa, unidentified
MSKLSADLSGVTVVGLDLAKHVFQVHCIDAEGRVVLNRSLRRREVVAFFGRLPRCLVGLEACASAHYWGRELLALGHDAKLIPPAYVKPYVRRQKNDAADAAAICEAVTRPSMRFVAVRSIENQALLMHHKVRELLVAQRIQLLNALRGHLGEAGVIAAQGACNARALAALVAAGHEEVPACVAEALLPLVEQLGQFDAAIAEADRAIAEAARENADTRRLMSIPGIGPITAHAIAASLGPDGATQFSGPREFAAFLGLVPRQRSSGGRERLGRITKMGNAYLRKLLVVGAHAVLHHNARHADPLRTWARKLLAAKPFKLVAVALANKLARIAWAVLAREARYVA

SEQ ID NO: 342995 - protein, 354 aa, unidentified
MSSVSMIGLDTAKATFQVHGIDETGRATLKRKLRRDGVVAFFAAQPACTVVLEACGAAHHWGRVLGALGHEVKLVPPEAARPFVKRGRKNDAADAAAICEAARRPEVKFVPVKTAERQGVLALHTARALLVKQQTMLANAVRGLAAEFGLTAPRGLLKLGQLMEVAEAQEAAALPEAARQALRALHGRFRALEEEAATLERAITSHARRDETARRLATIPGVGPITASLIAATVTDIGLFGSARAFAAWLGLVPRQFSTGGKTRLGRITKAGNGAIRTSLVVGATSMIVRAGQWDSPTGAWIRGVLARRPTRLATVALANKMARVAWALMTRKESYRPRGRAAAAAIPETAAVA

SEQ ID NO: 342996 - protein, 360 aa, unidentified
MRYIGLDIHTDSIKVAVAESGRDRAQFLTSLSNDTPSLVRRLQRLGPLESLRCCYEAGPGGYSIQRALSAAGIDCRVIAPSLIPKQSGRRVKTDRLDAENLAHYLRSGDLVEVWIPDSKTESLRNLVRLREDAMQTRQKARQQLHHFLLRGGRSYPYRTTHWKHGHLNWIRRQRFDEEADNITIADYLRAVEMTDSRMAGIEEDLRQQSQDWQLHSLVLNLQALKGISFLSAMTIAAETGDMRRFATAEKLMSYYGLVPSERSSGKQEQRGRITRCGNSLVRRLLVESAWHYRHRPFMSQAISQRCEGLTQKVVDIAWRAQKRLHQKYMRLQMNGKPMQKVCVAVARELAGFIWAIGREV

SEQ ID NO: 342997 - protein, 358 aa, unidentified
MVQRKELNFEGQNIYICIDVHLKTWHVSILTESGCLKKHSQQSSAQALFEHLKKHYPNGNYLSAYEAGFSGFSTYYSLLDFGIECLPVHAADIPTGQYESVMKTDAIDSTKIARALKSGLLRGIYIPKKEVLDDRNVMRLRITLKRQLSGYKSRVKHLLYNNGVIYPECFQNSKSHWSKRYLKWVHEDVQLLSESRNSLDLLLRQVELFRKSLLEITRLVRTLSRNGRYGEAYENIVSIPGIGMITGMCLLTEIGDIHRFRNERQFASYLGLVPTSHSSGEKTSHGEMTFRGNKRLGPLLVESALVAIRQDRALAAAYGEYCKRMLPQEAIIRITRKLSNRILIILKSGKKYEHDRCY

SEQ ID NO: 342998 - protein, 371 aa, unidentified
MTGEKYIGLDVHQATISVAVMDSEGKVVMESILETKASTLLEFFAGLRGSLFVTFEEGTWAAWLYDLLKPHVTEVLVCNPRKIPLLKQGNKSDKIDARKLAERLRLHDLKPVYHGETGIRMLRELARSYLTVVKDLSRVMNRLKALYRSWAIPCAGRDVYYRRHRSAWLDKIPEAGTRHRAEQLYQQLDLLQHLRQQARRELLSESRKHVITAKLRKIPSLGPIRSALAVALIQTPHRFRSKRQLWTYSGLGLETRDSGEYHFVKGQPRRRKKQATIRGLNKDYNHDLKGLFKGAATRASVKPGPFQEFYQRSLAKGIKPTMVRLTLARKIAAITLTLWKKGARATPSGWLYDSETVRAKCAMSVKRPGAN

SEQ ID NO: 342999 - protein, 292 aa, unidentified
MNTTQIGVDLAKSVFEVAVSHIPGRVHERHRLSRTRFRRFFADRAPTEVLLEACSSAHHWGRELQALGHRVALLPAADVARYRDGNKTDRADAKALLEAARNEAIDRVPVKSVEQQALSALHRLRQGYLQTRTARINALRGHLREFGVTIPLGAAQVLPRARAALAEERLPILTATALLAFVGDIHRFRSGRDFAAYLGLTPREHSSALSRRLGGITKHGNSYLRMLLIHGARSALRAGHVAACPDDLRTWALALQHRKGHNIAAVALANKLARVCWRVWRDQRPFERRDAA

SEQ ID NO: 343000 - protein, 336 aa, unidentified
MTTSLYCGIDLHSNNSVVSIQDKSSKQVYEKRLPNDLQIIVSALKPYRQALQGCVVESTYNWYWLVDGLMDADHQVHLANPAAIEQYNGIKYTNDFTDARFLAHLLSLDILPTGYIYPKETRGIRDVLRRRLLLVDQRTSLQSLLARHTGKQLSEVQFKALDSKSLQRLLPIPGASLSAEISLSIIQSMTILIEQLERAVSTHCVTQENYQLLTSIGGVGKILGATIALETGDIQRFPDAGHYLSYARCVNTQKISNGKNKGRGNRKNGNRYLALAFMQAAHLAAIWEPKIKRFYQKKQAKAHIMVAKKAVAGKLARAIYHMLNRQEPFDVERAFG

SEQ ID NO: 343001 - protein, 356 aa, unidentified
MQSKAISFKGQKVFIGIDVHKKTWSVTTLLEVGMPKTHSQKASAKELFDFLNRHYPEAEYHAVYEAGFSGFSTYYALKEYGIECTVVNAADVPTTQYESVMKSDPIDSDKMARALRAGMIRGIYIREKDNLDDRGLVRLRKSIQQDLTRYKNRVKHLLHANGVEIPELFDRSPNWSKAFINWLREEVVLLSSTRASLDMLIEQVETLRQNLLTVTRKVRALRLKKEYAEKYDALTSIPGIGPICAITLLTEIYDAKRFRNERQFASYLGLVPTCHSSGEKASFGEMTFRGNKHLGPLLIEASWVAIHWDDALSVAFTNYRRKGLMPQESIIRVARKLSNIIFSMLKTGNHYAPANA

SEQ ID NO: 343002 - protein, 344 aa, unidentified
MEQIIRIGMDTSKHIFQLHGVDAAEQVVLRKRLGRKQMVEFFAKLPPTMIGMEACGASHHWARVLEQFGHEVKLIAPQHVKPYVLRNKNDGRDADGVCEAMSRPRMRFVPVKRAEQQAALMLAGLREQMVARRTQLSNTIRGYAAEFGITAAKGLDKIEPLLAQIAQDESVPTIAHDLFTMQGREYAQLQVELKAIEARLRAWHRTNADSRRLAKIPGVGPIGATALVMKTPDPHAFPSGRHFAAWLGLTPKDHSSGGKTRLGKITRAGDERLRSVLVAGATAVIQQAKHGRGHPSPWVVALLKRKPPKLAAVALANKIARIAWKLMATGESYDGARVPSALAA

SEQ ID NO: 343003 - protein, 363 aa, unidentified
MLYFGCDLHKKSTTFTVKDESGKKLSQEKVPNIPHEIKEYVNRFPGEKTATVEATFNWFWFVDLMEDLTEKTILAHPGKTKAILQARAKTDKIDSSGLAELTRVNLIPKVHIPPKEIRDIRELLRYRTGLVRYRTSVKNKTHSILHKNGILNTFSDLFSEKGKQWLCEIPLRPCYKYILTNYIDLIQFINNLISQVEKDIYSKPLKHDKEIMLLRELPGIGELFAFHIKYEIVTIDRFYGDKHFVSYAGLAPSTKQSAELTRHGGLIPQCNHWLKWVLIEAAHHARRHPWFRPTYERVLLRHGKNIAKIAVARKLARVIYFMLSRKEKFRGHKETSTKRVSPRGHGPQRPNSLNESTVTRANR

SEQ ID NO: 343004 - protein, 487 aa, unidentified
MHPRTTNKFLETFDVYRFSFESAGALALDNEYSGFAVLPAHYIAFAERKRARPWTSIYHCGRYDVKPLATQQFTAYVGIDWADTKHDVCLQVPGNELREFDCIRHQLADIDQWAQSLHQRFGGPIAVALELAKGPIVYALQKYDFFVLFPINPLTLAKYREAFMPSRAKDDPTDAELALDLLMRHPERFTPLRPQSVQMRTLLSLTEHRRELVGDKTRFTNRLTNTLKQYYPHALDWFEQHDTLLFCDFLTRWPTFSQVKRARRASLQAFFYAHNGRRPNVISARLDAIKAAIPLTEDMGVIAPCRLQVLVLIEQLRTTLQAIDRFDREIAQLAPRLPDYCLFQDLPGAGPHLAPRLLAAFGEDRQRYQHADELQKYAGIAPVTERSGKKSWVHWRLRCPTFLRQTFVEWAGQTINKSFWAGAYYRQQRAKGSSYQATVRSLAFKWIRILHRCWQTRTPYDESAYLNALRKRGSPLLKHLELDAQSA

SEQ ID NO: 343005 - protein, 358 aa, unidentified
MVDKVTEAAVVGGVDTHKDLHVAAVVDQNNKVLGTQYFSTTRQGYRQMLAWMTSFGTLKRIGVECTGTYGSGLLRYFQNAGLEVLEVTAPDRMERRKRGKSDTIDAECAAHAAFSGIRTVTPKTRDGMIESLRVLKTCRKTAISARRVALQIIHSNIISAPDELREQLRNMTRMQLIRTLGSWRPDASEYRNVTNVYRISLKSLARRYLELHDEIADLDVMIAAIVDELAPELIKRNAIGYESASQLLITAGDNPQRLRSESGFAALCGVSPVPVSSGKTNRYRLNRGGDRAANSALHIIAIGRLRTDAKTKEYVARRVAEGHTKMEAIRCLKRYISREVYTFLRNQNRRINSIPITA

SEQ ID NO: 343006 - protein, 322 aa, unidentified
MSAPVLGIDIAKQRFEVALLIEGKVKNKSFKNTTEGFETLAVWLTKLGISKVQACLEATGNYGEDLAIYLHEAGHSVSMVNPARIKGFARSELIRTKTDSMDAGIIARFCLAMKPEAWIPPSPAVRILRALVRRADSLIDMLTQEKNRLGTAHESVIPLIQEHIDFLKKEIKKVRKQIADIIDQNPNLRQKKDLLVSIPGIGKATIAVILGELDNLEKFNHVRELVAFIGLAPKETLSGSSIKGKPRLCKIGHARLRKALYMPALVSIQCNPVMLAFYSRLKEKNKNGKVIVCAIMRKLVHVIFGILKSGKKFDPNYKPVLA

SEQ ID NO: 343007 - protein, 375 aa, unidentified
MAKSGILAKSHDLQESFGATTGQITIGIDLGDRFSHCCVLGPDGTVLTEGRVVSTPEGMSRHFQQLPPTRIAFEVGSHSRWVSELLTRWGHEVILANPRNLRLISDSIRKSDRVDAQTLARLARIDPQLLSPIVHSNPETYSHMTLLKSRDLLVRTRTRLTNAIRGIMKAVGLRLPSAGGTTFPSKTALLVPDELKPSLLPLLETISHLYKQIYQFDKAIDRVAREKYPQTSRLRQISGVGPVTSLQYVLTIGDPNRFAHSRDVGAYLGLTPRRRQSGDIDQQLRISKAGNRRLRSLLVQCAQYLLGRFGPDTDLKRWGARMTERGGKNAKKRAIVAVARKLAVLLHRLWVTGDTYRPLHNAMGWPPGSALPQAS

SEQ ID NO: 343008 - protein, 316 aa, unidentified
MNERVAPSVGIDVSQETLDVATSDAQAWQVKHHPRAMVALVRRLTKLQPLRIIVESTGRLQEDLVVALMEAQLPVIVVNPRQVRDFAKATGSWAKTDRLDAQLLARFGEAVKPPLRSLPDEATRELAALVARRRQLQSMIVAETHRRGRAPRPVRREIEQHIAYLETRREHLDQELQDRLRQSPVWQEQADLLRSVPGIGPTLSATLLAELPELGSLTRRQIAALTGVAPFAHDSGRFKGRRVTRGGRADVRRTLFMATLAAARCNPVIRAFYQRLVATGKAKKLALVACMRKLIVILNAILKHRTAWNPHLGLQT

SEQ ID NO: 343009 - protein, 587 aa, unidentified
MSTATPLDRIGVGIDTARYGHRVCFLRPDRLPAAKPLTVLEKRSGYLALQERLQQLHQQHPQAHFHVRIDAAGQYAVNLEHFLRSLDLPMTLSIGEPKRNKDYQKAHFPKRTTDDTESQAMARFAVVEQPAATAAVTPAMTLLREVAGRLQAKVKQSTQAINRLHNLLARVFPELATLTDDIAAAWVLHLLDKYPSAERIAQARLGTLQKIPYLSQEVAEQVQLVAQQSIASLRGAVAEALVRDLVAQVRHCRQVEHNMRQLLSAAFADLPASPHVHVVTVPGIGEATAAVLVAKTGDIGRFATPERFVGYFGVFPEENSSGVDKHGKPIPPGTLRMSRKGNDLVRHYLWNAARAAIVHNPAVRALYRRLRAKGTRGDVAIGHCMRKLLHLAFAVWKSNRAFDGQHFSWESSADNSMSAMAPSAADVSTPSTSNDKAVGHKRDVPAKEKVVTTAAATVAPGPAAVKPKSPPPRPRCGKVDFTFLREQVTMTQVLEHLGLLGDLRGRGQQRRGPCPIHGQPNDPARTFSAHLGKNIFQCFHADCGAHGNVLDLWAALHHLPLYDAALQLAETFHLRRNREEEPVSGIR

SEQ ID NO: 343010 - protein, 352 aa, unidentified
MKPNFKPGKWFMQCVGIDIAKNTFTACLCMYEFDMGCSTVPVVFNNNKTGFNQFVKWSRKEALKGHPLHYLMEPTGVYYEPLAYHLSKLGLDVCVVLPNKAREFAKYEGILTKTDDMDAYTLGMMGCLDKRLKTWTPPSPIFRELRQMTRFVADINKVRTELNNHLEALAHSEIAEKSIVKHYNKLIDEIDKQLAANEKAIREKVNQEPGLAERIDRVVTIRGIGFMTVVTVLAETNGFALINNRKQLTRYAGLDVPAHQSGPVDPKRHISKQGNVHIRTALYFPAIVSTKHNPQMKDFYGRLCQKNPQSKMVGVTATMRKLLLLIYSLWKSGEEYDPERDKPLCAKAKERG

SEQ ID NO: 343011 - protein, 467 aa, unidentified
MTPHKDYCLDPCPPVLTPMLPPSPILSDALQVCHPHAAGIDIGEAEHWVAVPPGSDPQPVRRFGPFTADLDALADWLIDCGVTTVAMESTGVYWIPLFELLEARGVQVLLIDPRQAKRAPGRPKTDRLDCKWLQRLHAYGLLAGAFRPADQVCVLRGYLRHRQMLLTYAAHHIQHRHKALEQMNLKLTQVVSDITGVTGMAILKAIIAGERDPVTLAKLRNPHCQHSEDEIAKALQGTWRAEHLFALQQAVELYQFYHPQLTTCDQRITAHLETFADQSAGQPLPPKARRHKKTNEPRFDARTPLYRLAGVDLTTIEGIEENTALILLSEIGTDMHRWPSVKHFCRWLGLCPQHQSSGGKVLSRRVRPGAHRVTVALRLAARSLHHSQSALGAFFRRMKARLGTPKAITATAHKLARLVSHLLKHGSAYVQQGLENYEAQYHERKVKTMAKQAKALGYTLVPLAAQG

SEQ ID NO: 343012 - protein, 346 aa, unidentified
MRHRTTIAVDLAKAVFAVAISRRPGRIDQELRLSRAKFVEFLARQAPAVVVIEACGSAHYWARQLLSCGHTPVLLPPQYVRPYVRRNKTDAADARALLEAYRDQQLKAVAPKTVEQQALGALHRLRSAWMKTRTARLNALRGVLRELGVTIPVGAHHVLPRLNAVLAADLCPVPAVLHSHLLALAAEIRVLEQHVRNAERELERAAVEIPAVCRFLTMPGVGILTATALFAFCGDLSRFTTGRHFASSLGLTPRESSSGQRRRLGSISHRGDAYLRTLLIHGARSVLLAAKRLERPDRLRAWALRLERSAGHNKAAVALANKLARIAWALDTSHRQFAPVYLDQAA

SEQ ID NO: 343013 - protein, 336 aa, unidentified
MEKQYVGIDLHRRRSLIVRRDDTGTTHSMVRLDNSDLAGIVAEVRAAGPEPEVIVEATNGWYWLVDLLRAEGAHVHLAHPLGNNWGTRRVKNDERDATDLVDLYRLGRLVESYVAPPELREQRELVRYRHKLVGFRTSCREQVHAVLAKKGVAVPMTDLFGVAGLELLEHVALGGGFAIRVESLRDLIELLDREVAMLDREIHRRLHNDPRFAVLQLLPGIGPVLAAILVTEIGDISRFSSPERLCSWAGLTPRHHESDTAVHRGSITRMGSRLVRWAIVEAVRRQGHSALLGEAMARVAERRGRRIAKVAAARRLLSLVFYALRDGELRCLASAG

SEQ ID NO: 343014 - protein, 332 aa, unidentified
MENFYFIGVDVSKKKLDFCVMFEGKVVHEEETANHQSAIMSLLHHLEEDYGIDNTRMLVCAEHTGQYTFPLACACKAVECRLWLENAAEIKYSSGVQRGKNDKVDAKRIAIYASRFQDKVHYYERPTEDIERLKQLESERTLYVTDLAKYKGQMKDQKDYMPKALYERKMKRLQALMDDLEEAIQSITDEIDEVIASCPVLSRQRELLMSIDGVGHVVATNMIITTEAFTRFDDPRKFNCYAGVAPFSYSSGSSQHSKARVSHRANKVMKRLLHLAAVAVTHRIGGELKKYYERKVAEGKNKMSVINALRAKIVARMFAVIKRNEKYKPILS

SEQ ID NO: 343015 - protein, 404 aa, unidentified
MWYAGIDWANDHHDALVIDEQGRQVGSLRVDHTPQGMSKLTTFLEQIVGAESKEQMACIIETTHGLLIAHLLEAGWPVYPVNLRTVDRRRAASGAKTDTIDAYLLAKTGRADLADLHRLTPDSEKIAELKLLTRDQDALIQMQTRLVNQLTACLKAYYPVALELFAKLQQKSTLLFLQTYPTPQAAMAASAAQIQQVLRQARHPNPTIVAAEIVERLQQPHLQADAVTTRTKARLLGALVSQLLPLIEQIAQYEKEIKTLFLTHEDHELFASLPRAGKRLAPRLLAEIGDDRTRYQDASSLQALGGTSPVLFQSGMYSKAHRRLGCIKPLRNALHQFAWQTTQSEPWAMQYYQRKRAEGKSHKVAVRALANVWVRIIFAMWIHHRCYEAITFETAQQQHARPAA

SEQ ID NO: 343016 - protein, 348 aa, unidentified
MRGAIHMQITTIGLDIAKNVFQVHGIDAAEKVVVRKRLRRGQMLAFFKALPPCLVGMEACATAHYWARELTKLGHRVRLMPARDVKAYVKRNKNDAADAEAICEAVRRPTVRFVAAKSAEQQGQLMQHRTRDLLMRQRTQVINALRAHLAELGIVAAQGDKGVKELLTIVTDKKDERLPIDARASVIVLAAQLEAVQTLIGSIERRIKTQHRANEASKRLETVPGIGVIGATAIAATVADPTIFRSGRDFAAWIGLVPRQDSTGGKQKLGPISKQGDRYLRRILVVGAHSVLRRAMQNPEKYLWLTRLLARRPFKVVAVALANKMARMAWALLAHGGTYRAPEPAAAA

SEQ ID NO: 343017 - protein, 344 aa, unidentified
MTIVEERTAVTGGVDTHSEVHVAAALDPVGGLLGTREFPATAAGYAGLLGWLGKFGDVALVGVEGTGSYGAGLARYLAAHGVRVVEVDRADRQDRYRNGKSDPLDAVSAARAALSGRASGAPKGRDGAVEAIRALMVAKRSARHERTQAINQARALVLTGPDELRARLAGKRAAAFAEAIAALRPRPGDAAGYSLRVALRELGRRVQFLDDQVARLNELIVPLVTTRAPGLLRLYGVGPDTAALLLIAAGDQPERLRSEAAWAHMCAVAPIPASSGKTRRHRLNRGGNREANHALWRIVITRMSAHPETRAYVARRSTEGLSKKEIIRCLKRYVAREVYPYLRG

SEQ ID NO: 343018 - protein, 317 aa, unidentified
MNTLNNQNEINVGVDTGKTQLDIYIRPLDIYFTVENNDGGIKHAIKTLKKHPITRVTIEATGRLEHPFIMACAQANIPFVVANPVNIKRFAGAIGQKAKTDKLDAQLIAHFGEAIKPPLSSLKPEQMRLMSDLLSRRRQLMDMQTMEKNRSQIMTKTISSLIKPILTALKNQIDKVDLKLQKLIKECDEYKVKNDIIQSVPGVGNVVAFNLLSDMPELGCVNNKEAASLVGVAPFNRESGAYQGKRMIRGGRPKIRTAMYMAMMSAIQCNPKFKAIYHRLVAAGKPKKVAIIACIRKLIVIINSMVRDGVMWDPKMV

SEQ ID NO: 343019 - protein, 417 aa, unidentified
MNSPPETIPTQRYIGIDIHKHYLMIGGQNRHQEWTLRPRQVQMARFRSWAEKNLKPEDEVVVEATSNVWDIYDIVVPLVRKTVVANAYKVRQIAEARVKTDKEDIKRLITLLIADIVPEVWVPPMNVRELRSLISFRWRLTKQITMSKNRLHSVVQRFNLNAPEGGLLTDKNKSWWDWQEFTELTSFQVDRDLEIVEHLEGQKGAIDQKLAELSNTEPWASEMVYLMQIPGFGLIFSMVILSAIGDIKRFPHPKKLVGYAGLGAGVHASGEKYQEKSITKAGRKELRWALVEAAWVAVRFDPYWKAQFIRLKKRMHVNKAIVSIARRLLVSIWHILTKREPYRHFDEETIAYKMLIWAQTIGEEGRQGLTRQQFAKYGLLRLGIGQDLEHIVKGGGPRRIASTEEVLALKPELAPPR

SEQ ID NO: 343020 - protein, 370 aa, unidentified
MAKRSMFVGMDVHKESIDLSLAEEGRDGEVRHYGVIPGDLEALAKVVRALRAPNRRLRFVYEAGPCGFGIHRYLTGQGEDCVVVNPSSMPKRSGDRIKTDRRDGDALARLHRAGELTAIYIPTADDEALRDLVRGREDAVGLSTQAKHRLKAFLLRQGRRYPGRAGWTRPYRRWLADLSFPLAPQHIALQEYRDTIDETERRVERLTDQLRQLTPAWRWAPVVDALQALRGVSFVTAVGLVTEVGDIRRFTHPRELMAYLGLVPSEYSSGPSVRRGGITKAGNPHARRLLAEAAWAYQGVPRVGRQMLYRQETLPKPICDIAWKAQLRLTSRFRKLVARGKAKPKVATAIARELTGFIWAIAREVPTPPA

SEQ ID NO: 343021 - protein, 439 aa, unidentified
MPGENQDKLMSGNQPEVQYAAFLAIDWADQKHVWSLQEANSSARERGEVDHMPEAVETWVAQLSQRFAGRPIAVAVEQSRGALVFLLSKYAQLHIFPVPPAMTANLRKAFYSSGAKNDPTDADLLLDLVQQHREKLRRLSPDTEATRRIQNLVEERRKLVDEKTAQSNRLEAHLKIYFPQIPRWFGDVGSPMVCALLERWPTLEALQKARPDTLRSFFRKHHCRKEELIESRIKAIGEAMPALKDRAVVQTKVAVVKVSVQLIQVLHEGIEGLNRQIQEAAEAHPDFFIFDSLPGAGAVMAPRLLAAFGSQRERYQNAVEMQTFSGIAPVTESSGKSSWVHFRFACSKFLRQSFHEWAALSITQSQWARAYYELQVRRGKKHHAAVRALAFKWIRIIYRCWKERVAYDENVYLAALAKHNSPLLAKHNSPLVAATKAAL

SEQ ID NO: 343022 - protein, 340 aa, unidentified
MQITTVGLDLAKSVFQAHGVDETGATVLVKRLHRKQMLPFFSKLPPCLIGMEACGTAHHWARTLAAMGHEVRLIPPSYVKPYVKRGKSDALDAEAICEAVQRPTMRFVPVKTVAQQSILMTHRARSLLVRQRTMVANALRAHLAELGLVANPGIANLAKLAQQALSGESSLPSYARTTLDILIRQILVFADEIAALDQQLLAWHADSEASRRLSAIPGLGIVTATAVAATVTDPEQFRSGRQFAAWLGLTPQQCSTGGKTQLGGISKQGDRYLRRLLVVGATAVIRHTKDKATPLANWIRKLLEKKPFRLVSVALANKLARIAWVVLNRKEAYRAHEMIA

SEQ ID NO: 343023 - protein, 316 aa, unidentified
MDQFPQNQPSFVGIDVAKKHLDIHVRPAGSSFTVSRDASGLDELLTRLQPLAPTLIVLEATGGYETVVLATLVGAGLPALAVNPRQVRDFARACGRLAKTDSLDAAVIALFAERIRPELRPQPNSETQALGEIAARRRQVVEMISAESTRQQQTANRKVHKRLDAHISWLQKELADVDADLDTAIRTSHVWCHNEDLMTSVPGVGKTVARTLLAELPEIGTLDRRQIAALVGVAPFNHDSGSHRGTRSIRGGRSVVRAKLYMAAWVATRCNAVIKPFYQRLIAAGKPRKVALVACMHKLLTILNALIRDQKSWQPA

SEQ ID NO: 343024 - protein, 408 aa, unidentified
MNTLYVGIDVSSKSNVIYLMLPNGDKHSNFSVANSHEGSTQLVKRILSALTSHSLDTVLIGLEATSVYGDNLVYFLREDATLAPFNRKIHVLNPKQVKKFHDAYNDLPKNDYVDSFVIADCLRFGRINKEVYMGDYRYKALQNLTRARFFAVQNLIKEKQRFMNVLFKKYSTMTQEKVFSDAFSTTALAVYDEFESAEVLANMDLHELTDFIIEKGKNRFPDPDAVAKAIQKAARSSYRLPKTVNDSVNQVLSISITSMKALESQIKEFDKAIKALMELLPNVLISIPGIGPVYSAGIMAEIGDINRFNSQAALAKYAGLAWKQHQSGGFEAEVTRLIPSGNRFLKYYLCEAAFSLVRCDKEYSDFYHLKYKEVNRCQHKRALALTARKFVRLVFRLLKDNRLYCPAK

SEQ ID NO: 343025 - protein, 428 aa, unidentified
MDKRTKNPIRIRESRTLIVGVDIAKKTHWARMIDSQTGIETGTAFSFKNNTEGFSRLLGKMTRAREQIHAEGIVVAMEPSGHYWKPLAAYLAGLGITVVTVNPYHVKKQKELDDNSPTKNDRKDALIIATLTWQGRFSNCYLPTGVWAELRGYTAMRQQQKRKLNASLNNLVAILDEYFPEYQEVFKTLAGKASQHVLRHTPFPEDILKFTVEELAQELKGATSNRVGEKRAALLLQKAATSIGIKEGLAMARLRLSNCLEEIAFHQGQLARTEAAMVDALLRTGMSQSILSIKGVGVVTAASFLGEVGSLERFDNWRQVRKLAGYNLVEDSSGDRKGKTCISKRGRPGLRSTLYQASIVLVAHNPEFRELYHYLKTRPKNPLKAKQALVAVACKLLRVMFTLARENRLYDPEKVMGAYRQQQLKIVA

SEQ ID NO: 343026 - protein, 365 aa, unidentified
MTTRQRSTSSSTDPPVRREVVLGVDTHGEVHVAAVISPLGKILGTESFPATAAGYRQLLVWARKRGTVRRAGVEGTGTFGAGLSRYLLAQQIQVFEVNRPDRSARRLLGKSDPLDAQAAARAVLSGRARARAKSGDGPVHSARIFKLAKDSAVKARTQAINQLKAVLVIADPALRERLSSLGNRELFRTCARLGPSDGEDGENAVAQATHMTLRMLAERIEQLTGQINELNQRLTQLVEHHAPQLLVPVGIGPDSAVTLLITMGDNPERLNTEASFAALCGVSPVEYSSGRRSTRRLNYGGDRQANAALLRIVFTRLRHDPRTQAYYERRTQEGKTRREIIRCLKRYAAREVFNLVRPVSRAPAL

SEQ ID NO: 343027 - protein, 326 aa, unidentified
MIDAQPPQPQATAAAAVHAGIDVSKARLDVCVLPAGRTLSAANDDAGVRQVIDLLAPLAPALIVIEATGRYHRRLAADLLAADLRVAVVNPRQARDFARALGKLAKTDAIDASVLAQFAAVGHLRPCEKQPENRAALDERVTRRRQVVHMLVMEKNRIEGAADKRTLASIRKVIRVLEQQREGLDRQIAKLIEQDDDWRGRHEILTSVPGVGDTTANLLVSDLPELGKVNREQLAALVGVAPVNRDSGEMRGKRACFGGRPHVRAALYMAIVSAIRFNPVIRAFAGRLTAKGKPFKLVATACIHKLLTILNVMIRDGQKWNPPAAA

SEQ ID NO: 343028 - protein, 339 aa, unidentified
MGIVGALDLHRKQVTFDWVDTESGENRRGRLAPANRESFRHWLAQFDERPVELVVEGCAGWRFIAEEAQAAGAIIHVADPAEAATLGRGKKRRAKTDKVDARALRELLEQHRVPDSWIPPHQVLEVRTMVRLYDDLIRDRIAWQQRIHATLFHLGAPQQSALLRGDRNRLLTSEALSPAASGAVATALRVIDTLDVEVDRLRQQLRSFAARQPGCLALQAEYGIGKLTSVVVWCELGDTRRFTSSAQAVRHTGLDVTIYSSDGKRGRAHITHQGPPLLRWALYEAGMCASRPTSPDHAYFTQVANRLGKKRAAISVARKLTRRCHHRLRALGDTAFAEI

SEQ ID NO: 343029 - protein, 372 aa, unidentified
MGKKSSTLYVGLDVHKDSIDIAVAEAGREGEVRHIGTIGGELAALDRALRRLQSAGARLHVVYEAGPCGFVIYRHLAARGIAVEVVSPSSIARRPADRIKTDRRDSLMLARQSRAGELTAVAVPQAEDEAMRDLIRSREDAVRAQRNARHRLKALLLRNNIRYVGKSAWTGAHLRWLAELKFEDAARQFAFQEYVHAVTEATERIGRLEAAMRETVAGWRMAPVVEALQALRGIAFIAAATLVAEIGAIERFAHPRCLMAYLGLVPGESSSGERRRQGAITKAGNSHARRMLIECAWLYRYPARVAPILQKRVERVTPAVREIAWAAQVRLCARFRRLAARRLPHNKIVVATARELTGFVWAIMMEMQAGAR

SEQ ID NO: 343030 - protein, 416 aa, unidentified
MFKIIRFNCCGLDVHKTWIFACIGITDANFRTEYFEARFSSFPKDLRRLAAWLQEYKCEEVCMESSGKYWIPVFNALETTCKVTLAHPKYTKPQKGNKTDRKDARWICDLFMCNMIKPSFIPPPDIRHLRDLIRYRTKLTNMLTSEKNRALNCLTVSSLKLDDVFTDVFGKSARSITEYILAHPGEKFNVAPFVDKHCKTPIDQIQDAVDGAICPEQAVKLRECLNHIDELNAHRDRIEQEILTLVEPYSAHLDLIRTVPGMNKDPMTAILILSEIGSDMSVFPTAKNLVSWAGCCPRNDQSAKHVKSTRISQAGSYLKPRLVQVANALLKSKNHPEIIERYRRIKSHRGHKKAIIAVCKMLLTAIWNILSTGEAYNASGYLIQTPRPTDETKVLTHKQALELLRLRGYVIKEESA

SEQ ID NO: 343031 - protein, 449 aa, unidentified
MSKQGKAMGLPVINAYAAGVDIGARIQVAAVPPELCDSPVQTFQCFTADIERMADWLVSLGIKTVAMESTGVYWIPVYEILEDRGLEVVLANARECKAVPGRKSDVNDAQWLQRLHACGLLRAGFRPARDIAALRAYMRVRDRHLEYAAAHIQHMQKALTHMNLQLHHVVSDVTGVTGMKIIRSIVAGERDPDVLASMRDVRCRESVETIRAALVGNYQPEHVFALAQALALYEAYQARIADCDAQIEQTLELLIADKAQPQEPLGAPRSRTKQTNSLNFDVRPLLYQLTGIDLTQIHGIGPSVALELVAECGTDLSRWPTEKHFTSWLTLSPGCKISGGKVLSSHTRKSNNRIAARLRLVATAVGRTETALGAFYRRLATRIGKAKALTATARKIAILFYRAMRFGMRYQDPGADQYERRYRERVVKQLHRRAAHFGFALQPIEPSVS

SEQ ID NO: 343032 - protein, 344 aa, unidentified
MDIVIVGIDLGKNSCSVAGLDPSGRVVLRRRMRRNVLENFVQGLQRCIVAMEACCGAHHLGRVFVAQGHEVRLMSPEYVRPYVKAQKNDNLDAEAIAEAASRPTMRFVEVKSQAQSDIQALHRARERLVSERTALINHLRALLLERGIVAAQGRRKLQEALSTFANEGGIEALSPRIRALIDDLRSEWRGLDERIAAFDAEFIRMARDDAVMRRLTSIPGIGTINATALAAAVGNGRTFRRGRDMAAWLGLTPRQMTTGGKPRLLGISKRGNRYLRKNLIHGARAVLPSLVERETPLGRWVRGLLARAHKNIVVVALANKLARIAWAVLAHGTAYGAGSEAATA

SEQ ID NO: 343033 - protein, 409 aa, unidentified
MQVIHSRCAALDLGKDVLAAAVRLQNGKTVARECRSYGTTTRQVLALCSWLQSCGVTHVVMEATGSYWKCVWRLLEAQFELTLANPAQIKNLPGRKSDVNDATWMADLLAHGLVRGSFVPPAAITALRELTRTRKQFVREIARHTLRMQKTLDIAGLKITGIISDVLGVSGRAILEALIAGETDAEGLADLAHGRLRVPRAQLLEALQGRLTLQQRRLLGMHLRQIEAAEDSLASLDMYIDEAMEPFRETVTRLREVPGLSDVSVPALLGEIGVDMSRFQTHRQLLSWARLCPRLDQSAGKVHSTRTLKGANWIKTLMIQAAWCAVRTKNSYFRAQFLRLRTRRGSKKAIGAVAASMLTTVYYMIRDRTPYQDLGDRYFDQRDRSRVARRFVVRLQRLGYTVQINDAVA

SEQ ID NO: 343034 - protein, 353 aa, unidentified
MEQVKTRQEVILGVDTHLDVHVGVLIDAIGRVQGTLAIATNPSGYEQLLDWAQGFGVLRRAGVEGTGSYGSGLTRFLEGRGIAVLEVNRPDRSRRRSRGKSDPTDAESAARAVLADDAKSIPKAQSGLAEALRTLSVARRSAVKAKTQAVNQLRALLVSAPPFIRDGVLKVKPEDCVAACAALPQGDVNPVLASLKTTLRLLAKRWTALHEELRELDKQLTRLTKLAAPRLLARFGVGSQTAATLLVTAGDNPTRLRNEAALAALCGVSPLDASSGKMHRHRLNRGGQRQANNALWTIAMVRMRSDARTREYVARRTREGLSKKEIHRCLKRYIVRELYPLILADLKESMRPT

SEQ ID NO: 343035 - protein, 359 aa, unidentified
MQQGIMVGCDLHDGTMVLRVLGAGKKVLGGVYVTGPNGRQQMFEALKKESRKAGGVPIYLVYEASGLGFTLHDEAVKAGIQCFVLAPSKIEKSVKQRKNKTDAKDAEALLELVKCHVLAGKEMPVIWIPGMELRDNRERVRERLELGAEAARVKARIRSLLKRYELKVPEEAGKGWTKKAKAFLGKESQESTILGPGARAVLESLLRQMEVLEKEAEELEKGFEDLAQKPQYQKPAEKLMELKGVGLLTALVFLTEMGELSRFKNRRQVGSYVGLAPSVDESGESGDRKGHITRHGSARLRKVLCQAVWSSIRHRGKERDFYEKLVEKNPRKKKIAVVAAMRRLAVKMWHVGVEAKRAA

SEQ ID NO: 343036 - protein, 418 aa, unidentified
MYYVGIDIAKKFHIACVLDESNKLLVKNFRVESEITDFSMLHSELINISQDKSKFLIGMEATGLLFENLYIFLQGLGYNVVLLNPYQTTRFREMQTMKYVKNDNIDSQMIAALLKSGQYSKGYVSEDIYQAIKSLYRHKATLMQEMKSAKRQVSTTLAVVFPEFEQIIKDPFSVSGMALLEKYPTAKHYKGASGERILKLFRNIKGNNFNLQKANDLLDLAKLTIYQGNAKDERAYVILSNLRRIRFLKEEIEACEAQMFTLLNDVNKTIETSQENEVYISDLVDNLRSIDGVADKTIFAILSECGDISRFKSAQAFIGFLGLYPTLQQSGNSTKYGKLAKRGAKLAKLALYQASIACVRHNDELKKIYLDKKSGGRAPKECVIIVARRLAMIIYSIYKNNTPYNPARVFNTKASLSH

SEQ ID NO: 343037 - protein, 361 aa, unidentified
MSKDKYVGLDVDQATIVAYVTNDKGEFLMEVFLETKADGIRQFLKGLEGRVHVAFEEGCLAAWLYEIVRPLVAETVVCDPRANKLIQSGSKGDRVDAKKLARLLRLGELRHVYHGEESVRGLKELVHGYDRLVRDVTRTKNRLKGLFRGQAIGCRGQAVYSQETREQWKQKLDSSALRARADLLYKQMASLRELRDDAEKAMLKEARTHGAYKLLVKLPGVGPIRTATIIAAVGTPHRFRTKRQYWAYCGFAVVTHMSSEYEIIEGRIQRRRKPLQTRGLNENFNRMLKTAYKGATLTAIATEPFNKYYQRLIDNKMRPEMAQLTVARKIAAISLAVWKKGERFDPARVNQAEQSAGDEKR

SEQ ID NO: 343038 - protein, 340 aa, unidentified
MTVMIGVGPHKATHTAVAIDSNETELARKKVRATTAQVQQLLAWAEPFDSKTWAIESANGLGYLLSQQLVAAGETVLDVPATLASRTRLLTTGRSNKNDPNDATSVAVSALRFEGLRVVVPAGHAEVLRLLAKRNHDIGRHRNRLVSRMHSLVMELAAGGIAKEINASDVDRLLAEITPATPVEQIRFDLAVDLLADIRRLDQQLKDSHRRIRHAVTASQTSLTEIYGIGPIIAATLIGYSGDVGRFADRDAYAAYNGTAPVEFSSAGRTVHRVSQRGNRQLNHALHMAALCQIRQSHSEGRAYFERRVGEGKTKREALRSLKRHVSNRVYRHLLADAQH

SEQ ID NO: 343039 - protein, 394 aa, unidentified
MEDVLRSCCAGLDIHQKVIVACIIRSAEGKKRPEKFFGSFDTTTRGLFDLSDWLTSYEVTHISMESRGIYWKCVWRILQNHFDLQLANPRHIKNIPGKKTDMKDAEWIARLTRLGVVPTSFVPPEPIQELRDLTRYRKHLVEDLNREKNRGHMVLQNAGIKLTSVIKDIYGKSGRALLYALIENKPITESLFLECVYTTLRRKVPQLLESLEGFMTPHYRKMLALHLTQIECLEKQLVEVEETINDYLVPYEEYVERLEEIPGINRRTAAVVLAEMGIDMSVFLTSGHLASWAGASPGNNQSAGKNRSKRVGKGNSYLKKVLAQGALAVSQGKPNRIQAFFFRVRRNAGHKKSVVATVHLLIRIIYRMFSDQSRYNELGGSYLQNRKNTLTNNC

SEQ ID NO: 343040 - protein, 317 aa, unidentified
MRTPTASFIGIDVSKQQLDIAVRPGGESWTVAYDEGGLSALVARLRALAPTLIVLEATGGLEVVLAGARAAATLPVAVVNPRQVRDFARSTGTLAKTDRLDAQLLAQFAEALRPEPRPLPDAQAQELTALLQRRRQLVEMLTAEKNRLPLAARRIRPQLQAHIEWLHKQIAQFDEDLRQLIRSSPLWREKDDVLRSTPGVGPVLATTLVAALPELGRLTRRQIAALVGVAPLNRDSGTLRGRRAVWGGRAQVRAVLYMSTVVAVRHNPVLAAFYQRLRAAGKAPKLALTACMRKLLTILNAMLKHRTRWVPVLAQHA

SEQ ID NO: 343041 - protein, 342 aa, unidentified
MYYIGLDVHKKTISYCVKDAAGKIQSEGKIGSTRRELDAWIKTLPQPRMMAMEATIFTGWIYDHLLPHAEKVKVAHPLMLRAIAAAKRKNDKIDASKIADCLRCDFLPECYMTSTEIRDRRRTLRYRGLLVKQMVQMKNRISGLLMETGVSYNKQRLHKVGYFTELMSGNEEIDCVRPLLKLSRDTINRSQKLDYALVSSLERDPLLAERLKRLRTVPGVGPITALTWVLEIGDVVRFRSIKQAISYCGLCGAERSSADKVMRTPISKQRNKHIQQVLVEAAKLASRYSHELSLIYEKEMQRGNRNRATLAVARKMVAWMIAVERRKQDFVPAEKFGGTAAA

SEQ ID NO: 343042 - protein, 345 aa, unidentified
MEQISRIGMDTSKHIFQLHGVNAAEEPVLRKKLRRKEMFAFLEKLAPTVIAIEACGASHHCARLLQSFGHSVKLIAPQLVKPYLKRGKNDAADAEALCEAMSRPTMRFVPVKTAEQQAALMLVGVRDRLIRNRTQLSNAIRGYAGEFGLIAAKGKAHLDPLLERIQADESLPALARELFAAQAEEYAQLQAQIDQVDARLIAWHRADECSRRLIKIPGVGPIGAVLLKMKTPEPELFRSGRQFAAWIGLTPKDHSTAGKVRLGAITRAGDEALRSVLVVGATTVIQHAQRGGRPSPWLTELLKRKPPKLAAVALANKIARIAWKLMVTGENYAAKAAPATLPGAA

SEQ ID NO: 343043 - protein, 392 aa, unidentified
MEDYIWVGLDVHLESITAAILEDGDNNPEVIKMSGDLMKVRRLFRRLSKRGSVRACYEASGAGFVLQRVLTRDGFHCEVIAPSLIPRKPGDRRKTDRLDAVMLVRLYRSGHLTPVHVPGEDQEALRRLIRLRYAYQEQCKSTKRRICSILLSHGYVYRQGRSHWTKKHRQWLAALRRELQGPVATALIAELEHLEYLELQRSALDADIECYAQQLPFRKTVEALCCLRGVKTLTAMTLLTEIVDINRFRSPRALMAYFGLVPTERSSGNRERKGPITKAGNTHARRVLVEAAWNNHHRAGADLVLNRRRQGQPAEVVAIAVKAQHRLSRRFRQLNARKHTHVAITAVARELCGFVWAIMKAAPQHSTEAQHEKVMDRRATIGESSFQVCGMA

SEQ ID NO: 343044 - protein, 311 aa, unidentified
MTQVKQLDFTGTTIFCGVDVHKKNWRVNIQDVEFELEDFSQDANVVLLHKHLNRKYPGATMKVCYEAGFSGFSAQRWLSQHGVDCQIVNAADVATTDKEKRQKSDKIDARKLCEHLQSKKMKGIYVPTSQWEHGRSLVRARARIVSNQTRCKNRIWQLLYFSGLSFPQDYEAGQYWSRNFIKKLQAIDCGTEELKITLGLYIKDFLQTRRLLLEAMRAIHKLCKQPEYEKQITLLRSIPGIGKINAAVILFELQDINRFKRFDNLCSYVGLVPDTHDTGETKKSKGITNRSNQYLRMALVETIPCLRDMGV

SEQ ID NO: 343045 - protein, 454 aa, unidentified
MAQGSGLTRADRNRNRKLAGLRQVVLKDRAVPAVDLGEDKQAAVLVDHEGRVLARRTVKNAKAYELAGLLEWMAGRAAGAGFAGLVVACEPTGHRWKALMGLADAAGHGFVCVQSLAVHKEREKDDYTRDKTDQRDAYLIGKLVTKLECYLPERASADWARLRHLGARRFALVADVTSCMQQAGDLLGCAWPAPLAAARRPLESVSWLAAMAVVTGRCNGIPARLRTMGYDKFLAAVRRELPRWDGKIVRHSIVRDVRDALTGTAGVAAQRRGALERLHLLLEDWRSLRGRLAATEALMTGMLADLGLAGLVASIDGMSALSGAVILAETGDLTRFASGRAVVKHAGLSPSEHTSATITGKTRISRRGRPGLRTAAWRAVRGALRHNRVLAGKYDRWTSRNQNQLTDGQARTACAATILRWLWAVVTTGRAWDARIAAGQIPARPAALAVAAAA

SEQ ID NO: 343046 - protein, 337 aa, unidentified
MNITLIGLDLAKNVIQICGVNQAGKAVFNRSVTRHKVLELLSQYPQVPIAMEACSGSNYWGRALQQRGHPVMLLPPQHVKPFVKGNKNDRNDAFAICEAARRPNMTFVPPRTLEQTDISLVHRLRERRIGERTRLINQLRGLLNEYGIVLAGGKETLKQAMPLLLEDASNELTPRARTYCCDILEEWQQLDEAIRCLDKDIEQQCRDNEACARLTDIRGVGAVTATAMVAFVGNGSQYRNARHFSANLGLVPKEHSSGGKQKLGSITKRGNGYLRKLLIQGAWSIIRHLNKATDRLSLWVKQLAERRGKQRAAVATANKLARIIWVMLFRQEHYRAA

SEQ ID NO: 343047 - protein, 367 aa, unidentified
MKQQTSATSETQIKGKNIIDFTGKIIDVGIDVHQKDYQVAKVCEGVTLGNHRMESNADKVIEHLQGHYPGARFRCVYESSAWGFALQRKLSAAGIECIVVHAADVSTSDKERKRKTDKVDALKLARSLASGDLKGIHVPDETIQKERTMIRYRKNVVNDINRSKNRLKSLLKYHGIEIPEQFAKSSWSCNFMKWVEQQAAKDDLLKDSLLLMLQQVKLLRQQLLKVEKKLGDLRKGKYAPKAQLAMSVPGIGPTTAMLFLLEVGDVRRFKGFDPLNDFIGLCPDTASSGEKDRDTGITSRRHKQLRSALIEAAWNAIRLDPALLECYQMLIKRMKGSQAIIRIARKLLRRLRAVLLSGIPYQKGVVA

SEQ ID NO: 343048 - protein, 410 aa, unidentified
MEVLHAHCAGLDVHKDSVVACVRHMADSKVTTVVKTFKTTTQELMSLSEWLSAEGATYIAMEATGVYWKPVWHILSDGEFELVLANAAHVKNVPGRKTDVNDATWLAALMAHGLIRASFVPDEPTQQMRDLLRTRKQMVRERSSHIQRIQKTLEDANIKLDSVVTDILGLSGRRIIEALIAGQTMPQALASLAHRRIHASVDELEASLRGRVTKHHRFLLKLHLDQIDAFDAAITCIDEEVSANVEPFRAAIELLSSIPGIGSLAAQVLVSEIGIDMSRFETAGHLLSWAGLCPRNDESAGKRRSAKMKKGAPWLKTTLIQCAWAASRKKNSYLQAQYLRLRSRRGSKKAICAVAASMLTAAYHMLKNGTFYEDIGADHFDRRAQGKQVLRLVNRLQNLGYNVEITPKAA

SEQ ID NO: 343049 - protein, 431 aa, unidentified
MKGGDTVKNKFISTLFVGIDVSSKQNVLCALDFNGNKLLNLKALNNQPGAESILKSIIGCLNSNALKYVVIALESTSFYNTHIANFLSSNEELLYFNPLVYCLNPKTVANYRKSFIDMDKTDPLDAYVIADFARCGRITSKPWRGAQFLALQRLTRHRLHLVESITREKAYMVSNIYLKFSELAVLDKEDKPFSNTYGVTSAAILTEFLSLDEITYSPVEELVAFVREKGKNRFSDPEKTAKLLQKAARDSYRLDKVLYEPLNVAIASSFNVIRALESEVKAVDKAIEKNIRGLNTSEYQSLKSIPGIGPVLASGILAEIGTIASFDSHNALAKYAGLTWRVKQSGDYTSDETRMTKTGNKYLRYYLIEAANSVKYQVTEYNAFYSKKYGEVTKHQHKRALALTSRKLVRLIFSLLTKNQIYSSNKVGEIK

SEQ ID NO: 343050 - protein, 310 aa, unidentified
MEITVGIDVSKARLDVHLHPLGEHFVVDNDEAGVAGLCVRLLGLKGVQTVGLEASGRYERLAVAALADAGLPVMVLNPAQVRAYAQAIGQRGKTDPLDARLIALFLEATRPEPRPLPDAATQELAALMARRRQLVGMLVAERARYKQAGPGVVRVSLLRIITSIEDALKELDRDIDTHVRGTPVWREREDLLASVPGIGKTISRTLLAELPELGRLNPRQIAALAGLAPFTRQSGKWRGRSFIAGGRAPVRAALFMGAMVACRHNPVLKTFKDRLVQAGKPKLVAIIAVARKLLTILNAIIRDQKPWTIT

SEQ ID NO: 343051 - protein, 430 aa, unidentified
MKSNTQNAKIEAITEKTLVLGIDVGSKTHYARAFDYRGIEYSKKPFKFSNTEVGFATFKEWILDLKERHEKDKVVPGMEPTGHYWFNLGKFLQDNEMKPVLVNPHHVKKSKELDDNNPTKNDRKDPKVIAGLVREGRYMIPYLPDGVYADLRTASNIRFQLQAELTRIQNRISRWFNIYFPEYKTVYGKPDAKSGMLILKAAPLPEDILTLGIDGVNQIWRDAKLRAVGKARAKTLIEAAEHSVGSKEGAVSARMEIRMLLEDYESRNTRLQEVMVLIEELVRKIPMAEKLLEIKGVGIRTVSGFLAEVGDISRFNNPKELQKLAGLALVENSSGKHKGETTISRRGRKRLRYLLFEVAMSLVSKNQEFRELHNYYTTRRLNPLKKMQSLMAIAAKLIRVFYAMLTKGVDYDPKKMISDIKRPTVYLQAA

SEQ ID NO: 343052 - protein, 316 aa, unidentified
MICGVDVSSKTLDARVGRQGPSASFANDEEGIAGLAQFCRLQKVDLVVMEATGGYEQQAFALLWACGLGVAIVNARSVRKFAQAMGILEKTDQLDSGVIAWFAEVKKVVAMHPASVQQQRLKAMVTRLRQLTELRAGQRNQRLLVTEATVREGFHQLLVFLNQQIRALEKEIAAIIGADPMWAKLDQSFRSIKGVADRTVARLMAEMPEIGVLSNKKISKLAGLAPLAADSGKSQGKRTIYGGRQAIRDILFVVAGVVSRHNPDFSAFQTRLAQAGKAKKVIRIALAHKLLVRLNAKARVVRQQFNAAPLIAALAP

SEQ ID NO: 343053 - protein, 380 aa, unidentified
MDVHSTNFTLCSFEPGYGFEADKIFGQTQIKEDIFNSTVKYINKLKSMRPDVDVVCGYEAGCLGYNLHRKLKAKEIESVILAPTTMAVSRNCSKKKNDYRDAITIAKCLASSAYKAVYIPDDKDEDVRDFIRMRDDHKTALKQIKQQLNAFCLRHGHHYDKTKWTGLHLNWLRKLELSKLQRETVEEYLVTYETLTSKIAALDVRIEDIASEERYAEKVNKLKCIKGIKTHTALSFVCEIGDFNRFKSADKFAGFIGLVPGECSSGNTERMLGITKAGNRHLRRLVVEISNTYRRGTVGRKSAALKERQKDMPKDVVAYADKAINRCQRKYQRMMFKGKNSNQAVAAVARELCCFIWGMMTGHHSRTAQAEASVYRSELD

SEQ ID NO: 343054 - protein, 425 aa, unidentified
MKHAPDNSNRTTLPPNPARGLTAGLDWVKDDHVVCVVDGAGRAVDRFTVTHTGSGLAELLQRLRKTGCQEIAIERPDGPVVAALLEADLTVVVISPNQLKNLRSRYGSAGNKDDRFDAYVLADTLRTDRARLRPLLPDSPATLTLRATCRARKDLIGHRVALANQLRAHLHTALPGAVGLFAELDSAISLKFVGRFDTQDKLDWLSAKRLAGWLRNAGYSGRVDPAVLHARLTAAPRGLTGPPGAAHAHTTRALLTVLASLVEQIRAQSEQIGEQLDLHTDQHIFTSLPRSGTVRAARLLAEIGDCRARFPTPEALACLAGVAPSTRQSGKHRGVSFRWSADKQLRDAVCDFAGDSRRANPWADKLYRDAITRGHDHPHAVRILARAWLYIIWHCWQDRVAYQPARHGALQRHLATQNKITNQAA

SEQ ID NO: 343055 - protein, 368 aa, unidentified
MTIVAQTRPFVIGVDCHARTHTYAIIEVSTKRQVACEQFPTTSTGISRALAWVGRRTDGDMASLWAVEGIGSYGARLARAVTDAGYDVAEAPRMNARGRRGIGKSDPMDAAAIGAAVLSLEESQLRVPRQNEGTRAGLRILSAARDQLTRERTVNVNALIALLRAHDLGIDARKPLVPSQIATITRWRERQEQIELSIAREEAVRLARRVSEVTTQLAANQKRMTELIQESPAAPLLEMVGAGAVTVATVLTAWSHPGRVRSEAAFASLAGVNPLPASSGNTVRHRLNRGGDRRLNRALHTITMTRMTHDPGTRDYVAKRTQEGRSYREIRRSLKRYIARTLYRQLSTLYATAEPAPSHAAGADPCQE

SEQ ID NO: 343056 - protein, 407 aa, unidentified
MEVLYARCAGLDVHAGSVTACARIASGPQVTYEHRTVPTTTRGLLDLAEWLATHGCTHVGMEATGVYWKPVWHVLEAHFTLVLANAMHIRNVPGRKSDMNDATWIADLLAPGLIRSSFVPPAPIQELRDLTRTRRQLVHEVARHVLRIQKTLEDANLKLTQVMSDIVGVSGRAILNALIAGETDPHRLADLTRGRLQATRADLVEALHGRVTDHHRFMMQLHLTQIDTLEAAVATIEARIGDALGPFRAAVSLLTTMPGLSETTARVVIAEIGIDMTRFPSVGHLISWAGFCPRLDESAGKRRSSRTRQRAPWLKPTLVNAAWAATRKKDSYLRAQFLRIKTRRGAKKAILAVASSMLTAAYFMLRDGVEYHDLGAHHFEQRDKEQLAKRLIQRLRDLGVAVEVKAA

SEQ ID NO: 343057 - protein, 492 aa, unidentified
MPSYGGVLMRLLDDSGRTGVRPDSVQAFGGMLSLRLPTLCWVWLSFGLRARRTPCRGVAPEGTAQLAIAMPASRSLQVHDEAGDGMSKVFIGVDPHKLSATIEVVDDHENVLATGRFGTDKAGYAAMRKTVSRWPERVWAVEGSNGAGRPLAQRLLADGEHVVDVPAKLSARARLFDTGHNRKTDAHDAHAVAVVAVRTKGLRVLAYDVELEALRMLADRREELTRTRIQTVNRLHRLLSELTPGQAKKDITTGQAKAILSSVRPRDLAGKTRRRLAAEQLAELVMVENKIKTLTKELKAMVLALGSRLMDLPGVGPVVAARILADVGDVTRFADRNRFASWTGTAPIDASSGELVRHRLSRAGNRKMNHMLHIAAATQARLDTPGRAYYRRKLAAGKTRMEAMRCLKRRISDAVYRQLLADAARAQLAHPPELAGTGPGGHCGASQESSAVDLPPHIDTSDQPLPGPAPTTLQPPMTVRKSPRKRTPQTTA

SEQ ID NO: 343058 - protein, 420 aa, unidentified
MPSHPSDFAAIVGLDWADRKHDICLLESGQDTPELSVLEHDPVAIDAWADKLKKRFGGRPIAVCVELTRGPIVSALLEYDFFVIFPINPATLARYRRAFSPSRAKDDPKDAFLALDLFRHHPERLSPLRRERPAMRALQCLVQTRRSLVDDRCRLINRLTYALKEYFPQVVRWFRDKHTDVFIAFVSRWPTLEAAKRAHRDTLVDFFHAHNVRSGKTVQRRADAIRAARPLTSDVAVIEPNRLMAEALLAQIAVLSKAIDRFDAEIAARAAELPDFKIFAALPGAGAALAPRLLAAFGENRDRFPDAASVQKCTGIAPVVERSGNKSWTHWRFIGPTFLRQTFVEWVGETVPHCFWAKAFYTSRKAKGIPHQVILRALAFKWIRILWRCWHDRQPYDEARYLLALQKRHSPIIAAAAQSP

SEQ ID NO: 343059 - protein, 417 aa, unidentified
MLKIVYRVCCGMDVHKSFVVACIAATNEQGVTTYKSKRFSTFTGDLRRCAAWLAENNCKDVCMESTGKYWIPIYNILEHTCNIVLAHPKYVKAIRGKKTDKRDAKWIADIFKHDLVAGSFIPPPDIRQLRDLVRYRWKLTNFTTGEKNRAQNCLTVSNFKLDDVFSDVFGKAASAITARILEDPTEKITDISGFRTKGMKATDEQVLAAVDGEMCAEQAEKLRIIRSHMDSLELCKLNLESLILSTAEKYLPQFNLVMSAPGIQSFAAIGIISEIGVDMSVFPTSKHLCSWAGLTPQNNESAGKKKTTRISRAGAYIKPLLVQCALCAIRAKQFPEVRNRYLALKKRRGHKKAIIAICRMLLTAIWHILSDLKPYTAEGFLESRPVNKAKVLTTSQALNLLKQRGYTIKDDIVPAMN

SEQ ID NO: 343060 - protein, 347 aa, unidentified
MATSYIGADVDSKMTELAVERNGRIVCRQRVETSIVGIKQFLAGVCGRKALSLEEGPMADWLYRNLKDSVDELVVCDPRRNKLIACDGDKDDPIDAGKLAELHRGGYLRAVHHSDSAERVLLKQWVGLYHDRVKEAVREVNKIRARCRMHGLRPPRGFLCNAKVQKQWLAELGGHGVRGQLELLLPGLGAVRQQVRRARLEMARRVKGHDIVDRWKDLSGVGPIRATTLLAYLDTPWRFGSAKKLWKYCGVGLVRTASGTDKKGRPRKGKLQLAWAVNRRLKGTVIGAAVSAIEQGANVFSDHYRRLQAQGVSPSNARHAVARKMLTTMWGMWKNKSRFEAALVCGG

SEQ ID NO: 343061 - protein, 343 aa, unidentified
MQIHSVGIDLGKTTFHLVALSAAGTVLLKKKFTQKQLITFTANLQTSLIGMEACSGAHFLGRTLREQGHDVRLIPPQFVKPFVKSNKNDFLDAEAIAEAVDRQNMRFVPIKTDDQLDLQALHRVRDRLIARRTSVINQLRAFLLERGMTFAKTPAKLKVAMPEILENADANLTPRIRNLISLLWSEWKDLEQQIVTVNAEVEQIASSDAACLRLRQIPGIGPLIATAIVAAIGNGAAFHKGREFASWLGLVPRQHSTGGKAKLFGISKRGNSYLRKILIHGARSAVVRMKRERAPFGAWLDALQTRAPLNVVVTATANKLARIAWAVLSTGKEYRALPNSTPA

SEQ ID NO: 343062 - protein, 349 aa, unidentified
MLADELDYVVGVDTHLDEHVFAVVAAATGAVLARQVVRANECGYQAALRFAGEAAHGARAWAVEGTGSYGAGLARYLAGRGETVLEVSRTPRTERRLRGKDDALDAARTARAALAREALALPRNGERREALRLLLVARRSAVDVRREALGQLRGVIVTAPDRLREQLRVLPTGRLLERCSRLRSSSTAGADELATRLVLRSLARRIRAATREAAELEREILAHVRALAPALLDEPGVGPIVAAQLIVAWSHRGRLSSEAAFARLAGVAPLPASSGQTTRHRLSRGGDRQLNRALHTVVLHRRQHDPATKDYIARRTAEGKSRRDATRLLKRYLARHLYRLLQNQEPLLA

SEQ ID NO: 343063 - protein, 406 aa, unidentified
MVFVGIDWAEAHNDVLVMDEAGAVLSSARVPVGVEGLARLHALVADHAEEPGEVIVGIELDQGLLVRSLAGAGYQVYAINPLAASRYRERHTTSGAKSDAGDAKLLADLVRTDRHNHRPLAGDSDEAGAIKVLARAHQALVWTRQRQVNALRSGLRDYFPAALVAFGDDLAAPDALAVLQIAPTPERGRALSRSKIASGLRRGGRQRNVERRAAEIQQLLRAEHPAAAPIMADAFGAATQARVAVIASLVAQTAELEARLAEHFDRHPDAEILRSLPGLGLVLGARVLGEFGDDPTRFSDARGRKAYAGTAPITKASGRSRIVLARVARNKRLADACEWWAFCSLTRSAGARRYYDALRARGKTNHQALRQLANRWVGILHHCLEARAAYREDIAWPEPAELRLAA

SEQ ID NO: 343064 - protein, 394 aa, unidentified
MPELFVGIDVAKDRSSAQGIDSNGIERFSLTFSMDSEGFMQLWKAIAEQSKDLSEVRAAVESTACYHINLYSFLTAKGVSTVVINPLLIANFTKLSLRKTKTDKKDAMSIAQFLLAHRDTINQLSLSQDLQDFRDIARERESVGNMLTAHKVEIKRLLQSTFPELERIGNLSTRVLQDFILEFPSARLVKMAKPKAIQKILQRKWVGTKLTYTAEDLIQAAKQSVATISPAKEFILQGKVRTLQHLQERYVELTKILTEYCKSSMLEDFEIMTSIDGIDKRTATTFLAEIGCIGNYASHKKLIAFAGIDPTVYQSGKFEGASRISKRGNRHLRRVIWLMTTCTIQHNATFKAYYMKKRGEGQPFKKAVFATAHKLIRMIFAMLSQKTMFREVCL

SEQ ID NO: 343065 - protein, 346 aa, unidentified
MLYAGLDLSRKRLDFHLLDAEGATVEVGATPPDADGLRGLSERLARHGEPVRAAIESMNGARFVHDRLELAGWQVEIADAQKVKGLAPLACKTDRIDAWVLAELARRDLVPAIWLPDPVVRAERERARWRLHLVRHRSSLKQRVHAVLLTHGKPCPVSDLFGVRGRQLLARLGLPQPWQATIEASLRLIDELEREITDCERELRRLGADHRYVPLLLTVPGIGWVLAYTIAAEIGDISRFPSPRKLAGYTGLCPRVYQSGERDLRGPLAKQGPRYLRWALVEAATHACTAPVYRDRYQQTKARIGKQRGAKVAQIDLARRLSEAIWHMLSHEQPFAPKGATDPLAA

SEQ ID NO: 343066 - protein, 454 aa, unidentified
MTKRKTGGHPDLKMVNPQAAAIDIGSTMHMAAVNPDADIIMPVRAFGTITQDLHDLADWFQSCGVTSVAMESTGVYWIPAFEILEAHGFEVILVNARYAKNVPGRKTDVSDAGWLRQLHSYGLLRGSFRPDAEIATLRAYVRQRERLTEYAAAHIQHMQKALMEMNLQLHHVVSGITGATGMRIIRAIVGGERDPEALAALRDVRCKSSVDTIKASLVGNDREEHVFALTQSLELYDFYKAQIETCDRRLEAAVAALTVRADDDLAPLPKARIKGKQHNAPSFDVRAALYGVLGTDLTQIHGLGPSLALKLVAECGTDLRAWKSAKHFTSWLCLAPGNKISGGRLLSSRTRRSSSRAAALLRLAAVTIGKSDTALGAFYRRLSSRIGKQKAVTATARKIAVLFYNAIRHGMTYQDQGAAAYDERHRQRVLSNLQRRAKIMGYALAPIPETAGVS

SEQ ID NO: 343067 - protein, 374 aa, unidentified
MANIIEAFVAFDTSKLRNAVAIAEAGRAGEVRFLGEIENTEAAITKVVRKLAGKYGRLTFCYEAGPTGYGLYRQIKSLGHECIVVAPSLILKKPGERVKTNRRDAVSLVKQLRAGDLTAVWVPDPRHEAMRDLTRAREVAVEDLRCKRQQISAFLLRQGLHYPGERTWTKVHRNWLMSQKLEYAEHRIAFEEMLLAMRQAQERIERLEQAIRVAVPDWSLAEVVTALMAMRGIDFISATAFLAEIGDLSRFPTPRELMGYLGLVPSEASTGDTIKRGPITKAGNRRARRILVECSWSYQHPPRVGKEKQERVAAAPQAVREIAWKAQCRLSARYRALTRKGKLKTVAVTAVARELSAFIWAINRQIANPRAVAR

SEQ ID NO: 343068 - protein, 427 aa, unidentified
MNQNDTSTNFAATLGWDWADKKHDVWLQAAGGGKPEHRVIEQTPEALHQWVAHLRARFPKGRIALAIETSRGPVLSALGAYGFIVLYPINPAMLCSYREAFCVSGAKDDRTDAMLLEEYVRLHQAKLRPLEPDTELTRKLARLVENRRGLVDERTRLVNQMHSLVKTYYPLMEVLFEDMTLPLVAFFLLKWPALASLKMAGPAALRKFFYGHNCRSDKTMEERLQAIQKAQPLTEDPALIEPAVLQARALAGLLQVLHQSIDQMETKIEQTTDAHPEAALFRSFPCAGPALAPRLLAAFGTNRDRFASAQEVQQFYGIAPVKKQSGQSKVIHMRYRCPKFGRQTFHENASHAVRKEGWAKTFYEEQRAKKKGHHACVRAVAFKLLRIYFRCWKDKKCYDANLYEEALKKHGSPLAGLLKKAAPTNGE

SEQ ID NO: 343069 - protein, 321 aa, unidentified
MTRSLGTVGIDCGKQGLDAAIFPSGETIRVENSLDGRRSLREWIVAHGVDRAGMEASGGYERAIRDLLCEAGLTVHVFNPARVRYFAKAKGRLAKNDRLDAAVIAEFTATMSGDWLPVTPDPAREELVGLVHARRRMVDKHADLRKAMRMAPEAAKTAFRHAVDALGAAITELETLIAEKRKANEAVDRTVTTLTSASGIGPVTALTLAVCIPELGHTSNAKIAALLGVAPFDQDSGQHHGLRRIIGGRADARHALYMATLVEATRTPGVIADFYARLVARGKPPKVALTACMRKLIVRLNGIPPAWAACSPDLSQGMLTA

SEQ ID NO: 343070 - protein, 331 aa, unidentified
MTSLPERTNETALTVGVDVAKATLEVAFSDASAPLAPTNDEAGHAALLAHLAALRDQGRTIALVVLEATGGLELDAATALQLAGWPVVIVNPRQSRDFARAMGFLAKTDRIDARLLAHMGHTLLQRDDLRKLVKPLPNEQQRLLQAMVTRRRQLLAMHIAEQQRASGPDKRMRRSLNIMLKALDRELARLDKDMLALIGEHHAELAARLGEVKGVGKATISTLLAEVPELGELNGREVSALVGLAPINRDSGEMRGKRMIFGGRPQVRRVLFMAALVATRWNPVIKAFYERLLAAGKPKKLAITACARKLLTILNAMARSGKPFNAALHLG

SEQ ID NO: 343071 - protein, 400 aa, unidentified
MTSVGIDIGKRQHVAAVCRDGERVAQKAVLRFGADRAGFLELAHWLGRQAPIERVVMESSGHYWMALAAALHRAAVPVAIVNPVSAKHFSKRRLQRSKSDPADARTLAALGMADQPATREPLTGAELREAARFAMRLVEEQSRLDNRIHRLIDLGFPELARAYDDPTCISALAVLRVAPTAAAVARKRPETLARAARPGGGRPIGARKAAELIALAKDTIAPPELERQVAFEMELLIAQHDLLERQIAEAEARVASLLDGELARRLQTIPGVGPATAATLIAEIGDIARFSQFDKLVAYVGVHPAEKSSGQSGGPETSWQMAKTGNAYLRAALYRMAVVGLQHNPVLRDHYARKRAEGKTKMNALGHCMKKALSLVWGIWRGEHDFTPDPPRHLTTGYGT

SEQ ID NO: 343072 - protein, 313 aa, unidentified
MPNLAYVGIDVAKARLDIAVRPTGEQWVSATDPASLDALVRRLQGLQPELIVLEATGGREGPAVAALAAAGLPVAVVNPRQVRDFARAVGQLAKTDALDAQVLAHFAQVIHPTPRPLPDVQAQELAALLARRRQLVQMLTAERQRLDTALPAVQAQIQRHLAWLEAELADLDRTLSERVQASPVWREREQLLRSVPGIGPTTALTLVAELPELGHLDRKAIAALVGVAPLSCESGTWRGRRIVWGGRARVRTALYMATLVASRFNPTIAAFYTRLCAGGKPKKVALTACMHKLLTILNAMLRQGSPWSVQIAP

SEQ ID NO: 343073 - protein, 386 aa, unidentified
MKRNDLSRSLVAFDQNSTLVAVVELSLKTWLVAGLVPGLSRRPLKKQPADPDALVARLGRWRDEAIEAGAEISRMVVAFEAGRDGFWLARFLRARGIEAYVIHPSSVAVAREHRRAKSDRIDTEMLMRAVLGWLRGEPKHCSMAAIPDLAEEDAKRPNREHQHLTEVRTGLVSRLKSALVRLGIRDFNVKLRKAAERLASLRTPEGEPLPANTLAELRRDFERLALVRAQIKTIEQTRLGRLAAAPRQGTHPMMLMLVKVLGIGVETADMLVHEAFTRSLRDRRAVARYGGLTGAPDESGSRRREKGLAKAGNARVRRGMLQLAWRWLMFQKGSALAQWYFARTADRRKDIRKTMIVALARKLLIALWRYATAGEPIAGVVLRPAQ

SEQ ID NO: 343074 - protein, 346 aa, unidentified
MTMLEARRVTGGVDTHLDVHVAAALDALGGLLGTESFEVNPAGYQSLLSWLESFGAVGKVGVEGTGSYGAGLARFLRQHGVSLIEVDRPNRALRRRSGKSDSLDAVEAARAALSGRAKSVPKSKDGAVEAIRVLLVAKRSARQARVKAVTQVRHLVITAPEELRRRMKGLSVSALVEEGAKLRPSRSTDPVVAATKAAISSLAHRIQALESELDELAEMINALLVATAPDLLAMFGVGPDTAAALLVCAGDNPERLRSEASFAHLCGAAPIPASSGKSIGRYRLDSGGDRQANSALWRIVMVRIAHDPETTAYFERKVKEGRSKRDVIRLLKRYVARELYRYLPRG

SEQ ID NO: 343075 - protein, 401 aa, unidentified
MRVGIDAHKMKCTTVMFDGDSVTGSFDFQTTRQGVYEFMKKVPEGSIAVIESSTTGKVLSRMLSGKYEVHMVAPPERKVSIKTDRRDAERIVMEDMLNYLRRCYIPSQYIENIRFVVTQQIQIGRRIARVKNQVHALLEMNMIQHELDDMADIFGVKGLNKLSKIQLPRHDMIALARYLEELKMYVSHHRQLDTEIARIAASDNDVQLLMTIPGINCFTAVAIKSRIGEVSRFATKKYLCSYAGVVPKANNSGEYISEHNHVKHGDIVLKYALTCAVRGAILANKNSSIKLFYRKISKKGVSPQKAQIAAARKMACTVWKVLSSKQPYTEQDDHMTKRKMKIMSSKAMRIIPTSVMPSKVSELVRNLADDIDILGKYHEDSGYIIGKDLSNKNRLKEDILR

SEQ ID NO: 343076 - protein, 339 aa, unidentified
MELYSGLDLHSTNTYIGILDTDFKRVFKKRISNNLDLILETLQPFRDQLKGLVVESTYNWYWLVDGLMDAGYDCVHLANPSAIKQYEGLKHSDDQHDAFFLAQLLILGILPQGYIYPKEDRPVRDLARKRMFLVKHKTAHFLSLQSLITRCRGQRISSNQLRTFTSDDLQQLLIEEHLVLSAQANLDSISFLKQQIHRLEKVIKSKLKLNQAFNGLLTVPGIGHILAMTIMLEVGDIGRFAKVGNFTSYCRCAPTKRLSNSKSKGSGNRKNGNRYLSWAFSEAAHMACRHNQRFRRYYDRKAAQTNTMVAARALSNKLARVCYHIMRDQVTFNEELILH

SEQ ID NO: 343077 - protein, 350 aa, unidentified
MTNATRWVGVDLHRRRSQIAILDEQGDLTFSRRIINDRDAFTELLGDPDSAHVALEATYGWEWLAELLQEAGYDVHLAHPLRTRAIAAARVKTDAVDAKTLAHLLRCGLLPEAYIAPPELRDLRELLRHRAVLTRMRTAVKNRVHALLARHGIREQHSDLFGNSGREFLAGLELPEGPRRRLESLLSLIADFDREITATTREIDARAKVDERVAVLCQIRGVGRYTAMLVIAEVGEVSRFPTARHLCAWAGLAPTVRSSDGKARLGHISHQGSPALRWALTEAAQKIPTGSGPLRAQFDRIAKRRGRNIAKVAVARQILTLCYYGLRDGEIRCLTHQPIDDDNDELAAVA

SEQ ID NO: 343078 - protein, 360 aa, unidentified
METKVKKNLFDGQPFYVGIDVHKKSWQVAIMGEQYEHKVMSQNPDPNLLAGYLRRNFPGGNYHAVYEAGFNGFESCRKLRQLGVDCVVIHPADVPTRQKEKLQKSDPSDSRKLARSLRSYEFEPIDIPDPSLEADRALVRQRFRQMRDVTRTKNRITSLLFQFSIKIPERFTSAQTRHWSKVYINWLKEVPMEYESLRQTLDNYIRIGESQRKELLLLNRQVRDLSQMDSYRDNYCILISIPGIGLLTAMTFLVQIGDIRRFKRLDDLCNYVGLVPMMHGSGEKMRTGKMIKRGRKELKIMLIEASWEAVRKDPALMARFNELSKRMNKNKAIIRIARKLLSRMRTVLLNGERYEFGITE

SEQ ID NO: 343079 - protein, 390 aa, unidentified
MHRAAEQPQAPTAVRTDLGAIFVSLELSRSTWLVTSLSPGGGEKMSKHQVRGGDIAALLARFAELKAKALARTGKSFPLVVIQEAGLDGFWIHRALVGEGIESHVVDPASIATSRRRRRAKTDRIDGEALVRALLAHKRGEPRVCAMVRVPTPEEEDRRRLCRELKSLIGERVRPVNRLKGLFFAQGIGDYEPRRSDRRERLDGLRTGDGRPLPEHLKALARRELDVIELLNAQIEEVKAGRDALLAAARATASPPAPVAMLLGLKGVGPGFAGALWSEGLFRHFDNRRQVAAYAGLAPTPWQSGRVDHEQGVSKAGNPRLRAVIVEMAWLWLRHQPDSALARWYRDRVRRDGGRMKKVAVVALARKLLVALWRYVTAGVAIEGAAMKSA

SEQ ID NO: 343080 - protein, 391 aa, unidentified
MPEDAPRPAQAAIRTELGAIFVSLELSRRAWLITSLSPGGGQKMSKHSVPAGDVSGLLCRFSELRRKAAVRTRRDFPIIVIQEAGLDGFWIHRMLQSEGIESHVVDAASILTSRRRRRAKTDRIDGETLVRTLMAYKRGEPRVCSMARAPTPQEEDRRRVCRERRTLVGERVRHVNRIKGLLAAQGVFGYEPLRRGRRDRLEDLRTGDGRPLPVHLKAQIVRELDRLEVVLAQLKTVAAERDALLKPASDEATSPAAMLVRLKGIGPETAAVLWSEGLFRRFDNRRQVAAYAGLAPTPWQSGSIDQEQGVSKAGNPRLRTTMVELAWLWLQNQPSSALSLWFHERVRRLGGRVRKTTIVALARKLLIALWRYATAGVVIEGAMMKTASAAI

SEQ ID NO: 343081 - protein, 417 aa, unidentified
MSEYAALVAIDWADQQHAVCLYDPSTGAREQTIVKHTPATLQEWALGLRQRFAGAPIAVCLEQSRGPLIYALLQYDFLVLYPINPATLAKYRQAFSTARGKDDPTDADYLLDLLEHHRNRLRPWHPDDEKTRTLRLLVEQRRRLTGDRTRVSNRLTALLKGYFPQVLDWFEDIRTRLVCDFLERWPQLSLLQQARPATIDKFLRSHHSTSKATNQRRLSEIKTAIPLTTDAAVMTASVINLKVLVAQMQTIITAIAEYDRHLEALCQTHDDYHLFAALPGAGPVHAARLTAALGSDRSRWQSADELVRFSGIAPVIERSGKQFRIRWRYFCPKFFRQTFHEFAAQSIQDSFWARAYYFSQRAKGKDHHAAVRALAFKWIRIIWKCWHTRTPYNEVIYLESLRKKGSSLLKFAADYQQ

SEQ ID NO: 343082 - protein, 319 aa, unidentified
METSSVGIDVSKANLDVCVLPSKERFCFSNNETGVKELKARLTRFKEAIVVLEATGGLESYAAAALGTAGFKVAIVNPRQVRDFARALGRLAKTDRIDAESLALFGDRVRPEPRPLPDASLRALEALITRRRQLIEMLGAERNRLAQIADRDVSKRIQRHVKWLQQELKAIDNDLDDTIHGTPLWRAKDDLLRSVPGVGQVTSYTLIAELPQLGSLSRKQAAALCGLAPFNADSGTFLGRRRIWGGRASVRSVLYMAALVASRRNPAIRDFYQRLLRAGKPKKLALLATARKLLVTLNAILRNQTPWTPPLKIDLQDGC

SEQ ID NO: 343083 - protein, 429 aa, unidentified
MNYTQNEKIMSITTRTLVIGIDIAKDTHVARSIDYRGVELGKALAFDNNAKGFKKFLDWANKIMINNYKENCIVGMEPTGHYWFNIADYINELSNKYKLVLVNPSHVKKSKELDDNCPTKHDKKDALTISKLVKDGRYVFPNIPEGTYAELRTIVKSREEIMRSMVRIRCKIHRWVDIYFPEYREAFKDLTCKTSLVTLKNMPFPQDIVKLENKDIVDIWRTKIKSGIGLKKACQLRQLALDSVGRKFGINSARIEILWLIEDYEKLEERSCSLESQISELLNQIPYADALTNIKGLGEVTVASILSETCDLTNYTHGKQLCKLAGLNLKENSSGKHKGQTTITKRGRSMLRAYLFRAIMPLVSKNPEFKILHNYYTKRPNNPLKKKQSLIAMCCKLLRIMYGIAINNSNYNAKEILKGLNLACITEAA

SEQ ID NO: 343084 - protein, 392 aa, unidentified
MEPVVGVDVAKGSSVIQAFQKRNEPVGKAIVIEHAASGFEQFTEMLGALQAETGVAPVVVLEATGHYHRALVSCLNRSGYTYYIVNPLQSKRAKGTQLRKVKTDAADAWHLAEMYYRGDVKPHRNWDETFTELQHLTRQHEFVTGIFVQAKLNSRALLEQVFPAYEQIFYNVFSTTSLTVLSHCLEGSVANWNEVIQGNSGRSHSKRWAHEKARKLEEVLDEWRGIRRSPAQSKALLGMVSLLLTMIQQLEELEKQMEELAENLPEVELVRSIPGIGTKLAAAIVAELGDVKQFSDAKQLVAFAGLDPGIFSSGKFTATSTRITKRGSKRLRRSLYLAVQCGMRKNANARIRSYYEKKRNEGKPYKVAVIACANKLLHHIFAILQKGQPYQV

SEQ ID NO: 343085 - protein, 376 aa, unidentified
MSFYCGIDLSARDSHVCVVNQHLSRLVDEKVPNKLPRIIALLEPYKADMQIVVESTFNWYWLVDGLRAAGFNVCLAHTLGLYMITGAKIKTDRRDAFSLAKLLLAGVIPRAYIYPAETRPVRDLLRQRLLLVRRRAELYGRLSRLALREGIIDARRHEIEELSEEELEKYFAHPLLRLSVSQELARIELYSEQIKELEQSILERAEKQPVFARLQGIYGIGPVLALTILYEVGEMPRFENVRHFSSYCRVVPGLAQSGNITKRGRGSKQGNHSLAPQRCCTAGDPALKWAFSQAAVHAVRCYPEVRRCFDQHLSRRRGRGRRMIAYGIIAHKLAQAAYYIMSETEEFRGQLLFGNLLHEGGGRTNPKRLSGTNPMS

SEQ ID NO: 343086 - protein, 344 aa, unidentified
METKRRYIGVDLHRNCFTACVRLENGREYLKQWQLEDLSKFATKLRPTDQIAVEVTGNTRLFHDAVSAHVERVVAVNPNQFKVITHSVKKTDPNDARNLALYLSKDLLPEVRMKDKTQAQIASLTQTRDTMVKLRTALKNKINNLCSAHGVNLNKESLASEKGLRAVLDMKFDVLVNLELKIIVDQIRSLNKSIAELEETISKEGTKLKGHRNLTSIKGIGGLSGSILLSIIGDINDFAEEGNLAAYFGIVPRVSNSNETEHRGSITKRGSKLGRTTLIQCALIAQRYSPYLKKYYERIKNRRGTGKAIVALARKFLGIIYRTLKNNWVFADFPNFVLAEPAKA

SEQ ID NO: 343087 - protein, 315 aa, unidentified
MEAPSVYVGIDVSKDQLDVAVGAEGRRWRVAFNEAGLTALGEELGALQPTLVVLEATGGLQVPVLAQLTALKIPAVAVNPRQVREFGRSLGKLAKTDAIDAHLLAEFAARVQPAVRPLPDEGTRTLEALLARRRQLIEMLTAEKNRVGQAVPRVRPELREHIAWLQGRLKALDKDLEDFLRQSPLWREQEDLLRSVPGVGPVVAVTLLAELPELGSLSHKQIAALAGVAPFNRDSGRYRGKRTVWGGRAPVRAALYMAALVASQHNPVIRAFYQRLVAAGKPKKLALVACMRKLLTILNAMLKHRTTWRTGEVAA

SEQ ID NO: 343088 - protein, 344 aa, unidentified
MHITSIGIDLGKTTFHLVALGERNKVLVRKKFSRAQLLAYTANLPASLIGLEACAGAHFLGSGLRAQGHQVRLIPAQFVKPYRKSNKNDFIDAEAIAEAVTKQNMRFVQIKTQEQLDWQAMHRVRDRLMQRRTALINEIRGFLLERGLTFAARPIHLRKNLPTVIEDAEQNLSPRLRWLLDRLWQEWKQTEIDIKAITDEIERISNDDARCRRLRQIPGFGPLVSTATVAAIGNGAAFRRGRDFAAWVGVVPRQYSTGGKHKLFGISKRGNIYLRRMLIHGARAVLLRVKYDTGGFGQWVHRLAQRAPRNKVVVAIANKLARIAWAVLSSGQEYRHQPLQPAAA

SEQ ID NO: 343089 - protein, 346 aa, unidentified
MAITMIGLDTAKSIFQIHGTDSAGKAQLKRKLRRPELIPFFEKQPVCTVIIEACGAGHHWARLLGGLGHEVKLVPPEATRPFVKKGKKNDAADAAALCAAASRPDVKFVPVKTREQQGVLALHAARSLLIKQQTMVTNAVRGLATEFGFTVPKGIGKLEGLVAAVEVDDALPAEARQAIGELHRHCNTIAARIAKFEAQIVGHAREDAMGRLLATIPGIGPITASLIAATIGANIANFKSARHFAAWLGLVPKQYSTGGKTRLGRITKAGNAEIRKLLVLGATSMVYRAEQWNSSAGKWIVGVLHRRPVRLATVALANKMARIAWAVITRKEAYHPKGGAAAKAVA

SEQ ID NO: 343090 - protein, 408 aa, unidentified
METLYERCCGLDLHKRTVVACLVTPGPNGQAHKEIRTFGTVTGELLALGDWLAAAGCTHVAMEGTGVYWKPVYNLLEDRFVLVLANAQHIKAVPGRKTDVRDCEWIADLLRHGLLRASFVPDRAQRELRELTRYRTSLVQERADEVNRLQKTLEGANIKLASVATNVLGASGRAILTALVAGETDTLVLAGLARGSLVQKTAALRQALTGRMGTHQRFLLGEQLRHIEAVEASIARVSAEIEERLRPFEEALERLDTIPGVGRRIAEIVTAEIGLDMTRFPTAQHLASWAGMCPGNNESAGKRRSGKTRRGSPWLRTALVEASHGAQRSKGTYLGAQYRRVAAHRGGKRAAVAVGHSILVSAYHILARRQDYADLGETHWQTQKTARREHRTVERLRGLGYTIVEPAA

SEQ ID NO: 343091 - protein, 409 aa, unidentified
MTPPLPTPPMLSTVYGGADTHADTIHVAVIDALGRELGDREFPTTPAGYQAAVEFVTGHGQVVAVGIEGTSSYGAGLSRAVQAAGMAVVEVNRPDRAHRRRRGKSDPIDAYQAAHAAASGRAHAAVKDEDIEAIRAVTNARNSAVKATTAAMNQIHQMLITAPVEVRERYRDLKQKALVKALAASRPTAPNSLLSPTARTVLGALRRLAVRHQFLTTQAGELETELRDLLEALNPGLLAAYGLGPATAAQLLITAGGNPDRLRNEASFAALCGVAPVPASSGKTTRHRLSRGGDRAANYALHTIALVRLASDPRTREWATRQRAAGRTGLELLRILKRAIAREMYRHLTRPTAVPQIADLRPLRQSKNLTLTAAANHFGLWPAAISNLERGVRRNDDLAQTYREWLLTA

SEQ ID NO: 343092 - protein, 356 aa, unidentified
MIAMKYYTSTTEFNCGIDLHARQMYICVMDRSGKKLVHTNIRNNDFAYFLKLVAPYRHDLTVCAECMFGWYWLADACQAANIHFVLAHALYLKAIHGGKNKNDRVDSEKITHLLRTNLIPPGYVYPAAKRPLRALLRQRLLYVWNRSELLSRIQSHQLAHNRPTTRQTLYNREPWEKHLLASEPDPVRQLALQNDLALIGHYDAQLASLEKELLQLTKQTASRDFTLLKTTPGIGDYLGLTILHEIGDIARFPSVKDFLSYCRLVKGTVASAGKIKGLRGAKLGNPYLRWAFGEAAIIAKRDALLGPLAQRLETRLNNKFKANTVLAIKLARAVYFMLKTKTVFDPERLVAALSNN

SEQ ID NO: 343093 - protein, 369 aa, unidentified
MEKYSEVFVAFDVAKKKHAVAIAEGGRSGEVRFLGDVENNPLPIERTIKRLADRYDRLHVCFEAGPTGYGLHRQIQALGHDCTVVAPALIPKRAGERVKTNRRDAVTLARLHRAGELTGVWTPDVAHEAVRDLVRAREAAGDDLRRKRQQALSFLLRHSRIYSGGGHWTLAHRRWLAGQKFEHAAQQIVFQEGIDAIEDAIQRLRRIEKQLAVIVPDWSMAPVVAAYQAMRGASFLVAVTFAAEIGDVRRFDTPRQLMSFLGLVPAESSTGDTVRRKGLTLAGNRRARRALVEAAWTYRYPARVSETLRARLEGVPKPVRDIAWKAQVRLCARYRRLGATGKKAPVVVAAIAREMAAFLWAIGREVAPA

SEQ ID NO: 343094 - protein, 352 aa, unidentified
MLIIGCDFHPGFQQVAIFDNLTGELEEKRLPHRAEAEQFYRSLAGQAVRVGMEACGHYPWFERLLEELGVELWFGDAAKIRASVVRRQKTDRRDAEHLLNLLREDRFPRIWVPSLEVRDVRQLLVHRHKQVQARTRTKNQLQAMALSCGVQKQRKLWTKAGRAELEQLPLLPYAAQRRQRLLEALDALEVEISELDRRVAEEAGQRPEAVRLMTHPGVGSVTALAMVLTLGPAERFGSAKQVGSYFGLIPSEDSSGGKQRLGRISKQGSSFLRFLLVEAGQTAARYDPQLKRFYRRLAARKNRSVAKVAVARKLATRLYLMLREDWTYAQLSQAVMQVSPSHSVAGEQEPSV

SEQ ID NO: 343095 - protein, 423 aa, unidentified
MKSSGTQTFRAYVGIDWADTKHDFCLQERGSDRREFGCIAHQVECIDEWAKSLQQRFGTPVAIALELAKGPIVYALQKYDFLVLFPINPLTLAKYREAFKPSRAKDDPSDAELALDLLMRHPERFAALRPQSVGMRTLISLTERRRELVNDKIRLTNRLTHTLKEYYPQALDWFDQHDTVLFCDFLTRWPTPLQARRAHQASLKAFFHAHNAHRPQIIAARLKAIKAAVPLTQDPGVVVPCRLHVLVLIEQLRLALQAIEQFDRHIAELAPTLPDYRLFAGLPGAGPHLAPRLLVAFGEDRERFQRAEELQKYAGIAPVTERSGKKTWVHWRWQCPTFLRQTFIEWAGQTINKSFWAGAYYYQQRARGSTYQAAVRALAFKWIRILYSCWKTRTPYDESKYLNALKRRQSPLLNNLVPIPQNA

SEQ ID NO: 343096 - protein, 345 aa, unidentified
MKYFAGLDVSLDETTVCVVDEEGRIVREARVASEPAALVAFLRGLGLALERVGLEACSLSAWLHEGLTAAGLPAVCLETRHAKAAMGAMPNKTDRNDARGLAQIVRTGWFRAVHVKSPTCRSWRALLAARRLVLNKMRDVENGLRALLREAGLKVGTPGRKEFAARVRELVGADAVLAASAEPLLAIVAAMTHGLAQLTKQILAVVRDEPVCRRLMGVPGVGPLTALTFRATIDRPERFRRSRDVGAHLGLTPKRYQSGETDVQGGISRCGDELARTALYEAAHSLLVRSRKWSTLRAWGMQVAKRRGMARARIAVARKLAAILHRMWADGTEFRWGEADAAVAT

SEQ ID NO: 343097 - protein, 343 aa, unidentified
MTFVGCDLHTRQQQVAVLDTTTGEIREQQLLHEGTTVEDFYAALPRPVTVGIESTGYAIWFHALLQRLGHTVLVGDAAKIRAMVVRKTKTDRRDALHILDLLRHDRFPAIWIPDPATRELRALLMHRLRLVRIQTMLKNGVHALALNQGLARGSKLLRRAGLAQLQALPLPPYTAQRRDQSLDLLATLRTHLDHLDDAIAAVALTHPDAPRLLTHPGVGPVTALATVVVLGTVSRFPDSKHVVSYVGLAPALSASADKYRLGKITKQGSALLRFVLGQAAAHASRLDPELTRTYRTLAQRRGRAKAKVAVARKLLVRLFIMLRDHIDYDEFRRRGRAPVVAPG

SEQ ID NO: 343098 - protein, 429 aa, unidentified
MEEVDDAELVVERVAALDLGKAGLEACVRVPHTHRPGRRMQELRGYGTTTAQLLEMVAWLRQWHVQRVVMESTSTYWKGVYYLLEAEGFDCWLVNAREVKNVPGRAKTDRADALWLAKVAERGMCRPSLVHPREIRRLRDLTRYRRALVQDRTREQQRVEKLLEDAQIKISAVLSNLHGVSGRAMLEAPIAGERDPRTLAQLAKGQARKKIKALEEALCGFFTDHHATILQMMLDNIDRISAQIAALDTRIEEAIGPFSSQAARLAEIPGVDAVAAAELIAEIGVDMTRFPSAAHLVSWAKFCPQTHQSAGKSKAQARGKGNPWLAGTLGRIAFANSRSDTFLGTRYRRLARRRGAQKAIVATGNSVLTVVYHLLSDPDASFIDLGPGYYESRINKHRRARDLATQLQALTGQHIAIRDGKAITTDKAA

SEQ ID NO: 343099 - protein, 344 aa, unidentified
MQTMYYIGLDVHKRTISYCVKDASGRVYAGGSLPATRFDLDRWMKTLPQPWTAAMEATVFTGWIYDHLQPHAAALKVAHPLMLRAIAAAKKKNDRIDASKICDCLRCDFLPECYMASTAIRERRRTLRYRNLLVRQMVQMKNKISGLLMEAGVSYNKQRLHRAGYFRELLATNSGIDEGLCSLLRLCRETVVRLQKTESAMVLSLERDSLLMDRVERLMTIPAVGPITALTWALEVGDAQRFSSIKKAISYCGLCGAEKSSANTVQRTPLSKQRNKHLQATLIEAAKMAPRYSPNLAMLYDKEKQKGNANRATLAVARKLVAYLMAIDRGHRNFQVVETNCIAA

SEQ ID NO: 343100 - protein, 360 aa, unidentified
MKKRLSKKANWFKENSFTDEDELYVGVDVHKEQYHVAIWHNGHIGCVYSMLSDNTKLLWDLQKIRSSLKNVVYEAGPTGYSLVRLLRSAGLPAEVVAASKTPRMTDSGAKTDRLDCQQLAEYAAKGLLTFVWVPTKQQEADRQVVRWRDQLMSKRKRVMQQIKSFLLQHGIAWPGGGWSKTALKQLRQLDIGTELRFTLDQYLDEYEFLSKKMAVTKAKLCQVFSSERHSAAIAVFKSHPGVGDITAWEFRAEMFNITRFSQPKQVSKYIGFCPRISQSGNTCRHGPITKTGRRELRAILIQAAWAWHRKDPYARQIYNRLLRNTGNGKKAIVGLAKRIAIHLWRMLCDGCLYDIKVAKV

SEQ ID NO: 343101 - protein, 347 aa, unidentified
MSISLIGIDTAKSTFQLHGIDATGKVQLKRKLRRDELIPFFEQQPRCTVVMEACGAAHHWARVLSGLGFEVKLIASEAVRPFVKRGKKNDPADAAAICAAASRPEAKFVAVKSLEQQGVLALHSARSLLVKQQTMLANAMRGLATEFGLVVPKGMDKLKELMTLVEEDKSFPEQARKAFAELREHCHVTTERIEKLERQIVAHARHDDTARRLATVPGIGPITASLIAATVGDTIGNFPSARHFAAWLGLVPRQHTTGGKIRLGRITKTGNRQIRTLLVLGATSMVYRAEQWNSAAGAWVRGLLERRPVRHVTVALANKMARIAWAVMARNEVYRARGGVTPAAATA

SEQ ID NO: 343102 - protein, 403 aa, unidentified
MNSVGIDISKGRSTIAVMRPFGEVVISPFEVRHTDSGLSELARQLKSLNGETRVVMEATGNYHAPVAKLLHDAGLYVSVINAKLVHGYGNNDLRRVKTDRKDAVKLANYGLDRWLTLPRYVPEEDTRLLLKNCYRQYRQYSKVQTVLKNNLISLLDMVFPNVNRLFSSPIRGDGSEKWVDFVAEFWHCRCVSEKSQKAFTNKYQRWCRKHGYNFSEAKAHTIHAEACGHIDVIPKSETTKLLVEQAVAQLRATSAALAALKHEMQALASMLPEYPVVMDMFGVGPTLGPQLMAEIGDVRRFYSKKALVAYAGLDAPPNDSGDVTGRHKSMSKIGASSLRRTLFLVMSVYLQTAPLDEPVYQFMDRKRAEGKPYRVYMMASANKFLRIYYATVKAYLESLEHTA

SEQ ID NO: 343103 - protein, 384 aa, unidentified
MDTVSVVGMDLHRDFSKVAMMSEDGKVLETRNIRHDSRKEMAEFFDGLEDGTDVVMEAGFNWPWVADLAEAAGMKPHLGHAIRCRELAKGMAKNDRKDAIFLGKLWLAGGDVFPEAYLAPQEVRVMRAKFRTRSLLVKIRSQMRNSIHGILHKYGVKCDEATDLYGKKGRKILEGLELPAVAKDEMERKLAFLDDLGRHIESIERQLRAELPLDKRAVLLQTMPGIGQIIAYGMLAEIGEIGRFPDKRALASYAGVLPLDNESAGDDHGKHTNRRCNKALRWMALEAVRGAVRHSRRMRSLFERVKAKHPSTPGMAVVAVARELLEVAHLMLTRGVPYMENPPPRPGSVQTVASCHPELLGTRGSRRASQMGRCAASERIQADH

SEQ ID NO: 343104 - protein, 458 aa, unidentified
MAQSKKRKMKGKGTAEPPVLNPHAAGVDIGATEIFVAVAADRDSEPVRSFATFTEDLNRLADWLEFCRIKTVAMESTGVFWIPLFQILEARGLEVCLVNARYYQNVPGRRTDVSDCQWLQYLHSVGLLRRSFRPADQVCVLRSLVRHRESLIQSASTHVLRMQKALDQMNLQIHHVISDITGLTGLRIIDAILEGQRDPVKLAKLRDGRIKASEETIIKSLVGDYRREHLFTLRQSLAAWRYYQTLMQDCDREIEQQLKLFDDAVDLQLHPLPPLKVKRKKLFGNEPKFDLRTHLYRIFGVDLTVVPGMNVLTAYTLLAEVGPDLSRFPSAGAFASWLGLCPDNEISGGKKLSAKTRHVVNRATCAFRMAANALYKSHSWLGDFFRRLRAKLGAPKAITAAAHKLARITFHLLRTRQPYNESIFATLEQQTRIRMEGRLKAQAHALGFQLVPLAPKPA

SEQ ID NO: 343105 - protein, 417 aa, unidentified
MVETFEWFLGIDWASEVHALCLTDARGRVRGTRSVAHTAVAVDEAVRWLGEQTGTGPEAIAVAIETPRGVLVDTLIERGFPVFAVNPKQLDRFRDRFSPAGAKDDAEDAHVLADALRTDRRAFRQVRPDHPLIIQLRDVTRLREDLLEEESRLTNRLRDQLYRVDAAWLTLSPAADEPWLWTMLAQAADPAAWAHLARRRIAAVLRAHRIRRLSADDVLHALRQPRLTVAPGVTDAVATRITTVVQQLQLVHDQRNTAEHHLDRLLARLASMERPEGEASEHRDVEILQSLPGVGRIVAATMLTDATGPLADRDYATLRAHAGAAPVTKRSGKRAVVHMRYACKGALRQALYHWARTSIQLDAAARAYYKALRARGHRHGRALRSVGDRWLRILIAMLKTRTLYDATRFAQAEALPA

SEQ ID NO: 343106 - protein, 382 aa, unidentified
MQGSTVGTPTTGHFGTIFVAIELSQKTWLVTLHSPERDRISRHKLEGGDHAELLALIERTRARVVEKLGSVPRVVSCYEAGYDGFWLHRLLEAAGITNFVFDAASIAVEQRARRTKTDRIDGELLLRTLMAYLRGEPRVVRIVRVPSVEAEDARRASRERDRLVTEQTAHTNRIKALLRLLGMAVGNPRRRDWLAWLARQRDWQGQPLPAHLLAEAQREHARLMLVRDQLAALEEAQAAQTLPVPAPIAQRRDLLLRLKALGPAFTATLVNELFYKDFRNRHEVASYCGLTPSPWKSGGIDREQGISKAGNRRARHKAIELAWLWLRHQGDSALSRWFRTRTANAGKRAKRVAIVALARKLVVALWRYLTTGLVPEQATMKA

SEQ ID NO: 343107 - protein, 478 aa, unidentified
MNRLIERCAMLDIHKSQITACVRVPDDAGGRRQEICEFATTTAGLITLADWLRGWSVTVVGMESTGVYWRAVFYLLEDEFECQLFNAKHLRHVPGRKSDVQDAEWGCQLLEHGLVRPSFVPPRPLRELRDLVRYRKAKIQERTREVQRVEKTLQDAGIKLSSVASEVLGVSARKMLDALIAGTHDPELLAELAKGALRKKIPALRQALQGRFTGHHALLVGQMLAQIDFLDETIATLSERIEELTRPFSRELELLDTIPGVDERAAEMLLAEIGPDMSRFPTEHHLASWAGMCPGQRESGGKKHSAATRKGSKWLRGTLTECAKGIVRTKGTYLSARYHRIKSRRGHAKATIATAHKILTAAYHVLNQAVPYHELGEQFFYRRDRACDSVAGIERFMDALVFLQEQRDAHGGCPIGSLASQLAERDEGARLALGDGFKRWEAEIRSGLEAMAAHAPSCASAAIQGCSPPRRLPRWRAA

SEQ ID NO: 343108 - protein, 316 aa, unidentified
MPLQHFGIDIDKAALTVACHEVPGRTERVSNDAASIDAWLRRLPAHSVLAVEATGACHQALLQGAVRHDLPIYLLNPRDVRHYAESLRRRTKTDRVDAQVIARYVAHEKGNLRRYLPAPASAARLEQLLRRRALLAQTQAQLRLGCSDLALPAMDHLHASFKATLAALDEQLDALVAQDEQRARQREQLRSIPGVGPLNSLALVSLFWRLPSITADGLIAFVGFDPRPRESGNYRGQRRISKRGDAETRRLGYLAAQAFARHPVGRPLYDRYRQRGLSATATYVILARKILRLAHALISQGTTFDPQRFAAACAGT

SEQ ID NO: 343109 - protein, 368 aa, unidentified
MKMNAIKAAPAASAIALKNEKSAKAKRILIGTDVHLRGYQAARKVDNGVIGVVENFRSEEALLLHVEKQCERAEQVVVVYEAGPLGYTLYRKLTARGVLCYVCAPDSSEQKRKRRKNNKIDARNLTSKLFNYLNGDEGALQLARVPTEVQEQLRLASREHDQMVEERKRLGAKGNALLLTQGFGSWSNWWRPKAWAQLSSLVPEWLLERLKIWVDVLKMLDEKICLAKVALARTCSGPRPKGVGALSQIQLQSEVLDWSLYTNRRKIACLAGMVPSEWSTGDTERRGSITKVGVPAIRRIIVEMVWRIVLFQPQYKPVQKWQKVLQGTNPALKKKAVVAIGRQLIVDLWRLQTGRVTAQELNLLMVGA

SEQ ID NO: 343110 - protein, 357 aa, unidentified
MQSSYVKYIGLDVHKEAISIAVLDGAGKLVMESVIETKASTLLQFLNGLRGELHVTLEEGTWAAWLYDVLKPHEWDIVVCNPRRNALLKEGSKSDKVDARKLAELLRSGMLRAVYHGENGLRTLRELARSFQVISKDLRRVMNRLKALYRSWGIPCTGTQVYSQRHREQWLKKIREAGVRRRAELFYQQLDGLQVLRRTVRGELLAESRKHQAVKVLRQIPFIGPLRAAQLVALMQTPHRFRSKRQLWTYSGLAVETHDSAQYRYVDGQLQRSKKPQQVRGLNQNHNHAMKEIFKSAALTATLRAGPFQDFYTGLLAKGMKPELARLTLARKIAAITLTLWKKGERFDAEYVKSQAA

SEQ ID NO: 343111 - protein, 400 aa, unidentified
MRTVFGIDVSKASSEVAILVNGERVHGYTMPNDIIGFSRLLEDLKTVSNPEIIFEATGVYSRRLQAFLEENSYDYTRLNPLEAKKQLDGLRVRKTDKIDAEKLASSQFVLNRKPTYVQEEVYQNLHDLSRFYQNLTEDIVRTKNRLHKVLQVAFPEIENLLSTPTGEQYWNLVSIFPTKHWVLELSEVELKETIRNSTSKRISENRVGNLAEKLVGLAKQSYSAISKTSPMIEEVKYNAQELIRLTNRREQVLQQLIALAEPLPEYKILLSIPGIAETTATSIIGELGDIRRFKSANQINAFIGIDLKHYESGDFLGQEHITKRGNPYARKILYKCIHNIASASHTNPCHIADFYEKRKRQSQITSTKPHTIASIHRLIRTMYYLIMHNKLYDYSLAQSH

SEQ ID NO: 343112 - protein, 357 aa, unidentified
MAKGITAKTKITIGLDVSDRFTEAYAIDADGEWIESWRMPTKAEALRKGLSRYPEARVVLEVGSHSPWISRQLKQDGFEGIVANPRRVRLIAESDSKSDRFDAEQLARLGRIDPGLLSPIVHRGERAQRDRVLLLARDGLVRARTQLINQVRGFAKSLGSRLPSSSSAAFAKRVRDRVGEDLFPGLDSMLRMIEQLTQEIRSMDRQIERLGEERYPETEQLRQIPGVGPLTALAFVLTLEDPHRFAKSRDVGAYLGLRPRQRDSGTRRPQLRITKAGDDMLRRLLVTSGHYILGPFGPDTDLRRFGLRLAERGGKAGKKRAVVAVARKLSVLLHRLWITGEVYQAIGYGLTKDEQAA

SEQ ID NO: 343113 - protein, 319 aa, unidentified
MNTTTAAHIDRSERNVGIDIGKSTLDICIFELDVYLQYPNTTEGIRELIKKLSRYNLTRILVEATGGYERGLVEACAEKELPVIIVQPTQVRQFGKAQGVFVKTDKIDSRLIAQFGAILKPEPRPLNSKKVRYIRDLLSRKRQLNEMRTQELNRQHKAPAILAATHKRLLKVLDKEIESINKLLAKAIGEVTEWQRTYEILSSVPGVGDGVTFTLLGELPELGQLSPRKIAALCGLAPFNRDSGMMKGRRRIKGGRAPIRTVLYMAMLSAIQCNPVMKKFYKKLVEQGKHKKVALTACMRKMMTILNAMVRDNCEWQAN

SEQ ID NO: 343114 - protein, 312 aa, unidentified
MSRTICGVDVSKDWLDAHVEPGATAERFGNDAAGIAGLAGFCRDHGAELAVMEASGGYERLAFLLLWQAGQPCGIVNARNVRCFAEGIGFLEKTDRIDAAVIARFAEAKQIMPTPPPSPAQARLKALMVRLSQLGADLTVNKQRRSAAADAETVASLEEVIALLTRQSRRIEGEIASLIDDDPLWARLDRTFRSIKGVASRTVARLLAQLPEIGILSNKAIAKLAGLAPMANDSGRRSGRRHLRGGRAGPRGVLFLIARLAAKYDPHLAALHQRLQAAGKEKMVIRIALARKLLVILNAKARDARTEFANAT

SEQ ID NO: 343115 - protein, 340 aa, unidentified
MNVTTMGIDLAKSVFQFHGVDEKGGIVLRKKLRRSAVLDFLRDVSPCLIGLEACATAHFWAREISGLGHDVRLIPPAYVKPYVKRQKNDAADAEAICEAVTRPNMRFVPIKSAERQGVLMLHRTRDLLMRQRTMMLNAVRGHLAEFGIVTAQGPHKILLLIREIRKGEVPGLPQIAQAALESLATQLDNLAGEIRTLERQLMAWHRADEISQRLETIPGVGIITATALSASVPDPAVFKTGRQFAAFLGLVPRQNSSGGKDRLGRISKMGDGYLRRLLVVGATSVVRRAGSNTSATGVWVRSLLERKPSRVVTVAIANKTARVAWAILARGGTYRAPRPA

SEQ ID NO: 343116 - protein, 416 aa, unidentified
MKIVRPICCGMDVHKNIIVATIGITNKKTRITEYIQETFSTLNPDLLNLKQWLINHKCFDACMESTGKYWIPIFNILEDEINIYLAHPKYVKAIKGKKTDKKDSKWICDLFKHDLIKFSFIPPKEIRALREISRYRYKLVGMRSSERNRYQNCMTVSNIGIGSVFSDPFGKSAQAIMKEVLESDIIEDEKILKCIHGSCKNKDKILDSIKHCNIETDQRFKMNESMTHMEELQVHINNCEIEMMKRAAPMFDQFMHITQLPGISTLSAILIISEIGVDMKQFESDKQLTCWAGLAPANNESANKKKSVRISKAGQYLKPLLVQCALGAIKDKEGYFGIKYSRIKKRRGHKKAIIAIARMMLVSIYHMILTGETFNPSDYESFRNPKPPIKQQDLTEESAIEFLKKSGFDVSKLTKP

SEQ ID NO: 343117 - protein, 414 aa, unidentified
MEVIHGRCAGMDVSKRDAKVCVRIAGRGRRKTVETVRTWASTTNAILALREHLINEQVSLVVMEATGDYWKPFYYLLEDTGFELMLVNARQVKNLPGRKSDVSDAAWLAQLGAHGLVRGSLVPPAPIRELRDLTRARTIMTRERGRDIQRLEKLLEDAGIKLSSVASDITGVSGRLMLQALIDGQRDQAVLADLAKRRLRHKIPELTEALTGRFVDHHAFLARMYLEAIDQRSRAITDLTTRIEVVIEPFRSFCNLIGTIPGIGVRCAEVIVAETGADLSIFPTAAHLASWAGTCPGSNESAGRIKSTATRPGNPYLKAALGAAALSIANTHGTYLAAKYRRIAARRGPKKALVAVEHATLIAIWNMAHTGAEYDDPGADYFTRRDPVRARQRALDQLQHLGYRVTLKPVAASA

SEQ ID NO: 343118 - protein, 376 aa, unidentified
MGTPSAQTLDDVGVREIFQELEEVPLMTMVGGLDVHRAQITFDYVDDDGLVHWGQIRPATRKTLRGWLAEHCPDGDAEFALEGCTGWRYVSEELAGAGVGVHLGDPAEIAVLRGPKKRAKTDRADARLLRTLLLQGRFPELWIAPAHVLEIRTLGRLYCTLMDERRAWQQRIHAQLFHQGCPPVRALLSVTGRAALAGAELSAVGGQYVDTALGRIDELSTEIEPLRAQLVNFARHQTGCQALPRHYGIGWLCAAIIWAEIGDARRFSSSDQLVRFAGLDVTVYSSDGKRSPGHLSRQGSPELRWAAFEAAKCAARRGSPDYGYYRKLAAKRDGHNGKNPTLAVERKILRRCHHTLRELGDAAVALPVAEPQEVAA

SEQ ID NO: 343119 - protein, 325 aa, unidentified
MEGAPMLDTTTFVGLDVHARSIKAVSLDVMTGEVRCATFGYDAGAVAGWVRSVDPRARCVYESGVTGFDLQKRLSGLGVDCVVGAVSKMIKPSADRRRKNDRNDAEFLARMLSVGNVVEVWVPDDECEAARDLTRALEDARDDLSRAKQRLSKFLLRHGLVFDERTPTGRRKGNWTRAHWSWIESIGFAEGADNDVLAYYVDAVRRAAEDKARLEGLVEAEARKPRWRKRVDSLRCLKGVDTATAADLVFEAGEFSRFGNARSFASWVGLTPSEHSSGESDRRGAITKAGNKHLRKALVEAAWHYLTCSARPKDLARGQDPDRPQ

SEQ ID NO: 343120 - protein, 376 aa, unidentified
MNEYSNVACSGMDVHYKFSKVTFRDGQGEIVRRERLDHPDRQKLRERLSQWPKGLPVVLEASFGWGWLSDLMEEVGLEPHLSNCYKVEKMRQARGGVKTNDKDSDMTSLLPFEAENWWEVWRAPKAVRDRREQMRYRADLVALQTMAKNRIHALFHRHGIFHEFSDLFGGPGRKFLTELCQNGSGYLSGEALNALRGQVRLLDHLRGQLTDVARSLRGQLEKTPLIRLLKSVDGFALILSNVLAAEVGEISRFSNHHALASYSLLAPRSNDTGEPDRDQAPKGRHLGHRGNRTLKWTFIEAAHGAVRSGGKWRAIFDRVTGNGKKDRNRGYIKVARELVKIMYVVWKKQVPYTDTPPVRPGQKPQSKLTRSGTGQP

SEQ ID NO: 343121 - protein, 398 aa, unidentified
MICVGIDIAKGKSTVCFLKPGGEVLRTPYDMEHTAEGITKLIRDIRSYDEEVRVVLEATGHYHLPVVAQLLEANVFVCVVNALRMKKYCSQDIRKAKTDKIDAAKIAAFGLTYWQDLKAAKPTDEVYRELRLLSRQYFQLTSMLVKAKISLNNLLDNVMPGITDLLYDREQNHKLTDFVLRYLHFDKISAMGERKFTTDYCNRAKKQGYRMYERQAEEIFALVQNSIPALPMTASTTIVVKEAIKVVRELENSRASILAQMQTFAKSLPEYSLIREMACVGDTLTPLVIAEIGDVRNFHSKHALIAYAGIDAPPYQSGGFYGTERHISKRGNGYLRHVGFEIMQCKLRLKPEGDAVYEFIQKKRSEGKCGKEAMVAGINKFLRIYYGKVTELYRELEA

SEQ ID NO: 343122 - protein, 357 aa, unidentified
METAYDGRQVAGMDLHRRRSVLVRMTEDGRRLGTARITNSPQELRREIARAGKSPKVVLEATFGWYWAADTLAAAGAEVHLAHPLGVKAFTYRRVKNDERDAADLADLLRMARLPEAWIAPAEVRELRELTRYRHKLVHLRTSCKDQVHGVLAKLGVPVTCSDIFGTAGSAWLDGLGLPQPYAGKVTSLRHLTGELTAEVTMLSAVIADLLAHHRGYQVIQQLPGIGPVLAAVIIAEIGDVTRFKNPAQLCSWAGLTPRHRESDTKVARGHITKQGSRMLRWALIEAIQRAGADTVTGAVKDGIIARRGKEAKNIAKVAAARRLLTLVFYGLRDGQIRCLSQTSEDLPPVTPAQRAA

SEQ ID NO: 343123 - protein, 370 aa, unidentified
MARRERGRSQKSGSGSPKTVGQLGSSRSSGHQPEQLRGPRARIRQGRETRRCAMSGTCFVGMDISQDTVDVAVRPGTAFQVTNDERGITEVVARLRALQPTLIVLEATGGLEVPLAGALAVVGLPVVVINPRQVRDFARATGQLAKTDRLDAQILARFAEAIRPPIRPVPDEQTQALAALVARRRQLIEMLIAEKNRLRLATRPLQQRVQAHITWLEHDLDHINTDLTATMRQSPVWREKEDVLRSVPGVGPVLATTLVANLPELGTLTRKEVAALAGVAPFPRDSGTLKGRRAIWGGRAHVRAALYMAALVATRKNPVIRTFYQRLCQAGKAKKLALTACMRKLFTILNAMVKSATPWRHGMEPVCAQA

SEQ ID NO: 343124 - protein, 365 aa, unidentified
MTVKATCLVGLDVHARQTHATVLDRASGELSARRLRGTPEEAVLPFLERLRTTDLLAVYEAGPTGFGLAREAGRRGLDVRVVAPGSIPRAPGDRVKTDPRDSLRLVRLLAAGELSFAFVPTVEDEHFRDLVRTIEDVRGDLMRARHRLGKFLLRRGQRYPGPGRAWTARHLGWLRALRFEDACSQATFADYLASVELLLGRRATLHTTLENAIPDSSHAPVVGRIRCFRGIDTLSAAGVCAEVGDFRRFPRPTLLSGFLGIVPSERTSDTRRRQGSITKAGPVHARRLLVEAAHHYRHRPIVGEVLARRQADQDPRVIAIAWRAQRRLHQRWQHLHHDRRKPSGIVAIACARELASFLWEAAVLD

SEQ ID NO: 343125 - protein, 364 aa, unidentified
MKSVHYVGMDVDKEKIVLARLGAGKAKEVQEHAIANTPSAVKKYFSALLAGAEVHATYEAGCFGFGLYRQLSAMGVEVMVAAPGLIPRRPSDRIKTDRRDANTLALALRAGQLTGIHVPTVQDESVRDYLRMYEDLRGDLRICKQRVLHFLLRRGIRYEQGGPWTVKHRNWLSSIEFADARDRKTLDMYLSALQEREAMCSEAAAEVEQIAAQERYREQAKKLTAFKGVKTLTALSFVADIGDFHRFASAGQFMAYLGLVPSEHSSGNKRRQGGITKAGNSHLRRLLVEAAWHYRSYHPSSRTLIERRRGVDPQILSYANRAGRRLSRKYMHLVLRSKRSQVAVTAVSRELAGFLWGAMTGQVA

SEQ ID NO: 343126 - protein, 469 aa, unidentified
MIYSVGIDLHQGSHRARCLDERAQICDGFTFQTTPEGLAKLEERIFRDGANPIIVLEPAGLPWLMVAVYLRSQRPDCRLVKAKMQKVAALRRYLRGPVKSDRLDALTLAKMPFIDPEQLIEIYLPPAEIHALQRLTRQRKRMESDVSGRKVRISAILDGYLPGVRRAFSESWSSSFRAFLRGRINPFAVVREGEEALHAYLNKASSQRRVQTHQIFLACQSVAQVCQKSKTPGTLNEDFFSDLQDEVARELKLLEIAEAESESLARRISEIYKRLHPSDNLTTIPGVGPHTAPVFLSSIGNPTRFRNQSAFANWEGVVPGAKQSSNVEAKGLRMTKAGPSILRMALYQAGEIGRRNDPGLAAVYYREMVYHGKNHRQAMGAVMSHLGARVWRVLKEDRPYEIRDLEGKSIDKSEAKRIILSQFYVSEEVRRQRRRRNTKANNKGEAATVSVHEAVNAPQAEQLRSVSQK

SEQ ID NO: 343127 - protein, 314 aa, unidentified
MSSLVFAGIDVSQARLDVAVNDGQKWSLPHDESAMTTLVEQLATLHPTLVVLEATGGLEIPLTSALAAAGLPVVVVNPRQVRDFARAKGLLAKTDALDAQVLAQFAERIRPQPRPLPDTEARALAALLTRRRQLVEMLSAEKNRLLSASSSIRKSLRAHITWLERELQRTDTELTATIQQSPVWREKDELLRSVPGVGPVLTSTLLANLPELGTLTNKQIAALVGVAPLNRDSGTLRGRRTVWGGRAQVRAVLYMSAIVAARFNPVIRAFYRRLCAVGKAKKVALTACMRKLLTILNAMLKHRTPWRRMEAQHA

SEQ ID NO: 343128 - protein, 331 aa, unidentified
MKKIIIGIDVSKLKLDVGHYTSEGRVKSNCVVIENNTTGYNDMLTWFKKKKFKIKDILICMEHTGIYTDQLTKFLEKKKIPYTLQSPLHLSKSLGIVREKTDPIDAFRLSEYADEKKGKIKVSRRAPENQIRLKQLASERKQAVYALAKVRQVKTEITVHQKVSSQKRKEKQIKLFSKIILEIEKEIESIINSDNELYKNYSLLCSIPGIGLVNAINIIVFTRNFTLFPDARSYACYVAIAPFEHQSGSSIHKKTSVSKIGNHYLKAILGQAARSAINCDPQIRKYFNRKFNGKKGPESNYGQVLNAIKFKLICRMFAVIKRQTPYIRLDF

SEQ ID NO: 343129 - protein, 396 aa, unidentified
MLQENEGTISTQDQPTGSDIFVSVEMSRSKWVVGIHTPLADKIGLHTMACGDVEALLALIDRARVKLIASGSNSPAAMICYEAGYEGFWLYRRLVALGIRVVVINPASLLVDRRAKRAKTDRIDARAMVRALMAWARGERQVLREVRVPTVEQDDARRGLRERQRLVKERTGHGNRIKGLLKTQGIMDFDPRAADAAARLDAIVTGDGRPLAPCLKREIVRELERLALVMRQIDQVETERDAVVQACDAGAGTDALAAEPEREAAMIGELNRLKGIGMNDATILVREAFWRDFRNQREVGGWSGLAPSPWASGSVLRDQGITKAGPPMLRAHMIQMSWRWLLWQPDSDLAQWFRKRTEGATGRMRRIMVVALARKLLIALWRYATTGMVPHGAIVT

SEQ ID NO: 343130 - protein, 355 aa, unidentified
MHSKWNNKINQVTENTLVVGMDIAKRIHYACFVDERGRVIEKAFAVHQSKEGFENLYEKIRQMMKEAKKTEVIIGIEPTGHYWMNLAYFLDQYGIPLVMVNPMHVKRSKELDDNLPTKNDKKDALVIARLLKDGRFSYPRILKEVEAELRIGSTLRLKLTEDLASIKNRIIRWLDRYFPEFTQVFPTFGKMALTALERTPMPQDIQGKTAEELVFFYRQVGGMRAPQLPKAKLLIEKASNSIGLTEGQKMAKHEIATLLRQFRLLETEIEAVNDQLTELAKTTMEYDLLASVPGLGDATIVDLLSEVGSFSLYENPRQLIKLAGLTLRENSSGQHKGQNIYQNVDVRDLDISFSK

SEQ ID NO: 343131 - protein, 458 aa, unidentified
MKSRKKDRRKREKSFLQKINLYAAGIDIGSKSMFVGVPEELDPRPVREFPCLTGDLNRLADWLVGIGIQTVAMESTGVYWIPVYEILEERGLEVLLVNARHVKNVPGRKSDVQDCQWLQQLHTYGLLEGAFRPPEEMVGLRSYMRQREILIQGASDQIRRMQKALRQMNLLLDNVVSDITGNTGMAIIRAILAGEHDPFRLAAYRDRRCANDEKTIAASLEGHYKEEQLFVLRQAVELYDFYQQQIKACDEEIRKQLEKIDSQGGGDISSSGGKRKNKSSFHFDLRGELYRMAGVDLTQIDGFNETTVLKILSETGTDMSAWPTEKHFCSWLGISPGNKISGGKILKSKTKPTASRAAAAFRMAAYTLFNSKSALGAYYRRQRIRLGAPKAITATAHKLARIFYSMIKKGTEYVKLGQKEYEQMYRNRITKNLKRRAAELGFELVEKPEIHGTTINAI

SEQ ID NO: 343132 - protein, 326 aa, unidentified
MEHELHYIGIDTAKEKLDVDVLRPDGRHRTKKFANTTKGHDELVSWLKGHKIDHAHICIEATGTYMEPVAECLYDAGYIVSVINPALGKAFAQSEGLRNKTDTVDARMLAEFCRQKRPAALEAPHPLERALRAPVVRHQALTDMHTQELNRTETAREVQRPSIDAHLLWLEAELKRLEKQIKDLTDDDPDMKHRRKLLESIPGIGEKTSAVLLAYIGLKDRFAHARQFAAFAGLTPRRYESGSSVRGASRMSKAGHVSLRRALYMPAMVATSKTEWGRAFRDRLAANGKKGKVILGAMMRKLAQVAYGVLKSGVPFDASRHNPVAA

SEQ ID NO: 343133 - protein, 320 aa, unidentified
MTYIGIDVSKDSFVAAYPTKSGYTTKTFPNTTTGVRKFVNSLPADCHCVMEATGNYSMLLLYLLQQANIIVSMENPQKIKHFARAMLSTTKTDEIDAKLIATYGEKMTPAPYKIPTESIILLKQKRTVLRQLKKQLTATINLQQSLAVLPKQDPASKVAIEQTVKFLRKQISKMEEEITNLSTKEFGRQVKLLTSIKGISVTIASALILATGGFTYFSNAKQISRFLGLCPTYQQSGTSVNFKGHINRNGDTHLRSQIYVAAFASIRCNAACRETYERLRARGKSGKLAVVAVANKLIRQAFAVVTNNQPYIDGFVSSYA

SEQ ID NO: 343134 - protein, 346 aa, unidentified
MNEVSVIGIDLAKGVFEVCLKAADGEVVERRRLKRAAFERYMERAPRVLVGLEAGPGAHYWARWLDGQGYSVKVMSPRAVRAYRSGPHKSDALDADAVGEAAGRAGVRAVAVKSERAQTLQALVRVRDRQVASRTRVLNQLRSLLLEFGIATSRNLLVWYPRLTATAAVAALPERTRRLFDALFEEARELDRRIKAFDRELACGVRADPLARRLTGAPGIGPVNAIQVCAQIVAPSDFANARAMPAYIGLVPRLIASGATTRLGPITKHGAAALRKSLVLGAHAVITAAQRCPDKSDAIYVFARRLLARGKPRNVIAVAVANKLARIVCAMLKSGKPYDPHYSSAQ

SEQ ID NO: 343135 - protein, 516 aa, unidentified
MGVAIDVFYLTSSIHAPSAPPTESTLSFQVSRLQVFTFPIAQHPHRPPMPRNITQKPNEVGYRHEEGDASKSGVIGGTDPALVRVWEVIPVNKSKTYRSMSVKQVDVEKILADHLHQPVEAGLDIGKESIWSVIRFRDGSYLRPWRAANPSEVNLLVSLLKRISQQVKLTVAMESSGTYGDALRQSLSHAGLNVHRVSSKASHDWSEVFDGVPSQHDGKDAAVVAELCAMGKSVPWRFEPPSELEQQMHYWVDQLDAAHRVQQVWMGRLESRLVRHWPEVCALLKLSSPTLLKALKQWAGPAALAADPEAAATLRRFSHEMLEDQTIDRLIDEAKQTVGVAMTRWEQRRMREDAQAALAAHRQKREASKRLRELASGHELLPALGEVVGLPSACVLWVSLGDPRRYSSGAAYRKAMGLNLAERSSGMYQGELHISKRGKSLPRRFLYFAALRYASKEPVRQWYLRKKQRDRQEGMRGIVAIMRKLSLALWTVAQGEMFDPLRLFKSVVNQERAAKA

SEQ ID NO: 343136 - protein, 388 aa, unidentified
MPQTPNDLSRSLTAFEQTATLVAVVEMSQASWLVAGMIPGLERQPLKKIAPNEAALLSLLQRWQEEAIKICQTIRRITVAYEAGRDGFWLARWLCSRGIEAHVIHPTSVAVSREHKRAKTDRLDTAMLIRVFLGWLRGERGHCGMVAVPTLEEEDAKRPSRERENLVGERTRIINRMKSALVRLGIRGFKPELRRAPQHLERLRTPEDVPIPLRTLEELRRDMARLAMVRAQIEAIEQIRLQRLEQAPQDVAHAMVRMLANIIGVGVETADMLVREILAKELRDRRALARYAGLTGSPNESGSKRREKGLAKSGNARVRRGLIQLAWRFLRFQKDSALAQWYRTRTEGAKGARKTSLIVALARKLLIALWRLVTIGEVPQGIVLRQAT

SEQ ID NO: 343137 - protein, 321 aa, unidentified
MSRTLIGVDVCKDFLDAHARPAGLRQRFANDAAGIDQLVAWARALAPQRVVFESTGPYQKAAVGALLAAGLPAVVVNARQVRDFARGTGQLAKTDAIDAGVLAHFGEVVATVVRPLPPPEVLEFRELCDRRGQLVRMLAAEKNHRHAARGASPKVLKNIDKHVAFLEKQIEELEGRMDRIVADSEAFKARDEILRSITGIGPQVSRTLLAHLPELGQGCRQRITALVGLAPFADDSGTCCRTRRIRGGRGKARIALYQAAVAAIRYCPVMKAFYAGLKARGKATKVALIAVARKLLVLANALLRDGTPYQPRTNSVCPENA

SEQ ID NO: 343138 - protein, 404 aa, unidentified
MYNAVGIDVSKGKSTVAVLQPGGTVIRKPFDVSHTSQSLIELARYLGSLEGSTKIVMECTGRYHEPMLKALYEAGLFVSVVNPHLIKNFGNNSLRKVKSDPADARKIARYTLDNWAELRQYSGMDNTRTQLKTLNSQFSFFMKQKVAAKANLIALLDNTYPGVNKLFDSPTREDGSEKWVDYAYSFWHVDCVRKIGLKTFTERYKAFCKKHHYIFQQDKPEKLFNASKELVAVFPKEKTYKLLIQQSIQQLNLASGHVERLRQEMNALASTLPEYSTVMGIYGVGKTYGPQLIAEIGDVSRFTHREALTAFAGVDPGVDESGQHKSKSNRASKVGSARLRKTLFQIMTTLLQNAPEDDPVYRFLDKKRAQGKPYYVYMTAGANKFLRIYYGKVKECLRNLEQAE

SEQ ID NO: 343139 - protein, 421 aa, unidentified
MAVYCGIDWAEGHHDIALVDSDGTLVAKRRISESADGFAELTAMLAAAGDSAADPVPVAIETPRGLLVAVLRATGRPVYPVNPLAVARYRGRTCVSGKKSDHADAMALANILRTDAHLHRTLPADSGLARSITVLARGYQDAVWRRTKLVQELRARLREYYPGFLAAFASPGAGRRLSTTQLASADARAVLAIAPSPAEGLKVSRARVEAALRSGGRQRRVSTLAASIVAALRMPQLRQEPVVEQAMRTEILALLGVFNAVCESAGLLAAALAEAFRRHPDYQVITSFPGLADVSGAIVLAEIGDDRDRFSDDRALQAFAGSAPVTRASGKSHTVTRRRTKNNRLAAAGYSWAFTAASRPSPAREHYLRRRASGDGHPAALRHLFNRMLGQLHHCLRTGQVYDPVKAYPNATAAHPQQAAA

SEQ ID NO: 343140 - protein, 298 aa, unidentified
MWHIGIDLHRRTVVMSAVNDSGEVVSPVTIECRNTKAILNFLEPLKPFRAVVESTATYRWLYKLLSEEGTILLAHPAKLRLMIQRRAKTDRLDCQLLANLLRINQIPLSYIPPDDFQQLREITRHRARLARDGAQVKIGLRSLLARHNRDAPYRIPFGPRGIKWFRDQSFSPIDDLIRDELITRLNHFTEQINAIDQQLEELRESFPQVEALLDIHGIGLYSALVIVAELGEIERFRSAKQVGAYAGLTSKVNQSGGALLLRLHYQTRTTLVTLGTDRSRDSRGQTRCSLEKVLHPNS

SEQ ID NO: 343141 - protein, 309 aa, unidentified
MTSEKYVGIDVSKDKLDVAIWGEKSCLEVANSKRGITKLVKQMLALAPKLIVVEATGGYEEAVVLGLFEAGLPVALVSPQRVRQYARAKGLLAKTDRIDAQVLAEFGKKLQPRLFVGKSEERKALSAFVTRRKQLEDMLLAEKNRSRTSSSEIHNSLQNMIQYITTEMKHMDEQIRSFMQEHAELQKQEKLLRTAKSIGPVTAATLLAELPELGQLDRKEIAALVGVAPMNHDSGKKRGYRKTKGGRPEVRSALYRSALSGIRYNPILKPQYNQLVKRGKEKKVAITACMRKMLTILNAMMRDQQPFRM

SEQ ID NO: 343142 - protein, 387 aa, unidentified
MNHADDLSRSLVSFEQNGTLVVVLEMSLSSWLAAGVVPGIERRPLKKLDPDPSALLHLVDRWRDQAIKAGRTITRIALAFEAGRDGFWLARWLLARGIEVHVVHSTSVAVSREHRRAKTDRLDTEMLIRVFLGWLRGEARHCKMVSVPTLEQEDAKRPSRERENLVGERTRIVNRMKAALIRLGIRGFKPELRKAPERLEALRTPEAESIPPNMLAEMRRDMARLAWVREQICAIEQARQRRLELAPADGPHATVSLLARVIGVGIETADMLVQEVLSRNLRDRRAVARYAGVTGSPDESGSRRRERGLAKAGNARVRRGLMQLAWRFLRFQKESALARWYRDRTEGAGKRKTTMIVALARKLLVALWRMATIGEIPAGVVLRPAVV

SEQ ID NO: 343143 - protein, 357 aa, unidentified
MNDQERGLDFNNQDFYLGIDVHKRSWAVTIRSNNIVLKTFSMNPSPKELSDFMKKRYPCGNYYSVYEAGFSGYGMHRELESLGFSNTIVSPSEIPTTGKEKLTKTDEVDSRKLARELEKGTISGIYIPSQLQQEIRSLSRLRHQQIKKQTRIKNQIKSYLDFYGHKLPKNCEMQHWSRKFIEHLRTLEFNYDIGKEHLEIYVAELLVIRNRILQILILLKKYFQQYEKYHIIELLRTVPGVGFTVATTLYSEIMDIERFTNNEKFASYIGLVPSTMSSGEKKKVLGLSFQFNRYLRSLLIESAWVAIRKDPALTLAYNNFMVRLSAQEAIVRIAKKLLNRIYYVLKNKKKYVYSVVK

SEQ ID NO: 343144 - protein, 530 aa, unidentified
MVTRSRKRKSKGSKNRFIGKPAGQIQERVRAVGPEHFGIVSVDCAKRRSKWMLCNFYGKVIIEPTTVEHTSGGLRVMTQLVAEACRAEGLTDTVVAVEMTGIYHKPTFRAFRKAGFDTRIVHPFASNHYRRPLHSDQKTDDHDLEAIFHAAVKGYGLAGLPVSEVYQSLQAVSRHRHNLVKQRSRLMMQIRRLLHQTMPGFADLFEEDTLFHKSIALPIALKFTSADAIRDAGVAGITSHLTKTNVRFQTRTIERIVAWASTAADPSELEEIHTRQWQQLNEVRRVFDEQVAAAEREMASFLVKTPYVLLLSVTGINVVSAARLAGEAGPIEHYASARAINGRAGLYPSRYQSDEVDHADGSLVRQCNRKLRGAAMLVAENLIKCHPYYRGLSALWTQRKVDPRDRRCRIANRAMRMVFQLVGGRQVWRGRSVDREHLLAKLQEFHRLHQTPIEQSIRDLNEAFMWLPKSTYTAEAKPLAEWARQKHRGPQRIGDLMIPLLIRLGVTREELGVPSEETLESNTSEARSSD

SEQ ID NO: 343145 - protein, 376 aa, unidentified
MENDSTLYVGLDVHKDSITVAYSLGAGEVELLGKFGTSKADIDRLCKRLQSKARRIRIVYEAGPCGYGLYRRLAGKGFECMVCAPSLIPKKPGERVKTDRRDAVKLVRSLRAGDLSAVYVPSVEDEAFRDLSRAWVNAKDDLKRARQRLKAFLLSHGVRYSGRADWGPAHRRWISAFVFDSAWQQLAFDEYRRAIEDRIAQCSRLEAALREAVVNWRFYPAVLGLQAMRGVQFTTAVGMLAELGDLSRFAHPRQLMAWLGVTPAEHSSGEKRHQGSITKTGNSYARKLLIEAAWSYRHPARLSPEIQRRHEGIPKAIIDRAWDAQLRLCRRYRKLAARGKNPNIAVVAVARELSGFIWDISRLAMSLAIPREAYAV

SEQ ID NO: 343146 - protein, 360 aa, unidentified
MRIIGCDLHARQQTLAMLDTITGEVVTRTLMHEGHEVRDFYSPLPRPVLVGIEAIGPMQWFLDLLEELQIACQVGDAAKIRAAEPRKQKHDRRDAELILKLLVEKRFPAIWRPSKEQLDLRALLLHRHHWVRLRTQVQNALQAIALAHGLRRGAGLWSHDGQAKIAFLPLAPHASYRRSALQTMYRNMAEEIKKLTEQVAEQAEQRCGARLLLSHPGVGPVTALATEVFLGDPRRFADGKALASYVGMIPREYSSGERQRFGALTKQGSPLLRFLWGEAGAHAARCDPELQRFYRRKLVQKGLGKARVAVARKLGIRLWIMLRDQIDYQEFCRRGQKHSGAACAGMPETRFGAHGHRPVD

SEQ ID NO: 343147 - protein, 338 aa, unidentified
MFTIGIDPHKCSHLAAVLDERGTLLEQLRVRADCHQRERLLKFATSYSPRVWAIEGARGLGALLAQQLVAAGETVLDVPAKLSARVRVLDNECADKNDTHDARAAAIVAINNRRLVRVGPEDHAAVLRMLAKRHHDLHGRRTQSICRLHALLATMTPGGLPRLLSADRAARELRRIRPTDSVGAARRQACSELLGEVRNADRELEALHTRIVAGVRAADTTVTNVYGVGPVVAAVLIGYTGDITRFATKGHYARYNASAPLNASSGPRPRHRLNNRGNRQLNHALHMAAVTQISHNSTGRAYYQRKVAEGCGDKEALRALKRRISDAVYARLHADATR

SEQ ID NO: 343148 - protein, 384 aa, unidentified
MSADSRPEQSAIRTDLGAIFVSLELSRATWLITSLSPGRQKMSKHQVRGGDTAGLLARLAELQSRAHARTGQLFPLIVIQEAGLDGFWIHRVLQSEGIESHIVDPASIATSRRRRRAKTDKIDGEALIRALLAYKRGEPRVCAMVKAPTPREEDERRIGRERKVLTAERVAHVNRIKGLLFAQGISDYEPMHRHRRARLDDLTTGDGRPLPQHLKAQVSRELDRLELLLEPLQAVEAERDALLAATESPDKPALAALLLDLKGIGPEFASVLWSEGLYRSYANRRQVAAYAGLAPTPWQSGTVDREQGVSKAGNPRLQTTMIQLAWLWLRHQPGSALSRWFHERVARRSGLRKTMIVALARKLLVALWRYVTAGVVIQGATMKR

SEQ ID NO: 343149 - protein, 341 aa, unidentified
MAKFIRVAIDLGKNYFQVHGLESEGGRSISRKVKRSKMHEVFSQIEPCRVGMEACGSAHYWARQLTAMGHEVVLIPPAYIKPYVKRGKNDAVDAAAICEAMSRPDMRFVPIKSADQQAVLMLHKTRELLVKQRTMAINALRGHLAEFGIVAAKGIGRVEELLALAKADAALPPIATAAVDCLAQHLEGLDLSIATVENEIAKSHRQNPISRVLDEIPGVGTLIASVVAASVPDPGVFKSGRDFAAWLGLTPRQNSSGGKEKLGAITKQGNRYIRKMLVTGATSVLRVVGKRKGSFADWINALRVRKPERVVAVALANKLARICWAIMTTGEGFRTDTYVKA

SEQ ID NO: 343150 - protein, 340 aa, unidentified
MAVLRKNYLGIDVSKPWFDVSLLVVLDHLKQAMITERFDNNAAGMKLFKKWLKAQGISFDEHSLLVIENTGIYHRLIWSFCSTHHLQLHIGNAAHIKWSLGITRGKSDAIDSQRLCTYCCKQADELKLTPALNPVFIKLKDLMSSRSRLLIQLHATKNYINEIKSIHDIALLAILEKAHKAAIDGIKKSIRQIEELINKIITEDAAIYTNYQLIKTVPGIGHLTAVYIICCTNNFVSKVSGKQLASYAGVVPFEHSSGISIKGKNRVHKMANKELKKMLHLCALTAIKYCPEFKHYFDRKKAEGKNGMLVVNAIKNKLVLRVVAVVNKQQPYVENSKITA

SEQ ID NO: 343151 - protein, 345 aa, unidentified
MQSMYYIGLDVHKKTISFCVKDVSGQIHTEGAFPATRFDLDRWMKTLPQPWTAAMEATIFTGWIYDHLKPHAAALKVAHPLMLRAIAAAKKKNDRIDASKICDCLRCDFLPECYMASTEIRERRRTLRYRNLLVHQAVQLKNKISGLLMEAGVSYNKQKLHKVGYFKELLATNPDIHEGLGPLLRLCRETLVRLQKTESALVRSLQRDSLLAERVERLMTIPAVGPITALTWALEVGEVQRFSSIKKAISYCGLCGAEKSSAEAIKRTPLSKQRNKHLQSVLIEAAKLAPRRSPELAQVYDQEKQKGNANRATLAVARKLVAYLLAVDRRQKEFLTVERENRTAA

SEQ ID NO: 343152 - protein, 413 aa, unidentified
MSVPDEGPTTRVTAGVDWAKDDHAVCVVGAEGEALQRFMIKHDRPGLKDMVRRLLRAGVTEVGIERPDGTVVDALLQAGLVVLVIPPVQVKNLRSRYGSAGNKDDRFDAYVLADVVRTDRRRLRPLERDTAATTALRTTVRARRDLVAHRVAAANQLRAHLQIVFPAAAGLFAGMDSEISLTFLDRFASQEQADWLSPKRLASWLSSVGYSGRTDPDLLHARITAAPRGTTGPDAATHAVITAAYVAVLRTLKAQIAQLAGKIAEQLAVHPDAAIFTSLPRSGCVRAARLLAEIGDARGRFPTQDSLACLAGVAPSTRQSGKVKAVTFRWGANTQLRDALCDFAGDSRRDNIWAADLYAKAIARGHDHPHAVRILGRAWAHIIWRCWQTNTPYNPADHGALQTILNQDQKAAA

SEQ ID NO: 343153 - protein, 337 aa, unidentified
MRYIGVDLHSSNFTVCVFSENEETIFKQYPLAELEAFKEFLDSEDRVAVEATSTTRFFYNQVAPLVAECVVVNPSRFEIIKKSFKKTDKNDALNLARFLSMGQLPSSRMKNELQAEINSLATTRDKFVKLRTILLNKIHAHLKGNGYPSRKEAYDHPANLKKVLDLTWSAAVRIELEVIINEILNLTGGITKLEKEISERGAEMEGSENLNSIKGIGKYSAAVLLSVIGDVNDFADEDKLASYFGIVPRVSNSNQTQHHGSITKCGSKLARTVLVQCTLTAKRFSPYLKQYYERIKARRGSGKAIIATARKFLGIIYRTLKYKWVFSDFPNFVLAEQ

SEQ ID NO: 343154 - protein, 380 aa, unidentified
MNNATARKRTQITIGLDLGDRRHTYYVLDGAGKMAREGSLGNTREQLATMARSYPGATVVMEAGTHSPWVSRFLQELGLRVIVANPRKTRAIYQNERKSDRRDAMMLARLARMDPTLLHPVEHGSQEAQQDMLQLKLRDSLVRARVALINAVRFTLKSLGYPVSNPSSERFHKLVLSEVPESIGEMIAHNVAAIAELTQRIKALDVSISRLAAERYPETIYLQQVSGVGPITSLYFVLKVGTPGRFQRTRDIGAFLGLCPRRDQSGETDKELRISKCGDQYLRGLLVNAAQYILGPFGTDSALREHGLRLAQEGTARAKKRAVVAVARKLAVLLLTLWKSREPYESFPTIGLNRSDGGCAPPNPAPLAAAGVRGELLTPN

SEQ ID NO: 343155 - protein, 400 aa, unidentified
MISVGIDVSKGKSTVCILKPYGEIMCSPFEMLHGEKELNALDDLLNKLDGEIRIVMEATGIYHLPILTFFHEKGYFVSVINPFAMKKYAKDNSIRGAKTDKLDSIMIANYGIEKWFKLQRYKGDEEIYAELKLLGRRYRHYMELHVKALQELTHILDYVMPGIKKMFNSWNEANGKDKLSDFVEQFWHFDLITAMSLEKFTEEYLDWAKEKKYHRSRSKAETVYELASSGIPTLPSSTPSTKMLVQEAISVLRTVDSSLSLIVTRMQVLAKSLPEYSTVREMGGVGDVLAVKLIAEIGDVRRLHSAKALIAWAGIDPPPYESGQFIGSKRKITKRGSSTLRKIGYEVMRVLKSHPAPKDDAVYNYILKKEGEGKSKKHAKIAGLNKFLRIYYARVIAVYQ

SEQ ID NO: 343156 - protein, 422 aa, unidentified
MLEETNDTEELIGRVAALDIGKAELVCCVRVPSPEAPGKRLQEVRTYQTMTRSLLVLADRLAELGVTRVVMEATSDYWKSPFYLLEAHGFEVWLVNARDVKHLPGRPKTDRLDAVWLAKVAERQMLRPSFVPPPAIRRLRDLTRYRADLVGVRTAEKQRVEKLLEDAQIKLSVVASDIFGVSGRAMLAALLAGERDPKVLARLARTRLRAKIGQLEEAFTGHFSDHHAFLLARMLVRIDQASADIAELEAKIDQEVAPFAAAADRLDEITGVGRTAAQVIIAEVGVDMGRFPTPGHLASWAKFAPGVKQSAGKPKGKATTGHGNPYLARVLGEAAVTAGRTDTFLGERYRRIARRRGAKRAIVAVGRSILVIIWHLLADPTARFHDLGAGFYDTRINPERAKRNHIRQLEALGYKVTLQPAA

SEQ ID NO: 343157 - protein, 411 aa, unidentified
MDVVHARCCGLDVHKKSVVACVLITQPNSSVERHVRTFKTVTADLLKLADWLSTLQVTQVAMESTGIYWRPVFNVLEDDERTLLLVNPQHMRAVPGKKTDVKDAEWLADLLRHGLLRASFIPPAPIRAIRELARYRKTLVQERADETNRLHKTLEGANLKLAGVATDVLGLSGRAMLAALLQGERDPEVLADLAQGRLRAKLPQLREALDGRVQPQHLVLIDHILAHIDFLGQAIAEVQAAIESCLPPYGDALQLLQTIPGVKPIAAAAILAEIGTDMSRFPSAGHLASWAGLCPSNKESAGKRMKAPMNHGNVWLRGMMGEVAWASIRTRATYFHAQFRRLSRRRGPKKAAVAVAHSLLIVIYHVLRTGKPYTELGVDYFNTLDSARLERHHVLRLEQLGYKVSLTPVAA

SEQ ID NO: 343158 - protein, 375 aa, unidentified
MKETVRFLVLDVHAETIVVAIAEPGGEVRSLGTIANREESIRKLIGKLGAVGQLRACYEAGPTGYVLYWQLRRLGVDCAVIAPSLVPMKAGDRVKTDRRDAERLARSHRAGDLTAVWVPDEGSEALRDLVRAREAAKQDQLRARHRLSKFLLRSGQRPAAGVGAWTLPYLAWVRQLRFEQPAQESTRLDYLHEVEHMGERVKRLEQAIGEAIKLASPERQEVIQGLQALRGVAQISAVTIVAELGELSRFESARQLMGYSGTVPSENSSGKRTQRGGITKTGNAHLRRIAVESAWSYRLRPGIGPGLRKRQEGVPEPIKEIAWKAQLRLHKRYLKLIAAGKDQRKIVTAVGRELLGFIWAIGVKAEAASREKIAA

SEQ ID NO: 343159 - protein, 414 aa, unidentified
MLTGDLVRLFVGDDWAEDHHDVEVMSEAGKVLARRRLPEGVAGIAQLHALIGARAGDDPDEAEVIVGIETDRGPWVAALVAAGYRVFPVNPLQASRYRDRHGVSGAKSDAGDAHVLADMVRTDSHQLRPAAGDTPEAGAVKVLARTHKTLIWERTRQVQRLRHQLLGYFPAALEAFEDLDAPEALELLARAAEPARAAKLTRAQVSAALKRAGRRNITERATTVLAALRGEQLGQPEILTAAYAAAVRSLIAVITVLNEQVKVLEQQVRDHFGRHPDAEVILSQPGLGPVLGARVLAEFGDDPRRYADGKARRNYAATSPLTRASGKKKVVTARFVHNDRLVDALNAQAFSALTASPGARAFYDQQRANGHGHNDALRRVANRLVGILHGCLKTRTLYDEDTAWGHRQQTQQAA

SEQ ID NO: 343160 - protein, 336 aa, unidentified
MLYVGLDVHSRQSSLCILNSAGGTVNEIQVKGPRSAVVDRLRQLDQPFSICYEASCGYGHLYEALRPLAHHVAVAHPGKLRLIYKSKRKNDRVDAQKLAKLLLLDMVPQVHVPHVDVRAWRSLIVLRQRVMAQMVRAKNQIRAVLRENDIAGPKWLWSKKKLAWLDSLELHPVAKLRLDLAVEEFKSLNQKVKRLEAELQRYADRHPAVTLLMTIPGVGIRTAETFVAWVDDVARFRRTRQLGAYFGLVPCQDASADRNRLGHITKDGPPVMRKLICEATWTAVKKCPAFKRFFERVMADKPERKKIAVVAAAHRMIRVMGAMLRSGTAYDPNYKG

SEQ ID NO: 343161 - protein, 342 aa, unidentified
MWIIGCDFHPSFQQVAYVNTEGGECGNRRLAHPGEAERFYRGLSGQAVRVGMEASGHSRWFERLLAELGHELWIGDPAKIRAAQARKQKNDERDAADILELLLAGRFEKLRIWAPAAADRDVRQLVMHRHRLVEMRTRVKNQLKAVALNEGLVVRRPGLWSKQGQEQFRAPPLPQWTGRRREDNLALLEDLLQRTGPLDRAVEEQARRRPEAVRLMTHPGVGPVTALAFVLTLGDAGRFSCGRKVASYLGLIPAEASSGGRQRLGHLTKQGNALLRGLLVEAAHVAAQREPELKRCYRRLAMRKNRAIAAVAVARKLAVRLWWMWRRGVDYEQMCASGSHAG

SEQ ID NO: 343162 - protein, 358 aa, unidentified
MKKSSRKMEWKERPEKTVGIDLGDRFSRYCVLNSDGEVVEEGRVRTNEEAFRLHWAGEARQRMVIETGTHSPWVSRLLKGLGHQVIVANARKVRAIWENESKNDRRDAEMLAQLGYSNPRLLAPIQHRSVERQRDLNLLRARDTLVRARTMLINAVRGLVKSGGGRLPSCGADYFATKVSSSLPAELGTAMVPLVEQITALTIQIRGLDQEIENLAKRYPEIRILRSAPGVGPVIAAAYVLTLDRVEAVEHSRSVGAFLGLRPKQSQSGDSDPEHGISKTGNRYLRRLLVQAAHYILGRFGPDSALRRWGCKLALGGKRAKKRAVVAVARKLAVLLHCMWRTGQSYQPFPEPTAATVA

SEQ ID NO: 343163 - protein, 442 aa, unidentified
MSESLTVASEPEWAAFAAIDWADQKNFWRLVPAGSQRQEQGELENTPEAVEVWAATLQQRFGGRPIAVCLEQSRGALVYMLAKYAHLVLFPVHPTTAARYRETFCTSGAKADPSDTTSLLDLLLRHRERLRQLRTDTTETRLLQFLVEARRRMVDEKTRQSNRLTDCLKLYFPQILHWFGDVASPLVGDLLQRWPSLEELQRAHPGTLHKFFHQHNCRGEERIQERLQAIYQATPATQDAAVREAGAMIARGLVALLATLRSQIVVFEQRIEELVRSHPDGVLFASLPGAGAALVPRLIVAFGTHRDRYQSAYQLQCYCGIAPVKEASGKTEWIHFRFTCPKFLRQTFHEFATHSIGQSEWAKAYYEHLRNDQKKSHHAAVRALAYKWIRIIYRCWKDGKSYDEEVYLRSLRRRGSLFAGALGLATGAAWKTVPGFQKFSAE

SEQ ID NO: 343164 - protein, 347 aa, unidentified
MRFYTTQHPFYCGIDLHARTMYVCILDQSGEVLVHRNMKTDPETFLHVVAPYRQGMVVAVECMFTWYWLADLCADAGIPFVLGHALYMKAIHGGKAKNDKIDSHKIATLLRGGMLPQAYVYPAKMRATRDLLRRRMHLTHKRAELLAHVQNTNSQYNLPAIGKKIAYKANREGVAERFADAAVQKSIEVDLALITYYDALLRDVELTIVNTARHHDANTLHLLQTVPGIGKILSLVLLYEIHDVHRFPRVQDFVSYCRLVKCARESAGKRYGTSGAKIGNAHLKWAFSEAAVLFLRDHPAAQKYLARLEKKHDKGKALTMLAHKLARAVYYMLKRQVAFDPETFFQR

SEQ ID NO: 343165 - protein, 412 aa, unidentified
METIFERVAGLDVHKAQVTACVRVPATAGGREQHLAEFSTTVPGLIALRDWLEAHGVTHVAMEATGVYWQPVWHVLEDVFELMLVNARHVKQVPGRKTDCSDAAWICQLMEAGLLRGSFVPPKPQRALRTLTRYRKTQIQERQREANRLHKAPEDTGIKLDCVASDILGKSGRAMLEALVGGTTDPEILAELAKGKLRAKLPALREALEGRFEPHHALVIGAILEHLDFLDEHIDRLSEAIEEQLGPFAPGVQLAATITGVAERSAQMMVAEIGTDMSRFPTPGHLASWAGRCPGNDQSAGKRRSGHTRKGSKWLRITLEEAALAATRTKDSYLQAQYQRLRPRRGHRRALVAVEHSMLVAYWHMFTTGETYRDLGGDYYRKRDPERQTRRLVAQLQALGHKVTLETLPQAA

SEQ ID NO: 343166 - protein, 356 aa, unidentified
MQTQGNKIDFSGQNIYVGIDVHLKSWKVTVMMDSLYKFTFSQDPCPQTLYNYLVSNFAGANYFSAYEAGFSGYWTHYKLCSLGINSIVVNPADIPTTAKEKVQKEDARDSQKIARSLKNGELTPIYIPSLESLGHRGLLRLRKTVVSDTTRVKNRIKASLHFKGIVIPAEINTPKWNRKLLKWLAELETDLVYRQVLDAQLSTLAHMRQNTLNITKQIQSLSKTEQYKKDTALLISIPGIGLITALTILTELENMDRFNSIDKLCSFIGLVPSTSSSGESERTGSLTSRGHKVLRATLVECAWVAARVDPALARSYNQYCKRMKPNQAITRIAKKLLSRIRYVLKNKQPYVLGVVK

SEQ ID NO: 343167 - protein, 371 aa, unidentified
MESIVYVGIDVHKDSYSICCYKAREDRFYYEKKINAETKPVLKYLDSAKKEFGDDTIFICGYEAGPTGFGLYRDLEKANYNCVVIAPTSLKHPTNHKIKNDKVDARFLARTLFTKDYSAVHVTTEHEEAIKEFCRMRQDVKCHLKKAKQVLLAFLLRQGIKFSNGEYWTVKHRTWLKSLTFKDGYLEEAFNEYMITVNSLEDRLKNIENRLKEIAEDKDVKEKVDKLVCFCGIETLSALTIVSRIGDFNRFSKAYHFSNYIGLTCGEDSSGLKEKHLGITKNGDKEIRRILTESAKSLKLANPRGEKSKRLLERQKEKDPAVIAYADKCRYRLKSKIAHLEMKGKPANVAATAAARELACFIWGMMTNNIA

SEQ ID NO: 343168 - protein, 407 aa, unidentified
MIFVGVDWAEAHHDVHVQDENGKRLGGGRLPEGVEGIARFHELAGAHAGDPGEGVIGIETDRGLFAAALVAAGYRVFAVNPMSTSRYRDRHSTSGAKSDPGDAKVLADMVRTDRHNHRPVAGDSDMAEAVKVLARAHQSMIWSRRRQASMLRSALREFYPAALAAFDDLTSGDAVEVLRAAPTPALGAVLSRPKIAAALRRGGRQRRIDERAAQIQAALRTPQLRASAVVADAMGASVSASAAVIAEMSAQIARLAARLEADFKQHPDAVVVRSLPGLGTILGARVLGEFGDAPDRYATAKCRKNYAGTSPITRASGARRVVLARHARNQRLADAIYLWAFAALTASPGARAYYDTRRAAGDTHHQALRALGNRLVGILHGCLTHHTAYSEATGWAHRTQNKLTQAA

SEQ ID NO: 343169 - protein, 317 aa, unidentified
MNNNNTLYVGLDVHKESITVAYAINSEPVELMGKIGTSPTDIQNLCKRLRSKSSQVSIVYEAGPCGYGLYRRLVKSGFDCMVCAPSLIPKKPGERVKTDRRDAIRLVRSLRAGDLSAVYVPGIEDEAFRDLARAWASARDDLRHARQRLKSFLLVHGVHYVGRADWGPAHRRWLSKYSFESPWRQLAFDEHRRTIEDRQAQCERLESALKEAVTEWRLYPVVEALQAMRGIQFITAVGLISELGDLTRFEHPRQLMSWFGITPSEYSSGGSRHQGSITKAGNSYARKLLVRQRGVTVIRARISPAIQKRQENLPARH

SEQ ID NO: 343170 - protein, 393 aa, unidentified
MKQRKNAGSEPENNTERTSSIFISGLPACLNPDPDSRLTSIVKVVRLSSSPFFTKNFKDKSMENFYFIGVDVSKKRLDFCVMFEGKVVHEEEISNHQSAIMALLHQLEEDYNIANCQMLVCAEHTGQYTFPLACACKAVECKLWLENPAEIKYSSGVQRGKNDKVDAKRIAIYASRFQDKVQYYERPTEDIERLKQLESERTLYVTDLAKYKGQMKDQKDYMPKTLYERKMKRLQALMDDLEEAIQAITDEMDEVIVSCPVLCRQRELLMSIDGVGRVVATNMIITTEAFTRFDDPRKFNCYAGVAPFSYSSGSSQHSKARVSHRADKVMKRLLHLAAVAVTHRVGGELKKYYERKVAEGKNKMSVINALRAKIVARMFAVIKRNEKYKPILS

SEQ ID NO: 343171 - protein, 416 aa, unidentified
MDVIVARCAGLDVHKNTVMACVRAPGPDGGRISTVRRFGTFTDALRQLRAWLVAEGVTQVAMEATGVYWKPVWHVLEAVPEFELLLANAHAVKNMPGRKTDVADAEWLALLCECGLLRPSFVPPPVIAELRDLTRYRKKLIEERSRETQRVQKLLEDAGIKLDSVVSDILGVSARQMLEALIAGVRDVEALAELAQTRMRPKIPQLRRALEGRFGAHHALMLPMHLDHVDQLSAAITRLDVEVDRVIRPFSAQLQRLITIPGVGRRTAEVIIAEVGVDMRRFATAGHLASWAGMCPGNHESGGKRRSGRARKGNQALRAALCEAAWAAAHGKTGYLPAQYRHLMRTFGKKGQTRAVFAVGHSILVIAWHLLANDCDYTDLGAEHFTRNADPEARKHYLIRQLEALGHKVTVEPAAA

SEQ ID NO: 343172 - protein, 389 aa, unidentified
MSELTKARKEAVISLLTWEGKYLGKSFKISNNVPGVKELENRLLSILSLGNFEHICFGMEATQNYGFHLSEYLATSDKLSPWKPLVYVINAKYIKDFKRAFPERDKTDLIDSQFIAEYLRFEKLPHPFEPNNRYLPLQRLVRYRYHLVKDIERESKFFLANLFLKFPSWVQNRPINTLGKSAMDVLGEFYSLDEITQMPLEELALFVARAGKNRSPKPEEIAREIKKAARESYRLKPGLADSVQFILENMVINIRTFRSSLKEVNKAISLEMKGFSNPLLSIKGIGPVYGAGIFASIGNIKRFSSDDKIAKLAGLVWKRKQSGKFEAEERRLIRQADRYLRYCLVEAANSLRVHNEEYHTYYRKKYREVRKHQHKRALVLTARKLVRQI

SEQ ID NO: 343173 - protein, 314 aa, unidentified
MDVSFVGIDVSKDKFDVHIRPLDQSECFSYDEAGLKKLVVLLKQIQPQVIVVEATGGYERRLVAVLLTSELPVAVINPERVRHFAKATGQIAKTDALDASVLSLFAQTLQPQPRRLPDAFAQELQDLLARRRQILDMIVAEKNRLETANKPIRGQILQHIKWLEKRLLSVDRDLNQRIQSSPTWKAKDDLLRSVPSIGPVGSSSLLIQLPELGTLNRHQIAALAGVAPINQDSGRFKGHRTTQGGRPAIRAVLYMCTLVATRHNPVIKEFYQRLVLAGKPKMVALIASMRKLLTILNSMLKHNRGWDSSYAKNC

SEQ ID NO: 343174 - protein, 348 aa, unidentified
MNYIGTDIHISTLDFKVVGNLGKVKMAREVTTSAPNFLDFIKSVPAPRQVIIEEGPLAAWLLEICDKNGEHLIISDPKRNKWIGASGEKEDPIDAEKLAQLARGGYIKEIHHPLGQRRRFRELITAYHDTNKSIVRIKNKIKAKFLQNGIQCPGKTVYSGKQRAEWRQKLPQEPALLVIIDSLWQQLDQIQDNLESILAEAKLEANRYPEIELIDEIPGIGFIIAATIVAILENPHRFANKRKVWAYAGLGIVRKSSANKTYAEKLGKEFNRMLKCVVEEAAQAAINTETDNAFRRSYARMTIQKGIDPHHAMLTVSRDIIATVWAMWKKGEHYNPAIDRQVKTEVEV

SEQ ID NO: 343175 - protein, 393 aa, unidentified
MICVGIDVAKDKHDCFILSSDGEVLADVFTIPNNAEGFGQLLQTIRRCTSPQSKIKVGLEATGHYCYNILGFLLDKGMPTYIINPLHTNLYRKSLSLRKTKTDRVDARTIATMLMSDVDLKSYTDAAYHNEELKSLTRYRFEKVRERAKLKQSVSRLVTILFPELEKLVPSLHIVSVYVLLSEFPGAKQIAGAHLTRLKSLLEDASKGRYGRDMATILRDAARCSVGSVMPAKSLELQHTIRLIRELDAEIDDIETAIQDMMEKIQSPIITIPGIGVRMGAMILAEIGDFSRFDSPDKILAYAGMSPSTYQSGQLSLSGAYSHMEKRGSRYLRYALYNAAKYVCLWDPIFAAYLAKKRAEGKHYNVALSHAAKKLVRLIFAMEKSRQPYNAAV

SEQ ID NO: 343176 - protein, 486 aa, unidentified
MAKRKESTFERLPKGQPLNRRERREVANRLNSPDPGWEIVHPHAAGIDIGNESHYVAVPAGQDEHPIREFGSWTGDLERMGDWLQACGIQSVVMQSTGVYWVAVYDVLQRRGFDVHLVDARGTKNLPGRKSDVQECQWLLKLHTYGLLRRCFLPGEEIRRVRTVWRLRDQHVKEAGRAVQQMQKALTEMNVQLHKTISDLSGVTGQAIVRAILAGERDPARLAALRDRRIQASEAELVQSLRGNWKEDTLFELRQALETYDFYRQQMKQCDAHLGPYLAALPSREPVAAPPPAETPEASSRPPVRRAWRKPRKNPGNQPALDLRTELQRILGVDATGIEGIDVLTVQTVVAEVGADLSAWKTERHWASWLNLAPKREVSGGRVIRHTREHRTNRVGNAFRMAAQSLIRSESYLGARFRYLRAKLGGIKAVKAMARTLACLYYRLVTRGQAWVDRGAAEFERRRQKREFAMLQRKARDFGMQLVPAA

SEQ ID NO: 343177 - protein, 352 aa, unidentified
MHATTVAIDLAKDVFELAFADAGNAVIARKRLRRGRFLAEFQNRPPLTVVMEACGTAHYWARRLARLGHAPVLLPPRHCKPFVRGNKTDRSDAAGLLTAHAVGGIQPVPVKSAEQQGIQGLHRIREHHKHQRTASINVVRGLLREFGVAIPAGAAALRPAALAALEDADNDIPMALRVRLGELLEEIASHTAAMQRIEADLAEFASRDLRSQRYQAATGVGLITATALSASQGDLDRFPSGRHFASSLGLTPKEFSSGNTRRLGKLTRRGDIYLRQLLIHGGRSLLQSAALRRKQGKELDRLSDWAIRLSDRVGHNKAACAVANKLARRLWAAEHHRTSFDPDHVSEVPAAN

SEQ ID NO: 343178 - protein, 323 aa, unidentified
MDAPFQTHIGIDIAKRSFDLAIRQAGGPRSFPMTPLGIARAVRLVGKHQRPMVALEATGRYQAAVVDALHKAGISLAVINPRWVRDFAKASGQLAKTDRIDAAVLAEYAERMEPHPQPPTSKALKTLRALTARRHQLVRMHTMECNHAEAVDNPDVLASVAQITEQLDRQLEAVEIRIREYIDAEPEFQHRVKLMQTVPGIGETTAYLLAAELPELGHCNRQQIAALVGVAPINRDSGPIQGKRPTRDGRKSVRTALYMAAVSASQHNPPLHEFYQRLRDAGKPGMVALIAVMRKLVVVLNTMLANNEPWRNPDLPQNTPESS

SEQ ID NO: 343179 - protein, 351 aa, unidentified
MKGMAVAIVESRVTGGVDTHLDVHVAAALDGIGGLLGVESFPTTAAGCEDLLEWVAGFGPIAVIGVEGTGSYGAGLGRYLQAAGVAVVEVDRSDRQDRRRQGKSDPLDAISAARAAQSGRARGEPKGRDGRVEAIRTLMVAKRSARGDRTATLNQMRALISTAPDDVRARFAHHSVARLVAVTAAMRPRPGDIVGYATRVTLRELGQRAAYLGDQIDRLNELIAPLVTARAPGLVALYGVGPDTAAILLIAAGDHPERLRNEAAWAHMCATAPIPASSGKVVRHRLNPAGDRQANHALWRIVITRMSSEPRTRAYVQRRTAEGLSKMEIIRCLKRYVARETYRHLRPPVAD

SEQ ID NO: 343180 - protein, 318 aa, unidentified
MNNQTTTTTTQHTQTLIAIDVAKDSLEVRTDKSAFSLENSPKGFKALLRKVPQKTGLLVVFEATGGYERALAEFLHERKIALSIINPRLLRSFARSEGIKAKTDPIDAEMIYRFARSKALRITPAPTAGQRELSDLLDRRSQLSEFLAREQNRIQKALSKALLASLRRNMKALEKEMALIEKHIRALVDSTPDLKKHSLIITSVKGVGDITAWTLLAQLPEIPTLSRNQLVALAGVAPFNNDSGKFSGKRSIYGGRAKIRRVLFMAARAAAQFNPVIRAYVGGLLARGKPYKCALTAAMRKILIHVQSLLKKCEMSPC

SEQ ID NO: 343181 - protein, 344 aa, unidentified
MQHYAGIDVSLEWSSVCVVDATGQIIREAKVLSEPEALVAFLLELPVSLARIGLEAGPLSQHLHAALVAAGLASILIETRHVKVALSAMTVKTDRNDARGIAHLMRLGWFRPVHAKTLSAQEVRALLTARKQLQTKLIDLEISLRGILRGFGLKVGTVARGGFEGRIRELVAGQSMLERVAEPMLRARSALRTEFASLHRQLLQLARDNQVCRLLMTTPGVGPVTALTYSSAIDDPGRFRRSKDVGALFGLTPRKYHSGEIDRTGRISKVGDATVRTALYEAANVMLSHPVRFSALKAWALRVAARHGMKKAKVALARKLAVVLHRMWVDGTSFRWAAASTAAV

SEQ ID NO: 343182 - protein, 418 aa, unidentified
MNQQNNTQTINVVNPVCCGLDVHKKVILACLIVTDAQGNEHITIREFSTFYNSLIKLRDWLIENDCPIVAMESTGIYWRPIHNILEDYIQVVLVNARHVKNLPGRKTDTSDSCWLAGLLKHGLLKGSFIPPKNIRTWRDLTRTRQKHVQNVGEYKQRTQKLLESANIKIDCVISDLFGASGTGLLNLLADGKEISLEDINQVVHWSVRHKSEELLISIEGHFTEHHVFLLGAHLETIKFHQSQIKAIDERLKSMMTDIEPLIKELDRIPGIDEVAARAILAEIGISLDEFESSDNLCSWSGLCPGNNETAGKRKSGKSSVKKHLLKTIMVEVAWAAIKKKNSYYKEKYHRLKSRRGPKKAIIAIAHKILKVIYNIVKHGCEYQDLGEEYLNKINKQTKIRNLNKQAAALGMKLVPIGS

SEQ ID NO: 343183 - protein, 430 aa, unidentified
MEVIYPKACGVDVHKSFIVAVICDSTSVKPQYLRKRFSTFNNSLIDFRNWLLANDCQNVCMESTGKYYIPVYNALEGYISNVVVANPKWVRCIKGEKDDNKDAKWIADLFKLGIVRSSFIPNKDIRILRELTRYLYKLTNMRTSEKNRFTNALTVGNCKLDMVFSDIFGKTSSAIINTILSQNEYNDEDILKNIDKHCKSSNEDILNSISGISWQDAQKQRMNVIQEHIDYLDKSIKTVREIIDSIIAPYESAINLLCSIPGIDRKSAITIISEIGTDMSQFSSHYRLSSWAGLAPGCNESAGKKKSVKISRAGVYLKPALVEVAHCAVKNKDNAYYTNKFNVLSKRRGKKRAYIAIARKILVAIYHMLSTGEFFNPTDLSKVETSDKDKIKFTKNNFMQSTKQLISLGLTIDDLQTLIQSKISESTPVI

SEQ ID NO: 343184 - protein, 347 aa, unidentified
MAEIRFIGLDIAKDVFHLHGADRAGHPLVRKVLRRAELTRFFATLTPCTVGMEACATAHHWARELTKLGHDCKLIPARYVKAYLKTNKNDLRDAEAICEALQRPTMHFVAMKSVDQQAVLALHRSRELLIEQRTQLGNSIRAQIAEFGVYLRCGSWTLTRQVAAMLAPEDERLPGIVRELIQVLVEQWTQLQGRITDIERRILSWHRGNEESKRLAEVPGIGPITASAMIASLGDARNFKSARHFAAWLGLVPRQQSTGGKPRLGAISKRGDGYLRRLLVHGAQAVLRWHRARPAGRRPWLDGLLLRRPVNVAAVAIAHKNARTIWALLVRGERFTGYRSGPVAAAN

SEQ ID NO: 343185 - protein, 387 aa, unidentified
MAQVNDLSRSLIAFDPISTLVVVVEMSKAHWLVSGAVPGVERRPLKKLEPDAAALLRLIERWRSEATRSGRPIYRIALTYEAGRDGFWLARWLIAHGIEAHVIHSASVAVSREHKRAKTDRLDAAMLMRVFLGWLRGERGHCGMVVVPTMEEEAARRPSREHENLVNERSRITNRMKSGLARLGIRGFKPHLRKAPERLAGLRTAEGTCLPVNVIEEFRRDMARLALVREQINSIEKTRAERLERAPNAGPHAMVRLLARVIGIGIETADMLVREILLRKLRDRRAVARYAGLTGSPDESGLKSREKGLAKVGNARVRRGLIQLAWRFLMFQKDSALARWYRTRTEGPSGARKTTMIVALARKLLIALWRLVTTGEIPDGVELRPAA

SEQ ID NO: 343186 - protein, 398 aa, unidentified
MTRKNTLKSLPTDTDFRVVGLDLAKSDVSVAAIPVDDNTPSLVDRMTYADLLDWAGKISPTLFAMEPCNGYSLLCLQLENLGHEIKVISGWTVSMWINTHLSGQKTDLNDAIALARLAVSDAELTPIRHKSITEIRIQTVQAVRQQLMSQRSKSIVSFKALAQQWGIPCAAGHRNLKKLRESIEAKVDLITRPVANAMLFLLDAVKSLDRQIGQLNQTLQELVMSDERGRLLQSVLGVGTQISARVITVVGNIERFNSPRSLVAYVGVAPRNFITGHKNLTKKKHGNCPDLSHKGQGKISRRGDKLLRSLFIQGAACLYMQFCKDQLPECLLKRWILKQLASQKPYGKLIVSLAAKLIRIVWAVLTYGEKFNIQKAGMTRSMWSEMALETPLNKEVPA

SEQ ID NO: 343187 - protein, 322 aa, unidentified
MGVDVSSQELHAWFRSSDRDGVHQVYENTAEGIIQMINFLGSRGQGSPIVMESTGRYHYLCATMLNENGFYVSVINPLLVKKYQQSRIRKTKTDKIDANILAEVGAKEKELPRFVCSREDIHLRQKISLICSLEKTLQKCSASMSNYEKSLEKTKGELSPDEATVKEIIEQLKKQKDKLEKEVVRLISVQPQHVESFGLLKTIPGVSPFMACLALFFYSFDKGKKSRQWVAYTGMDITVLESGNWKGHGHLAKRGNKYLRKRWFSAAWGAMMHSEEFGVYYKHLKEEGRAHTEALNIIARKLVRITHHIMKTKQPFNPGKAF

SEQ ID NO: 343188 - protein, 370 aa, unidentified
MENIIYIGMDVHKESFSLCALHGTTGEIVREARCASNVSLVKKFVEKLKTKYGEDIKIKAGYEAGCLGYSLHNLLEQNGIDCDILAPTTMYSSSKNKMVKNDRFDAKMIALNLANGTYKEVYVPEEEDVAVKEYIRMLGDFKTSLKKMKQQIKAFLLRHGYVYEGKSSWTIAYMKWLKNLDVQGLLKETLDEYLLQYDVLVDKIERFSLRLEELSHSERYEEPVAKLRCLKGIDTTSAMTVHVEIADFTRFPTAKAFMAYVGLTPSESSSGEKISRSSITKQGNSAVRSMLVECANALVKGTIGFKSKRVKARQKGQRSEVISYADRAVERLQRKYHRMMYQGKPRNVAITAIARELGCFIWGLETGKIH

SEQ ID NO: 343189 - protein, 416 aa, unidentified
MNAVGIDVSSRKSTVAVLRPLGEVVCLPFDVTHDIAVLASLAEKLKAIDGETRVVMEHTGRYYEAVAKALHEAGLFVCAVNPLLIKEYGANSLRRVKTDKADAIKIARYALDNWADLRDFTPMDAIRYDLKTLNRQFQLASKQRTASANNLIALLEQSFPGIRKCFDSPVRSDGTQKWVDFAYSFWHVDCVRKQPFPAFCERYRKWCKLHAYFFKLRNAEKVYALAKSAVVLTPKSKVVKVLVQEAANQLISISRSVEVYRAEMDRLAAMLPEYPVVMAMYGVGKSYGPQLMAEIGDVRRFERKQALVAFAGIDPMPNQSGDKNVRSNKSSKRGSPYLRKTLFNVIRTYLQCAPQDEPVFQFLNRKRAEGKPFYVYMLAAANKFLRRYYAKLRDYFASLDTLQPAAPIPTILKATL

SEQ ID NO: 343190 - protein, 390 aa, unidentified
MACYVFLNEAEPDSYNALILIEAPPGFDLRVIMEVAKKTRRSLMPFYTKRHKFYCGIDLHTRMMYLCVQEQDGNVLVHKNIKAQATPFLDAVEPFMDDVVVGAECTFSWYWLADLCHDMDIPFVLGHALEMKLIHGAKSKNDRIDAFKIASLLRAGMLPQAYVYPGHLRPTRDLLRRRCHLVQLKSEMLTHIQNTNSQYNLSPLPGDVRRPRVRDELDQHFSDPMVRTSMAANIALIDAYDQQIRLMERTVLAQATRHRPYDLALLRTVPGIGKILALTLIYEIDDISRFPSVKKFASYSRLVKGQDISAGKLKGTKGAKMGNVHLKWAFSEAVVCMMGKSEQARRFIARQAKKGSKGKAMSILSHKLGRTIYYMLKRKEPFTMARFFAS

SEQ ID NO: 343191 - protein, 417 aa, unidentified
MELKPIYRRVIGLDVHQAKISACAIIEQSDGTVTIEMREFGGFKRDRRALAEWAKSVNAEVVVMESTGIYWKSPYAALEKVGIVAWVVNARHVKNVPGRKTDVADAQWLATLARSGLLHGSFIPPANIRHLRLIARQRQKLGGTLAAEKNRLHKILADAGIRLGVVVSDIHGQAARAMIKAIIAGKSMAEVLDLAGRLQASRKELFEALQPEELSDAHLFVLTEIMAHIEELEARMGRFEQALLQGLSAWQPQLTLLQTVPGIDTMGAAMLLVEIGVEMQSFGSAERLASWVGICPGNNESAGKRKSGKIRKGNAWVRRLLCEFAQAASRSRCALKDKFAALSIRKGHKKSIVALAHKMLRIVFSILKNNTPYRDRSVDYEALSVQKNAPRWIKMLKKHGFLPTSETTAASSPALAA

SEQ ID NO: 343192 - protein, 343 aa, unidentified
MQTVTTIGFDIAKSVFQVHCVDAAGQVVIRRQLKRRYVLAFFQKLPPCLIGIEACASSHHWSRELQALGHTVRLMPPAYVKPYVKRHKNDATDAEAICEAVTRANMRFVATKTAEQQSCLVLHRTRHLFIRQQTAVINAIRAHLAEFGIVAPVGRHGVEELLNVVADPNDKRVPEIARVCLSALGAQLRKIKEQILGFDRMITAWHRSSETSRRLDDCPGVGPALATALVASVADPKAFRSGRNFSAWIGLVPKQHSSGGKDRFGSISKQGDRYLRGLFVAGALAVIRYAKIHGTKHRPWLAALLARRPTKVAAIALANKIARMAWAMMAKGERYKEPVALAA

SEQ ID NO: 343193 - protein, 362 aa, unidentified
MTTQDKNSITIGLDLGDRRHRFCVLDGNGKVTEEGTLANSRECLTELSSRYPGALMVMEAGCHSPWISRYLEEAGCEVVVSNPRKTRAIYQHERKSDRRDALMLARIARMDRALLYPVRHGSEQAQEDLLRIKLRDSLVRARVGLINAVRFTLKSLGYRITNPSTERFHKVIEGQIPESVKNVIAPSVQAIEELSLRIKVLDREIMTLAHNYTETAWLQQIPGVGPITALYFVLKIGEPARFERVRDVGAFLGLCPRRDQSGESEPQLRISKRGDVYLRRLLVSAAQYILGPFGPPSALREYGLTLAAGGTARAKKRAVVAVARKLSVLLLTLWKNQSAYEAFPGHEDKMRTSDRERLRSIV

SEQ ID NO: 343194 - protein, 338 aa, unidentified
METYAGIDLHSSNNYIGVIDSQARRLYTKRHDNRLDCILRALNPFKKTLAGVVVESTYNWYWVVDGLQDNGYTVHLANPAAIQQYEGLKFTDDKWDALWLANMLRLNILPEGYIYPKEDRAVRDLLRRRMMFVGQRTAQILSLQSMITRNRGLNFSGAVVKNIMDFFVDKLFDSPHLRFTAKKNLAVIRFLDGAIKEIEAEVKSQAKLKKEFEMLLTMTGVGDILGMTIMMEVGDISRFEAVGNYSSYCRCVESKRLSNGKLKVKNNKKNGNKYLSWAYIEAANFSRRFCPMAKKFYQRKLAKSNKVLATKALANKLSKASYFIMRDQVPYDPEKLFK

SEQ ID NO: 343195 - protein, 402 aa, unidentified
MINAVGIDVSKGYSTVAVVNSLGNVTVSPFDVNHTVSELGKLADNLKVLQGETKIVMEATGIYYLPIANALHAAGLKVYAVNPILINEFGNNSIRKRKTDKADARKMGRYAIANWYELPPEYIPDEDIRQILQTISRQYSKYNKVKTMLTNNLISLLDRSFPGLNQLFTSPAREKDGHEKWIDFAARFWHADCVAGLTPKVFAESYRKWCKRMGYYPVGADEIHAFARQCVPAMPKSDNVKRLITTAITQVNAVAETLNATGIEMNRLAKLLPEYEIAIGLYGVGKVLGPQLIAEVGDVLRFPKKSTLVAFAGLEPTDNDSGQFQGKKPISKKGSPHLRKTLFQIMDCLLRTSPADDIVYQLLDRQRAKGKHYYSYMCAGSAKLLRIYYAKVKEHLSKLDDI

SEQ ID NO: 343196 - protein, 341 aa, unidentified
MSVIIGIDPAKGSHAAAAVNGSEEVLAELEVRASRRQSGELLAWAQRFPQRRWAIESANGHGYLLAQQLVATGEYVVDVPSTLSARVRVLDSTRSQKNDANDARSVAIVALRQPNLRVVTEEDHVAVLRMLAKRHKQLAGLKTQAAARLHAVLAALIPGGLAKEMVVRQAAGLLRRIRPASMVEAERKRLAHQHLAEVRRLEKELVASKASLATAVEASGTTLTEIYGVGPVVAGLLIGYSGDIARFATRHHYAAYNGTAPIDASSGSKKRHRLNPRGNRMLNHALHLIAITQLRYPNTEGRIFYERKLAEGKTKKEAIRSLKRRLSDVVYRHLVADQQTR

SEQ ID NO: 343197 - protein, 339 aa, unidentified
MSKLSNPIEAFVFCGVDVSAAMLAVAIQQDDQPLEQREFANTGSGHKALIACLHRRRARARVSLEATGIYSLNLALALDAADEIEVAVLNPKVVNRFAQTLRRSKTDAADAQVLAEYSRRMPFTAWRRPSRNGLALRTISRHLDGLSVEHTREHNRLHAAQNSTATPACVVQDLKRSLASLKRRIARLRRAALELVRSDELLRNRFELMISIPGIAEISALQLLGELAALSEEMSVRQWVAHSGLDPVHQDSGSSVHRPARISRAGNRHLRRALYMPALVAVQHDPHLRAFYELLQSRHKAKLQALVAVARKLLHAIYGVFRSQLPYDGHKLFPALILG

SEQ ID NO: 343198 - protein, 345 aa, unidentified
MKIVGCDLHTRYQQIAMLDDETGELVERRLEHANGEAKQFYESLSGSVRVGIEATGHTRWFERLLAELGHELWVGDAARIRASAVRKQKTDARDAALLLELLLSGRFPRLWRPSSEDRDLRQLLWHRQQLVWMRTSIANQLHALAMGEGLCKKKQLFTKQGRAELEALNLDPWASRRRQELLRMLDQLDVSLKQFDEAVNEQAAQSAEAVRLMTHPGVGPVTSLAFVLMVGPVTRFQRSKQLVSYLGLNPREHSSGGKQKLGSISKQGNPMLRGLLVEAGHTAARLDAELRQDYQRLKLRRGGSVAKVAIARKLAVRMYWMLRRQMNYTQLVRMQGSSRGTLVQQ

SEQ ID NO: 343199 - protein, 342 aa, unidentified
MSIVGGFDVHRRQLTFEYLDMATGELRHGRIAPADRQHLRQWLTRFAGHDGEVEFALEGCTGWRYVVEELCRAGIRAHLAEPADTAALRGRKRHAKTDKTDTRHLRVHLMAGDLPECWIPPEHVLEARATARLYKDLLDERGAWHQRIAATLFHQGAPAVGTVAHAQGRAAVAEVALSAAGRQAVETGLRQIDRLTTELDPLRRQLNLLSRRQPGCRALRATQFGVGPVTSVAIWAELGDVRRFANSADAVRHTGLDITVYSSDTKRSAGHLSRQGPELLRWALYESAKCAARPAAPDHRYYRTARDRRNAGLATLSVARKLTRRCYHTLRELGEEALQPAA

SEQ ID NO: 343200 - protein, 346 aa, unidentified
MGNDTLVAVDIAKSVFQLAVSDRPGKVGRRERLTRDRFLEFFAQLQQAAVIMQACGSAHFWARRIEELGHTVVLLPPQYVRPYVLRNKTDRTDTGAMLEAYRNEQIRAVPIKSVTQQVLGTLHRLRSGWVGERTARINALRGLLRELGFFIPVGRREVLPHAWEIIRDAESGLPDALRPSLAALCEEIVGFSKRIEDIEKQLHALAQQVPAVGRIYSVPGIGILTATALYAFVGDPVRFPSGRHLASFIGLTPREYSSGSRRHLGRISKRGDAYLRTLLIHGARATLWHAKKLEHPDRLRAWALRLEKQSGHNKAAVALANKLARIAWAVSKNDRDFDPAPEAQAA

SEQ ID NO: 343201 - protein, 337 aa, unidentified
MSILHVGIDVSRKNLDVATGHGEAQPVYLGKFTNDQAGFEQLAQALQSAMQNLGTTPIHLTIEPTGGYEQLLARFAIAQGWRVSLPNPLLVRDWARAEGRRSKTDRQDALLLARYGARAHPPEWCPLPASVEQLEALLLRREDLQAMLRQEQNRQLALQARDAYQGPVAQSLDASIATITAALSQIEQAINNQLDQHPDLKQQTKWLRQVPGIGKKNVLFILVLLHRWGTLTQLTGSSKGLTAYVGLDPVAFTSGTSVYKRSGISRKGNKTVRHFLYLGALGGVRGHNALCVFYQRLLARGKAKKLALVAAARKILVWAWAVFRNQTPFDHALSYAR

SEQ ID NO: 343202 - protein, 381 aa, unidentified
MLDQTAHYPVPTVYAAIELSKKSWIVAIVQPAKGQPSIYRIKGGAFSELVMRLRTATPSGERLLVCYEAGYDGFWLARSLQTEKIDCRVLDPASLQVNRRARRVKTDRIDVLMLLRALIAVDRGDRHVCSIVRVPTIEEEDARRSHRERQRLIRERTAHINRIKGLLFGQGIRGVEPRLRRSRIDFSDLRTGEGLPLPARLRAELEREYARLDLVETQLRVTEAERDTADAQDPCIEYKRKMLIQLRGVGPASAAILTREIFGRRFANRRQLGSYLGLTPSAYDSGSTTRCQGISKAGNSFARRVMIEVAWLWRKYQPNSALAKWYEERAAGQSPRIRRIMLVALARKLIVALWRYVEIGLVPAGAVCCANNGAALEAAAA

SEQ ID NO: 343203 - protein, 343 aa, unidentified
MAAQITGGVDTHLDVHVVAALDELGALVGVESFPTTPAGYRALLGWLGSHGEVVLVGVEGTGSYGAGLARHLQREGVAVVEVDRPNRQRRRRQGKSDPHDAVTAARAAQAGDALGAAKLRDGNVEAIRVLRVVRCGAKRDRTRAINQMRSLVSTAPDDLRQQLRGLTITKLVRRAAAFRPGGRSDVTSATRLALRTLARRVLELDTEVAALDKVLEPLVAATAPELVAQVGVGTDTAGALLVAAGENTTRLRNERSFARLCGAAPLDASSGKQHRHRLSRAGDRQANSALWRIVISRLSHDPNTRRYLQRRLTDGKTKTEAIRCLKRYVARELYYRLPQEPLA

SEQ ID NO: 343204 - protein, 311 aa, unidentified
MGGVNAAIEVGKHQLDIALGSNGELFSEPNQARAITRLAKRLAELDCTRVLIEGGSYQNVLVAALRAAELPVVIINPRRVREFAKSIGQLAKTDHIDARVLALYGERIEPPIRELPDEQNQALRGLWVRREQLIEMLVMEENRLEHAPKTLHRSLRAHIDYLRKQIKQADNNLDREVRNSALWDKYELLSSVPGVGPVLSVALLSDLPELGRLNRREIAALAGVAPFNCDSGTLRGQRKIQGGRKRLRRVLYSATVASVRCNPVLRPFYQRLRASGKPAKVALVAAMHKLLLILNAMLKTKTVWRPPCPAA

SEQ ID NO: 343205 - protein, 412 aa, unidentified
MDVYCGIDWAEDHHDVALAGGDGQLLARRRISDDAAGLAALLDLLAEHGDSPEAPVPVAIETPRGLLVACLRATGRQVYPVNPMAVARYRDRHSVSGRKSDHGDSVVLAHVLRTDMDMHRPLPADSELAQAIAVLARAQQDAVWDRTTAHNKLRSHLREYYPAFLAAYATAKGGIMRPDARAVLAAAPTPADAATLTLTQLRGLLKKAGRSRGIDTEAARLREAFRAPQMRQLPLVEAAMGRQALALLGQLDAACAAAADLEQAVTESFNLHPDAGIITSFPGLGALTGARVLAEIGDDRSRFADAKGLKAYAGAAPVTRASGKTRSVTHRKIKNNRLAAAGYTWAFSALTASPGARAHYDRRKDAGDRHAAAQRNLFGRLLGCLHHCLLTCQHYDEATAFPAATKKISQAA

SEQ ID NO: 343206 - protein, 415 aa, unidentified
MNAVYSLGVDVAKRNIHFHLLDPHGQRRFSGHCPATAAGWAALLDQLTPVGAPGTITVVLETTGLLHVPWAEAFTAHGYPVLAVNALVAHRVQPLRNALRANKTDKLDAAGLAELGRGHAAELGRFRYQSEPARFGLQRLVTVRQQLRAQLTNLRKAYGSLLECLFPELSPLLQTKIHGRRLRALLAVAPTPAALGARPVRELQRAVGAPAAAVLAAARDSLGSAALAAASAPALQAVLTAITNLEQQLATLEVALQAQTLQVVSAAQLQLVRSVPGIGSKTGIQIAAYLPPRFWQREYWQTQPSRRRAVAHLLAFMGAEPRVRESGQWKGQDRMSKRGCEPLRTALFQASFCGQQRDVELATLYAHHKTQGKPHKVCISHLIRRQTQRLIGVLQSGQAWSPLSPPRESTHALAA

SEQ ID NO: 343207 - protein, 407 aa, unidentified
MGVDLHKRTNVAVVVDSYGDPLGKAMKFENSPAAFPAWVAQVKERAGGKGIIFGLEDVHGLGRNLAGYLLQVGYTVKFTNAYLTKAERDSVNKTDRQDALAVARITAKQTLRLPDADVDELQWALIATVQHRRGLVEEQTRAKNRLHALLAQSYPLYEGFFGEPFGKTALAFWERHPSPSTLARVTVAELGGFLREQSHYALGEKQAQAILGAISGMDRPRGYQTERDRLVKLLVRELRHLGELIKEAEAQMGELVAQTDYHLTDIPGIDVVMAAELIALIGDVTRFRKAEHFLAYTGIAPVVMGTGGNENRFRSKFGRRELLALFHRIASTQLVVHRRTGVPRNPEAKAYFEKHLGEQAKLPKEKQDRKVRKKALLSLMRQQAIRFYRLMKAQKYAAKERRGPGAA

SEQ ID NO: 343208 - protein, 341 aa, unidentified
MIYIGIDVAKDKHDCFITNSEGEVLFNAFTIPNNADGFHDLFQKISSLTNDFSNVKVGLEATGHYNYNLLGFLIDKGLPTFVINPLHTNLFRKSLSLRQTKTDKVDAHTIALMMMSGVNLQSYSNTSYHNEELKSLTRYRFDKVQERAKLKTSISRLVNILFPELEKLVPSLHMVSIYALLAEFPSSAQIASCHLTRLTNLLANASKGHYNKEKAIEIRNAAKHSIGSNMPAKSLELKHTIRLIQELTSEIDEIECSIKSIMDEIRSPILSIPGINYRMGAMIIAEIGDFNRFSSPDKILAYAGLSPSTYQSGQLDGCYSHMEKRGSRFLGYGLFNATKFV

SEQ ID NO: 343209 - protein, 368 aa, unidentified
MNTVYCTTIGADVSDRTTKICVMSKESGKPKIVRETTIPTTPDGFRAFLEGQDKSAPLVFETGTHCRWIDKVGTGLGFKTIVANPARLRMITESNTKNDKNDARTLARMALADVELLHPVRLRDDEHQKMVNLHEIRDQLVKERTAEVLQIRAIAKSMGFRIPDCSAECFHNIAKNSIPKELGDIVWPLMKELKSKAVTIKTVEKQMRKLAKSDVFKAQVERLMEIPNVGFITATCFVAVTGGDMDKFDRPRDIGPWLGVTPKQDQSGDIDRQCHITKAGSKMLRWKLTECAQRVLQKNSADMDLKVKGLRIRARGGKIAKGKSITAVARGLAVLMVAMLKKPDVPYVPLSEDKAKELAQIRAAMAAA

SEQ ID NO: 343210 - protein, 374 aa, unidentified
MSVSACYEGQQFVGIDLHRRRTVLVRMTAAGERLGAMVRFPSTPEALRREMVAALSPAGPAPQVVVEATYGWYWAVETLQQLGARVHLAHPLGIKGFTNRRVKNDERDAADLADLLRMGRLPEAHIAPEPVRALRELVRHRAKLARWRSAVKNSIHAVLAKRGVSVPMSDLFGAEGTALLDALCRPARGPAGGSRLEPEYAARVGSLRGLLATLEGEIAEFDRRIAAALAGHPGYRTLQQISGIGPVFAAVFIAEIGDVSRFATADKLTCWAGLTPRHRESDTTVHRGRVTKQGSKLVRWAAVEAVQRSSEPAVAAIRTRIAERRGRPGQRTGRNIAKVAAARVLLKLVYYGLRDGQIRTLDRGPASPGVMNAA

SEQ ID NO: 343211 - protein, 363 aa, unidentified
MLRVAKTLVTNKEETSMRFYTQQHPFYCGIDLHARTMYLCILDQAGETLLHRNMTATPEALLKAIAPYRDQIVLAAECMFTWYWLADLCAEQGIPFVLGHALYMKAIHGGKAKNDKIDAHKIAVLLRGGMLPQAYVYPAEMRATRDLLRRRMHLARKRGELLAHVQNTNSQYNLPAIGKKIAYKTNRDGVAERFADPAVQKSIEVDLALITYYDELLRDVELTIVKTAKHHDANTLYLLQTVPGIGKILSLVLLYEIHQIDRFPRVQDFASYCRLVKCAKESAGKRSGTSGTKIGNAHLKWAFSEAAVLFLRDNPAGQKFLTRLEKKHSKGKALTILAHKLARAVYYMLKQKTAFDISKFLNG

SEQ ID NO: 343212 - protein, 329 aa, unidentified
MKHYLGVDLHRTQFTVCTRLESGRTYLRQWPIKELKLFAAQLRKENEIAVEATGNTRLFHDAVVERVTHAAVVNPSQFKVISQSVKKTDRNDAELLALYLAKGLLPEVRMKERKQREMSHLAQTRDLLVKQRSALKAKIKNLLSAEGVNLKRESLSSNKALQRVLTLPLSPLMRAELRVLVGQIRSLNGSIAELEEMIEEEGPKLAGHENLMSIKGIGPVSAAVLLSVIGDIRDFSDPGKLAAYLGLVPRVSNSNETERSGHITKQGNKLARWACRPIRCCAPRVCTRRSRTGRGGRSTMLRRWRTGRAGFTPSLLRRQCRKTGCRRTS

SEQ ID NO: 343213 - protein, 330 aa, unidentified
MKTWNVILGVDVSKLTLDICCAARGLHVKIDNSSQGFTALKKWCKTHGIKMRETLMVMEYTGGYEYRFLQFCESLSIPYCRIPGLEIKRSLGMTRGKSDQIDAFRIGQYGEEKSKRLEPSKPLDKNVLKLKQLLSFRKRLVRERAGMESTLKERLHMYGVQEDDLITRIAGEKMEANKTNIRQVEQEIAGLIKSTEAMWKNYQIITSIKGIGPINAWMTIAYTENFTSFAKARQYAVYVGVVPFEHSSGTSVRGKKKVSHMAHKELKQELNQAARTAVIHNKELKAYAERKYKNKHYYLVLNNVKFKLILLMFSLVERGEKYVENYKRAA

SEQ ID NO: 343214 - protein, 455 aa, unidentified
MSRSKSAKAGDLPMVVPGAAAIDIGSTMHMAAVNPDADDRPVRAFGTFTGDLHVMACWFKTCGVTSVAMESTGVYWIPAFEVLEEHGFQVILVNARYAKNVPGRKTDVNDAAWLQRLHSYGLLRGSFRPKAEVATLRAYMRQRERLIEYSASHIQHMQKALMEMNVQLHHVVSDITGATGMRIIRAIADGERNPVTLAEMRNVRCHATVETICSALTGNWREEHIFALCQSLALFDFYQSKIVECDRKLEIALRDLEDGNGHDTARLPKARTKTGQVNAPDFEVRSALYRVLGVDLTQIHGIGPSLALKLVGECGTDLSAWPSSKHFTSWLCLAPGNKISGGKLLSSKTRRSSSRAAALLRLAATTIGRTDTALGAFYRRLSARAGKAKAVTATARKLAVLFYNAVRHGMAYHDPGATQYEERYRSRVIGNLQRRAKAFGFVLQELPEEPEMAVS

SEQ ID NO: 343215 - protein, 371 aa, unidentified
MLHSDHTIGCDAHKHFSLFVVLGGSGDLVQRTRVGHVPGAIGAFLSQFPEGTPVALETVANWYWIVDEIEEAGCIPLLAHAAKAKVMMGNVHKTDKLDAQGLATLLYLGKLPSVWIPPAEVRDERELPRTRMTFAKHRTTVKNRIHSTLAKYALSLDTASDIFAPKWRPELEATLQQLPDETGRCVLQQLQILDALTDHIKQLEDRILDRIQTTPTIQLVQTVPGPAKVLAIVIDREVGSIDRFSADKHFTSYCGLVPKLSASAGRAHYGRMVRQCNTYLKWAFIEAPNVIVAHRDHPNWRRTYVVHLYESTRRRKGHSVAVGATARYLAESTYWVLKKSEPYREPPHWAPAGKRAPVSLSQEQARAQHGS

SEQ ID NO: 343216 - protein, 389 aa, unidentified
MLEVNTNTQHRAKIKEAGMEHNNIFIGMDVHKKSIDIAIAYEGRDGQVVHYGKIDGTLAALDKVVRKLVSKGGCLHFAYEAGPCGYQIYRYLTAKGFDCMVVAPSMIPKQSGSRIKNDRRDALMLARLHRSGDLTAVYVPAAEDEAMRDLTRAREDAKEDEKKSKQRLSAFLLRSGYRYSGRTPWTLAHRRWLADIKMPHASQQIVLQEYIDAYEQCKLRVERITEQIRTLLPQWRMHPVVQALQSLRGVSLIVAATTVAEIGSFKRFGHPEQLMQYLGLMPSEHSSGQRIKRGPITKTGNRHVRRMLTEASWAYRLRARISRPLLKRQEDLPQSIRDIAWKAQVRLCARYRHFWAKGKAKQVIITIIARELCGFIWAIAVEAESAITN

SEQ ID NO: 343217 - protein, 352 aa, unidentified
MNKLKYIGMDIHKAMTVIAVLDSTGKVLTEAIIETKDSTILDFFKSQRGTLHVGFEEGTQAAWFYDLLQPRVANVVVCNPRKIVRQGNKDDKVDAKLLAELLRTGALNPIYHGEKSTRAVKDLTRSYLSIVADGTRIKNRLKSLFRGRGIECRGAGVYSPDERKDWLAKLDSAAVCSRALRLWEQLDLVERLSEEAAKELVAEARKHAAIKILRTVPGIGPIRAAVILGVANTPHRFRTKRQFWAYCGLAVVTETSAQYEMVNGRVRKSNKKPLLRGLNDNYNRALKGVFKSAAKTVAAGLWKSRFEAMVANGTPESLARVTLARKIAAITLAVWKKGERYDHRKLKKMHAA

SEQ ID NO: 343218 - protein, 334 aa, unidentified
MKQILGIDIASETFVGSVVTNEPTPQQKSEATTFPNTSSGFSACAQWLDSLGVVPSETLVVVEATGVYWEALALFFHHHHFTMSVANPAQVKYYAQSVLQRGKTDELDAQLLARFGATMNPRTWEPPSAFSEELQVLMRQRDAYLGMLTQERNRLHSYERSGIPPQHAITVSKKTITFLEQQIKELETNFKNMINTDERWKHMLELLPSIPSIGLVTAGILLTETQALEQFHSSRQLTAFAGIAPAPYTSGKSVYKRSRISKIGNSTIRKAFYMAAVSSLRFNPIMKNFFDRLVANGKTKKVALVAVARKLLILCFAICKSNNPFQPNYLHLNS

SEQ ID NO: 343219 - protein, 424 aa, unidentified
MKVTYQTCCGVDVHKSFLVATIVKTTGGIEPSYQKKRFSTFNNSILEFKQWLLDNHCHDVCMESTGKYWVPVFNLLEDKINVVIANPKWVKAVKGNKDDTKDSKWIGDLFRLGLVKGSYIPCKKVRILREYTRYRYKLVSCRSSEKNRYQNALTVCNVALDSIVSDIFGKSSTSIIDYLLEQSGTSINHEEIASKLLRSLKSKEDAVIESVEGYQMTDAQKYRMRLVRAHMDYITAEINDVDKMIENMISSNPDFENAVQFLCTIPGVKRDSAITIISEIGTDMSQFSSSKRLCCWAGLTPGSNESAGKKKSVRITRAGVYLKPALVQCAHAAVKSDKSPYYKKKYESLVKRRGKKRAIIAIARMILTAIYQMLSTGEQWNPGDLYKIDMPVALVEKQKAKAIKQAKKLLQREGLLPPDEPLAS

SEQ ID NO: 343220 - protein, 416 aa, unidentified
MTDQKQWYAGVDWASQSHHVFLTDGDGRKIGEKVFRHGGEGLAEMAAWLTATSGAPEAGRIQVAIEVPHGPVVETLIERGFTVHAINPKQMDRFRDRFTLAGAKDDSRDAEVMASALRTDTRCFRPLAAADPVVIELREWSRMAEGLGAERNRLTNRMREQLWRYFPALLELENDLGAEWLLDLWETVPTPAKAARIREATIAKLLKRHRIRRFDAAHVLAALRKPPLEVAAGTTEAASAHIDMLVARIRLVNRQLKQAHHQLDALTARLIPTEEAGPGQTKQHDVEILASLPGVGRIVLATLLAEAFDALQRRDYAALRSLTGTAPVTKRSGKSCIVVRRQACHDRLANAMYHWARVAIQHDTSSRSKYAALRSRGHSHGRALRSVADRLLNVACAMLKAGTTFDPSLATQKTSC

SEQ ID NO: 343221 - protein, 370 aa, unidentified
MEKRSMFVGLDVHKESIDISLANDGRDGEVRHYGVIAGDVEAVAKVVRALRAPTRRLRFVYEAGPCGFGIHRYLTAQGEDCVVVNPSSMPKRSGDRIKTDRRDGEALARLHRAGELTAIYIPTADDEALRDLVRAREDAVGLSTQAKHRLKAFLLRQGRRYPGRAGWTQPYRRWIADLSFPLAPQHIALQEYRDTIDETARRVERLTDQLRQLTPAWRWAPVVNALQALRGVSFVTAVGLVAEVGDIRRFTHPRQLMAYLGLVPSEHSSGPSVRRGGLTKAGNPHARRLLAEAAWAYQGAPRVGRRMLDRQEALPKSICDIAWKAQLRLTSRFRKLVARGKAKPKVATAIARELTGFIWAIAREVPAPPA

SEQ ID NO: 343222 - protein, 388 aa, unidentified
MQTVADRPEAPTAIRTDLGAIFVSLELSRSRWLITSLSPGGGEKMSKQVVRGGDVAALLERFARLREKARARTGKVFPFVVIQEAGLDGFWIDRALQNEGIESHVVDPASIATSRRRRRAKTDGIDGEALVRALLAYKRGEPRVCAMVKAPTPEEEDRRRLCRERKVLIGERVRHVNRVKGLLFAQGISGYQPLRHDRRERLDTLQTGDGRLLPDHLKAQVRRELDRLELLLEQIKAVEAERDVLLAVQQGAAPAPAAMLLNIKGIGPEFAAILWSEGLFRHFDNRRQVASYAGLAPTPWQSGSVDREQGVSKAGNPRLRTTLIQLAWLWLRNQPQSALALWFKERVNRNGGRLKKTTIVALARKLLVALWKYVTAGVVIEGAIVKSA

SEQ ID NO: 343223 - protein, 416 aa, unidentified
MLEHTRRLFAGIDWGTETHHVCVVNPDAQIVEDRKVPHSASGLAEFVRWLSAMRQDSAASVVVAIEVPHGAVVEVLLEHGFEVFSINPKQLDRFRDRYFPSGAKDDGRDAFVLADSLRTDQHCFRAVCVSDPRIIRLRELTRLDEELNFCFQRHSAQLRQQLQRYFPHVLELSRTADEPWIWALLELAPTPAKAAKLTVKRIEKLLCQCKIRRIEAAQVAAALRGPMFSLSEGTVEAAGDHVLMLLPHLRLLHQQRLAVAARTERLLDELSITKESQPPSDVQVLLSLPGVGRIVTATLLAEASHLIAERDYHALRAHAGVAPVTRQSGKRTAVLMRYGCNVRLRNALYHWSRVSMQNDPRSREHYHRLRAKGHSHGRALRGLADRLLALLFAMLKSQTLFDPAHRRAAISSANSA

SEQ ID NO: 343224 - protein, 348 aa, unidentified
MSMLAELVEVVIGVDTHKDTHTAAVLDARTGGVLARATVAADPDGYAELVALAEQHSGLRAWAMEGTGGYGAGLARHLADSNELVVELDRPKRPARRAGAKSDPIDATRAAREALGRDQLAQPRAAGQRAALSVRLAARRSAVQATTDAQRQLHALVVAAPDVLRGRLRGLTTHQLVTACGRLRQRSGWDSETTATAASLRTLARRIQLLDREIAEHTRALTTLVRAWRPDLLHQHGVGPIVAANVLCAWSHPGRCRSDAAFAMLGGAAPIPASSGQTVRHRLNRSGDRHLNQALHLIVLTRLAHDPATRAYAAHRRAQGKTNREIKRCLVRYVARQLYRLLETDPTH

SEQ ID NO: 343225 - protein, 314 aa, unidentified
MKKCTLFIGLDDSKDTIEVAVAEGVPGGEVRDFGSVPNTPESLAKLVRRLGRPKDLFFAYEAGPCGYGTYRTLLGLGASCLVAAPSKTPRRPGERIKNDRRDARTLAKLHRASELTPIWVPDAPTEAMRDLTRAREDAKYAQTRARQRLFAFLLRHGRRYPGRTTWSAPHFRWLRTQSFDHPAQQICMEEYLLAIEEATNRVARLDQQIEQLVPQWTMRPVVRALTAHRGVNLLAASTLIAELGDLTRFDEPRTLMAFVGLVPSLTASGLERRTGRITKVNPYQCAHRPSLVGRPPMEFVHRTAVWLAAGHRTS

SEQ ID NO: 343226 - protein, 349 aa, unidentified
MSILLLTRTVAWDLKPVSTRLGERAMKSKSSEVFIGIDVCKDRLDIANDSNSEVWSESNNDVGILLLVERLSSLKPCLVVMEATGGLETLLYSSLVASDIPAVVINPRQVRDFAKALGKLAKTDAIDAWVLARFGASMRPEVRPIKDEQTRELSSLVTRRRQLVGMRTAEKTRLKQADKWTRKDIKSLIKVFDKRLSKLEKEIANNVKNTPGWKEKDKIITSVPGAGPNLSSYLLANLPELGKLNRREIATLVGVAPLNRDSGKFRGTRIVWGGRAQVRSALYMSTLSASQCNPNIKLFYRRLIEKGKKPKVALTACMRKLLTILNTMVKNNTTWDQSYSINLDFNHGC

SEQ ID NO: 343227 - protein, 429 aa, unidentified
MNEEDLTRIKEYRQIRKEIRRSDKYLVVGIDVGKEKHYAYYGTSNGKTLQRRLVFWNTFSDIEMMMDHANAIKEGNGLEKVVYGMEPTANYHKPLAEYLIKSGCNVVQVSGVSVARNRELLDGRWDKHDSKCSANVADLISQGKCQYYDYPSIEIRDLRNLLSLKRLLRKQEHRMRVRIRNNLIAQYFPEFDSQFAKGCSESLAVVKWCIRPKNINLMEYEEFEDLVAPRVRTRAQADRIKSIWLDANESIGCEAGEVLQFGARLMVEDLQNIKGSIKAVDEQIANICREFPEYHYLLTIPGFGPDVSSKMLGAIGNPFRFDNGKKVIKLVGYDLSASRTGMTADRAIPRISKRGNAHLRYALYQAALVASTRNKYFKRYYANQLRGRERETGIKTRMKVKLAAKMLIIAWTLMKKKEPFDPAYLNIEY

SEQ ID NO: 343228 - protein, 337 aa, unidentified
MKVCLIGIDLAKNTLQVCGVNQAGKPIFNKALKRNKLLPFLLNYPDAIVAMEACSGSNYWGRELEKLGIKVRLIPPIHVKPFVKGNKNDRNDAFAITEAAVRPSMYFVKPRSLEQTESSMLHKVRSRWVSQKTRLTNQLRGLLNEYGIVIAPGDKALKQTLPEILEDGENNLSSGIRHLIDNIRQEWLEMEARLSEVDSLMRSQVKSDEDCRRLMKIKGVSTITATAIKAFAGDGKHFKNGRHFSSNLGLVPREHSSGGKQKLSGITKRGNQYIRRLLIQGAWSVLRYAKQSDDDLSNWAEKVMERRGKHKAVVAVANKLARIIWSMLVNKTEYKKT

SEQ ID NO: 343229 - protein, 347 aa, unidentified
MRYLGVDHHKRYSHMTVLDEEGGTVKTGVVPNRSQDVEEFLEGSREGLKAVIEAGRASYTMVDVLKELGAEVLMAHPWQIKAIAQAKIKTDKRDSKMLAHLLRADLIPAVYQREAANRSRQRILRHRMAYVRMETQIKNRIRALLAQQKEEIREMVEMEERLFGVKGMAMLKELRLPEKDQEMLDALLMTYGHLGRRIQESDELVKEIYQSDEQARLICTIPGFGKFLSVLVVTEIADIERFASAGKLHSYAGVIPSTHASGEKSYHGRLIHQGDKWLRWAVVEAVWPAVRSDFDMRVLYQKLAARKPTNSAKIAVARRLLTIIYRVLKEKRAFIDYKREAHRLPSA

SEQ ID NO: 343230 - protein, 324 aa, unidentified
MKLYLGIDMAKHDFASAIESSNGSIKRSSKKLGNNKRGWNEIKSWTVREKSRCKADTVHMGVESTGGYETEMVEWIRTHTDFEISVLNPIQVKRFIQSQLIRTKNDSVDARMIARYMATHKPSPTPVLDEGIRELRALTRHLDHLIRKRADEMTYLESAKTPVIKSSVKQMIKSFDKQIEKVKKQITDHLDNHPDLKKNKELLTSIPGIGDLTAGILLSEINGSLEPKKQVAHAGLAPMERQSGMSKGKSRLCKTGNRRLRTALFMPSLSAIRYNPVISRFYMKLISNGKPKMVAVAACMRRLLHIVIGVLKNQILFDPDYEGV

SEQ ID NO: 343231 - protein, 342 aa, unidentified
MGEVSIIGVDLAKNVFQVHGAAADGSVLFRKKLSRPQFARFMADQPPCLVAMEACASAHHWAREMSRYGHEVRLIAPHYVKPFLKRQKNDAADAEAIVEAALRPTMRFVEPKSADQQARAVAFRTREQLVKQRTEAVNALRSHLYEFGHVAPEGIGYLPRLAKVIDEPGTDVPELAREICRMLLEQIAQLTARIDALKARIAAMSQEADLPRQLQTMPGVGPITALAVETFAPPMDQFRRGRDFAAWLGLVPRQHSSGGKQKLGKTSKMGQRDIRRLLVIGATAVIRWASRRGAPKGSWLARMLDRKPVPIVAIALANKMARGIWAMLTRGESYRGPVLIGA

SEQ ID NO: 343232 - protein, 309 aa, unidentified
MEHFVGIDVSKDRLDVHLRPGGESFAVARDGEALAALVERLRALAPRLVVMEATGGYETVVASALGAAHLPLAVVNPRQIRAFARATGRLAKTDRLDAAAIAHFAAAVRPAARPIAKPEALALGELVARRRQVIAMIVAEGNRRRMASQHRVIRAIERHIALLQAELSELDGDIDGAIRNSPAWQADADLLASVSGIGPATLRTLIAELPELGKLDRRKIAALVGIAPINRDSGTLRGRRTIAGGRAAVRTALYMPTIVASRTNPVIAAYYQKLRAAGKSAKQALIACMRKLLVILNAILRDHKPWQPA

SEQ ID NO: 343233 - protein, 343 aa, unidentified
MEHFAGLDVSVKETSVCIVDDTGRIVREVKIASEPDALLQELTSLADHFKRIGLEAGPLSQWLFSALAEAGLPVICVETRHMKAMLKAQINKTDRNDARGIAQMMRAGLYRPVHVKTLRSQKLRMLLTHRKLLQSNALAIENDLRATLRNFGLKVGVAGKVKFEARIKELVENLPDLAVLVEPLLIVRRTLREQIGVLQRRLLAIVRDDDVCRRLMTVPGVGPVVALTYRVTVDVPARFRKSKAVGAVFGLTPSKHQSGESSRTGGISRCGDEMMRVMLYEAAQVMLVRSVKWSWLKAWAMQLARRRGMKKAIVALARRLAVILHRIWVDGTEFRWTQETAAA

SEQ ID NO: 343234 - protein, 389 aa, unidentified
MLFRSIDISKYKHDCCIISAADQQIVSKFTVKNDKDGFEHLLTTLNSLSNPEDIKIGFESTAHYALNLELFLENAHHSFMEVNPVLIKEYKKSTTLRRTKTDSVDCESIARWLMTVEYKPHSKGFYHSYSLKSLTRLRDRLIRQRSFYLVKITNVLDHTFPEFKPFFNERLSKTAIYLLENYGSAEKMAHMNSASYDKLRCASRGKFSIQQFLRLKELAANTVGVNNSIFDIELNSLLTLYNSLCKEIKTLEAEITKLIEEVHPHYMSIPGIGPISAAVIYAEYGDISNFSNPGQMLAFAGIEPGINDSGTESHGGRMVKHGSSQLRYVLLNACLPLIRFDITFATYYAKKRAEGKKHRVAITHVAKKLIRVIYALERQDVDFNVQKLR

SEQ ID NO: 343235 - protein, 492 aa, unidentified
MKPSRKSPSVYRNQNAFIRAVFDRAGDTRKVLCVALDFAKAKHVALICDGNGDILKNPFPVRNDVDGVAFLCEQIEGTARRRKIPKDCIFLGGEDDPTYVANFTAALRSKGYLVVSVNAYEAKESRENLLASTDNLDLLGIAKTLLSRRARDPGRASSNNPAYQHIRQLSRCRSSLVRQQTAASNRIHTLVDELFPGFLCDAKSGLTAFGEGSLSLMKERFSAPEIGRRKPSSLTKLLHRHGVQHPEEAAAKILALARNALPPEPHRIVTLQRALSATIDLYECLADNAAQLRTEAALTLVTTPYAMLTSIPGIGFVLAAGAAGELGCPKPLPSTDSLCAYSGIVPRTFQSGGPDSPPVQGHASPRCNRILKNWVIQSVQKIHLYGPAELKDRITRWNSNGQRGTSAGARRYLRLLRSLIHNEIPYLAAQGRHRNSTPQDIAAAAMATWRVLQNKWRQIPGGLDLIIDEAYPIGFWRRVLKETHGVDLPARP

SEQ ID NO: 343236 - protein, 364 aa, unidentified
MKRKVYVGMDVHKETIRIANLTNNTKEIVKEQQIKHNEVQIKKFVNKLKSEWNEIHSCYEAGVTGYPLYRYLKSLGVNCILVAPGKIPRQSSDKIKTDKRDAIKLAKLLRSGELESIHVPSEEDEAVRDYLRSRDSLRLDLGRNRQRLMKFLLRKGITYSKTKYWTMSHNKWLNNLQFNNEILQETFNDYYSRVRVQEENLKAMDKRIQEIAESEPYREKVGILRCFRGVDYLTAMFLLCEVCDFKRFKTAGSFMSFLGLVPGEYSSGSKRKQTGITKTGSPRLRRILTEAAWQHRFPGTGSKTVTARRSGQPALVVALAEKASLRLHKKFRNLQQRGKTPQVIITAVSRELSGFLWAAMNLTT

SEQ ID NO: 343237 - protein, 321 aa, unidentified
MTYVGIDVSKLTFVVAYSSAKTSKTKTFKNTAKGIREFIKTISVDEHHCVMEATGNYSTLLVYMLSEFGFTVSLENPLKIKNFSRVMLSVIKSDEIDARLIALYGEKMQPSPYRMRSDSILILKQKRTVLRQLKKQLVATSNLKGSMEVLPIYDSKCKKTIEKTIAFLEKQIKYMEGELASLANDEFKRQMDLLTSIKGIGVTLAAALIVATAGFTYFDNAKQLTRYLGLSPTYQQSGTSVNFKGHINRNGDPILRSQLYVAAFSSLRCNTECKACFDRLRSKGKPGKVAVVAVANKLVRQAFAVVTQDKPYVDGFISVKP

SEQ ID NO: 343238 - protein, 340 aa, unidentified
MSEITTIGLDLAKHVFQVHGIDAQGTTVLRKRLRRGQVLAFFSRIPRCVVGLEACATAHYWGRELGALGHEVRLMPAQYVKAYIKRNKHDAADAEAICEAVQRPTMRFVPVKTAEQQATALLHRGREQLVRQRTMLVNALRAHLAEFGIVAAQGLRNVGELIAIVRDDGDTRLPDVARQVLQVLANQIEQIQTAVAALERQLLAWHKTNPVSQRLASIPGIGPIIATAIATTVADPKVFRSGREFAAWLGLVPRQNSTGGKTRLGGITKRGNRYLRRLLINGASANLLRSKATKADPWVIGLRRRRPPLVVAVALANKTARIAWAVMLREKEYQPRAVAA

SEQ ID NO: 343239 - protein, 325 aa, unidentified
MIFFGIDISKLTFDVTVLIESKSKHKKFDNNSQGFLGFNKWIKSFNSDSYLCMEATGVYSTHLASFLVKKKYKTIVSNPYKIKNYARMKMNRNKTDKADSMCIAQYCKNLYRENEIESQIYVPKSKYFQRLQALVTRLEQVKLLKVQEVNHLESVLDKVSIKFIKQTIKQLEKQIIAVKSSIVKCVNQDLILKKQVNLLITIDGIGEITAWSILAYLGDISLFATSGQVTSFAGINPFVEDSGTSLKTSRLSKMGHKRLRKSLYMPAITAKKHNPVLIEFYDRLLAKGKPKKVAICAVMRKLLVIAYGVLKSETAFDPNYKVRRT

SEQ ID NO: 343240 - protein, 411 aa, unidentified
MERVYERCCGLDVHKGSVTACVHVPRREGGRGELIESFTTMTADLLALRDWLQGLGVTHVAMEATGVYWKPVWYVLEDDFELLLCNAGHVKNVPGRKTDVSDAQWLCQLLEHGLLRSSFVPPKPIRELRDLTRYRKTLIRERQREANRLHKVLEDAGIKLACVASDVLGVSGRAMIEALVAGEGDPSVLAELARGRLRAKLPALQRALEGRFAAHHALLCSHILAHLDYLDEAVESLSEEIDKRTRPFARELEQLDTITGVGKRAAESILAELGTDMSRFPSHRHCARWARLSPGNDESAGKRRSGKTGQGNPWLREILIECARAAARSKDTYLKAQYLHLRRRRGDSKAIVAVAHSILVSAYHILKNGEPYRDLGFDHFQRHEPQDQIVRRLTRQLEQLGHRVTLEPLAV

SEQ ID NO: 343241 - protein, 544 aa, unidentified
MKYGHLSPEPSRTDMILTANVTISWTLYKIITGGYTPNYDGEKNKYLLVRYKKQPPYNKISYQTNQRYEEVIMYEEERIRHARYCQLRREIRGSEEYLIVGIDIAKDKHHAFFGTARGKVLLKRLVFHNTKEGIAKLLSQVEALKIRHNLPKVVFGIEPTGNYHKALGDHLVKNGHLVVLVSGAAAKKNREIMDGRWDKNDTKDAAIIADLISQGRCLFYEYPPQGIRDLRDFLSLRRRFKKEEHRLRLRIRNNLVTKHFPEFDRFFGENDSESLSIVKWCLDPQEIHAMDFDKFFLMVTSRRRSLAQERRLRAIHFTANDSIGCKMGAAGGFESGTLVDQIKGVRAVIKDIESHMEKICREFPEYEYLLSIPGFGPYVSSVVLASIGNPWRFQNASQVIRLAGYDLSANRSGKSSDKAIPEISKKGNADLRYALYQAALVGSTKNRDVMEYFTRKLKGRSRENGIGTKMRVKLAVKLLVIAWTLMKKKEPFNPEYLKDSCLKKQGGVSHLLEAKRAEAMVRSRASASSSRRDRRPLIVNRSAG

SEQ ID NO: 343242 - protein, 311 aa, unidentified
MESETIFIGIDVSKDHLDVAGFPLKLTWQFTNTALGISKLLEKLTKLSPALIVMEPTGGLEAPVAAELAAAGLNVAVVNARQIRDYAKATGKLAKTDRLDALVIAQFAAAIKPAPRELPDEQADEIKETVSRRRQIIEMITAEKNRLAIARKFLKPQILEHIQFLKKDLQDIDNELRKQIEASPMWREKDNLLKTIPGVGNVLSATLLAELPELGKLNRRQIAALVGVAPYNRDSGMMRGKRSVWGGRSHIRAALYMATLVATRHNCIIRELYQRLLVHGKAKKVALVACMRKLLTIMNCMLRFKRAWQYT

SEQ ID NO: 343243 - protein, 464 aa, unidentified
MSKGSGTTRGDRRRNERRAMLRGLLPRHGAVIGIDLGEDKQAIAVVDHDVRVLARKTVKVKAYQLGEALDWAVAQARAAGFGHVAVACEPTGSRWLQVQRLCRERGLQLVCIQPLVTHIAREQQDFTRHKTDESDCVMIARLAIELYCYVPEELDERWAELRYLGRRRAALITAQTASVLRIRDFLSCAWPVVTGACASPFDSLTWLAALQVVTGRCGGDPGRLAAMGQEAFTALVRGAIGDWGGQRAFGPISRRIFAVLASTEGVILTHRRGLLRRITDELGDLQRVRAQLRRAEADMAALLDELGLSRLGDIPGLSVAGAAAILAETGDPRHYQTSSSLVKHAGMSPSENASGSFAGETHISRRGRPGLRLTVWRAVWPLLAHNPVMAAKFQALTQDEAAAGESTTRSRQAAAAAARARRAKARVACAASLLRWIWSLVVHGTCWNPEIAAGQLSHHHAMAA

SEQ ID NO: 343244 - protein, 343 aa, unidentified
MAIVNRIALDLAKDFIQVLALDENEQEVFNKKLRSNKVLAKLATLSRTDDCEVAVESCGMSHYWRRECEKLGYKTVALPPRFVKAYLQGEKNDANDARAIAEAASRPNRQTVRLKSIEQQDLALMVNQREGFVQTRTQFSNRLRGQLAEYGIVLSKQVKTILQRVPEVLEDDSNALTLQSRDLINRLYQMLRTVDEEVKALDKRLAAQAERNEDSQRLMTIPGIGPVTATSLLALIGDVSEFKRGRNLSEYLGVVPRQNSSGGKDRLGGITKKGNTKLRTLLVHGARSALRVAHQRDDKLSLWAQGVAKRRGNNVAAVALANKHARIIWAMLKNKEDYRPTAA

SEQ ID NO: 343245 - protein, 461 aa, unidentified
MAKQLGKRKKDGAKADATEGLPPLNLHAAGIDVGSAEHYVAVPPDRDAEPVRKFGSFTADLHRMARWLKDCRIKTVVMQSTGVYWMALYDVLESHGLEVNVANARHTKTLPGRKTDVQECQWLQKLHTFGLLNNSFRPPDEIRVLRGYLRQRENLVAAAATCIQHMQKALTEMNIQLANVISDISGTTGLAILYDIVRGERDPYKLAMHKHSRIRASRQEIARSLQGTWRQELLFVLEQSLDLYQTYQQKIQTCDERIDGQLRSMEPRIDPLSEPIPEPRRGKDARGHQSGFDLRGQLYRITGVDLTRIAGIEVQTAQTIISEVGVDMSRWKTEKHFASWLGLCPDNRISGGKVLKRGTRHVVNRASTALRLAASALLRSQSALGAKFRRLRSKLGAPKAITAMAHMLARLLYRMLKFGHDYVDRGIAFYENKSREQQLKRIAKQAAALRMQLVPLAEVVS

SEQ ID NO: 343246 - protein, 405 aa, unidentified
MNSVGIDISKGRSMVAAITMTKEVTVKPREFEHTELGLEQLLDVLAPLTLEGETRVIMEATGRYHEIVASTLYEAGIYVSVVNPLLIHDYGNNSIRCVKTDRKDAMKIARYGVDNWGELREYTPVDSARQLLKLLSRQYNQYMKVLVSQQSNLIALLEKTFPGANDLFKSPRRDDGHQKWVDFVQVFWHSDCVIRLKEREFIERYQKWCKRKGYNFSEDKAFDIYVYAACCGYTLPKNSSTKALISVAVEQVIACSKSVAAIKAEMLKISAQMPEHKVVLSMFGVGDITAAQLIAEIGDVRRFNNRGALVAFAGVDPSTFQSGKYASKSGKATKRGSAHLRKTLFQVVGAYLKRSPADEAVFQFLNRKRAEGKHFYVYMTAASNKFLRIYYARVKAFMESLDHNN

SEQ ID NO: 343247 - protein, 352 aa, unidentified
MDKGNRVDFTGQPIYIGMDVHKRNWSISIHTEHVEHKTFSQPPEVEKLVNYLHRTFPGATYHSVYEAGFSGFWIHDRLRAEGIQCMVVNPADVPTKDKERAGKADPVDCRKLARSLRNGDIKGIYVPSRVKVEDRNLVRTRQSMVRKQTRCKNQIKAILFFYGIVIPEDSHWSKRFINWIETIRMEKTSGDLALKAYLEELKHLRQIIATLNRAILALSRTEEYRFDVLLLKTVPGISTLTAMTLLTELCDISRFSSLDKLASYTGLTPVIRSSGETEHTVGITYRRNAILRAILVEASWVAVRKDPAMMMAFNKFALRMKKTNAIVHIARKLLNRIRYVLKNRQGYVPAVV

SEQ ID NO: 343248 - protein, 338 aa, unidentified
MIVIGVDVHKHSLTAVAVDEAGRLLDERTVTGANDGLVAWASSVGEERLWALEDCRQLTRALERELLAAGEELVRVPPKLMAPERRAGRMRGKSDPIDALAVARAALREPRLDHPRAAEQRLRELKLLVDHRDDLIDERRRAQQRLRWHLHDLDPALAVPLGALDRAVWLDRLGRRLARPEQTAQVRIARELVGRCRSLTRTILELDRELQAAAAQTAPALLALPGCGAVSAAKLLGEIGPIERFDSDAQLARHAGVAPLEASSGKHRRHRLDRGGNRQLNCALHRIAVTQGRVHPPARAYLERKQAEGKSRREAVRCLKRQLARTVYTTLKKESLLT

SEQ ID NO: 343249 - protein, 377 aa, unidentified
MEKDSRFVGLDVHAETIAVAVAESGGEVRSLGTIPNTPEAVRRLAKKLGPPETLRVCYEAGPTGYVLYRQLTALGVPCAVIAPTLVPVKAGDRVKTDRRDAEKLARSYRSGDLTPVWVPDPGHEALRDLVRAREAAKKDQLRARHRLGKFLLRQGRRAPTGSKAWGVKHRAWLQTIRFAHAAQDATLLDYLTEIDHAADRIVRLERAIATAAAVAPAPVRAVIAGLQALRGIAKLSAVSIVTEVGALSRFAKPRQLMGYSGAVASEHSSGPHLRRGGITKTGNAHLRRIVIEAAWAYRHRPAIGGTLRTRQQGLSEEVKALAWKAQHRLHGRYTRLLAKGKAPTQVVTALARELLGFIWAIGVHIEQHTAGGAPAAA

SEQ ID NO: 343250 - protein, 367 aa, unidentified
MKKISTEAVKQNRNFSEQKLTIGLDLGDRSSWYCVLDEAGSVLLGQRLSTTPKAMKEALGGMPRSRIALETGMHSPWVSRLLSELGHEVIVAHARKVRLIGESRKKDDRLDAQTLARLARIDPQLLCPVRHRSAKAQADLTVIRARAGLVRARTALVNTARGLAKSYGERLRGCNVRNMNPEKAEGLSPELQRALEPLLAGIESLSERIGECNEGIEKLAQESYPQVARLKQVKGVGTLIALTFLLTLEDAQRFRKSRDVGCYLGLQPGRRNSGQSEPQMHISKEGDPYLRTLLVQGAHHILGPFGADSDLRRWGLKLAERGGRNGKKRAVIATARKLAVLLHRLWVSGEAYEPLRNSQQRALPAAA

SEQ ID NO: 343251 - protein, 339 aa, unidentified
MNRTTIGIDIAKNVFEIYVEDGATQSVERKRLARKKLLPWLANRPPALVGMEACGGAHYWARELTKLGHEVRLMAPQYVKPWVQTNKSDQADARAICRAVQEPGMRFVRIATEAQQDVQAMHRVRSRLIGNRTALVNQIRGILLEYGVAVPQGVASLRKVLPTLLAEERWSPLMRQFLTAQQAELTVCETQVAAVTGAITRASATQPVCQRLEQVRGIGPLGASALWLKLAGGAYQNGRHVAAALGLVPKHTGTGGKVRLGGISKRGDRYLRQLLIHGARAVVAQVGEKPDALSGWLRRLVARRGMNKAVVALANKNARVAFALLHGEQPYEVTKMCQA

SEQ ID NO: 343252 - protein, 373 aa, unidentified
MGLGGDRNHGGADAMQAKCWVGLDVHAAKVVAAIVDSESGELRVQRLPGRTDKVAAFCAGLPGPVRVTYEAGPTGFGLARALERAGVGCVIAAPGKIARPATDRVKTDRRDAELLVRLLMAGQLSAVRVPSVREEACRDLVRAREDVRGDLMRVRHRVGKLLLRHDQRFDGNNWTGAHREWLNRVELSDPVAQGVLLDAVGAVDALLVRRDALERQMAALVPDSPWAQTIGRLRCLRGIDTLTALGLAAEIGDFERFPRPAQLMSFLGLVPSEHSSGSQRGQGAITKSGSEHARRLLVEAAWHYRRAPRRGTELARRQDGQPQHVTAISWQAQRRLHRTWQRLDGERGKRRTVVAVAVTRELSGFCWAVATAD

SEQ ID NO: 343253 - protein, 389 aa, unidentified
MTTTAKTTAADTILAIDLGKYKSVACVHAEASGTFHFTSLETTRSELQRLLARHRPTVVIIEACLLAGWVHDLCAELGIRCLVANTASEAWKFKHLKRKTDRDDAQRLAQLYLLEQLPTVTLPPTSVRQWRSLIACRQTLVGRRVAVQNRIRALFVAQGLPAPRGARAWAAIGLAGMASWARPLGDCAADELWRGLLDLSLTEYRQLCELIDQTETKLDALGKQHADVALLETAPGLGPRTAETVAAYLHDASRFQTGKQVSAYSGLVPRQHQSGEMDRRGRITKRGPALLRKMLVECAWCMIRYNAWARGIYQRLTGGGQRRKKQAIVALARKILVRCWAMLRDRKPWHDPQTGPKPTLSPSKQRRRAEAQQRRQAKQQPALAPVATP

SEQ ID NO: 343254 - protein, 370 aa, unidentified
MSLKIVYKICCGIDVHKTFVVACIASTNDIGVTSYESHRFSTYTSGLKTLLQWLLKRNCKDVCMESTGKYWIPVYNILENDCSIVLAHPKYVKAIRGKKTDKKDAKWIADLFKHDLVAGSFMPPADIRQLRDLMRYRFKLTCFQSSEKNRLQNCLTVSNIQLGNVVSDTFGKSAQAILDKLLENPADTSFDLEPLVYKSLKKKLPELRDAIDGYITPEQVGKLKVIKAHYESLESRKAELEELILALAAPYQQELAILQTAPGIRSDFTSIGIISEIGTNMEAFPSAKHLCSWAGLTPTNNESAGKKKSVRVSKAGCYIKPLLVQCANAVVTSKKHPEIRNRYLRLKASRSQESNHCHCKNASDCIISYA

SEQ ID NO: 343255 - protein, 363 aa, unidentified
MIVIGADTHKRTHALAAVDAGTGEVRGEREITANDDGHRKALHWAHEIDPDVVWALEDCRHVSHHLERALVTSGERVVRVAPRLMGQSRRGEREAGKSDQIDARAVARAVLQEGVEKFPGAHLDERAMEIRLLCDHREDQVAEINRLTNRLRWNLVILDPALEASIPPRKMDFPGQLDRVARRLRGMEPSARVQIAKDQIRKIRELSRQARELKRDLHTLIAAYRPELLAELGCSTITAAILIGQTAGAERFPTDAHFARMAGVAPIPASSGKHERHRLHRGGNRRLNRALHVIAITRGRWDPATKAYLERKEAEGKTRMEALRCLKRQLARHFHRLLLKPPLTAATRPVVPINAAISVPCLT

SEQ ID NO: 343256 - protein, 519 aa, unidentified
MHQTKYRGIITEAGSLTTPPWEPAFRLAKPLRKSVSPFGGDLCFGWLGSPRLYLYKPLGCVSAFWKWMPAGKDKTMQYQKVLKMLENIPYLSVGLDVGADFTWMSIMLPNGTLAGKPFKIIHSDPQSRELAVAKIKEAQEAYSLKSHCFLESTGIYHIPLLCFLRDKGFDCSVINPIITKNSTNMNVRKLHNDKFDSKKAAKVGLDASLKTSIIPDDEVIDLRNLVRDYYYFKDLQSAVVLKLTAELKVSFPAYRKVFSKVTTQTSLKLLDAYPLAEDLLAAPKETVVEMIRSTARFGRKYALAKYDALRTAAEDAAIFGRALKSNSVRIRLYIDSYREYQKRLDTIMEAIHASVDGLKDSPTHGRILLLQSLRGVGFMSAVVLVAEMGSFDLFPSPKKLYAYFGLDPAVKQSGKFNGDKVHMSKRGSSLARRILHMVALNNLKVDKGSGMPVNPVIHSYYADKCKAKKKNVAVGAVMHKICNIIFAMLRDNKPFEVITPQEHCKQYLAAHPSKAQNAA

SEQ ID NO: 343257 - protein, 320 aa, unidentified
MMAQNDLVVVGIDVAKDKVDACIRSLSLRQTFPSSPQGQRKLVGWLRKHPVNKAVMEASGGYERAWAKVLREAGIEVRIVDPKRVRSFALSAGRLAKNDTIDAEMIAWFAETFSDAPGQKHDAAHEELQTLVKARLSLIDLRMRLVSQSEHAAPGLVQKAHAHILKSLASELAKLEAAICAKIKSMPDFAERAEIIESVPGFAETSSANLVAGMPELGQVSDAIAAALIGVAPYDDDSGQRRGERHIKGGRRWVRNAIYMPCVGAATLNNPVLKAYYRRLIAKGKKPKVAIIACMRKLIVILNTMIARRQKWDPSRHALS

SEQ ID NO: 343258 - protein, 348 aa, unidentified
MSQSKQYVGLDVSLKETSICVIDDADKIVWRGQVDSTPEAIASAVKQHAPHAVRIGLESGQLSSWLFHELKGVGLPVICVDARHAKAALSLKVNKTDANDALGLAQIMRVGWYREVTVKGLDCQAERALLVARAQIVSQITTLKNCVRGILKTFGRVLPKGLRSQFPARVRAAIDGHPVLGAIIEPTLQVLEATRAQLLVYDKAVIQRARSDDTARLLMSAPGVGVVVALAYMTGVEDPARFKRSSSVAAYFGMTPRRYQSGEVDHAGRISKCGDGMVRGLLFEAAKVLLSRSTRPSALKTWGEALSKRIGAKKATMAVARKLAVILHRMWTTGTTFQWNAEAASPAA

SEQ ID NO: 343259 - protein, 353 aa, unidentified
MKPKAETTEAPLAVVGVDIGKEVFHLVALGADGKIAFRRKIRRLGLKEAFERLPPCIVSMEACLSAHFVSRTLRALGHEPRIIPAIYVKPFVKGQKNDYNDAEAIAEAALRPNLRFVQEKSQDQLDLQACHRVRSRLVSRRTATINQIRAFLIEQGIAVRVGPRALRNSLFAILENRKDEISPRMAKLILGLYEDWCHLDERVETVTGEIEELSRVETKCQRLMSVPGIGPVISTGLVAAIGTGEAFERGRDFGAWLGLVPRQHSTGGRSVLGRISKRGSKYLRTLLIQAAKVLLMRPHNWPRYSFGAWLKTASDRLHRNKLAVALANKLARIAWSVLRNDKAFDTHLVTEAI

SEQ ID NO: 343260 - protein, 371 aa, unidentified
MEHTRFVGLDIHKERISIAVAESGRSCAVEYLGEISNDPVAIGRLCDRLERPSKTLAFCYEAGPCGYGVHRQLISLGHRCDVVAPSLIPTRPGDRVKTNRRDATMLARLHRAGELTPVWVPDADHEAMRDLIRLRSVVRQIVGRARQHLQGFLLRHGRKHGRGTAWRMAYRRWLSTLAFEHPAQQIAFQDYVDAVMDAERRLQRVEEQISGLLPEWNLRPVVDALQAMRGIALITAVVLVAEVGDFTRFANPRQLMAYFGLIPGEQSSGETIRRGGITKTGNAHARRALVEGAWAYRMKARIGRHKVDRIEALPKVVRDIAWRAQLRLCTRYRRLSARGKTANVVNVAIAREMVGFIWSIACTVQSAPKTA

SEQ ID NO: 343261 - protein, 392 aa, unidentified
MYCGLDVSKNKSNVCILDNDKKVVKEFEIQHDIEGFMELEKHITPDTKIGLEITGNYSKTIYRYFKNKYNIIYLDSLQMNTFARLYSPTIKNDKADARLIALALTVDLKSVNPSKMDELKNLSLLYQKTVKQLTRYKSMFKDQISVIFPELENMMSNNSNMGLANMLLKYPRPCDIVNASDEEIKQALRENLKRAGRFDIEYAKEIKSIALKSVGITDYPTSYFLHVIKTMLFYKSQVNEIKKGIDKCLKNTPYYKLMDEFGYNIAGLSTILGEVGEINRFSNPKKFASYCGFGIYEKKSGTSVNKSSHITKSGSSKLRYSFHMMALIHLRYKTDYSKFFYRLRERGKHPKKCMVALARKLAVKCYYDLKGCLATSGTLPIQNVVTQNINII

SEQ ID NO: 343262 - protein, 372 aa, unidentified
MPKRNVPRPAAVYGIDIGKNIFHVVGLGSDGVPVQKVRFRRDTLLQFFARAAPAIVEMESCAGSQWIARKIQALGHKVRLIPAQFVKPYVKSNKTDVIDAEAIAEAATRPTMRFAALKSEEQADLQALHRVRDQMIGTRTRLINQMRAFCLEYGIALRQGAGLFKLDLPQVLEDQSNDLSPAMRKLLANLFADLRQLEHRIGDLTREIEAIANREDVARRLMTIPGIGALGATALLAAIGNGRQFHKARDLAAWLGLVPREYSTGGKQRLLGINKRGNRYVRKLLVHGARSCFRHLDRTRDRLGSSLDGLQARIHPNKAVVALAAKMARIVWVCPDQAWSALRTQRPSIHLIIQARLQGSGIVMTKQWINMP

SEQ ID NO: 343263 - protein, 339 aa, unidentified
MKKSDCPTYLGIDVSKESLDCCLYNGTEHKTRSFNSNKLSTVQKIISHFKISPDSCRVVLEATGVYHSAAFIGFTSQDFDVAVENPLRIRSFATMKNLLRTKTDPVDAKTIAEYGFANNPVSTKPKEAYQCKVVARLKLIGFFKKLIAQNRNHIEALNNNSFECNATSLITHVKNEINHLNVTINEIKSDIEKILTKHCPELYKQYKSIPGIGPTVAGAIICFYGDFSGFSNSKKAAAFAGLCPKVCKSGSSVDKKGSISKKGNSMLRTLFYMAALSAARCNDTCQEVYLRLRQAGKPAKVALIAVANKLLRQAMALARKGESFIENYKEISPCAAKTT

SEQ ID NO: 343264 - protein, 324 aa, unidentified
MEVEAVYVGIDVSKARLDVAVWPGAERFSVANDPRGIVEMVEKVAALKAQAVLLEATGGLETLAASELHAAELTVAVVNPRQVREFARSLGRIGKTDRLDALVLAQFAQSAHSNDRLPKLHLRDEAEAELKALVTRRRQLLGMLTAESNRRERAPKVIRRSIVASIRALKRSIKAIEQQVREVMSDSPVQQAKAVLLTAVPGVGPQLTATLLAELPELGSLGRRKIASLVGVAPHPHESGKFYGRRRCWGGRATVRTTLYMAALSGIRFNPALRACYQGLLGRGKSRKLALVACMRKLLLILNAILRDSASWNPHHQLDFQHSR

SEQ ID NO: 343265 - protein, 491 aa, unidentified
MAQKKTSIQERLRSGKLNRKQRKELVRRVYADDPGLEVVHRNVAGIDVGNESHFVAVPPGRDPQPVREFGCWTADLLRMAEWLKSCGIETVVMQSTGVYWIAVYDVLEKAGFKVWLSNARETKNLPGRKSDVQESQWLMKLHTYGLLRNSFRPPEQIRAVRTIWRLRDRNVRDAAREIQHMQKAMTTMNVQLANVLSDVAGVSGQAIIRAILGGERDPHVLAKLRDYRVKASQEEVARSLEGNWQADLLFELQQAVDRYDFCQQQIAKCDQQLEKYLAALPSRKGAVQAPVAKAEAGDAAHARPAAKKSKNRKKKRGKPRGNEPRLDLEAELRRICGVDLTTLDGVYVMTVLTFVSELGTDMSPWRTEDHFVSWLKLAPSRQISGGKVIKQERNRTRNRVANAMRMAASGLKDSDSYLGARFRQLRARLGPGKATKAMAAQLARLFYRMLTNGQEWVDRGTQEHEKRRVEREKQFLLRKAASLGYRLEPAA

SEQ ID NO: 343266 - protein, 336 aa, unidentified
MNVITIGFDLAKTVFQVHGVDRQGAVVLRRQLRRQHVERFFAKLPPCLVGMEACGTAHHWARRLRELGHEVRLIPPAYAKAYVRRNKTDAADAAAICEAVGRPSMSFVPVKSVAQQAIASVHRVREALVQQRTKLANMIRGQMAEFGIVVRRGMSHVAELLARLAEPGAVPEMLRRMLLGLGEALAMTDQQIKAADREILSWHKENECSQRLASIPGFGPIASSAMAARVVQPTRFKSGRYFAAWLGLVPKQASSGGKVRLGGISKRGDVYLRRLLVNGAQSVLIGREAKLAPWTARLLAHKPRKVAAVALANKMARIAWALMVRGTKFGAASPAA

SEQ ID NO: 343267 - protein, 482 aa, unidentified
MKPKPQEKTKKATDHPRQQHWREMNRQQRREMMRNIQSEDISLEVVHPDAAGIDIGNESHYVAVPPSRNSQPVQRFGCTTAELKAMADWLEQCGIRTVAMQSTGVYWIAVYDVLEQAGLEVYLVNARETKNLPGRKTDVQESQWLMKLHTYGLLRNSFRPSQEIRMMRTYWRQRNDLVQSAGRHIQRMQKALTQMNIQLANVLSDVSGVTGQAIIKAILGGERDPHKLAAFRNSRVKASEEQIARSLEGNWQEDLLFVLKQEQDGYEFCEKQMAECDRQLNHYLKQRADRSHGAPLPEEKRKGRLKKKSGNKPQFDLRTGLFRMSGTDLTRVDGIDVITATTILSEAGWDMSKWVTEDHFVSWLRLCPDNRISGNKVIGKGRLPTNNRVTIALKMAASTLRLSDTYLGAQFRRFRTRLGAPVAIKAMAAKLARLVYRMLCYGMKYVDKGAALYQAQHRNLQIKQLNRKAASLGYQLIPVPAA

SEQ ID NO: 343268 - protein, 383 aa, unidentified
MNYSAIDYHKKNSFISTCNEQGERIAEAKICGNDPSAFARYFARLGEGLGKVVVEACWNWSWLHDVLRELEPIEEVVLAHPYKTRVIAEAQIKSEKLDARILSQLLGTKLIARAHVPSKQTRQRRLLLRQRMFWVRLRTMVRNRVHALLARQHGLTLPQRADLFGSGGMKFLGTVQLEGSEATLLGQDLEVLEQLELQIKQSEKEIRRQMGQEPEVERLQSIPGVGILLSAVIAAEFDGAERFQSNTKLWAYCGLAPSTRSSDSHTWHGPLLFRCNKWLRWAFIEAAWIGIQHSAYFAAIYQRQLTRGKIPNKAIVVVARRLCEIAWKVLREKRSFSAQPPPRQANPFSRSPSRHSGGAYCKQYRLAPSLSIGDRESNPLPCG

SEQ ID NO: 343269 - protein, 348 aa, unidentified
MSVYVGMDVHRKRSQIAIVDEAGDQQRNRNLPNDPTKLVPILGALEPGTPVAFEAAYGWGWLVELLEELDLEPRLVHPSRCKAIASARLKNDKVDAATLAQLLRADLLPEAWIAPQQVRDLRALLRHRASLVRSSTACKSRVHAVLADRGIPERSSLWTGPGRTWLAGLALPPTQRAIVDDLCGLLDALAVPIARLEREIGALAKPDPRVQALMVLPGVGRLTAMTLVAEIGDITRFPTARKLCAWAGLTPAVRNSDRKVRHGHITKQGSPWVRWILQEAAQTAKKSPIFADTYAQLARRRGRSIATVAIARRLLARCFHILTQLEAATGEGQTGCARNKRMSLQHGR

SEQ ID NO: 343270 - protein, 391 aa, unidentified
MIYVGIDVAKDKHDCFITNSNGEVLFKSFTISNNQDGFNVLYQRIESVMEDVTKVKVGLEATGHYNYNLLGYLIDKGLTTYVINPLHTNLYRKSLSLRLTKTDKVDARTIAYMLMSDVNLKSYSNTSYHNEELKSLTRYRFDKVKERAKLKTSVSRLVCILFPELEKLVPTLHMTSVYALLSEFPGAKHVAGAHLTRLTNLLSDASKGRYGKDTAITFREAARASIGSNMPAKSLELKHTIKLILELGSEIDEIENEIKFIMDEINSPILSIPGINYRMGAMIIAEIGDFSRFDSPDKILAYAGFSPSTYQSGQLDSAYSHMEKRGSKYLRYALYNAAKYVCHWDVTFAEYLAKKRAEGKHYNIAISHAVKKLVRVIYHLVKSNQQYMKVA

SEQ ID NO: 343271 - protein, 346 aa, unidentified
MATVTKDIMIGVDLAKNVFQLHAVSMTGQPKFCKKLSRSGFAKFMEEHTSSVVVMEACGSAHYWAREMVRFGHEVKLIAPQYVKPFVKRQKNDAADAEAIVIAAQRPEMRFVEPKSAEQQSRAVLFRARERLVHQRTELVNALRASLYEYGHVVPQGIRQIGRIADILDAPGTDLPDLMREECRDLLEQIAEQTVRINMRTAKIKALAAQADTSRRLQTMPGVGPMTALAVEAFAPPMESFKCGRDFAAWLGLIPRQFSSGGKERLGRISKAGQADIRRLLIIGAMSRLNRLGRKSIPEGSWLERMVARKPRMLVAIALANKMARAIWAMLTRNEDYKLPAQVEAA

SEQ ID NO: 343272 - protein, 388 aa, unidentified
MDRVVIGMDPHKRSVTIEVMAADETILGGGRFGTDAAGYRALLRYVRQWPERVWAIEGCQGIGRHVANRLLADGEEVVDVPPKLSARARVFATGQGRKTDATDAHSVALVGTRMAGLRPVVNDEQLAVLRLLVDRRRALGEDHTRTVNQLHALLLELIPGGAKKDLSAAQAKALLAKVRPRDVAGKARRRVAAELIADLERIYKRKKAADKELKDLVAATGTSLMDLHGMGPSGAARLLVEVGDITRFPTRAHFASWNGTAPIDASSGDQVRHRLSRAGNRQINRTLHIMATVQLRNPTEGRAYYDRKVASGKGNMEAMRCLKRRLSDIIYRHMLDDAITQIVTGPGGHWETSTDSSVTDSHPYAGSSDKPLPGPARTQPKTPAAATG

SEQ ID NO: 343273 - protein, 354 aa, unidentified
MMTSTSADVFGGVDTHGRTHHAAAIDGAGHLLDDAEFPATAAGYRALLAWLAGFGRLVKVGVEGTGTYGAGLARHLADQGIEVIEVDRPDRKTRRRQGKSDPIDAIAAARAVLAGTAIGAPKTRTGPVEAIRALRVARRGAVKARTAALNQAHGLVVSAPEQLRAELTGLSTSELITRCAGFRIDAARLLEPVMATKAALRAIARRVQTLDEEIALADARLRPAVATVAPRTYALLGAGPDVAGQLLVTAGDNPERLRSDAALAHLTGISPLPASSGRTDRHRLNRGGDRAANSAVHRIVLCRMRYHEPTRAYVERRTTQGLSKTEIMRCLKRYIVREVHTALLADFEHLTQAA

SEQ ID NO: 343274 - protein, 473 aa, unidentified
MKIGYHPRAPTPGHVDSVWYRESEPKLTWELPGPRIVAIEHAEQSREQDAPAGAGAHRRGGEAMERVIERCCGLDVHKKTVVACVRVPGRTGGREQHVRTFGTTTAELLALRDWLGGYGVTHVAMESTGVYWKPIFYVLEDAFTCVLANAAQIAQVPGRKTDVKDCAWIAQLLEHGLVRGSFVPPVPIRELRDLTRYRAALIGEHTRETNRLQKVLEDAGIKLASVASDVLGVSGRAMLDALTQGTRDPDVLADLARGALRRKLPALRQALTGRFRPHHAFLVSQVLAHLDYLDEVIEALSTHLDEVMAPFAEAVSRLDTIPGVNKRTAEVLIAEIGVDMGVFPTAGHLASWAGLCPGNNESAGKHRSGKTRKGNRWLRGALIQAALAGGTRATKGAFAARYRRVMRHRGHKKAVVAVAHAMLVAAYHLLARHTTYQEPGADYYERRHAERVRHRAVQLLERQGYRVILEPAA

SEQ ID NO: 343275 - protein, 338 aa, unidentified
MVYGAIDLHMRYSQIRIIDEAGVVQRDQRVVTSRERLTQAFASHGPMRILLETGTESEWVAQTLEAAGHDVIVADPNYAPMYGELRRKVKTDRRDVAALAEANRRGWYRPVHRVSATQRETRQVLRTRRLLVATRTGMVSLVRALLKQSGYRLSTGTCATVPARVARLAVPRLLAETLAPLCRQIARLTDEIHEIDGRLKRRVAEDVIVARLRSVPGIGLIVATTFRAFVDQHERFVHGGQVSASIGLVPREDSSAERRHRGHITKAGPRELRSLLIQAAWVCWRHPHSAALRAWADRLAARRGKRIAVVALARRLSRIMFALWRDGTTFEVTTFATA

SEQ ID NO: 343276 - protein, 349 aa, unidentified
MDQIIRIGMDTSKHSFQLHGVNSAEEPVVRRKFSRGQMLAFFARQPSTVIGLEAGGAAHHWSRTLSAMGHEVKIIAPQFVKPYVKRGKNDAADAEALCEAMSRPSMRFVAPKTAEQQAALMLVSVRDRLVRSRTQLTNAIRGHAAEFGVIASRGLDKIDLLLALIVTDESIPALARSLFAQLGAEFAATEARLKQINAELLDWHRQDEVSRRLAQIPGVGPIGATMLALKAPDPGNFRSARHFAAWIGLTPRDHSTGGKTRLRGITRAGDEALRSLLVVGATAVVRQVRHNRGRPWPWLQCLLERKPPKLVAVALANKIARIAWRLMTAGQSYDGALAARLRHRAKAAC

SEQ ID NO: 343277 - protein, 436 aa, unidentified
MSQEIGERQEEFAALIGIDWADREHHVCMRVVGSNTVTSRKLLQTPEDIAEWIAGLRSQFPGRQIAVAIEQSRGAVVYALMQYDFLTLFPINPVMVAKFRQAFTHSRAKDDPTDAELLVDLLVCHRDKLRAWKPDGEATRRLQILAEHRRKAVNLRSQLSNRLLSLLKVYFPQAVELCGCNLFYPVACDFLAAWPTLEAAKSARKETIRKFYYAHNIRRPETIEQRLKLIAEAQPLTTDVAVIETHALAAAMIVGQLRSLHKFLLKYDQQIAQTFRSHDDAGIFSSFPGAAEAMAPRLLAAFGSDREHFGSAAEMQKFSGVAPVTERSGQSQWVHRRWSAPKFVLQTFHEYANISIRYSIWAKALYEHLRAKGKGHHTAIRAVAFKWIRVMFRCWQDRVPYDEIAYIKTLQKRGSYLFGRIADAQQKTTMQGAVIG

SEQ ID NO: 343278 - protein, 313 aa, unidentified
MTKLNTAFSGFIGCDVGKAEIVIHDSRDGTTTAIANSAKPLAAFAATLKTTCLVVCEATGGYETVLLNAMLKAKIPAHRADARKVKAFIRSFGIRGKTDAIDARALAQYGRERADKLRLWEKVEVAQGQLQSLVLGRDDLVRQRVANKNRLGAPGNAVIKPSLTAVIACLGKQITKIEAQIKLLIETNPKLARNAEILTSIHGVGPVVANALQALMPELGTLGRREVAALAGVAPHPNQSGGRDKYRKTIPGRPIRSILFMAALSASQSQSGLGDFYRKLLAHGKTKMVAMVALMRKIIVIANAKLRNADLPA

SEQ ID NO: 343279 - protein, 339 aa, unidentified
MDITTIGFDLAKTVFQVHGADGEGHPVLRRKLRRGKVLAFFAGLPSCLVGMEACASAHYWAREIQALGHEVRLIPPQYVRPFVKTNKNDAADAEAICEAVTRPTMRFAPLKSAEQQSVLMLHRARELLVRQRTMVINALRGHCAELGLIVAQGASRVEELIAIIEDPDDARLPPLAREALGMLVAQLRSAQARIKELEVALLAWHRSSEASRRLATIPGVGVITATALVATIGDGAQFRSGRQLSAWLGLVPRQHSSGGKNRLGRISKRGDGYIRRLLVHGARTVLRWRRAKPGTPPGWTDQLLARRPTNVVLVAMANKTARVAWALLRYERIYQPVSA

SEQ ID NO: 343280 - protein, 356 aa, unidentified
MSKRSKLNFSGQAIYLGLDVHKKSWSVSIFTKYGEYKTFSQPPEAEVLIQYLQRHFPGAQYHSVYEAGYCGFWIHDQLRERGIDNIVANPADIPTRDKERRSKRDRIDCRKLARGLRGGEIEGIYTPARWKLEDRSLIRTRLSMGRKQARCKNQIKSMLLFYGVVIPEQREMGHWSRRFIQWIEGIRMERSSGDVALKLHLEELCHLRQILAKLNRSIVALARTEVYRSWISLLKTIPGISTLTAMIVLTELYEITRFRSLDQLCSYVGLIPDTQSSGEKEHVGGITGRHHSSLRWLLIEASWIAVRKDPAMMEAFNEYCKRMRKTKAIIKIARKLLNRIRYVLKNEAEYVTGVIE

SEQ ID NO: 343281 - protein, 429 aa, unidentified
MNYNTQNAKIASITEKTLIVGIDVGSETHYARAFSWRNYEYSKKPFAFSNDEAGFAAFKEWMDDIAEKHEMEVIIPGMEPTGHYWLNLGAYLQEQGMKPVHVNPHHVKKSKELDDNNPSKNDRKDPKTIAGLVNEGRFSYPYIPTGIYAEIRNLSNLRIQTQEEITRIKNRMARWFSIYFPEIKDVYRNPDAVSGLMVIKQAPLPCDIRELGVEGVNRIWRDARLKGAGIKRATTLVTAAEHSIGNTEAPRSARKEIRNLLEDYEGYKKRMDELMEEIEKTLSEIPYIDKLMEITGIGIKTVSCFIAEVGDIGRFDNPKQVQKLAGYAIVADSSGKHNGESRISHRGRKRLRYALYEAAISVIGKNKEFKEIHSYYRTREKNPLKKMQSVIAVACKLIRIFYTILTKGVDYDGQKMLNDIVRPEIQPAA

SEQ ID NO: 343282 - protein, 411 aa, unidentified
MDRIYDNCCGIDVHKKLIVACFRKGNKQEIREFGATTRELLEMADWLKDGGCEMTAMESTASYWKPLYNILESSGLNAMVVNARHMKAVPGRKTDVRDAEWIADLLQHGLLQPSYIPDKEQRELRELVRYRKSLVGERTRELNRLQKMLEGANIKLSGTVSDINGKSARNILEYLLTGASVDGPKYDEMYEQKIIAHNLKATKEQIIDDLNGVMSPLQRRMMKELLAHLDELNIHIKNLNDEIDNFMKPEEKQASHAIQDVTGIGNTSAQAIISVIGTDMERFPTDRHISSWAGLCPGDNESARKRKSGKTRKGNSLLRTTLITCAHSAVKNKKSYFHAQFMRISSHRGKKRAYVAVAHSMLIAIYHILKDGVVFKDLGADYYNQFNKERKINAYLKKLKALGWEATVVAA

SEQ ID NO: 343283 - protein, 370 aa, unidentified
MRIIGCDLHARQQTLAMLDTETGEVVNLTLMHEGNNVREFYSKLPPPVLVGIEATGSMQWFLNLMEELGIECRVGHPAQIRAAEPRKQKHDRRDADLILKLLAQNRFPAIWLPSKELLDLRALLLHRHQWVRMRVRMQNALQAIALANGLRRGPALWSYDGQAKIAFLPLLPHAAYRRSALQAMYKNMQSEIENLTRRVAEQAGNRCGARLLMTHPGVGPVTALATEVFLGDPQRFADSKALASYVGIIPREYSSGGHQRLGGVTKQGSPLLRFLWGEAGAHAARRDPELKRFYRRKLVHKGLGKARVAVARKLGIRLWIMLRDEIDYQEFCRRGQLQQKTVRPVAGMPETGNGAKSHRPSDEATRLPES

SEQ ID NO: 343284 - protein, 390 aa, unidentified
MAGTPRIDVRGLGVRVVLAPTPQLWEVPTMSESMALVGLDVHQAQTVAAVLDPSTGELSVQRLRGEPARVVPVFLEELDRPVAAVYEAGPTGFALIRVAQERGLDVRVVAPGSIPRAPGDRVKTDRRDASRLVRLFASGELSYAFVPSEVDERFRDLVRCIEDARKDLMRSRHRLSKFLLRRGHRFPSKAWTQPHERWLGKLSFEDAVSHATFVDYLCAVQTLVQRRRVLIDALEQAVPASSHAGTVARLRCFRGINTLTAAGLCAEVGDFTRFAKPALLSGFLGVVPSEYTSDEKRTQGQITKAGPPHARRLLVEAAHHYRHQPAVREGLAARQAGQDPRVVQIAWRCQRRLHERWKHLGGTRGKRTGTVAIACARELAAFCWEAATLD

SEQ ID NO: 343285 - protein, 482 aa, unidentified
MSECSASRHLTRRPKRQQGVAPTLCLERLPMSIRNGTSSSVNPQRQSTAASRGRQPSGEEEEEEVLGMDEQTKSSAGLDWAKDEHALCVVEEASGRVLLERRITHQEQAINELCRELVHTGVERLAIERPEGVLVERLLEAGIVVITIHPNQLKASRPRFRASGYRSKSDSFDAFCLAELARTDHHRFRALVPDSDETKALRALTRAREDLVRTRVALANQLRAELEAFWGGAANLFSEIDSSISLAFLKRYPSLKDASKLAEKRLENFLSKNHYCGRKSAPELLGKLRKAPKGRAGEAEMEARQEAVLALVATLKALVERIKLLEDRIAKAVRAHPDGEIFLSLFVSPNSTLTAASLVAHMGDQRERYPTNEALAAAAGMSPLAIESGKRKVASFRRACDKRLRRAVATLAESTRHHNRWAKDIYLRARGRGCDHAHAIRILGRAWVRVIFRMWQDGVPYDPPLHGGLQRLRSAQRLPQGV

SEQ ID NO: 343286 - protein, 329 aa, unidentified
MKRRWFIGIDISKKTLDVVIYDQENKKAKTHIIVANETKGFKRILRTFKEEGVKLKEAFICLEYCGVYGLEIGLYLEGKVAFSFCSPLHIKRSLGLTRGKNDKLDAYKIARFCYLHRDELTPSSMPTETMLKLKSLMSERNRVVKAAQIEKQVLKEHSKQLSIKSVKRMRKRLKALTADIAIIEKDVIELVESDTLLIQNYKLLISITGIGMVNAVMMILSTNNFEGITNARSFACYCGVAPFEYSSGTSIRGKTRVSHLANKTVKAHLTNAARSAVVHDPELRIYYKRKREEGKAHGTVLNAVKFKIITRAFAVVKRKTPYVKLRKAG

SEQ ID NO: 343287 - protein, 342 aa, unidentified
MYYIGLDVHKKTISYCVKDASGQVHREGKVGATRWELDDWMNTLPQPWTVAMEATIFTGWIYDHLLPHAQQVKVAHPLMLRAIAAAKKKNDRIDAGKIADCLRCDFLPECHMASTAIRDRRRTLRYRHLLVRQMVQMKNRISGLLMETGVSHNKQRLHKVKYFRELLESNEEVNESIRPLLRVSRDTIARLQKTEYALVSSLQRDPLLAERIKRLRTVPGVGPITALTWALEMGEVSRFPSIRQAISYCGLCGDEKSSADKVTRTPLSKQRNKHIQRVLVEAAKLAPRQDHNLALVYEREKQKGNANRATLAVARKMVAYLLAVDREQRDFVPFADSQNAAA

SEQ ID NO: 343288 - protein, 348 aa, unidentified
MNYSHFVGLDVGKKTFDASLMSADEKELSHKSFDNTPTGIQSLLDWIAGYHLSLSKLLFCAENMGSYVTELSVSSVSMGFSLALVCPLTIKKSIGLQRGKNDRIDAKRIANYAVLHYRKLELYKLPDKDLVRLRGWIIIRDNLVKQKVSSIKLLETFSWMAKLADVTESISFLEEQLKSIKERILEVEEDMEQLIAASTSLYTNYLLLRSIKGIGIINAIVLLCVTDNFQRFDNPRKFACYCGVAPFEHTSGISIRGKTQTSSLANKEVKVYLTRAAITAISWDPQMKAYYKRKIAEGKHKASVINAVRAKIIARSFAVIRRQTPFVTLAVMSIYKLTQGYVNVRKLG

SEQ ID NO: 343289 - protein, 356 aa, unidentified
MTSNIKYIGMDVHKESISIAVRNSVGKVVMESVIETKASMILQFIDGLRGDLQVTFEEGTSAAWLYDLLKPRVTKLVVCDPRKNKSMREGNQNDKIDARRLAELLRLDHLTPVYHGEHGLRTLKELVRTYLTVTKDLARVMTRVKAIYRSWAIPCSGKQVYARCHRAEWLGKITEPGVRRRAEFYYLQLDALRVLRQDARRDLLAESKKHKAWKRLCEIPAIGPIRAAVLLGILQTPHRFRSKRPLWNYGGLAIEMHSSADHRSVDGELQRSRKNVLVRGLNRNCNHDLKNLFKGAAAVASSKPGPFQEFYTALLAKGMRPEMARLTLARKIATIVLIVWKKGACFDAQHLKPQTA

SEQ ID NO: 343290 - protein, 326 aa, unidentified
MSRIQEKKTITTATSPFIVMGIDVSKDQLDVYVSPAGNHHSFKNDAGGVAELVNVCRDHDADLVVLEATGRYHRMAHKTLHEAGVRTAVANPARSRNFARSVGRLAKTDRIDAQVLAEYGERVRPPASTPPSKQQAKIAEITVARRQIVDEMKILKQQQTQTLDDLVIAQIAARISLCQCHCKDLEQLLAELIEEDDGIRRKHEILTSIPGIGLTTAATLISELNELGGTNAKQIASLSGVAPMNRDSGSFRGKRKIGGGRKPVRDVMYMAAVVAIRWNKDMAAFYQRLKKAGKPFKVAITAVMRKLLILANTLLSENRLWSETQP

SEQ ID NO: 343291 - protein, 478 aa, unidentified
MAMARTAGVNRKQRKELTRRLQSDDPGLEVMHPHAAGIDVGNSAHYVAVRPDRDPDSVRRFDCFTADLHRLADWLQQCGVTTVAMQSTGVYWIALYEILDARGLDVYLVNARHTKNLPGRKTDVQESQWLLKLHTYGLLRNSFHPSAAIRVVRTYWRQRGDHVQGVSTCIQRMQKVLTQMNIQLANVISDLSGWTGQRIVRAILEGERDPATLAALSHPGIHATRDTIAKSLEGTWQPDLLFVLQQEVAMYDAYQQRIAECDHELEQHLKGFGDKVADPAADAEPSPTTSPKELRSGPKRRRKAGSHAPQFDLGRELHRISGVDLTRIDGIDVGVAQTVISEVGLAMTRWKTETHFASWLGLCPDNRITGGKVIRRGTRHVINRAATSLRLAATTLLRSQSYLGAQYRRLRARLGAPKAITAMAHKLARLVYRMLKWGHEYVDKGLQYYEERHREQQVQLLKQRAAKLGLQLVAPEVA

SEQ ID NO: 343292 - protein, 409 aa, unidentified
MMNPLFVGIDVSSRNNVAYLMKPDGSKYSSFSVQNNLGGAKLLSERIVSALGSMQLSDVVIGLEATSIYGDSLVYALREDGRLGQFQRKIHVLNPKQVRKFKEAYPDLPKNDWVDAFVIADHLRFGRIAREVYMDDYRYKALQTLTRARFEVIQNLTREKQRFANYLFLKCSGMAQDKDIANSSSTTIALMERFETVDDLANSDLEELTAFVTETGRGRFADPAATAKAVRAAAKGSYRLPKTVNDTVNQAMSVSIASMRALKEQVKVLDKAIEQQFEIIPNTLTSIPGIGKVYSAGIIAEIGDIHRFDSQASVAKFAGLVWHKNQSGEFEAEHSRMIKSGNRYLRYYLLEAANSVRRCDSEFRRYYDLKFKEVNKYQHKRALALTARKLVRLVFRLLKDNRLYIPPES

SEQ ID NO: 343293 - protein, 345 aa, unidentified
MPIVGGLDIHRKQITFDYLDTGTGQVRRGQIAPADRVHLRAWLARFAGREDVAFAVEGCTGWRYVAEELAAAGVTVHLAEPADTAFARGRKRHAKTDKTDCRHLRMLLAEGRLPECWIPPGRILECRALLELYHDLRAEHTAWVQRIHAVLFHQGAPALGEGTLRTGPGLAALREAAADWLSPAGQLQVATALEVLEALEARLHAVRHQLLAEARHLAGAKVLAARLYGVGPFAALAMTCWLGGAGRFSSSRKAVRFAGLDVTVWSSDRKGPPGRLSRQGPPVLRWAVYEAGKTHARAPAPDHAYYAAVKDRCGGKRAALSEARKILRQASHILAELGDDAFAAA

SEQ ID NO: 343294 - protein, 366 aa, unidentified
MLYLGIDQHARQITVSLRGEDGDVLQARQVSTQPEKVHAFFRQLTRQRLRADESFVAVLEVCGFNDWLIRLLQEYRCRKVILIQPDDRKKCKTDRRDAAGLSELLWVNRDRLLKGKPVRGVRQVDIAGGTDQENRRLTTLRKEAGQARTRLVNQVRHMLRRHNLQWDMPTKRLPTKAALAWLKQLALPEIDRLEMDHLLSDLERAQQRLRELEKVIARRCGVSEEAVLLSSMPGVSYFTAVSLACRVGRVGRFPRARSLANYWGLTPGCRNSGETSQRLGSITKAGSGMARWLLAQVTHKVLRKDARLREWFRRVKRRRGSTIARVAVMRKLATLIWHMLSKRTTYADCRALAEAGTREGEKQPCG

SEQ ID NO: 343295 - protein, 414 aa, unidentified
MKLFVGIDVSSQELEACFMNPDGDKLETLTVKNNLDGASNLRDRIVAAADKHSSSEIHIGLEATSVYSWHPAMYMHEDPALKARKAKVFTMNPKLVSKFREAYPDLDKTDRLDAWVIADRLRFGRLTTTIVMQEQYVALQRLTRMRFHLIHNLTREKQYFLQNLFYKCNAFTTEVESSVFGHALLEMLSEKYSLDDIATMEVTDLADYLRDKGRNRFPDPERVARCIQKAARASYRLSKVVEDSIDLVLGTSIQAIRSIQTQLKDLDKAIERILDGIPGAKCLRSVPGIDRVYAAGILAEIGDIERFSDQAAVAKYAGLTWRRHQSGPFEAEDTKRIKSGNRFLRYYLVEAANSVKNRDEEFGEYYRKKYKEVPKHQHKRALVLTARKLVRLVDVLLRNGQLYTPRKKVTTAKD

SEQ ID NO: 343296 - protein, 354 aa, unidentified
MNNITFTDSHFFVGIDTHLKNWRVTIRNSGLELKTFSMNPSPEELYKYLTTHYPEGTYFIVYEAGFCGFWPQRKFNELGINCIVVNPADVPSSGKEKVIKTDSNDSRKLARELENGSLKAIYIPDINHEQLRSLMRLRFRLVQNQTRIKNRIKMLLYNYGIIIPKEHITNSRWSGYFIHWLKSVKLNSTAGQFTLDNLLLQLEQSRENLKQVLKQLREESKSENISSVISSLTSVPGIAFITAMSLYTEIIDINRFNSFDHLASFVGLVPSVYSSGETDYTRGISFRHNKFLRPLIVEAAWTAVKTDPALTFKYKELIKTMAKQKAIIRIAKKLLRRIRHVWINQDKYVKALVA

SEQ ID NO: 343297 - protein, 342 aa, unidentified
MSIVYVGLDLGSSSFHQVAITSAGSATVNRSFSTSELNLRKAFADLRGEIQVHLEAGELAPWAAAVIDPLVQRVVCSHPRDNAWIAKDGDKCDRVDAFKLAELLRLNRFKQVHYAPDQPRRDFKTLVQHYDELTAQQARLKTKVKARLRMQGVIVTGERLFSAAGRKPVLAQVDSRDVRTAISQLFEVLDQSVSAQAQAKLLMLRAAQAFPEIKLFRTAPGVGPIGACRFSAYIHTPQRFSSKRKLWKYCRLSVSHRSSNGKPLRRPHLDRSGCGRLKDVSRKAFDVSVRATKDNGFKRTYQRALEATHDATHARLTVQRKIVSTLRAMWLSKTPYRDELLH

SEQ ID NO: 343298 - protein, 459 aa, unidentified
MKKAGVSKGASKKKVAVMTHVIEPNAAGIDVGSTEMFVAVPVDRDPQPVRRFSTFTNELVALADWLKQCGVTSVAMESTGVFWIPLFQLLEDRGFRVCLVNARHVKNVPGRKTDVADCQWLQYLHSVGLLRASHRPTQTICAIRSLWRHRESLVQIAAHHTQHMQKALDQMNIQLHHVISDITGVTGLAIIDAILSGERDPDKLAQLRNARIKASERTVAEALVGDYRSEHLFVLRLSLEAYRQYQRWITDCDREIEQQLSRIESKIDPVQHPLIRTKDDRRKPRGNEARFDLRNDLYRIFGVDLTDVPGVSSLTAHLLLTEVGADLSKFPSAAAFASWLGLCPDNRISGGKILSVRTRHVVSRLAIALRLAAQSLHGSRSYLGDYFRRMRARLGPPAAITAAAHKIARILYHLITTRQRYDESVFAVMEQRAKQRQISILKKRASVLGFALTPAGCVP

SEQ ID NO: 343299 - protein, 341 aa, unidentified
MGQAHTIGLDIAKRVFQAHGADASGRVVFRKRLVRAKVLAFFAAQPPCTVAIEACAGAHHWARELGKLGHIVRLIPPAYVKPYVKRQKNDRADAEAICEAAQRPSMRFVPVKTEEQQANGVVFRARDLLVRQRTQCINALRGHLSEYGYVFPQGITHAEAVIAHVEDPDSAVPESARAVLKVLIGTFQALEAQIQALDAEITQRAKADPVARRLMTIPGIGPIAATAITALVPAPEGFRAGRDFAAWLGLTPLQKSTGGKQKLGAISKMGERTIRRLLILGASAVVRWAGQRGTPAGSWLARMLARKPKMLVTVALANKTARIVWALLVKGGGYRAPAPAA

SEQ ID NO: 343300 - protein, 375 aa, unidentified
MKAKLRFLGLDVHAETIAVAVAEPDGEVRSQGTIANRAESIRKLVKQLGPVEHLRACYEAGPTGYVLYWQLTGLGVECEVIAPTLVPVKAGDRVKTDRRDALKLARCHRAGDLTPVWVPDEGSEALRDLVRAREAAKQDQLRARHRLSKFLLRTGQRPAQGMKAWTQAYMGWVRQIRYAQMAQEATRLDCLHEVEHMGERVARLEQAIAEAVKLASPQIQEVVKGLQALRGIAQISAVTIAAELGNISRFEGARQLMGYSGAVPSEDSSGKRKQRGSITKTGNSHLRRIAVEAAWSYRLRPGVGPALRKRQQGVPEEIKEIAWKAQQRLYKRYSRLSAAGKDRRKIITAVGRELLGFIWAIGIKAEAAAKLRLAA

SEQ ID NO: 343301 - protein, 396 aa, unidentified
MLYLGIDIGKNNHVASLIDEKGKILFKAFSFSNTVDGGESLFSKLNNFIPSVSDIEIGMEATCHYWLSIYSFLVEKGFVIHVVNPIQTDGWRKGTEIRKRKTDIIDSILIAELIRYGDFLETSLADENTMSLRNLSRFRNYLIGSIGDLKRKTICVLDQVFPEYQSVFSDVFGQTSKEILLNFSSPGDFENISSAQLQKALSEVTMKKFATNKINQLTSIAKNPFGVTFCLDSFTLQLKLLIEQINFIENQVKDIEDQISNLLDKINSTITTIPGIGKVTAATILGEILDGNIVSLPAKLVAYAGIDASVSQSGEYQSTNNKMSKRGSPYLRKALFSAALVASNCDPVFKAFYQRNRAKGKHHLTAVGAVARKLYYTIHAILKNNCSYEVRFPDNN

SEQ ID NO: 343302 - protein, 321 aa, unidentified
MSAILGIDVAKLKFDVALYRNGKYKHKVFENNPAGFDALAAWLQQYNVSEVHACLEATGAYGDGVARFLFAAGHTVSIINPARIKAYGKSELLRTKNDKTDAKLIARFCEAHKPPAWRPDPPEIEHLRLLGRRREALVGMRTQELNRLGGPDAAVNESIQKVIDFLNQEIEQISATIREHIGKHDGLRKKRDLLKSIPGVGEVTIEAILSEVNGFEDFDTVEKVVAFMGLSPKDHESGTSVKGKPKLCKIGSARMRKVLYMPTLSAIQHNPFVTALYDRLKAKSKNGMIIACACMKKLVHIIYGVIKTGKPFDPAYNLKNA

SEQ ID NO: 343303 - protein, 353 aa, unidentified
MTKKSPRQKSVLIRETKTSRHLGVDLHRNSFLVCVREQGPGRFQRWSLEQLPEFAAGLRPQDELAVEATGNTRWFCRAVAGRVRRIVVVNPHQFRVISQSVKKTDRRDAALLAEYLEKDLLPEVRRKSDEQSELAQVAQARDQLVKMRTMLKNQLHGLFSSYGVLLEKKQLASRSQRAGLGKVPLPPLADVQRRVLLGQIEALETSIAELERAITAAAQALPGHKNLVSVKGVGSLSAAILLSAIGRVEDFPDPAHLAAYFGMVPRVNNSNETERHGRITRRGNKLARTTLVQCALIAKRYRPFLRGFYERIQARRGTGKAIVATARKLLTIVYYTLKNHWVFTDFAAFAVET

SEQ ID NO: 343304 - protein, 414 aa, unidentified
MAVIRWVGRAIGLDVHREFCEVAICEDGEVRSAGRVPATAEGIQTLAESLVSSDRVALEVTGSCWEVARILERRVDRVVVVSPDDTGITSARAKTDRLDARALASLLWKGELEAVWVPDQRCRVLRRRLARREQLVHARSRAKNEVHAVLVRRLQPRPPCSDLFGVKGRAWLAGLELPAEERESVDAAMRHVEFLDQEIAAVERLIAKQALSWPEIRRLMTVPGVNLVCAASFIAAVGDPHRFLTSRKLVAYLGLDPRVRQSGEGPARSGRISKRGSPMARWALVEAAWTAVLQPGPLHGFYERTRARRGHGKAIVATARKLAVLFWCMLTRGEDYAHQQPSLTRKKLRRLEITAGAPKYTRRAAGIWSTNDLMRTAELELARQAEASYKRMVQDQQAGAPARKAGASVTLERA

SEQ ID NO: 343305 - protein, 368 aa, unidentified
MNSVKFIGMDVHKNSITIAIAEEGSRDSARIYGTLNNDLNALDKFCRKMVSTASELHFVYEAGPCGYGIHRYLSGKGFDCMVTAPSLIPKKSGERIKNDTRDAKTLARLHRAGELTAVYVPEAQDEAMRDLSRAREDAVIAGRKAKQRLKAFLLRHGMTYSGKTSWSKAHFNWLADIAMPHPAQQIAFQEYIDAVHETLNRIERLTDQIRQMVPDWRLAPIVDALQAARGVSLIVAVTMLAEIGDLTRFEHPGQLMAYLGLVPSEHSSGESIKRGGITKAGNGHARRVLIEAAWAYRLQPRISRVLLKRHENVSEPVRRIAWKAQQRLCAKFKRLSAKGKPTQIVVTAIARELSAFLWAIAKQMQPAA

SEQ ID NO: 343306 - protein, 458 aa, unidentified
MKGKRASSTARSVMTIVHPNAGAIDVGATMHMAAIGPDRSSEPVLSFGTFTSDLHRLADWFAAFGINTVVMESTGVYWIPIFEVLEERGIEVFLVNARDAKHVPGRKTDVSDAQWLQRLHCYGLLRASFRPKAEIAELRAYLRQRERLLDYAASHIQHMQKALTEMNLQLHHVVSDITGATGMRIIRAILAGERSSIALASLRDTRCHATAETIQNALTGHYRPEHLFALEQALAIYDGYQEKVSACDMRIETALKELACRRGHKGAPATLPRRRIIRQANGPAFDVRAALYAIIGKDLTQIHGLGPYLALKLIAECGDDLSAWPSAKHFTSWLCLAPSNKISGGRVLSSRTRLSGNRVAALLRLAAVTVGRTDSALGAFYRRLAARIGKAKAVTATARKIAVLFYNAMRHGMDYIDPGASYYETRYRERVISNLHRRAKAFGFVLQVDASASERAVS

SEQ ID NO: 343307 - protein, 448 aa, unidentified
MKQEPEEIPDTEHELVLERVCAIDVAKDSGKVCVRVSGRASKRVSKVWDVPARTGTVAELAEHLLAEGIEKVTVESTSDYWRIWFYVLEAAGLSVQLVNARDVKNVPGRPKTDKLDAVWLAKLTEKGLLRPSFVPPAPIRELRDYTRLRIDLTRERSRYWQRLEKLLEDALIKVSAVASTLDTLSVRDMLEALIAGERDPRRLAGLARGRMKPKQAALVEALTGRFDDHHAELTRMLLDQIDALATQIGTLTTRIDELLTAMEPQARADEPDTRGGAGAGADGARESTTIERLDEIPGISPGLAQIILAEIGLDMSRFPTAAHLVSWAKLCPRTIQSGAIQRSGKTGRGNPYLKGALGEAAAAAAKTNTFLGERYRRIVKRRGKLKALVAVARSILVIIWNMLNDPTARYADLGADYHATRINTERRTRNYVTQLMAMGYRVTLEPAA

SEQ ID NO: 343308 - protein, 370 aa, unidentified
MLDTTTFIGLDVHARSIKAVSLDVMTGEVRAATFGYDAGAVAEWVRSVDPRARCVYESGVTGFDLQKRLSGLGVDCVVGAVSKMIKPSADRRRKNDRNDAEFLARMLSVGNVVEVWVPDDECEAARDLTRALEDARDDLSRSKQRLSKFLLRHGLAFDERTPTGRRKGNWTRAHWSWIESIRFAERADNDVLAYYVDAVRRAAEEKARLEGLVEAEARKPRWRRRVDSLRCLKGVDTASAADLVFEAGEFSRFGNARSFAAWVGLTPSEHSSGESDRRGAITKAGNKHLRKTLVEAAWHYLTCSARPKDLARGQAPDRGARRHAAKGVRRLAERREALLARGVHGNKANVATARELACWVWAVGLMAEEA

SEQ ID NO: 343309 - protein, 423 aa, unidentified
MEVMHERVAGLDVHKEAVVCCVRIVAGGKASRECRTFETTTAGLEALLSWLTQSGCTHVAMEATGVYWKPVWNILSDGKFELILANAAHIKNVPGRKTDVNDAMWIADLAAFGLIKASFVPEEKIQELRSLMRARKQLVREQTRHIQRIQKTLEAANIKLDSVISDIMGLSGRRMIEAMVAGVRSPQKLAQLADRRIKASPKALYDALHGRLTDHHRFMLQLHLGQYDALGSSIAQIDAQVDAAIARIDEEAAAGRGSFRDLTTLLDGIPGIASLAATSILAEIGTDMSRFASDGHLVSWAGLSPGQNESAGKRKSSRLRKGAPWLKTLLVQCAWAAVKKKDSYYKAQFNRLKSRRGPKKAICAVAASMLTAIYHMLKNGVEHNDLGASHFDRRPAAIKANRLVAQLAKLGFRAELQPLAQAA

SEQ ID NO: 343310 - protein, 409 aa, unidentified
MMNPLFVGIDVGSRNNVAYLMKPDGSKHSSFSVQNNLGGAKLLSERIVSALGSMQLSDVVIGLEATSIYGDSLVYALREDGRLGQFQRKIHVLNPKQVRKFKEAYPDLPKNDWVDAFVIADHLRFGRIAREVYMDDYRYKALQTLTRARFEVIQNLTREKQRFANYLFLKCSGMAQDKDIANSSSTTIALMERFETVDDLANSDLEELTAFVTETGRGRFADPAATAKAVRAAAKGSYRLPKTVNDTVNQAMSVSIASMRALKEQVKVLDKAIEQQFEIIPNTLTSIPGIGKVYSAGIIAEIGDIHRFDSQASVAKFAGLVWHKNQSGEFEAEHSRMIKSGNRYLRYYLLEAANSVRRCDSEFRRYYDLKFKEVNKYQHKRALALTARKLVRLVFRLLKDNRLYIPPES

SEQ ID NO: 343311 - protein, 368 aa, unidentified
MPVSVTRISDDRVVVAVDPHKASWTAAAVDGSLQPLATVRVPVGRNGYRALRRFAHRWPHARWAIEGAAGLGAPLTTLLGSDGIEVIDVPAKLAARVRVLSSGHGRKNDDADALSVGIAALTSPAPGTAQIDAATTALRAVVEHRDDLVKTRTQTVNRLHVVLTRLVPAGARRHLSADHAAELLRGVRPRDAAAKTLRALAMDLVSEVRQLDRRIAKAANDIQMAVSASGTTLTDLHGLGAVTAGEILGHVGEVSRFRSAAAFASYTGTAPIEVSSGEVVRHRLSRAGDRQLNFCLHVMAIAQVRHDTPGRAYYLRKRSEGKNHNEAMRCLKRRLSDIVYRQLIGDAAKQKAGPGGHSGAALSSRAAS

SEQ ID NO: 343312 - protein, 400 aa, unidentified
MECVFGIDVSKENANVAVLVDNVVIKQFKIGLDRLGFSLLSDELNSFNAPLIIYEATAMYSRRLRAFLQRDGWKYTELNPLAAKKVMEEFRHTKTDALDAVGLARAMIKNHFKPTYQESPVYTELHDLERTYQQFNKDIVTNKNRLHRALQLTFPEIEHFMSSTDGVLYWHIVQRFPHPAIVLSHEENELTEIILTETSKKIGLKRAMKLANRLLALAQNSAPAKEPQSHAVRAVIALAKEVERINQLKAQIIVEMTTLGENLSEVPLLVSIPGIGIKTALCLIAELGDVRRFHSANAINAYIGIDLIRYESGQYEAKMHIRKRGNPYARKILYRAILNIISVSQYQPTLISANYKRKKQSAQSHGTKKIAIAAMSQFNRLMHHLILNNELYDSTTFMPE

SEQ ID NO: 343313 - protein, 415 aa, unidentified
MALKIVYKICCGIDVHKTFVVACIASTNDKGITSYESHRFSTYTSGLKTLLQWLLDRNCKDVCMESTGKYWIPVYNILEPDCSIVLAHPKYVKAIRGKKTDKKDAKWIADLFKHDLVAGSFMPPADIRQLRDLMRYRFKLTCFKSSEKNRLQNCLTVSNIQLGNVVSDTFGKSAQAILDKLLENPADTSFDLEPLVYKSLKKKLPELRDAIDGYITPEQAGKLKVIKTHYEDLESRKAELEELILALAAPYQQELTILQTAPGISSPFTAIGIISEIGTNMEAFPSAKHLCSWAGLTPTNNESAGKKKSVRVSKAGCYIKPLLVQCANAVIKSTKHPEMRNRYLRLKKRRGHKKAIIAIARMLLTALYHMLKNGENYNPELYRKTDLPPAGREITIEQALMLIRNQGYKIKSATT

SEQ ID NO: 343314 - protein, 311 aa, unidentified
MENYVGIDISKRYFDLYCLPEGKQYRFENNQKGIRQCLKLLADIKPKLIVMESTGGYELALATELYVAGLPVAVVNPRQIRDFARAIGQIAKTDKIDAKVIAQFACMVEPAAKQVMDDKARQLKSLVARRDQLTDMHVAESNRMEHAVDRSIAHSIKAIVAVIERQIADINKQISEHIKHDQQLRRKAEIVDSAPSIGSTTASMLVTLLPEIGTLNRRQIAALVGVAPMNRDSGAFRGKRMTGGGRGRVRAGLFMPTLVAIQHNPVIRQFYQRLLSMGKTKMTAVIAAMRKLLTILNTMVAKNEFWNPKIA

SEQ ID NO: 343315 - protein, 316 aa, unidentified
MKRKMNSTIGIDIGKDTLVIHRLPDKATLEVSNDKAGLTKLLRWLSRDEAFRVIFEPTGPYHRLLEKTLAAANIALIKVNPRQARRFAEAIGRLAKTDRVDAAMLARLGATLDLQALPPKSEMLHDLRELRVARQGRVKDRIALTVRLRYANLALIKHQLRLSIRQVESHLAEIDAAILEAVRADEALSQRFDILTSIPGIGEIAACAMLIEMPELGQLEARQAAALAGLAPITQQSGKWKGHAHIQGGRAGLRKSLYMPALVATRYNAPLREKYQKLIASGKAAKIAITAVMRKLIVLANALLRDNRNWTPNTSC

SEQ ID NO: 343316 - protein, 472 aa, unidentified
MSWLAAADDGARIVPLPAISRARRRSPSRTVGQLLSVFFGKHHGEYAVRHRRVCGVGRERLHRAIVVDPMKREGTESCPLLTVTLVTNTGVPPMTTAIDTRDVCCVALELSKTSWVCAFASPGNSKATVHKIKTGDVDRLIGILKNGKAKAEHQLGRPMQIVLCYEVGYDGFWLARFLTARDIRTVVFDPASFLMPRRGRRAKTDRLDAEGMTRTLRAWLAGDREMARDVHIPSIEQEDAKRIERERKCLVEERVRIVGRIKGLLALHGIWLTGKRIGKGLKEHLEAMKTGDGRPLAPFLRRDIERMLFRYDLVSQQIAEVEAEGKEALSDNTGRFPNAEKVRHLSTLGAVGETTATVLVAEVYHRSFETRRHVASFIGLAPTPYNSGDVDRDRGISKAGNKLARQTLVELAWFWLRYQPNSKLSLWWRERFGDKGMRGRKVGIVALARKLAIALWRFVEDGIVPEGATLKV

SEQ ID NO: 343317 - protein, 421 aa, unidentified
MTSMTSLTLAANPERLPGPLFAGIDTHKDTHHVAVVDGTGRPVNDREFPATPTGYAQVVAFFQSHGPVERVGVEGTGSYGAGISRVLAAAGFTVMEIARPNRRHRRLKGKSDPIDAHQAALAVIAGTEAGIPKRGDGLVESLRILVSERHSAVKARSQAMNQIHGLLVTAPDQVRQDYRALGGEKLVAVLSRSRPAPGADPAIVARHTLKRLALRHSLLRDEIAVIDSHLNILIRVLNPVLLALSGVGIVTAATLLTAAGDNPERLASAAAFAALCGAAPIPASSGQRVRHRLSRGGNRKANSALHRIVLLRMRHQEPRTASYFARRRAEGLSDRDIVRCLKRHIANEIFRALTAPIPETPTGMLLRRRRQELEIPITILAATLGVPYQRLRRLEIGTRGDTELEQKAHEALNQIETPKAA

SEQ ID NO: 343318 - protein, 326 aa, unidentified
MEHELHYIGIDTAKEKLDVDVLRPDGRHRTKKFANTTKGHDELVSWLKGHKIDHAHICIEATGTYMEPVAECLYDAGYIVSVINPALGKAFAQSEGLRNKTDTVDARMLAEFCRQKRPAAWEAPHPLERALRALVVRHQALTDMHTQELNRTETAREVQRPSIDAHLLWLEAELKRLEKQIKDLTDDDPDMKHRRKLLESIPGIGEKTSAVLLAYIGLKDRFAHARQFAAFAGLTPRRYESGSSVRGESRMSKAGHVSLHRALYMPAMVATSKTEWGRAFRDRLAANGKKGKVILGAMMRKLAQVAYGVLKSGVPFDASRHNPVAA

SEQ ID NO: 343319 - protein, 317 aa, unidentified
MAEVTFPQLIQRACGIDVHLKVVVATIDGAGIQRETRSFKTFTSSLNELKEWLLSNGVTHVGMESTGVYWKPVYKVLEDSIPNVWIVNARHIKNVPGHKTDKMDSEWICKLLLAGLLKPSYIPPKEQRQLRDLTRYRNKLIQQIASEKNRMMRILEDCNIKLSSVVSNTSGTTATSLIDMLCEGKVLTLDDINSVYHGKLSASPEELLEACTGFVEEHHIYLLQMIRKDIDQTQTLVDDLSERIKRLLSKYENVLELLREIPGFSTKVVEDLVSEIGLDMSHFPSEKHLSSWAGLSPGNNESAGKKKAHESLTETNR

SEQ ID NO: 343320 - protein, 426 aa, unidentified
MKKLDFLSTLFVGIDVSSKSNVVCALDFQSNKLLQFSVSNNQPGAEEFVAKLISILEGSKFKTVVLALESTSFYGIHIANFLSSSSLLMPYNPYVYCLNPKMIANYRKSFIGLSKTDPLDAFVIADFARVGRINIKPWHGSQYLALQRLTRHRLHLVECITREKTYMVSNIFLKFSELSILKNEAHPFTSNHTATASAILTEMLSLEDLVSMPIEELVDFVCKTSKNRFADPAKVADILRQAALNSYRLDKCLYEPLTISIASSFNCVSAYQTEIKIIDKAIERAIKGLNPLEYQCLISIPGIGPVYASGILAEIGTISAFHSQEALAMYAGIVWKQNQSGDFRADDTKMSKAGNKFLRYYLIEAANSVRNNIPEYRDFYLKKYLEVKTHQHKRALALTSRKLIRLIFGLLAKNQLYSSKRVNQTE

SEQ ID NO: 343321 - protein, 371 aa, unidentified
MKQQTKSSNITVGLDLGDRRHRFCALDERGEVVEQDSICNDRVSLRKLAGRYHGALGVMEAGAHSPWISRFLEALGWRVVVSNPRKVRAIYQHERKSDQRDALMLARIGRMDLALLYPVRHGTAEAQQDLLRIKLRDSLVRARVAVINSVRFTLKSLGYTVRNPSSARFHKVVMEEVPESVREMITPSVQALAELTARIKMLELEINTLAQMKYPQSAQLQQIPGVGPITALYFVLKIEDPNRFAHVRDVGAYAGLCPRRDQSGESDPQLRISKRGDAYLRRLLVSAAHYILGPFGPQSALRAYGLMLAADGTARAKKRATVAVARKLAVLLLSLWKSQQPYQPFPGACLNGEQEDRRSGTIALHRMEATD

SEQ ID NO: 343322 - protein, 470 aa, unidentified
MPLIKPLSQTLKQDKEKFKVPKSVQQAIPIRKIWPDGIFQVESKYSRTFRFTDINYSIASKADKTEMFLDYSELLNALDSGCTAKITLNNRKINKEEFEQSLLIPMKGDGLDEYRKEYNDMLLSKISELGIPKDKIRVGLEATGHYSSNLAHFISEHDLPLLTFNPLLTNRYKQGFSLRKTKTDKVDACAIAQMIVSGKGSQTYSSSLYHNEEMKSLSRYRSQTMQKCSKLKISVSRLVTILFPELEGLTSSIHLASIYALLKAYPGHEQIAHCSMKRLTRLLSDASQGRFDKSKALEIHQAACRSIGKVSLSASMELVHTITDIEVLKQHIVEIDEKLKEMVDQEESSIIDIPGIGYTLCASILGEVGDFKRFPDVDKLLAYAGMSPSKHDSGDYHSKHNKMEKRGSPYLRKTLYLAARLVAQNVPRFKEYLEKKLSEHKPYKIALSHVAKKLIRLIYRLGISGCPYLA

SEQ ID NO: 343323 - protein, 352 aa, unidentified
MEMIALDCHKHYSVASVQSPEGRSLAECRIEHRRGSIRAFLASYSPGCPVAVETIGNWYWIVDEIEQAGKVPRLVHARKAKLMLGSIDKTDKLDVRGLNRLQQTGTLPTVWIPPAGLRDQRELPRTRMVFATARTRLKNRIHSVLDKYGLQDQLTGVSDIFGAGARERLEGCIKQLPPQAAYTSDLLLEQLDAVQERIEALEQRMAEVFRPTEELKRLDTLPGVGLILGVVLMLEIGDIQRFRCAERLASYAGTVPRVHASGGKTHYGRTRPDVNHYLKWGYTEAANAVAVHRESLAHRHVSQLYSRIRNRRGHASAVGAVARHLAEATYWMLTKKESYRERGITEVSPQGL

SEQ ID NO: 343324 - protein, 431 aa, unidentified
MTNRLQVGVDFSLKRADFCLLFPDGRPLEPHIAFANSRPGYSLAKRLLLDALDTYSFDGLDLSGEATGYLWLPFFLQLSADPDLAAYDLNLFLLNPRWVKWFKKCFAQDDKTDQKDPFYIAERTRTRRPDAIWSPLDCLPLRFYTRLRFHLIQNLAREKCYFSTFLFLKASAYRRLKTFSDVFGATSRLVLTQQPTLDELAALPVEDLASQLYELSGHHLPDPMDNARKLKRAVQESFSLDQTLALPVQRILDITLDHIRFLEAQVQQVDGWIATELEAYPLIAQLATIPGIGPVFSSGIGAEIGSVKRFLQVPKWDRKRKRFRPRNLRDAEDAVAKIAGLWWPRAGSGDFEAQDRRMAKTGNRYLRYYLVQAANLMRQHIPEYAAYYNRKFKEAVKHHHKRALVLTARKSVGLVVGLLHRDEPYRSREDR

SEQ ID NO: 343325 - protein, 346 aa, unidentified
MTIVEVDRAIVGGVDTHLDNHVAAALDPLGALLGTESFATTPAGYKLLLSWLGQFGTVTKVGVEGTGAYGAGLARFLRKEGIDVVEVDRPNRMARRLHGKSDPLDAVEAARAALSGRAGGQAKTRDGAVEAIRVLHVAKRSATRARAKALTQMRHLTYTAPDQLRCSMKGLPGNKLVTEARRLRPRSSSDPVTSATKASLSSLAHRIDSLDREIVELEALLAPLVEATAPELLALLGVGIDTAAALLVAAGDNAQRLHSESAWAHLCGVAPIQASSGKVTRHRLDRGGDRQANSALWRIVIVRLAHDPDTRAYMERRLKEGRSKREVIRILKRYVAREVYHYLPRG

SEQ ID NO: 343326 - protein, 437 aa, unidentified
MADTEVTDQAAELVERVAAIDIAKASGMVCMRLPHPSREGRRTQEVWNVPASTIGILELGDRLVCQGVTRVVMEATGAYWKPFFFLLEARGLDCWLVNAREVKNVPGRPKTDKLDAVWLARLTERGMLRPSFVPPKPVRQLRDLTRMRTVLIRERSRHKQRVEKILEDAQIKLSSVATDIFGVSGRSMIEALIAGKRDPRALAEMARGCMVVKKAALAEALTGQFEDHHAFLCRTLLDSIDFLSGQIDALTVRTTQAVEELPCPDPSGGSRPGAGADLVAKLVTIPGVGMRTAQILLAELGPDMTVFPTADHLVSWAKFAPRTMQSGGKNTSGPTGKGNPWIKGAIGEAALSASRSNTFLGARYKRIVKRRGRKRALVAVGHSLLVVVWHLLNEPETPYTDLGSDYHQHLVDPTRRTRDLVRQLKALGHDVTLTSAA

SEQ ID NO: 343327 - protein, 341 aa, unidentified
MSKVITIGLDIAKHVFQVHGVDGSGAVVIRRKLRRAEVLQLFEGLEPCLVGIEACATAHHWARSIMALGHKVKLMPPTYVKPYVKRQKNDAADAEAICEAVTRPTMRFVPVKGEEQQGILMLHRTRELLIRQRTMLINALRGHLAEFGIVTAQGRAGVSTLVALVEDDEHDLIPAIAREALLAVVDQLRDAHERVAAIERKIVTWHRSNEQSRRLETIPGIGPITASAIAATITDASLFRSGRELAAWIGLVPRQNSSGGKERLGHISKKGDPYIRRLLVIGAHAVLRFARNGKATTTKWAAALLARKPYKLAAVALANKMARIVWALMTKNEEFRSLTAA

SEQ ID NO: 343328 - protein, 422 aa, unidentified
MKKRIYRTMPVNAFQPFSIRREAIGAKLTVGIDIAKVDMVATLVAADKQVLATLRWKAPAENAALIAILHHFRTAEIPVEVAMEPSGTYGDVLRHQLVSHGFPVFMINGKRTSDAQEVYDGVPSLHDAKAAGIIAKLHLDGVSRRFSPLSPDRQQLRAAISVMDLHQQRYLQLVGHLEGSLARHWPELPTILELTSASLMALLARIGGPADVAAQPQQAARLLHGQSRGLLASDTITTVLASARTSVGLPLAGLERDALMAIAAEAYRALRSAKAARSIVEKLSRLTPATLLAPVVGLSTAAVVLSEVGDATTFSCAAAYAKAMGLNLKEKSSGTMKGQLKITKRGPSRVRQYLWLAVYRWIQIDPIAKAWYLRKKQRDGGRASRAAVALMRKLAKALYHVGRGGIFDSNKLFDVSRLQLDT

SEQ ID NO: 343329 - protein, 437 aa, unidentified
MNREVSTMKSNTQNAKIEAITEKTLVLGIDVGSETHYARAFDYRGIEYSKKPFKFSNTEAGFVTFKEWILDIKERHEKDKVVLGMEPTGHYWFNLGKFLQDNEMKPVLVNPHHVKKSKELDDNNPTKNDRKDPKVIAGLVREGRYMIPYLPDGVYADLRTASNIRFQLQAELTRIQNRISRWFNIYFPEYKTVYGKPDAKSGILILKAAPLPEDILTLGIDGVNQIWRDAKLRAVGKARAKTLIEAAEHSVGSKEGAVAARMEIRMLLEDYESRSIRLQEVMTLIEGLVKQIPMAEKLLEIKGVGIRTVSGFLAEVGDISRFNNPKELQKLAGLALVENSSGKHKGETTISRRGRKRLRYLLFEVAMSLVAKNPEFRELHNYYTTRRLNPLKKMQSLMAIAAKLIRVFYVMLTKGVNYDPKKMVNDIKRPAVYLQTA

SEQ ID NO: 343330 - protein, 469 aa, unidentified
MDKSKKQKRKNKEHRKVNTSHLEQLNINAAGIDIGAEFHYVAVPNGRDPEGQDVRHFATFTADLHQLADWLRQCNIDTVAMESTGIYWIPVFEILDSQGFDVRLVNPRNVKNAPGRKTDVLDCQWIQQLHTYGLLQSAFRPEDQICELRAYLRQRAMLVSYASHHIQHMQKALEQMNVKLTQVISDITGVTGMKIIRAILSGERNPVKLAGMRDARCNNSETIIAKALEGNWRSEHVFALQQAVELYDFYEKQIIECESRIQDHLESFDDRSNGTPLEKLRRKSRGSSNQFHFDARRYLHRMTGVDVTRIEGIEAPTALTIIGEIGIDMSPWPTEKHFASWLGLCPGSKISGGKVLSSKTKPSANRAAHAFRLAAYSLQRSKSAIGAFLRRKKAQKGAPKAITATAHKIARIFYNMLKYGTEYVDLGQEYYEQRYQDRVIANLKHKAKQFGFELVNIKEHKLLTGLPAN

SEQ ID NO: 343331 - protein, 388 aa, unidentified
MRTSITRASMDTHKKEHTVAVVYADTGELEVFTVRNTVKDIRKMVRKVQRQAPGEVHFCYEAGVCGFALKRQIEALGSRCEVIAPSLVLTRSGDHIKTDRRDARKLLSQFVAGQLTEVEAPSLAQEAAREITRCREAAKENLKRTRHQLLKFLTRHAYIYRDGRHWTQKHDRWLRSLQFDQADLREVFDWYYTELQHCVQRLATLDKEVAALADREEYREAVGALRCFRGIDTLTAVTVLTEIFEFGRFPSPRKLMAYLGMVPSEHSSGETRRTGGITKAGNRRVRRLLVESAWHYRHRPFVSKELKRRRQDQPQWAVDLADRAMARLHKRYWRLLDRGKAPGVVVVALARELAGFLWAVLHEQQWRAARAEAWGVPVTQEDGRRVPA

SEQ ID NO: 343332 - protein, 455 aa, unidentified
MSKLKKSTLPLEEARPFQGMSLINQKAAGVDIGAHEIMVCIPGPDNTQLVRSFGNYTADLYAVAKWLGEHQIQTVAMESTGVYWIPLFEVLESQAFQCLLISSRALRRVPGRKSDVSDAQWIQTLHTYGLLTGSFRPEADLVALRTLLRHRARLLEHRAPHILQMQKALLQMNLQLSQVLTDITGETGLRILRAIVQGERNPSHLAAMRNARCKKSETEIAHALTGTWREEHLFVLKQSLALYDFYTQQISACDAQIEQNYGAIRPEWELPAEAPDLAPKRLAKNAPKEGAHLRQHLKRICGVDLVKVDGISVSLAQTILAEIGTDMSKFPSEKHFCSWLGLAPKNDISGGKVLVSRTLKTKNRAGQAFRLAAVSVMRADCAFGGFYRRIKARLGPAQATVATAHFIARVVYRMLKDKVEYQPLSVGEYEKRYQEQQIKYLQKKAAKFGFQLAPV

SEQ ID NO: 343333 - protein, 449 aa, unidentified
MKELSLEIFNPHCAGIDVGSRFHQVAIGQKKEHIRRFGIYTEDHRLLIEWFKEKGITSVAMESTGSYWQTLFDALQNAGFEVILVNGNQIKNVKGKKTDVLDCMWIQKLHSLGLLSASFLPNSELQKLRTYYNHRQYLVAQTSKYSNKMQKAMRLMNIRLDVALNDIMGKSGRNIVQAILSGERDPRKLSLLADYRVKKSKEEIAKSLEGNWREDLLYELKECFFLYDVYSNKIRECDQHINDRMSSLSNQYPEVNFNEKKKKPASKFSPEFDIEGIAQRYFGVNLFEIPGVSHNTVLCFLTHMGHDIYKFPSNKHFCSWLRLSPNNRISGGKILSSRTPKGRNKVALALRQAANSVGNQKKHPMTSFFRKIAFKKGRGAAVTATARKLAVIFYNMVTKKESYKPFDHQNESENFKTKQIKKIKMKLFAMKLGAEELKNIFEACSLSTT

SEQ ID NO: 343334 - protein, 343 aa, unidentified
MSEVTTIGLDLAKNVFQVHGIDALGQVVVRRQLRRSQLLPFFEKQAACVVGIEACATSHHWAREIAKLGHEVRLMPARYVKPYVKRNKNDAADAEAICEAVTRPTMRFVAVKTEDQQSVLMLHRTRQLFVRQRTTLINAIRAHMAEFGIVAGVGRNGVGRLLRLIDEGSDERIPPVARECLQALRAQLVLVKRQILEADRRILAWHRSNELSRRLETIPGVGPLIATALVASIPDPHAFGSARDVPAWIGLVPKQNSTGGKERLGSISKAGNRYLRSLLVVGALSVIRRAKQVGYTRRAWLAELMARRPVKVAAIALANKIARVAWALMVSGTRYREPVPQAV

SEQ ID NO: 343335 - protein, 414 aa, unidentified
MSKIINVGIDVSLRKAAVTFVDQSGVRLGKPFEVPNTLPGAQELEQRLLALLKAGGFEHVRIGMEATSHYGFHLAEYFTATLELGHWRPLVYMINAKRVHDFKGAFPEKDKTDLVDAEVIAEFLRFGRLPEPYEGQAPYLPLKRLVRYRYHVVRTLQRETQYFVSHLFLKFPGWVQNKPMQLGATAKSVLTEFTPDELIGMSLDELALFIAKAGKNRSPDPKALAEAVQQAARESYRIRPELGKSVQLILASILRNMQALKASIKEIDAAIADAGKGFMNPLLSVPGIGPVYASGISASIGNIRRFPSDDALAKMAGLVWPRSQSGEFEAEDKRLIRSADRYLRYYLVEAANSLRVHNEEYRAYYQKKYQEVKTHKHKRALVLTARKLVRLIHALLSQNQLYDPARRFQSAAAS

SEQ ID NO: 343336 - protein, 354 aa, unidentified
MDKYIGFDMDCKKTVACVVQSGKKDLYATIGPDIEYMKKFLVQQKQDIGKVHLVFEISGQAGFIYDSLAGYADTITVANPSKMTWIYRTAKKNDRIDARKMAVLLSIGEIPAVYMPSKEVRQWRETILHRKKIVCKIVQVKNRIRATFKAHGYSKPLEKGSWWKKANWLWMRNICQRSIGVCDLWYMHLYNLLDEFDLLKSQLKRVTLYLDGYLAKNPGGRLLMSIPGVGPRTAEAVLAYTDDVNRFGNYKQYCSYFGLTPKLDESGLCRRLGHISKRGPSVVRWVICESSWVAIRKSKGLRAFYERVRCGQDGRKKIAIVAVARKLLSIMRAMLMTGELFNEELVNEMLRQAA

SEQ ID NO: 343337 - protein, 319 aa, unidentified
MSKNILGIDIAKLKIDVALLSESKTLTKQFDNSPKGFKLLQAWLKSLQISQVHACLEATGTYGDAVADFLHENGHFVSVVNPFSIKGYASSKMQRNKTDKADARLIADFCLTQNPVQWFPPAPPVIELQALTRRIEVLEEMLQMEKNRLDVSPPKTNPSIKRIIKNFEQEIENLQKSIKEHINQNPDLKEQSKLLQTIPGIGEKTAQLLLAEIEFSRYDSARQIAAYAGVTPKKSESGTSLRQTKLSKLGNGRIRKGLYFPAIVATGHNNIINEFANRLEKNGKTKMQIVCAAMRKLLHIAFGVLKHKSPFNPNMAFSS

SEQ ID NO: 343338 - protein, 414 aa, unidentified
MDIVHTHCAGLDVHKKTVVAAIIVPDPNGGLHKETRSFGTMTADLLALSDWLMEQGVTHAAMESTGEYWKPVFNILENNFEVLLVNAQHIKAVPGHKTDVKDSEWIAELLRHGLLRASFVPPLGQRELRELTRYRSTFVKERATLVNRVQKVLESANIKLASVATDVTGVSGRAILQALLEGKATPEEMAELAKGRMREKREQLAKALEGRVKPHHRFVLTELLCQIDGLDESILRFDEQIQEYCRPFEEAVELLDTIPGIARETAEVIIAEIGTDMSRFPSADHLASWAGVAPGNNESAGKRRSGKTTKGNHALGVALNHAANAASHTKNTYLSAQYHRLAARRGKKKAIVALEHSILIIAYHIIQRKEPYHELGGDYFDKRRPEATAQRLVKRLEHLGFQVSLQQMPASVAA

SEQ ID NO: 343339 - protein, 395 aa, unidentified
MEVMVKRCAGIDVHKKTITVCTLVGSLNRSKPKKQTKEFDTTTRDLQACAQWLESLDITTVLMESTGQYWRPVWNILEPYGFKMILANAQHIKQVPGRKTDMRDAQWIAELGRCGLVSGSYVPERDIQDLRQLTRHRSSVKEDLTRRKNQVHDILQRSNIKLSSYLSDIFGATGQRLLSLFINGEVINEQLIEETISKRVHASPRQLFEAMNGSLTTINRQLLQLELATIRRLTDEIKECEQLIEEHLQPYEDLYLRLLEISGISQTTAQVVIAEVGPTVGAFETVERLASWAGLCPGSYESAGIQYGSKTTRGNRYLKAALCRAGLTAGRSNHQEFRAIYFKFSERKQKGKGVVALAHKLLRIVYMLIKTGETYTPWQQKKDSSYGNSIGVPKN

SEQ ID NO: 343340 - protein, 493 aa, unidentified
MQQLLGVSCGLDIHKDMIAACILKARYHDTPEVIHEEFTTMRGDLFRLRDWIQSHGCMNVAMESTGVYWKPIYAILEEVGGMNLCLTNAYHMRNVPGRKNDEDDAEWIAALFMCGLLNKSFVPERGIRDLREYTRYHVKLTQSRVRLLNRIEKLLQTHGFKLSSVLSSIDGVSGISILEKLGRQGEVSVTDVRDSLERGVKKTAEEIAYAINGKLPLSSQMLLRTMLGGLISYDRQLADLFSDMMGIAQPYMPTVRLLATIPGINILSATCIIAEIGVDMSQFAKGAASLTKWAGLVPRDDKSAGKIISNKILKGNSYVKAMLCQCAWAATKTRKTRLANWYWGNVKRLGEKTAIIAVARKLLVYVYNIITTKKPYDTQLDVADAERIKAMKLASAKQQVSMLERKVSGSVTVEGIDPIDVNTATKTTKPKSGSKSKRQKSPFSNLDDLYRAVASNSTVIFDEQVSKPTATSDMDAATIKKKRGRPKKPLQPG

SEQ ID NO: 343341 - protein, 276 aa, unidentified
MEQVTTIGLDIAKRVFQVHGIDGSGAVVVRRQLKRAQVVRFFGKLPRCLIGLEACGTAHHWGRQLQALGHDVRLIPPAYAKAYVHRNKTDPADAAAICEAVSRPAMRFVPIKNEADQAICAVHRVRERLIGQRTMLINMLRSQMAEFGSVVAKGPQHVKELIGELVEPASLPEPLRQALFGIVRLLAELKEQIAGLDKQIALWHKGNERSRRLTQIDGYGPILSSALAARVQQPERFRCGRDLSAWIGLAPKQNSSGGKIRLGAISKKGDAYLRRL

SEQ ID NO: 343342 - protein, 309 aa, unidentified
MKEQLVYLGVDVAKSYLDGAIGNEKRRFTNERVGHRELIKWVKQFKGPVKVICESSGGYERTLVQALVGAKLKVSLVQANRVRQFARAAGIMAKTDRIDAEVLCAFGEVMRPGIISGSQLEQEHLRELESQRRHLTHLLVMEQNRAARVSDGCVRKLNRSLLNQIKRQIGQLDLLIKEHIEASPELSAKAQKLTAISGVGARTAALLLARMPELGQLNRREVAALVGVAPFNRESGKMRGKRAIHGGRRPVRHGLYMAALVAARHNPILRAFYLRLRAAGKPAKLALTATMRKLLIVLNSALKPGLNFT

SEQ ID NO: 343343 - protein, 347 aa, unidentified
MRFYNQQHDYYCGIDLHARILYVCIVDSAGNTVLHKKIDANPDALLDVLAPFQDQIVVGVECMHCWYWVSDLCLDYAFDFVLGHALYMKAIHGGKTKNDRIDSYKIASLLRGGNFPLAYVYPKAMRATRDLLRRRTKIMRHGADLKAHVSNTFSQYNHSAPNLQLRYPYAREEVRNRFNEPAINRNLDIDLNVIAFYTKELASVEHFIEQNAKQHNPQDYQLLQTVPGIGRILALTILYEIGNIQRFPTVQQFASYSRLIKCKAESAGKQYGTNGNKIGNAHLKWAFSEAAVLYLRGNKKAKKYLNRLQKRMSKAKALSALAHKLGRCVYFMLRNKTVFDEHKFLPE

SEQ ID NO: 343344 - protein, 408 aa, unidentified
MEVVITRCAGLDVHQATVVATIRVPDDQGGRRIVTETFGTMTADLLALRDWLQAYGVTHVALESTGVYWKPVYYVLEDTCTLLLINMHALKRVPGRKTDVKDSEWLAQLLECGLLRGSLVPPAAIRELRDLTRYRKRQIEDRAQEVNRLHRLLEDAGLKLASVMTDVMGVSGRAMVEALLQGQRDPVALAELARGRLRRKLPALREALAGRFRPHHAFLVTQILAKVDFLEETIDRLTAEIDERLRPFEADLARLTTIPGVARLNATTILVETGADMARFPTAAHLCSWAAICPGQHESAGKRRTGKLRAGNRYLRGALIEAGQAATRAKQTALQARYYRVKRHRGHKKAVVAVGHQILEIAYYLLRDKVTYHELGADYFDRRDRDRTMRRNVKQLEALGFKVTLEAA

SEQ ID NO: 343345 - protein, 422 aa, unidentified
MLEEDTAKEEIVARVAACDIGKAELVCCARIPNEDRPGRRLQEVTTWSTMTRSLLGMADHLRCLGVTRVVMEATSEYWKPVFYLLEAHGFETWLVNARDVKHLPGRPKTDKLDAVWLAKVAERQMLRPSFVPPPEIRRLRDITRYRGDLVEVRTAEKQRVEKLLEDAQIKLSVVVSDIFGVSGRDMMAHLIAGQRHPKALAQLARSSMRTKISALEEAFTGYFTDHHALLLSKMLARVDGLSADIAELDTAIEEMVAPFAETITRLDEIPGVGPVAAAVIVSEIGRDMSRFPTAGHLASWAKFTPTTKESAGKIKGRGSTGHGNRYLAKVLGEAAVCAGRTNTFLGERYRRIARRRGKKKAIVAVGRSILVIIWHLLADPEARYTDLGPDYHDRRIDPERKKRAHIHQLEALGYTVTLAPAS

SEQ ID NO: 343346 - protein, 320 aa, unidentified
MLSFCGIDVSKDRLDVMVLPDEYSSSVPNDPAGWAILVEQLRGFSITAIGIEASGGYERGAVRSLQAAAMPVRQVNPFKLRQFAKASGVRAKNDPLDARMIASFVGIMPTRPAQRTTPTAEQLVEMLAVRRQLSAEKTAAENASRLLEDLMLQRLSRRRIARLAADIELLDKRLVEIVANDATLAHRYRLLTSMPGVGPVLACTLIALLPELGGMSRKQVAALVGVAPYAFESGTLKGRRCIWGGRANVRQVLYMAAMSASNWNPVLKLFHDRLKGAGKLPKVVIVAVMRKMITTLNAMVRDDIAWADRLSGRHSVTTAR

SEQ ID NO: 343347 - protein, 317 aa, unidentified
MLGIDVSKDTLVATLVDSTTRKPRWTHSFPNTEAGIRRLLARTPAAVSWVLEPTGRYSLLVVQQAQAAGRTVLIADPKAAAHYLKSLSPRAKTDRIDSVGLALFALDRSLRPYPVKSAPLEEVDQLLSARRGIAEAISRLKQQLRELPHAAGPLKQALDALAKQQTELERQIAQRTKSEPALARVAELDRVHGIGLITATSAASRLAARGFARVEQWVAYLGLDVGIRQSGKRKGEWGLTKQGDAELRRLFYLCAKSTVTRKTSPFAAQYERELKKGMKKTAALCAVARKMAKVVWSLHEHGGQYEPSRVYGAQAAA

SEQ ID NO: 343348 - protein, 342 aa, unidentified
MDHSAGLDVSVKETSVCIVDETGRIVREVKVASEPEALLPVLKNPAYHFKQIGLEAGPLSQWLYSALAEAGLPVICVETRHMRAVLKAQINKTDRNDARGIAQMMRVGLYRPVHVKTLRSQKLRMLLTHRKLLQSKAIAIDNDLRGTLRNFGLKVGMVGKMKFEARIKELVENIPDLAVLVEPLLIVRRVLREQFVIQHRRLLATVRDDEVCRRLMTVPGVGPVVSLTYRTTVDVPARFRKSKSVGAVFGLTCAKYQSGEVEWSGRISRCGDEMMRVMLYEAAQSMLRSKRWSWLKAWAMQIARRRGMKKAIVALARRLAVIMHRIWIDGTEFRWTREAAAA

SEQ ID NO: 343349 - protein, 317 aa, unidentified
MHYVGLDLHQRTSTVHILDHYGRTVKEKTIRGHWHKTVFYLAKYKKPFAVCFEATCGYGPVYDALAKIARRVVMAHPGQLRLIFRSKRKNDRVDARKLAKLLYLDEVPTAHVPSIDVRQWRELIEFRRRLVDRQTACKNQIRSLLRSHGLQAPKSLWSRKGLAWLGALEWPGLSGWVRREMLVEELGACRRRVRTVTRALDRLARRHPGVQLLRTIPGIGPRTAETVLAYLVPCQDASAGRDRLGHITKQGPATARKYLVQGTWQAIRRSVRVRAWYDRVTDGRPDRRKIALVATAHWLVRCMFAMLRDQQPWREAA

SEQ ID NO: 343350 - protein, 345 aa, unidentified
MVNRSKPEAQVFAGIDVSARELSIAVRCGTEDRAVTTFGNNAAGHKALLAYLLRGNGRSRVCLEASGNYSLDLALTLQAHRQVEVSVVNPRRARRFAESLGERSKTDPVDAGVLCEYAARMPWVAWQPPSSLALRLRAITRAIEALGVMHTQEKNREHALASSQALPAVVIQEMRRHQRYLEHRMERLRREALRLIARDCELDRRFRLMLTVPGIGQTSALQILGELVVLSDTLDARQWVAFSGIDPSQFTSGTSVQKRPRISRGGSRHLRRALYMPALVVVRHAPHLRAFYQRLLSRGKARLQAVVAVMRKLLHALFAMFRSNQSYDGSKLCPIELTNKLAAVA

SEQ ID NO: 343351 - protein, 350 aa, unidentified
MLIIGCDFHTRYQQIAMMDKATGELVERRIEHETGEARAFYASLPKPVLVGIEATGPVQWFERLLAELGHELWIGDSAQIRASAVRQQKTDSRDALLILDLLLSGRFPRIWVASSAERDLRQLLWHRHKLVCMRTMVGNQLHALAMGQGLCRKKKLFTKKGRAELEGLGLGPWASRRRSELLRLLDQLDPSIAELDQAVLEEAKRRTDAVRLMTHPGIGPVNALAFVLTIGPVTRFRRSKQIASYLGLNPSERSSGGRQRLGAISKQGNTMVRWLLVEAAQKAARFDPGLRQDYQRLKFRRGNAVAKVAIARKLAVRMYWMLRSGADYARLVRMQGSPRGTLVGASPSLA

SEQ ID NO: 343352 - protein, 354 aa, unidentified
MSEYAGKQFVGIDLHRRRSVVVRTTDTGEVLETIQILNDVDRINAVMARAGESPEVVLEATYGWYWAVDALQAAGANVHLAHPLGVKAFEYRRVKNDVRDAIDLAELLRLGRLPEAWIAPPATRELRELVRHRAKLVGLRTHCKCEIHAVLAKCGIQVIMSDLFSPAGEELLERVSLPGPYAARVQSLRRLVEDLEEEIDLFARLARGRLVADPGYVAVQQLPGVGPILGALFVAEIGEVTRFGTAAQLACWAGLTPKHRESDTHVHRGRITKQGSPLVRWGAVESVKRIGPGTVVGAHKHRVAKRRGKNIGTVAAARKQIEFVFYALRDHHVRALHPPRPPATPVPGQQGAAA

SEQ ID NO: 343353 - protein, 404 aa, unidentified
MLDTDGVGVFLGMDVGKSAHHGHGLTPAGKKIFDKPMPNSEPKLRAVFDKLKAKFGTVLVIVDQPASIGALPLTVARDAGCEVAYLPGLAMRRIADLYPGEAKTDAKDAAVIADAARTMPHILRSLELTDEITAELTVLTGFDQDLAAEATRTSNRIRGLLTQFHPSLERVLGPRLDHPAVTWLLERHGSPAALRKAGRCRLVELIRPKAPRMAQRLIDDVFDALVEQTVIVPGTGTLDIVIPSLAASLAAVHDQRRAPEAQISTLLEAHPLHQVLTSMPGVGVRTAAVLLVTVGDGTGFPSAAHLASDAGLAPTTKSSGTSIHGEHAPRGGNRQLKRAMFLSAFACMNAAPASRAYYNRQRARGKTHTQALLRLARQRISVLFAMLRDGTLYESRTPTITPAA

SEQ ID NO: 343354 - protein, 367 aa, unidentified
MRKDTLYVGLDTDKKHIDIGLAEPLPKGEVRYWGKIANDAAALEQVRKRLQKNGRALVVCYEAGPCGYGLYRWLNGKPGVSCQVVAPALTPRRPGVRVKTNRRDCLTLAKLLRAEELTAVWVPDPAHEAMRDLVRARGAAKEDLNRCRQRLGGFLLRQDIRYAGKPWTKKHRAWLGRLSFAEPAHRLLVGELLEALDQATARRDRLSDHIAELAPSWSLAWLVEALQTLRGYQLINAATVAAEIGDPRRFDNPRRLMGYLGMAVSEYSTGERVRRGGITKTGNKRARTALIEAAWTYARPAKRPKAAALRQPAAVRAIADKARHRLSARYRKLVARGKLPAVAVTAIARESLGFLWAIAHAAAPPQR

SEQ ID NO: 343355 - protein, 329 aa, unidentified
MGTAATAVIGIDVSKATLDCCLLLPGGGARERAFPNDPAGFAALLAWADRHAGGAARFGMEATGGYEDALATHLHAAGRPVGVVNPTRVKYAGVMRGRGNKTDRADARLIAEYVRDQAPPPWSPPAPEVRELQALVRRRDDLRQLAAHEKARLDAPLLTPAARRSVARVIKLLGREADAMQAAADALIAATPALAAGRDLLATIPGVGAQTASTVLAELPRLDRVPSAQAAAAYAGLSPREFRSGSSVRGRTRLSKAGNARLRKALYLPTLTAIRFNPLLKGFFDRLVAAGKPRMQAVGACLRKLVMVCYGVLKNRTPFDPDWTSRITP

SEQ ID NO: 343356 - protein, 410 aa, unidentified
MKMAGIDVHKKVLMVVVVDASVPEEKPVRRRFVTLPSELQRFRIWLQEQGVEEAVMESTAQYWRSVWLELEPHMSLHLAQAFSNRAPRGRKHDFKDAERLVRRLMADELILSFVPKGEQRIWRSLTRMKVQLTRDRVRLQNQMECLLEEMRIKLSIVVSNLLGASGLRILHALAQGETDPKRLAELGDERLQCTQEQLVDALTGRVQPMHRGMLALQLQRLQLIDQQMTQLNSMIAQAMKSHQDAVIRLAEVPGLGVDSAQQIIAEVGAQASTFSSAAELTAWVGACPGKEESAEQNHSSRSAKGNKYLRRVLNQAAHAAVAKKGSYFQGVFRRLMPRLGYKSAIWAIAHRLCRVVWKILHEGVRYIEQGREVGPREKKQRAQMLARALRKLGYEVTITPINQLAPKPAI

SEQ ID NO: 343357 - protein, 348 aa, unidentified
MRFYTKTHTHYCGIDLHAKTMYLCILDPEGQILLHKNIRSRPEAFLEAVAPYREDLVVAVECIFTWYWLADLCRRESIAFVLGHALYMKAIHGGKAKNDKVDAYKIATLLRGGTLPMAYVYPPEMRATRDLLRRRLHLVRRRGNLLAHVQNTHHQYNRDVPSKKVAYRANREGVAEAFEDRDVQKSLEVDLTLIGHYDELLRDLQLHLEHRAKEHDPKAYYRLRSVPGIGKILALTILYEIHDIQRFPRVQDFLSYARLVKCAHSSAGKRLGSGGAKIGNVHLKWAFSEAAALFLRNNPEGQKHLRRLAGRHGKAKALSVLAAKLGRAVYLLLSKERVFDMRRFLATS

SEQ ID NO: 343358 - protein, 345 aa, unidentified
MKIVGCDLHTRYQQIAMLDQETGELIERRLEHESGEARAFYASLEGPVRVGIEATGHTRWFERMLAELGYELWIGDAAEIRASMVRKQKTDARDAAHLLELLLSVRFPRLWRPTMAERDLRQLVWHRQKLVWMRNAIGNQLHALAMGEGVCRKKKLFTKKGRAELEGLALDPWASRRRQELLRMVDQLDGSLKEFDQAVAEQAEQSEAAVLLMTHPGVGPVTSLAFVLTLGPVERFARSKQVVSYLGLNPREHSSGGRQRLGSISKQGNPMMRSLLVEAGHTAARLDGELRQDYQRLKLRRGGGVAKIAIARKLAVRMYWMLRSQASYAQLVRMQGSPRGTLVGQ

SEQ ID NO: 343359 - protein, 355 aa, unidentified
MNDIKYIGMDVHKTSTSIVVLNTSGRVVTSAVVETQAQALVAFIQGQRGTLHLTFEEGTYAAWLYDLLAPHVSRLVVCDPRHNALLQAGCKNDPIDAHKLADLLRLNALRPVYHGQNSLYTLKELSRSYLVLVQDSTRVMNRIKALYRSRGIPCRGTQVYSPGHRASWIDQLKEAGVHQRAELLYRHLDGLGVLRREAKQALLTESRKHSMSRILRPVPGLGPVRIAVLLAMVQTPFRFRNKRLFWAYVGLGLVTRISAEFAVVNGQLKRSGKAPTIRGLHPNHQRELKEIFKSAATAAVHRPGPLQQFYQGRVEAGRKPELVRLTVARKLAAVTLHLWKKGERFDVKHLKPTAA

SEQ ID NO: 343360 - protein, 441 aa, unidentified
MKNQFNCIQNVKLSQLTNETLIIGVDIAKEFNVARAFDFRGVELSRKEITFSNYFDGYKKFDDWIENLARIHNKNKVFIGAEPTGHYWFPLHNHIIQKKLSKDISYDFVLVNPFHVKRSKELDDNTQTKTDRKDSKVIAFLVKDARFSYIPQQSEEYIELKNYCDLRQKTLKKINGYTNNIIRWTDKYYPEMRTIFSDIVCKSSLVILHSLSFPADICNKSPKDIVDLFRAANIKQGIGLKKATEIIYLSQNSIGLSYGNNVAKFEIVSLIDTYRFLMDRLEKINIEIQRVTEMIPYYNKLNAIDGLGTVTISNIISQIGDISNFNSPKQLIKLAGLSLKENSSGKHKGVTTISKRGRSKLRAALYVAVITLVVNNDEFKLLHKYYKTRPVNPLTGKQSLIALCGKLLKLIFGIVKHNEEYNANKFLEGIKPKLIELKIAA

SEQ ID NO: 343361 - protein, 422 aa, unidentified
MKKVTEFTKKVKGRVNNPVLTKAIWVVGIDIGKKKISCALMKKDQTVLCRFNTKASIDGYKKMLDRVKEKTKGRGKVVYAMEPTGHYWMVLGQFFEDHNRQYVLIHPLAVARSREVVRLNRSKTDPMDARLIGELACRGIATRTQIPKDYWATLRFLAREYMDREKDIVREKLRINSYVETTLPGFLGVFPKPLCLAGRACLRTLADFKEAIKGDFPSFEKKVRKHYTGKRLLVSRVRQVYDTLRQSDTMGLRAGRYAMFGRIINSLERLEVAEKQQETAKESLVSYYNQSEYKKYLNSVQGTTSTTNALVLGFMGNPASYDNPKTLIKLAGCDPVLNESGKYRGKTSISHRGRSLLRKAADRTAFTIEKRNVVFRNFFHNLITRQKNKLTKRQARIACINKYFRIIWVLCNHRVTFNPSLA

SEQ ID NO: 343362 - protein, 305 aa, unidentified
MSSAIGIDVSKARLDVAIHGQARQTQFPNTPQGHRRLVKWLTSLAPRQVVLESTGSYDQAVVDALFAAGLPVVRINPRQARDFAKATGQLAKTDRLDAFVLAHMGHALALPRYEPRAGWQRRLGEWVQRRRQVVEMLVAERQRLETMQDRCLRGLARRHIQHLERTQARLEQEIGQQVQAQPHLQILRSLKGIGPILQATLACELTELGRLSGKAIAKLAGVAPLARDSGTLRGRRMVWGGRWQVRQPLYMAALVALRHEPPLRAFYLGLRERGKAAKVAIVAVMRKMLVILNARMRDQLAAAIA

SEQ ID NO: 343363 - protein, 494 aa, unidentified
MKTSKHTKITSVYRNQNVLIRAVFQRAGDTRKVLCVALDYAKRKHVALICDGNGDILKAAFPVENNPAGIDFLIKEVSATARRRKIPKNQIFLGGEDEAAYVANFTAALREHDYLVVRVSAYEAKENRENLIASTDPLDLLGIAKTLLARRARLTGETDCSNPVYQHLRELNRCRRGLVRQKTAASNRIHALADQLCPGFLNDSKCGLTAFSEASLALMQERFSAPEIARRRPIALANLLRRHRIHHPDETATKIITLAREALPPAPHRVVTLQRTLTATTELYRCLERNALELRSEAAHALATTPYALLTSIPGIGFVLAAGIAGELGDPRNLAPLDSLCAYAGIVPSTYQSGGPDSPAVQGRTSRRCNHILKDWVVQSAQKIRLYGPPELKDRIIRWNANGQHGIFAAARRYLRLVRTLAQNEVPYLGPEGRARDVDPDQLDAAAQHTWGVLQRKWRPLSGGLDLITDQSHPIGFWRRVIKETHGIDLPEHS

SEQ ID NO: 343364 - protein, 360 aa, unidentified
MKVQRTSIGLDVHARSVVGCGLDGDTGEVFQRRLCPDHQEILEWIQGLPAPVAVTYEAGPTGFGLARALICAGVDCRVAAPSKLQRPSGDRVKTDARDAAHLARLLHLGQVVEVAIPSPAQEAARDLVRAREDCRGDLMGARHRISKLLLRQGIVYCGGQAWTGKHEMWLRAQRFDTAGLQLAYDAAFDAMVCCVHRRDRLDEAIVGLAADSEFTPVVRRLGCLRGVSTLTAFGLAVEIGDWSRLTGRSIGAYLGLVPTEYSSGNTRAQGGLTKTGNTHARRLLVEAAWHHRAPYRPSRDLRRRWEAACPAARARGHAANHRLHTRWVGFDTRKKRPVVANAAIARELAGWCWSLAVLDG

SEQ ID NO: 343365 - protein, 443 aa, unidentified
MINPDAAGIDIGHREHWCAIPADRAAKPVQQFGTFTEDLEKLADWLKECGIKTVAMESTGVYWIAAFQILERKGFEVRLVNARQVKNVSGRKTDVLDCQWLQRLHSYGLLSASFRPADQMCVLRSYLRYRDELVCARSAQCQHMQKALQQMNVQLHQVLSDITGLSGLRMIEAILAGERDAQKLANLADRRVHASKATIQKALKGDYRSEHMFLLKVAFELHGTYERKIRECDEQIITEMAKLPTRVDPKQKPLPPRKPGRALIHDLVAGKDLREELYRWTGVDLTAIEGIGVLSAQVILSEIGTDMSRWRTEKHFTSWLGLCPDNRISGGKILSSHTRHVINPVADALRIAATTLERNKSALGAFYRRMKGRLGPASAITATAHKLARLIYRLLKHGDAYVRQGMELYEQRYRERLIYNLKKTAASFGFQLTQTKELTQGVS

SEQ ID NO: 343366 - protein, 411 aa, unidentified
MIKENYIYVGIDLHKETHTAVMIDCYNQKLGEITFPNRPADFPKLVAKVKKCNTDGKTIVFGLENAYGYGRPLAVWLIDKGYFVKDVNTAISHRQAKHRGAMYRKSDSDDAEAIALATLNMLDKLPDACPNDAYWSLGQLVHRRDNIMKQRTRLVNQLHEQLCIAYPSYKSFFNDISRPTALYFWEHYPSRKYLRGKSVEDLREELVPVSHNRCSTKNCEKILDAVASDKVKNNAYQDARDMVTLSIVSDLQHYDSQLAEVDKMLEQMYKMLGCTLTTIPGVNVITAVKILAEIGDIKRFSNANKLAQFAGIAPLHLSSSGKGKDVATKQGNRRLQATIYFLAIQMVQVSSKGTPRNPVVRAYYEKRKAEGKTSQQALICISRRLISVIYGMLKNGTEYRMPVVESAGENR

SEQ ID NO: 343367 - protein, 376 aa, unidentified
MQAAQIRAYEGNTTLYMAMELSNSKWKLGFGNGTKIRRKSIDARDRQRCLEEVALAKGKLKLPADAPVVCCFEAGRDGHWIYRWLESEGFEVMEIDSSSIETARGRKHVKTDRIDVEKLLDLLIRFHCFGLRKAFRVVRVPSVAAEAGQRLHREDEYLIRQRTRVSNRIKGLLIAQGVDTVSLRGNFTSYLERVRLWNGEGLSAELKTELTRMHAQYVVFNDQLKALAKSYAEELAADTPLAEMRRCLETLKSMGPKTSRILSAEVFGWRSFANTKQVGAFAGLTPTPSQSGDSDTEQGISKAGNRRVRRVMIEFAWLWLRWQPDSALSQWFNRRFAHGGKRQRRIGIVALARKLLIALWRYVEHGVIPEGALLKG

SEQ ID NO: 343368 - protein, 353 aa, unidentified
MSKILAIDLGKNNSAVCIFDRSSLKCKYKTLRTRKQVMHDLFVEFADQIEIVLFETGSQMGWVADILWALDIAFKVANTNHAAWKWKNNPNKSDRKDAQRLAMMYHTGFFPMVHVPIREVRQKRSLINYRDDVVKRITKIKNSIRAILGREDIHLPSGKKGWTIKALKSIRAMSIPVKEIDDMEQIWKGQLHSELNQLDNTTEELTAVEFKLNALGESDERVKLLRTIPGVGPRLSEAVVAIIDDPHRFKNGRHVSSYVGMVPRRWQSGQVDITGRISKCGNKLLRTLLVEVSWLGLREPWMREIYNKIKRGDKKRSKVAIVALARKLLVICWAMLKNGTTFDVDYAKIFAKC

SEQ ID NO: 343369 - protein, 317 aa, unidentified
MKKAVEIFVGMDVSKAWLDVAVHEQEEGFRTSNDDTGIASLVKRLKKLKPSLLVLEATGGFEKLVVAELTHAGLPAVVVNAKRVRDFARATGRLAKTDELDAKVLAHFAAAVRPPLRTLRSEEEEQLTALLTRRRQVLDMLTMEKNRLVTVRAKMHLEIAAHIQWLSSSLKDLDKEIEDFVEGTPVWKEKDALLQSVPGVGPVTSATMLGMLPELGLLNRQQIAALVGVAPVNKDSGKKQGKRRVYGGRADVRSVLYMAALSAKKFNPVIRKFYERLIQQGKEKKVALTACMRKLLVILNAMMHSQQPWRPQPVSLP

SEQ ID NO: 343370 - protein, 370 aa, unidentified
MLDTTTFVGLDVHARSIKAVSLDVMTGEVRCATFGYDAGAVAGWVRSVDPKARCVYESGVTGFDLQKRLSGLGVGCAVGAVSKMIKPSADRRRKNDRNDAEFLARMLSVGNVVEVWVPDDECEAARDLTRALEDARDDLSRAKQRLSKFLLRHGLAFDERTPAGRRKGNWTRAHWSWIESIRFAEGADNDVLAYYVDAARRAAEEKARLEGLVEAEARKPRWRRRVDSLRCLKGVDTATAADLVFEAGEFSRFRNARSFAAWVGLTPSEHSSGESDRRGAITKAGNKHLRKALVEAAWHYLTCSGRPKDLAKGQAPDRVARRHAAKGVRRLVERREALLARGVHNNKANVATARELACWVWAVGLMAEEA

SEQ ID NO: 343371 - protein, 380 aa, unidentified
MSMAKKYVGLDVSKNKIVVAIAPENRDEAVRYWGSISHTKEAVRKLVDQLTKEGDVTLDVCYEAGPTGFELHRWFQEWSVSSTVTAPQALDTKTRIKTDKRDAIRLAQLWRAKELTPIYVPTPDDEALRDLSRAREDAVEDLNRHKQRLTKFLLRHQIQPTKEMRLWSFAYEEWLDTLRFSREAEDIVFQEYRKSIHEATSRVKRYEEEMERQAEMSNLAPMIQALQGLRGVALVTATTIAAELGDIIGRFSSAAQLMSYIGLVPSESSSGDSRRQGRITKVGNAHVRRVLVEAAWSYRYSPAIRRRLRDRLEGLSSEVSSISWDAQKRLHKKYKKMQGKGKHMGTVATAVARELVGFIWSIAKEVDKQRKRQKQPSSVA

SEQ ID NO: 343372 - protein, 373 aa, unidentified
MRRRDPQAGDSPTCPGSKRPAFSRGVVRRLLVASPNSCLGLQARIVQGRVEASRFRTGGLMTAATVFVGIDVAKATLDVACRPSGDRWQVAHDPRGIEALLHRLSELGGVLVVLEATGGYEQTVAAALASAGVAVVVANPRQVRDFARATGQLAKTDAIDAAVLALFAERVRPEPRPLPDEARQSLEALVTRRRQLIEMLIAEQNRLGLARRAIRRSLTDHIRWLERQLGGVDRDLDQAVRASPLWRAQDDLLQSVPGIGPITSRTLLAELPELGRLSRKEIAALVGVAPLARDSGTLRGRRTIWGGRASVRAVLFMAAATATRWNPVIRTFYQRLRAAGKPAKVALTACMRKLLTIANAIMRSQTPWRALTA

SEQ ID NO: 343373 - protein, 409 aa, unidentified
MDVLYDRCCGLDLHKRSVTACRIVPGRQGQPTTEIRTFGTMTADLLALGDWLEAGGVTHVAMESTGVYWKPIWNLFEDRFTLLLVNAAHVKVVPGRKRDVGDATWLAELLRHGLLQPSFVPDRPARELRELTRYRSSLVRERTAEINRLGKTLEGANIKLGSVVSELTGVSARAMLRALVAGAEDGAALAELAQGQLRRKRPELQQALTGRMSRHQRFMLVQHLSHIDALDAQIAAVGEEIAERMRPFEAELTILDSIPGIGRWSAEVILAEIGPDMGRFPTAGHLASWAGMCPGHNESAGQRRSGRTRKGSPWLRVTLTEAAYAAGRSQDTYLSARYHRLIGRKGKKKTAIAVGRTILELAHQLLSTGQLYDDARARTHLALVPVTEEERLIRRLEKLGHRVMLEPAA

SEQ ID NO: 343374 - protein, 349 aa, unidentified
MNKEKLSYGGKKVYLGIDVHKKSYSVTVMYKGEVVKRDKMRADAQALCRYVKTHFKGAQVHSVYEAGFSGYSLHRILVEGGIKNIVINPASVERAANDKVKTDRVDSRKLAEQLSAGRLKGIYIPSKDQEQARSLTRTRDQIVEHRKLVSNQIKSKLHYFGLMRMDDKRRLSERYLKELEGQELGKYLSYSLRLLIEQWRFLNAQIKELRQKLEEQARENKQIEVYRSVPGIGEVGAPMLANELGDLSKRFVNERKNFSFTGLTPGEHSSGESERKGAISRQGSPRIRKYLIEVAWRAIYQDQALLEAFERIAKTRGRKRAIVAIARKLIGRIRACFKQGCLYQVGVVA

SEQ ID NO: 343375 - protein, 422 aa, unidentified
MLEETQDEQEIIARVAALDIGKAELVCCVRVPDPTGGSRRVQEVTTYSTMTRSLQTMAERLLDLGVTRVVMEATSDYWKPPFYLLEAHGFQTWLVNAKDVKHLPGRPKTDRLDAVWLCKVAERQMLRPSFVPPVPIRRLRDLTRYRIGLVSDQGREKNRVEKLLEDAQIKLSVVASDIFGISGRDMMAALIGGERNPQVLAQMAWTRMRTKIPQLEEAFVGYFTEHHRFLLAKMLSRIDALDADIADVETEIDAQIAPFASAVARLDEIPGVGATAAAVIIAEVGVDMTRFPTPAYLASWARFAPGVKESAGRKKGTGATGHGDRYLARVLGEAAVGASRTNTFLGERYRRIARRRGKKKAVVAVGRSILVIVWYLLQDDAVHFHDLGPDYYDSRINPERKKRNHIRELEALGYRVTLQPAA

SEQ ID NO: 343376 - protein, 332 aa, unidentified
MKYLKQIVGIDVARNELVVTLGRMREDLSIELCARKTFANDKNGFWSLVCWAKKLTDSSVSVRFVMEATGAYHELLAYYLVERGDEVSIILPSKISNYVRTLETKTVTDKTSADAIARFGLERQLDRWRRPSLVYATLRQLTRERNQLLDEQTVAKNQLHAELAGALVNKQSVKRLEERLALCERQSKEIVAELSAVVKADKKVGEQVVLLCSIPGIGFLTAVTLLGETNGFDLIRNKRQLTSYAGLDVREKQSGTSVKGQSRISKRGNKHIRKALYFPALAAIRCDERYKSLYHRILSRTGKRMKGAVAVQRKILEMAYTVFSTGVRYDKY

SEQ ID NO: 343377 - protein, 472 aa, unidentified
MIKSVGIDFASAGEHKARCLDERAEPCDGFDFDTSPDGLAKLEERIFKDGSNPVVVFEPTGLAWVMVAVYLRAQHPDCRLVRVQAQKVVALRKYLRRSSKSDKIDSLTMAKMPFIDAERLQDVYLPPANIYAMQRLARQRKRLEAEIGARKTRIGSIVDGYLPGVRRVFSDPWSAHARAFLRSKLNPLAVARAGEKALHSFLSKARAHRKSDTVESHVVYVACQHAATLYELSAPAGTMNDDFFEALQDEISRELRLMEVAEAESEAIAERLEELYKQLHPSDNLRTIPGVGEHTAPIFLACIGDPARFRSQSAFASYTGVVPAARQSSQSEAKGLRMTKAGPAIMKWALFQSGQIGRRYDPQLAWVYYREMVYRGKNHKQAMGAVMSHVASRVLTVLREDRPYELRDVEGRPISREESRKLILSHYQVPEDIKRERRRRKTSTSKTTGHQRRKRETASGSTIEAAYAPQTA

SEQ ID NO: 343378 - protein, 324 aa, unidentified
MFYLGIDVSKAKLHACLLEPAGGKGKTKAVDNTAAGIALLLDWAARHGALPAQVHAVMEATGVYHEPTALALFDSGVTVSIVNPAQAKDVARGLAVRTKTDGVDSWVLARFGALLNPPAWQPPPPEVRDLRALLARREALAQDVRREQNRREKALATATPLRVRQSIDDAISFLEQELARLQQDIDDQINGHPSLKADSALLTSIPAVGPQVSNQLLTLLRSHPFQSAGQLAAYLGVVPVERQSATSLLGPARLSKAGPARVRAVLYMAAVVAIRYNPHVKALYERLVARGKAKKAALGAAMRKLVHLCVGVFKTRQPYQADYA

SEQ ID NO: 343379 - protein, 408 aa, unidentified
MRIIGLDIHRMFAEAVALEDGEPKRLGRIGMTRDHLAAFAKTLDASDHVVVEATGNATAVTEILAPHVARVVVANPLQVHLIAKAKIKTDAIDARVLAQLYAAGFLPEVWIPDAATLARRRQVTRRTQLVRQRVRLKSMIQSILHANLIPRCPHADLLGGKGRAWVRAQHLPKDEQDAVEQHMQEYDRLTEAQAGVERDIARAALADPNVLRLMTIPGIDMVVAVGLMAAIGQTERFDKPDQLVAYVGLNPSVHQSGDGPAYHGRISKRGRSNARHLLVEAAWQTVRSPGPLRAFYERVRARRGNHIAAVAVARKLTVIIWHLLTKGEDYAWVRPALHAKKMRDLELRAGCPERRGQRGRSYDYNLPHRRRAERARAEQAEVAYRRITQGWRKQGPKRSTGATHEERQ

SEQ ID NO: 343380 - protein, 339 aa, unidentified
MVELYAGLDVSDKMTHVCVVDGTGAIKWRGVCATDPEVITKTLGRHARGLCRVVLETGSLSAFLYHGLAERGVPVTCICARHAKGVLSTRVNKSDPHDAEGLAQMARTGWFKSVLIKQEATHIDRAQLKIREQLIKSRNAIANQMRGLLKLFGLRMGKITTPGKRAERLVTLFAQKPELKPVMQPLVDSLEALEVQIRKATKLLAASAAADPVAARLMSVPGVGPITALTYKSSIEDPNRFARGEDAGAFAGLAPRRSQSGERDHMGRISKAGDPMLRSALYEAANNLLVRVKRSCALQEWGKRIAATKGGKRARVAVARKLAVLLHRLWQSETEFSWA

SEQ ID NO: 343381 - protein, 481 aa, unidentified
MKAKPQEKIQKATDPSTRGHWNEMNRKQRREMMRKIQSDDLSLEVVHPHAAGIDIGNESHYVAVPPTRDSQPVRRFGCTTVELKVMAEWLKQCGIRTVAMQSTGVYWIAVYDILEAAGLDVYLVNARDTKNLPGRKSDVQESQWVMKLHTYGLLRNSFRPSQEIRTIRTYWRQRNDLIRAAVSHIQRIQKALTQMNIQLANVLSDVSGVTGQAILKAILAGERDPHKLAALRDPRVKASEEQIARYLEGNWQEDLLFVLKQEQEGYEFCQQQMAECDRQLEQYLQQRDDRTQGASLPKEMRKGRLLRKKGNKPAFDMRAELFRITGTDLTQVDGIDVATAATILSEAGWDMSKWEDEDHFVSWLRLCPDNRISGNKVLGKGRLPTNNRASIALRMAASTLRVSNTYLGAQFRRFRSKLGAPVAIKAMAAKLARLVYRMLRYGMKYVDQGAKFYEAQHRQRQIGQLKWKAAKLGFHVVEAAA

SEQ ID NO: 343382 - protein, 375 aa, unidentified
MTSMTTAAPTRQHVARSRPDRVVFAGVDTHKELHVAAVIDSGETVLGTRSFSTTRAGYRALLAWIVEFGQLGRIGVEGTGSYGAGLTRHLVTAGVTILDVDRPDRSDRRRKGKDDDLDAINAARAALHQRRTVAPKSKDGAVEALRVLRVARAHAVRERRNTLQLLRMTIVAAPDELRDQVRNLTRMQLIRILAAWRPDVSNAADPVTANRVALKSMGRRYLELSDEITDLDELINPLVEALAPQLLARVGIGIEVAGQTLVTAGGNPDRMRSEAAFAMLCGAAPLPASSGMTQRHRLNRGGDRQANRALHLVAISRIRLDPNTRAYVARKTAEGHSKLEIIRCLKRYLAREIFFLLNPGQPTIPRRPYRRHRAA

SEQ ID NO: 343383 - protein, 400 aa, unidentified
MLYIGIDIGKRNHEATILDESGKELCESVKFPNSIAGAEKLLSKIPNLKDAMFVLEATGHYWLSVYCYLASKELAIQVINPIQSDSLRNLYIRRSKTDKKDSFIIADIARINRMPKTKLADENTLKLQTLTRLRFELIDQVTALKARIIGVLDRIFPEYESIFSNIFIKSSRELLKNSACPEEILEFDLSELAESLNKASKGRFGTVKAKELQSKAANSFGITLGLDAFRLEIKLLLSQVEFLEAQIKTLDSSVKELLQEFKDCFITTIPGIGDVLAASILAEIGDINRFNHVKKLVAYAGLDATIHQSGQFTGTRAKISKRGSPYLRRGLWSAANSARRFNPVLRDFYQLKIEQGKHPQVALGAVARKLTHLVYYILKEQKPFDPNYQWSNAKIYVDSL

SEQ ID NO: 343384 - protein, 355 aa, unidentified
MTHSSVAAIPTITIGLDVGDRFSHYCELDEAGVVVAEGRMQTTGVALRRHFASCARARVVLEVGTHSPWMSRLLEELGHEVIVANARRVRMIYSNDSKNDRVDAEMLARVGRMDVRLLHPIRHRGPEVQTDLALLRSRECLVRARTQLINHVRGATKSVGARISSCSTPAFARRAQAEIPDMLRPALEPLIELIAVLTQQIRSADREIERHCDERYPETHRLRQIHGVGPITSLCYVLTLEDPARFKSGRSVGAYLGLRPRQRDSGDRAPQLRITKRGDAMLRRLLVNAAQYILGPFGPDCDLRRWGLALAERGGANAKKRAVVAVARKLAQVLYALWVTDADYEPFRTSAQAAA

SEQ ID NO: 343385 - protein, 346 aa, unidentified
MYDRKDIILAVDYHAENIEVRWLNCATGEERCLRIPTTRGGILRLVEKAIAEASQMSGKVVWIMESTTGWARVKELIGSRVQFILANVLQMPLPPKAYRRKSDKIDTGRILREFLNGSLPRSHQPTAWWREVRRLVDSRQDLVERQTAVKNWIVHFLHHETWYDRDGLWTQKGMKRLQAFRLSAGDRMLLDLKLQELEQLAQRRGQMEAAMQAIYDQWPQAQHVDEVRGIGLVTAVSILAHIGPIDRFPSAEDLISYAGLAPGHRQSDGTSHTGRIGGGGTDSHLRYLLIESMQWVCQIPRYRPAFERAVAKRGTNIARIIVARMLLRSIFKMLRNQVRFNQVRAA

SEQ ID NO: 343386 - protein, 346 aa, unidentified
MLYAGLDLSRKRLDVHVLRDDGTTALVTAVAPDASALRTLVRRVAAEGEPVRAAIESMNGARFVHDSLEFAGWDVLIADAQRVRGLAPLAAKTDKIDARVLAELTRRALVPEIWLPTPEVRAERERARFRLHLVRHRTALKNRISATLMTFGHPCPMADLFGVAGRKLLDSLALPEPWQASLSESLALVDDLTARVDALEVELRDLGADDPSMQLLMTVPGVGWVLAYTIASEIGDITRFATPKKLAGYTGLCPLVRQSGPKDRRGPLAKNGPKYLRWALIEAATHAARDPRYLERYERTKQRLGRQRGAKVARVDLARQLAEAIWHVLTKNEPFHPAGPAIRLVA

SEQ ID NO: 343387 - protein, 366 aa, unidentified
MTSVSSAAELIHLGMDTSVKEIVVAVLRPGEEVPVVDRIPGDEESVRRLIGRFPDRRLLSACYEAGPGGYELHRLLTSMGVACDVVAPSLIPKGSSDRVKTDKRDSVRLALTHRAGLLTPVRVPSPAEEAVRDLVRARGDLLDDRKRMQQRLNAMLLRHGRVWRGGKKWSYAHRAWVDRQVFDEPALAEAFSLYRGGLEAREAELTAAGARLAAWAAREPLAGPVARLGCYRGIAQLTGLTLAAEVVDWRRFASARAFMGFAGLIPTEYSSGSRSRRGHITKAGPEGVRTALIEAAWAYRYRPAIGATLHRRQAGQPPETLARSWKAQQRLHAKYQKMTARGKPPGVAVVAVARELAGFVRAEMIT

SEQ ID NO: 343388 - protein, 340 aa, unidentified
MEEVSIVGVDLAKQVFQVHGATADGRVLFRKKLSRSQFPKFMAGLRPCVVAMEACGTAHYWGREFASMGHDVRLIPPVYVKAFVKRQKNDVADAEAVAEAAMRPTMRTVAVKTSEQQARAMLFRTRDLLVGQRTQMVNALRGHLAEHGIIVGRGLGNVERLATLIAADDLPDLVRTMGRLYLSQITQLHEEINQIDRRIAAEAKQSDIVRRLQKVPGIGPICAMAITAFAPPMEAFRSGRDFAAWLGLVPRQHSSGGKQKLGRTSKMGQRDIRRLLIIGAMSVVHWKGRGGGRPGSWLSNMLGRKPRMLVAIAMANKLSRIVWAMLSRNQEYRDPSGAVC

SEQ ID NO: 343389 - protein, 498 aa, unidentified
MEIAYSCCTGLDVHKKDVKACLATTQEDGQVCKEIRVYSTKTEDLLRMRDWLKESGCTCIAMEATGVYWKPIYNLLEGHFQLLVVNPQYVKALRGHKTDRKDAAWIADLLRLGMLKESFIPSKEQRELRELTRYRTRLVEERAREVNRLQKTLEDTNIKLADVVSDVLGKAARLILEALATGETDPRRLASFAVGRVRASQEQLERALTGNVRAHHRFMLGEHLKQIGNLDAAIKRVSQHIADRFAEPDPAKEESASIRSKEEKPEPCQETQSLPVCASEQAEEPCRIREQISDQPSSESAAQKMQAPRDAAMQRAIQATSPDACCKAMEPLSWHKAKELLMSIPGISERAAEGILAEIGLNMRQFPSARHLASWAGVCPGNDESAGKQRDGKTCQGNPWVRRILVQSANAAAHTKNTYLAAQYRRIASRRGGKRAIMAVAHSLLVIIYHVLLEQKPYQDLGSNFFDEHDRQAVEKGLVRRLERLGYRVDLQELPQAS

SEQ ID NO: 343390 - protein, 320 aa, unidentified
MDDNLTVVGIDVAKSSLEVALPEKKTFETKNNTKEITKLLKTLPAPGQALIVLEATGGYENLLVGELLVAGHLVARVNPRQIRRFAQALGILAKTDGIDAAVIARFGEQIRPRTLEPLSEPHLELQQLVTRRRQLVEMRTMESNRSEQVTAKPAVKSIKKVLKLIETQIRELDEEIAKRIDSDDQWKQQAALLSTVPGVGTVTAMTLITELPELGELNRQEIAALAGLAPFNRDSGKQHGKRSIFGGRAQVRSVMYMAAVSAMNHNPVLREFNCRLKDQGKPFKVRATACMRKLLVILNTMKKTQTPWQSPQERAAVACG

SEQ ID NO: 343391 - protein, 334 aa, unidentified
MTLFVGIDVSKYKHDLAILDEHGEILSKHFRFDNTYQGFQKLKEHLETLELPTSELRIALEDTGHYADNLIAFLQNIGYPTFTYNPLIIKEFVKSLTLRKSKTDKKDALSIARKLLADPTPERYTVEPQLQELKELTRYQNRLIHERSKNKTLYVRTLDIVFPEFAKIVKNVHNQFVYDLLSKYPSPQKIKRAHFQSLLTIKRLTADKIKQIQEAAHLTIGNSSLALQLELTQLIDMIRIQTIQINKVQEQINHLMTEIDSPITSITGIGQRLGAIILAEIKNIHNFKTPSQLQAFAGLEPSIYQSGTMDNRAYGQAWFVLLALCTHSSSQVNR

SEQ ID NO: 343392 - protein, 359 aa, unidentified
MTTKVNQIDFKGQNIYVGLDTHKKSFSVSIEGDRLFYKTFTQPPDPDILVDHLRKNYPGATFYAAYEASFCGFWIQKRLEKLGVHCIVVNACDIPVTDREKKQKRDALDSKKIARSLRNGELRPIHIPETQTQQDRSLIRTREQIINNQTRCRNRIKALLFYYGIEFPEQFRTSGTHWSKRFMDWLSSISLEFESGKKSLELLIKEATSLRALVQDIDHEILMLAKQDRYSSNVKLLVTIPGIGRLIAMILLTEIGDISRFKKLDDLCSYIGLIPNVYSSGETERIGDMTRRGNKRLRSFLIESSWMAVRKDPALGCKYHELCNRMPGNKAIIRIAKKLINRVRYVLLNKEEYELSVAA

SEQ ID NO: 343393 - protein, 349 aa, unidentified
MNEKYVAMDVHKASVAIGVRDAAGKYIMESIVETKAITLLEFVKGLSGTIHLTFEEGTQSAWLYDLLKPHVAECVVCNPRKNKLLEEGNKGDRIDVQKLSQLFQAGLLRPVYHGDHGTRALKELAHCYESLLRDRTRVKNRLKAIYRGRGISCEGEGVYNPTNRDWWLAQLRERGVRQRADSLFMQLENLNAMVAEAQRQMLAESRKHKAAAILRSLSTLGPISVALIIATCDTPHRFRTKRQFWTYCGFAVVTRSSSDHYFEKGELRKRQKPALTRGLNRNYNRRLKCVFKSAATSGSRQGPFKPFYEQLLARGLKPDLAKLTLARRISAIALAMWKKGERFDPQKLK

SEQ ID NO: 343394 - protein, 416 aa, unidentified
MNAVGIDVSSRKSTVAVLRPLGEVVCLPFDVTHDADGLASLAEKLKALDGETRVVMEHTGRYYEAVAKALHEAGLFVCAVNPLLIKEYGANSLRRVKTDKADAVKIARYALDNWADLRDFTPMDAIRYDLKTLNRQFQLASKQRTASANNLIALLEQSFPGIRKCFDSPVRSDGTQKWVDFAHSFWHVDCVRKQPFPAFCERYRKWCKRHAYLFKQSNAEEVYALAKRAVVLTPKSKVVKVLVQEAANQLISISRSVEVYRAEMDRLAAMLPEYPVVMAMYGVGKSYGPQLMAEIGDVRRFERKQALVAFAGIDPMPNQSGDKNVRSNKSSKRGSPYLRKTLFNVIRTYLQCAPQDEPVFQFLNRKRAEGKPFYVYMLAAANKFLRRYYAKLRDYFASLDTLQPVDPIPTILKATL

SEQ ID NO: 343395 - protein, 351 aa, unidentified
MSQTPRTSITAVGIDIGKNSFHIVGQDDRGAIVLRQKWSRSQVEARFANMPPCLIGMEACVGAHHLSRKLKALGHDARLMPAKYVRPYSKGQKNDFRDAEAIAEAVQRPTMKFVATKTADQLDLQALHRVRERLVSQRTGIIDQIRAFLLERGIAVRQGQRSLRAELPRILATPPDVLSPGMVRVIEGLAADWRWLDERIEGLSREIEELAKRDAGCERLMSIPGIGPIISSAMVAAIGTGDGFAKGRDFAAWLGLVPRQISTGDRTILGKISKRGNRYLRVLFVQAAWVVLVKVKPTRWEGHGLKHWIEAASKRLHHNVLAVALANKLARIAWSVLARGRAFEASKLQAA

SEQ ID NO: 343396 - protein, 363 aa, unidentified
MADGICFAGLDVHARRTVAAAVLLGSGEVFRARLAGGAPEAIGWLRSLPGPVRAVYEAGPTGFGLARAARAAGIEMMVCAPGAIPRQPGDRVKTDARDALKLARLHAAGQLRPVVIPEPELEALRDLVRAREDLRGDLMAARHRIGKLLLRRGLVWAGPGETWSRRHLQWLSKLRVDDTLADVVLGEYLACHEVLLSRRDRLDALIADQADHGPWAATVARLRCLRGVDTLTAVGLVAEIGDFHAFEHPRQLASYLGLVPSERSSGENRRQGAITKAGSGHARRLLIEAAWHYRRPPRISMTLRHRQAGQPPAAIETAWRAQLRLHRRWSHLDAARGKRRTTVAVAVARELACFVWELARQPA

SEQ ID NO: 343397 - protein, 429 aa, unidentified
MTATYATLSTVLVAIDISKHRHEVLISIPGKKRRRRLTITNTLEDFQRLATTLASYELPVRIGFEATGNYHRALAHHLGLAGFDLKLVSSVGLARTREALHNSWDKNDPKDAQVILHMLEIGAVQFFHDPLVTGKADIQELSKTHEIVSRSKTELWHRILTHYLPLYFPEAERFHRSSRTDWFLAFLEKYPTPHIIKAMDREAFVADAWHVVGRKVSKERMLSDIYDTAVESVGLPVHPDSDAVRMFRLVLAEGRSLIRQRDEIEARAVELLSDLPDYQLLTTIPGIGPINAMTILAEAGDLRRFRHHRQFLKFCGMDLATTQSGMFRGQSRISKYGNARLRRTLWMAGQTAVLKRTNSFRDKFERYISKDRHNAHLRRKAYTAIAAKMARTVHAVVKNGAPYRPFFEGVSPGGRTSLCSSRGGSSLTS

SEQ ID NO: 343398 - protein, 394 aa, unidentified
MDSPRLFGIIVPAGLIWRGVSALNQEESEMNATAALPIVGVDLAKSVFQLAVADGNWRVVEQQRLTRTQFERWFANRAVGLVVMEACGSAHHWARWLNGLGIEVRLLPPPYVRAYVKRNKTDAADACALLEAARCADIVPVRVKSVEQQALQGLHRTRSLWMATRTSRINALRGFCREFGIAIAQGARLGVEQIGRVLADPHSAVPELIRQTMKLLVEEIRLLEARVSQLERELTLLARQAPACTRLLSIPGVGLLTATAMVAATSGSVSHFRDARHFASWFGLTPKEYSSGGTRRLGRISKRGDRYLRMLLTHGARSVLQAATKAVQAGRAVDELRQWALALQRRSNHNKATCALANKLARICYATLRDEQAYGRPAPRPNKKIERTAFAIAA

SEQ ID NO: 343399 - protein, 361 aa, unidentified
MKQYVGLDVSQDQTSICVVDESGRVLWQGKCASTPEAIAATLGSRAPQAERIGLESGPLSIWLCHGLTALGLPVVCLDARHAQAALKLQLNKSDANDARGLIVRTGWYREVAVKSLDGQLVRALITARAQLVALRVDLGNQIRGILKPFGLLAGKGVGKTFAEKVRSLVPDGPLHDVVEALLRSWEAINKEVATLSRRLVTEARQDDTVSRLMTAPGVGVLVALTYVSTIGDPARFPHSSSVGAYIGLTPRRFQSGETDYTGKISRCGDRLTRTYLYEAAGIILNRVSRWSTLKAWGTRLARKIGHKKAPWPASSPSFSTGCGVMAPSSAGRTRRLPWPPPDPTATSSAALGRRAALARAR

SEQ ID NO: 343400 - protein, 344 aa, unidentified
MLKSNIIGIDLAKNILQICQISKHGELISNKAVNRQKLKEILAKAKPAVVAIEGCGSSHYWGRYAEQFGHDVRIISAKKVKAFLEGHKTDANDALAVVNASLQIGLKFSKPKNEEQQSLQTLETSRLYLSRNITSLGNHIRAMLYEYGITSARGMLGLRTAVQKTLDEPTLIPACLIATLHRLWEQYLNLKDEFTTLGKAKNALVRQLKPAKYLMALEGVAEVCSGMLYSTIGDGKQFQSGRQAAAFVGVTPKQHSSGGKTIMTGIIRNGGVKELRCALYQGALSYISVLPDEPKTVKQAWLIQLRERIGVKRTCIALANKTVRTAWAMLRYETKYQQQLLVTE

SEQ ID NO: 343401 - protein, 346 aa, unidentified
MKIIGCDFHPSFQQIAMLDLATGEWTRKKLPHASGEAEQFYRSLQGEAVRVGIEATGSTRWFERLLEELGQELVMGDAARIRSLVTRKQKTDARDAEHLLELLERDQFPAIWVPSAGERDLRELVLHRHKLVEMRTRIKNQLQHVALNEGLQKKRQLWTERGRRWLEDLALPPWTERRREDLLHFLDELDARIAELDQAVGEAARQDARVRLLMTHPGVGPVTALAFVLVVGEVTRFPRSKKLASYLGLIPSEDSSGSRRRLGAISKQGNSLLRTLLVEAGQSAARYDPELRRAYQRLCHKKQHTGIGKVMVARKLTVRLYWMLKTQQPYRPARMQSSPSHSVSAA

SEQ ID NO: 343402 - protein, 304 aa, unidentified
MKRQENKACGADIHKRFLMACILSRDGSKVLNRFDMTVEGVLSFASWLKDNKCKKVAVESTGNYWHLVYQVLDDEFEFILGNAFKTRRHSGAKTDKRDAEWLAELCLNNQIEPSRILPKEDRELRALTRARKGYVDFRSKIKARTIQELEACTIKLASELSDVFGKSGRHVLQGLVDGRSADVIVESIPSKKVKKNKEKIKQAIMAGLSPISIFLIKTHIQMIDKVDKKLVQLDAQISRLLKARKRDIEIAMSMPGIGLVSAAAILSEIGDYRNFASGKKLAAFSGLDPSVYESAGKRYTGKII

SEQ ID NO: 343403 - protein, 345 aa, unidentified
MEQISRIGMDTSKHFFQLHGVNAAEKVVLRKKLRRKEMVAFFKALAPTVIGIEACGASHHWARILRSFGHEVKLIAPQLVKPYVKRGKNDTADAEALCEAMSRPTMRFVPVKTGEQQAALMMVGLRDRLIRNRTQLSNAIRGYAAEFGFTAARGMAHIDPLLDRIQADESVPVLARELFAAQAEEYAQLQAQIAEADAKLMAWHKADECSRRLANIPGIGPIGATLLLMKTPAPEMFRSGRQFAAWIGLTPKDHSTAGKVRLGVITRAGDEALRSVLVVGATAVIQHVRRGGRGSPWIVGLLKRKPPKLAAVALANKMARIAWKLMVTGNSYAAKSAPAALMGAA

SEQ ID NO: 343404 - protein, 367 aa, unidentified
MKKGSTAAKQRVRNISGQTLTIGLDLGDRNRWYCVLDEAGRIQLEQRVRTNAKALQEVFGAMPRNRIALEIGTHSPWVSRLLSELGHEVIVANARKVRLIGESRKKDDRLDAQTLARLARIDPELLYPVKHRSAQAQADLMMIRGRAGLVRARTGLVNTARGLAKSYGERLRGCNARHLNPEKAEGLSPELQAALEPLLNAIESLSERIVEYNERIEKLAQQDYPQVALLKQGKGVGTLIALTYLLTLEDPHRFQKSRDVGCYLGLQPGRRNSGRSEPQLHISKEGDPYLRTLLVQGAQHILGPFGIDCDLRRRGLKLAERGGRSGKKRAIIATARKLAVLLHHLWVSGEVYEPLHNHQHKPLAIAA

SEQ ID NO: 343405 - protein, 338 aa, unidentified
MYYTGIDLHKFTSYLTTVDSTGRIIKQENMKNAAHNFIQYFSSLPGEHKTTVESTMTWYWLNDLLSSINIPLVLAHAKYVKAIAYAKVKTDKVDSHTLAQLLRMDYIPAAHKISNENRLLRDGLRARLKIVQRHTSITNSMQLLLAKYNYDSPTQLTGIPKFQYEQLSEVEEILNEQMLELEKQLYSSLVPNKDIQRLLWIPGIGKMNAFTILLEVDDIHRFADVKNFYSYSRLTPSARNSGGKSKQRSSKDGNKYLKVVFCDAAVHAVQYYPVIRKYHGKLLRKKNKQIAKTIIAKQLAEIVYHVLKNKTEFNNKFKGQQLEHKKSLQWPRITSPYT

SEQ ID NO: 343406 - protein, 344 aa, unidentified
MPSIAGGMDIHRKQVTFDYLDLVTGEVKCGQIAPADRASLRAWLQRFAGVRGVAFAVEACTGWRYVAEELRRAGVEAHLAEPADTATARGRKKRAKTDRADARLMRDLLAGSRLPECWIPPPQVLEYRALLETYHALRREHTAWVQRVHAVLFHHGAPAFRDLSRADAPRELAALARAHLSPAGQQQIGLYLRMLEVTAGEIDALRRQLVSAAGRLRGARALAGQLYGVGPVTALALCCWLGGAGRFSSARKAVRFTGLDITVYSSDGKRSPGHLSRQGPPVLRWCVYEAGKTHARAGAPDHGYYAAVKDRKGGKRAALSEARKIVRRACHIPGELGDDAFATA

SEQ ID NO: 343407 - protein, 412 aa, unidentified
MGRQRGDVSIAALTTSRWSPTMTKHKTETVNDLSRCLDPLDMDATLIVVIEMSQSSWLVAGIVPGVERQPLKKLAIDERSLLNLLSRWRAEAEKKGHRITRIAVAFEAGHDGFWLARWLAAQGVEPHVIHSSSVAVTREHRRAKTDRLDTELLKRGFLGWLRGERGHCKMVAVPTLAEEDAKRPSRERETLVGEASRIITRLKAAFVRLGIRSFNPKLKAAAERLGTLRTPEGEPIPPNTLAALKRDLERHQIIKRQIREIEQTRLDHLAQAPAKGPHAMVLLLARVVGIGVETADMLVQEVLSRNMRDRRAVARYAGLTGSPDESGAKRREKGLARSGNARVRRGMIQLAWRFLMFQKDSALAEWYRQRTANAPSMRKTFVVALARKLLIALWRLARDGVVPEGVRLRPAA

SEQ ID NO: 343408 - protein, 335 aa, unidentified
MNNESNSTNPNHTPISRTGYQRVIGVDVAKDKLDLHDSQGTLTRTIDNDAPSIQTKLLDKLDRGCRNLILCESTASYHLLMMDMAHEESIDVAVVNARQVRDFARGHGRIEKTDPIDAGMICQFGQDVSVHLTARRTEQQKHHTALVHRRESLLKMRTQENLRLEHTVDKETRKLIEQMLGSIQKQLKDVEKRLGEILKELAKEDPKVNILLSHVGVGKVTTSVLLTQLPELGRLNRKQIAKLVGVSPIANQSGTKDGKRSVRGGRQSVRNAMYMAANSARQHDERTKAFYNRLRNHGKPFKVAMVACMRKMLSTLNQMVRNEETFQASRYASMV

SEQ ID NO: 343409 - protein, 404 aa, unidentified
MHDPTIGYAGVDWAVDAHAVCVVEATGRVVAEFDVANSAEGLRELCRRVHRAGAQRVAIERPDGPVVDAVLDAGLEVVVVSSRSVKALRERYGTSGNKSDRSDAYVLADCLRTDGHRWASLELDSPATVTLRSHVRARKDLVEHRVAVANQLRAHLRIVFPGAVGLFRDIDSPISLRFLERFPSAGRAAWLSEKRLGAWLRANHYCGRKHPAELFARLSDAPVGLTGDDGDARGTVTLAYVVVLCALRAQIDELDSRLDELLDAHPDAHIFRSLPRCATVRAATLIAEIGDCRARFPDAASLACLAGVAPSTRTSGRHRAVTFRWSSDKKLRDAICDFAGDTRHANAWAAHRYRSLRAAGKSHPHAERILARTWTHIIWRCWQDRTPYDPALHGNHRRLTEAAA

SEQ ID NO: 343410 - protein, 406 aa, unidentified
MGAVSVTYSSCAGLDIHKKTVVACVITPELEEIRTFGTMTKDLLALSDWLRQQGVTHVAMESTGVYWQPVWNILEDSFELLLVNAQHIKAVPGRKTDVNDCEWIADLLRHGLLRPSFVPDRPQRELRELTRYRVSLVQERTAEVNRLQKSLEGANIKLASVATDIMGVSAQAMLRELLEGNTDTAAIAELARGRLRKKLSELEKALTGRMRPHHRFITARQLAHIDALDELIAEVDAEIQERMRPFDGEVQLLDTIPGINRVAAEGILAETGTNMERFPTHSHFSSWAKVSPGNNESAGKRKSSHTGEGNRWLRRFLVQVARAAARKKDSYLSAQYRRIKARRGPNRAAIAVAHSILIIIYYLLQRRCTYSELGGNYFDEREREATAKRLTRRLERLGYRVTKRVA

SEQ ID NO: 343411 - protein, 346 aa, unidentified
MSYSTTVGVDLAKNVIQISVVSSRGKELSNRSLTRKKFAEFLGKQKPSRVAFESCASAHYWARAAQRHGHEARIIPAKAVAPFRQGHKTDSNDALAVAEAARRPNIKEAPMKTVEQQGLQAIHRSRELLIQECTALSNHLRGLLMEFGIVIPKGFASLLKAVPEILEDGENELPDLYRPTLHRMYSRLLELREDIEAMTKEVDRLAKAHPICSKLMALEGVGPIGALLLYATMGSGAAFSGSREFAAYLGLAPKQYSSGGKTNIVGLSKKIGNSRLRSVLILGARAYTYRLKEPKSSKDKWLKANIERNGECRAAIALANKNVRTARSKVTQGPVYQRRAQVKIAA

SEQ ID NO: 343412 - protein, 333 aa, unidentified
MRHVVARFVLGEGAKPAEGMTTATLLARVAKWRKAGARVHCVYEAGPTGFALARQLIALGATCLVVRPRRLDRHGRRRKTDPLDAQHLAEDLAAHRFGRKGLLCPVRLPSEEEELRRLAVRERETLARTRHQLLNAAKGRALALGHSLPKEWWRPRVLPKVIRDLPAALARQLQRAAAAAAAMKEQLEAVEAELKSDAPAAPNGVGALTVGVLEREVCDWTRFKSAKKVASFAGLCPSEDSSGQRRRLGAIDKHGSPRLRFWCQETAWRLFKFQREYRGVIWAREKLRSANGSRAKQIAVALARRFLVDWWRIRTGRATAAELGFVFKASPSV

SEQ ID NO: 343413 - protein, 355 aa, unidentified
MKYYTSSTEYNCGIDLHARQMYVCLMDRQGKKLVHTNVKDNDFAYFLKLIEPYKHSLTVCCECMFGWYWLADACQAAGLSFVLAHALYVRAIHGGKNKNDRIDSEKLAHLLRSNLIPPAYVYPAQQRPLRALLRQRIFYVWRRAQLLARIHCHQLAHNRIPAKQSRWTRDPWEEQLLKAEDHPLRQLALSNDLAMIRHFDHQIFEVEKELQRQTKQLAAREYALLQTVPGIGEHLGLTILYEIGDIERFPTVKNFLSYCRLVKGTVASAGKIKGLRGAKLGNPYLRWAFGEAAVIAKRDHFRIRPLAQRLEARMAGNKFKANTVLAIKLARSVYFMLKNKTVFDPDRLVAALARN

SEQ ID NO: 343414 - protein, 498 aa, unidentified
MKKTVYPLRSQVVTEIFSRENRFNKILVVPLDHAKENHTVQFCFATGEHILRKALTIHNDSQGVSFLMDRIIKICKKYHLKRENIIICCEDPPNYMVNFIHTLRLSGYNFVSVNAAEASRYRSNNRASSDALDLNGIAQAVINRRAMDIRPVDELYTNLRAAGRNRRRLVMNETALKNRIHKCVDILFPGFLNENNTGITPFSPACLWLLEKNFSLVKIRRITKKTLMSGLKRHRISKPEEVFEKLKTYSNNVLAPPPEMITYYQKSLFAKVKLFRCLMETTYLEENEAVRHLIQSPGFYALSIPGIGAKYAMHIIGEYGNPNTWKDTGRMASFAGIVSRQKQTGGAGKKEPQSQHLPKNCNRILKDYLLQAAQHTGKALHPFRKISDTYKGEHTLQEHFQHVENHEGKSRLRNAKYLIKIIRRLVKEERFYFPEKHWLSKDFIPSSDEHIQFYSCVIESIRGKLKGYDFSGIDKENNYLLKEEKALNALINFKKNNT

SEQ ID NO: 343415 - protein, 387 aa, unidentified
MHTVTSTTVVATAARANDNTLFASLELSKSKWVVTINSPGSEKFSKHVIEGGDGAGLLELLSRLRAKAEQRCGAGVKVVVIQEAGLDGFWIHRLLLAAGIESHVVDAASIALPRRHRRAKTDTIDGETLLRTVMAWARGERRVCSMVCAPSPEEEDRRRLTRERDTLLKERIRHTNRVKGLLSSQGVRDYHPLRRDRFERLETLRTGDGRELPPLLKVEIRRELERIGLVTTQLAAVERARDALIRADAEEPNTPAVLLLKLKGIGPEFASLLWLEALFRSFVNRRQVAAYGGLAPSPWQSGAIERDQGISKSGNRRLRKTMIELAWLWLRHQPDSALSRWFRARVGPAKGRVRRIAIVALARKLLVALWRYVTQGVVPEGAVLKAA

SEQ ID NO: 343416 - protein, 367 aa, unidentified
MSSVIYVGMDVHQDSFSLCALDALNGEIIRETKCTADIQNVVKFTSQLPQTDETQIVLGYEAGIWGYSLYNRLIELGFECVILAPSTMYSNAKHQMVKNDHQDAQMIAHNLAAGTYKAVYVPDQEDDNVKEFIRLIKSLKKDLKQTKQLIRSFVLRNGFRFTRTPWTSLYLKWLEQLQLSKLKRVILDEYIVYYHELTDKIDRLNSQLEELSHQKRYQEPIAKLRCFKGIDTTAAMTIHVETSDFTRFPNAKAYTVYLGLTPSEHSSGNKVSLGRITKQGNSTIRTTLVECVQGLVRGEPSKKSKKLKARQNGQSGKVIRYADRAVKRLHKRYERMLHAGKPRNVAIIAVARELACFIWGMENNKIA

SEQ ID NO: 343417 - protein, 355 aa, unidentified
MSQEKYIGMDVHQATISVAVMDAGGKLIMECILETRAATILEFIQGLHGTLSLTFEEGTSAAWLHDLLQPHVSWLVVCDPRKAALLKEGNKSDRLDARKLAELLRTNQLKPVYHGDHGVRTLKELGRSYLTLTKDCTRVMNRIKAVYRSWAIPCGGTSVYAPRHRAEWLAKLLEPGVRLRAEHLYQQLDGLQPVRLHARRELLHESHKHAAVKLLRQVPAIGPIRSALLVALLQTPHRFRTKRQLWAYSGFAVETHDSGEYRYVRGKLQRNRERITVRGLNNNHNKDLKNLFKSAAISASTRPGPLHDFYVARVEKGMRPTMARLTLARKIAAITLTMWKKGVSFDPQNLPRQAA

SEQ ID NO: 343418 - protein, 355 aa, unidentified
MLNHYQEGEGHINKVTIGLDIAKSVFHLVVMNQSGRVLKKKKLKRYQVLSYFSQLEPSIVVMEACGSCHYWCRELTKAGHEVKAIAPQYVVAYRKGNKHDYNDAEAIAEASQREGMRFVPFKSQEQQDIQLMHRIRERMIAQQTALSNQIRGSLAEYDIVYARGVATVVKELPFTLEEADNGLSMLARQLFQGLFNDLLVLRERIKEMDKELKAFAQNHPVCERLMSMTGIGPLIATALYAGIGQGQAFNSGRHLAAWLGIVPKQHTTGDNPRLLGISKRGNTYLRTQMINGARAALRHIGDKTDKVSQWCRACLARMSFNKACVALANKMARMAWAMLHHQQDYLPGQINKAAV

SEQ ID NO: 343419 - protein, 401 aa, unidentified
MKYGVGIDVSKGKSTVAILTIEGEIIEDAFEIKHDIDGLNILEEKIKKLPKEEVRIVMEETGIYHLPILGYLLEKEYFVIAENALKVKKYIDRGLRKAKTDKKDSYKIAEYACDNWYKLKKVRDNDEIYKELRFLSRQYLSTISVQAKQKVNFSNLCDILFPGYYQILDENNFILGLEIFKKYYHPEIVKNKKENQIITEIDKVARKLGHRGAGITLAKKIYKLAQNTISPRPNNQYSQLSAISCVDALEITIKTSNIIITEMDKLASKLPEYDVIREFPGCGKKLTARVIAEIGDIRRFKNAGSIIAYAGLDAPPYQSGQYEATKRHISKRGNKYLRKTGYEIMKSIKSNTKSENEIRAYIIKKENEGKIKKVAKIAGLNKFLRMYYGTVKRKYRELNIW

SEQ ID NO: 343420 - protein, 424 aa, unidentified
MNLTQNDRLNQVTSDTLIVGVDVGSQTHFCRAFDWRGFKLSRRVFKFSNTRMGFLTFLRWTEEFMKKTEMKKVIVGYEPTGCYWLTFQKFLHDHDILLVTVNPFTVNRRMELDDNSPEKSDLKDPKTIALLVKDGRFSTSYLPSGVYAEIREASVCRDQIMKQHVHLSNQIQGWLQKFFPEYFECYASWDSTSGLMVLKEAPLPQDILKIGAGGVNQIWRDAKVRAAGLKRAQTLVEAAQNSVGLGAGEAARLEIWILVNDYILKAEQLKRLDEYLEEKVKEVPNVEKLLAIKGVGMSTVIGFVAEVGDIGRFTDPKQIQKLAGLEIVKKSSGKKKGQPRISKRGRRKLRKTMYESARALMTWNPVFQDVFLYYRNRQKNPLGGMRAKIAVACKAIRVFYVVLQTGCDFDEERFRRDIIRPEAA

SEQ ID NO: 343421 - protein, 336 aa, unidentified
MSHYCGIDLHSNNHVVVVIDESDKRVFDKRLNNDLSATLDVLLPYRETLQGIAVESTFNWYWLVDGLQEHGFGVRLVNTAAVKQYDGLKFSGDHQDAFHLAHLMRLGVLPTGYIYPKEQRAIRDLLRRRMSLVHAASTQLISVQSQIWRTTGIRIRSEELRKFEFTPPPMDQYTLQAVDSGLLVYRTIHEQIRVLEQAAYRVVKLTDTFEILRTITGIGKILGLMIMLEIGDFHRFAGAGNFASYCRTVDATRTSNGKKKGTGNAKAGNKYLSWAYAEAAHFAIRYEPLAQRFYERKKAKTNGIIAIRAVARKLARATWMMLKHQVPYDAKLMFPG

SEQ ID NO: 343422 - protein, 424 aa, unidentified
MTREMADYAALVGIDWADRKHDLCLQAAGSEKRERLVLEHRPEAIDEWACALRVRFSGQPVAICLEQHKGPLMAALSKYDHLVLYPINPLLVATRRRGLKPSGAKSDIADAEIILDLLTDNSAKLRPWHPDNARTRQLQALVEARRTLVENRVRTTNALTANLKLYFPQALECFDDLASGLACDFLTQWPSLGQAQRAREATLTTFFHQHGVRGEDLIAGRIAALRAAMALTTDSGILVPALLRTKTLVAVLRAQLDGISDYDAAITKAFDAHPDAALFASFPGAGPTFAPRLLAAFGADRERFASARAIQEYAGVAPVTEASGKSHWVHWRYACPRFVRQSIVEWAGMSIRYSFWARTYYQELRERGKAHNAAVRALAFKWLRILFRCWQDRKPYDEAKYLLSLQKRQSPLLQAAAKPLGQPA

SEQ ID NO: 343423 - protein, 370 aa, unidentified
MRQSTPLFVGLDVPKDSIAVAHAAGDSTAPPVVVGAIGSRQADLDQLLRRLQSKAASLAVAYEAGPSGYGLYRYLTAKGIACQVVAPSLIPRKPGDKVTTDRRDAITLARLLRSGDLTHVYVPSVEDEAIRDLCRARDAARVTMKDAKLRLKALLLRLGLHYVGRADWNAAHQRYLAKVVCPTPAQQIVFQESVRAVDEQVDRVARLEAELREATPHWRLAPVVEALQALRGVQWLVAITVVAELGDLTRFDNPRQLAAFVGLIPSEYSSGASRRQGGITKAGNGRARRALIEAAWAYRHPAKVSAHIQQRIDRLPKPLQDIGWKAQVRLCKRFRRLTARGKHPNVAVTAIARELIAFMWAIAKAVPLTA

SEQ ID NO: 343424 - protein, 343 aa, unidentified
MQIRSVGIDLGKTTFHLVALGDNGEVLLKKKFTQKQLIKFTANLQTSLIGMEACSGAHFLGRALRAQGHDVKLIPAHFVKPFVKSNKNDFIDAEAIAEAVDRRNMRFVPIKTDDQLDLQALHRVRDRLMVRRTSVINQLRAFLLERGMVFAKSPIRLREAIPEVLENANENLTPRLRNLVAMLWSEWKHMELQIQEMNEEIERIASSDAACCRLRQIPGIGPLVATAIVASIGNGAAFRKGREFAAWMGLVPKQHSTGGKTKLYGISKRGNRYLRKILVHGARAVVLRSKRDRIAMGSWMTSLEMRVPRNVLIVAMANKLARIAWAVLSSGQDYKAIPGAIPA

SEQ ID NO: 343425 - protein, 387 aa, unidentified
MYFVGIDISKYKHDCFICTETGEVIESNFSFPNTSDGFEQLLNLLKSIDNFKEIRIGFEATGHYGMNLKLFLEKNNYSFMEFNPKLVKEFISGQTLRKTKTDKKDAYQITKYLISVDYKPHPKQFYHKYSLKSLSRMREKLVKQRSYYEVALTNVLDHIFPEYKSFFNNTFSASSIFILSKYKSPDKIKNMKDYDSIRKISRGKFTSAQFFLLKDLAKNTIGTSNEIFELELETLLILRSQIEVEIKKLESNIEEIIKELNPPILSIKGIGYILGAGIVSEYGDVSRFKSADAMVAFAGIEPSICQSGTESHTGHMVKHGSGHLRYYLLNAADCIFLHEPIFTEFYYKKRNEGKSHRVALNHVAKKLIRIIYKLETENITFDSSKVK

SEQ ID NO: 343426 - protein, 326 aa, unidentified
MFFIGIDVSKAKLDCSLLLDVSSGKRRAKTVVNSRTGVSELLAWCEKHHVELHELHAILEGTGVYHEQAALALADAGVTVSIVNPAQVKDFGRSLGVRTKTDGVDSWVLARYGALLKPRPWAPPAPEARVLQALLSRREAIAQDLQRERNRLEKADATETPASIRQSILNSMVFLEQQLAKLQQDIDDHINKHPNLKADRELLVSIPAVGPQVGNHLLAVIHNHRFHSAEQLAAYLGLVPVERQSGSSLLGRPRLSKAGPARVRAVLYMAAIVGTQHNPHIKALYQRLQARGKSKMSALGAAMRKLVHLCFGVLKTRQPYQPTYAS

SEQ ID NO: 343427 - protein, 325 aa, unidentified
MEQAVVGIDVSKATLDVALVQAAQATRAAQFANTRAGCKRLERWLKKQAPGALPVCLEATGLYGDEVALWLHTAGYRVSVVNPARIHAYAASQLARNKTDRLDAALIADFCRTQQPPAWTPPDPVWLELRALARHLLDLKDMRQQERNRRQAGVTSATVQHALDAHIVFLDQQIDALERQMQQHINQHPSLKHDRDLLASIPGFGSLSAALILAEVPDLRAFSTARQLVAFAGLNPRQRRSGSSVRGQTRLSKTGNSALRRVLYMPALSAQRFNPRLAPWAAQLAARGKSKMQILGAVMRKLLVLAYGVLKSGQPFDAHFSTVSP

SEQ ID NO: 343428 - protein, 360 aa, unidentified
MQRQVNKNLFTGQSFYIGIDCHKKSWKVTILSEHNEHKTMSQNPDPDILANYLKRNFPGGNYYAVYEAGFSGFDACRRMKQLGIDCRVIHPADVPTNQKERLQKTDKADSRKLAKSIRNQEFSSIDIPDRKLEADRALVRQRFRLMKDLSRTKNRVKSLLFQFGISIPERFTHAQMRHWSKPYVNWLKTLSVEEESLRETLDNYINIGQKQREELLRVNRQIKKLARSDAYRNNCNLLLNVPGIGTITAMTFLVQIGNITRFKRLDELCNYVGLVPSMHGSGEKMETGEMIKRGRKELKIMLIEAAWIAVRKDPALMAKFNELRSKMNKNKAIIRIARKLLNRIRSILINQRPYEMNVIE

SEQ ID NO: 343429 - protein, 408 aa, unidentified
MRIIGLDIHRVFAEAVAWEDGKLRRIGRVDIRRDLLEKFASSLSPEDIVVVEATGNASAVSAVIAPHVKRVAIANPKQVKIIAHAKIKTDTIDAGVLAQLYACGFLPEVWVPDEATQALRRQVSRRQQIVKQRSRLKNIIQSILHAHLIPPCPAADLCGTKGRAWLSGQRLPEDERLAINRHVREFDRLGDDLKVIERDLAQSALEDGRAKRIMTIPGIDMIVALAIVAAIGDAGRFETAEKLVSYLGLNPSVRQSGSGPAHHGRITKQGRGHARGMLVEAAWAAARAPGPLRAFFLRVRSRRGQHVAAVATARKMAVLIWHLLRKGESYAWARPALYAKKLRDLELRAGRKPNRGQKGAASAYNIKSHRDEERRWAEQAEMAHARFVAGWSARGPKARTAAAKEERR

SEQ ID NO: 343430 - protein, 418 aa, unidentified
MKHNKVKKIRNINKKTLIATLDIGKKVHYGYFRAPSGKDIQPFAFINTSHSFDTFWERLCKFKEKHMLEDIVVGFESTGPYAEPICQYLRNKSVQLVQVNPMHTKRLKELTGNSPNKTDKKDPRVIADVISLGHSLTVIVPEGAAAHLRRLTQARERAIERRTAMSNQLQHLVFLIFPELVHIIKPSTKTGMYLIKHYSDPKKLLFVGIDKLNAIIKKVSRGRLGTDRAEQLHGAAKKSVGITEGKESILFEITHLVSKIESENHYVEDLEKQMGDYLEKIPYSHSILSITGIGRVTAAGLIGEVGDFRKFKTISEVLKLAGLDLYEISSGAHQGCRRISKRGRALMRKLLYFAAINTTRKNGILHGPYQRHLAKGMPRIKALMAIARKLIGIIFALVRDHSNYIADYSSQLVFKKAA

SEQ ID NO: 343431 - protein, 341 aa, unidentified
MNIVGAFDVHRRQVTFEYLDTGSGELKRGRVVPADRQHLREWLARFAGQADVHFALEGCTGWRYVAEELAAAGITPHLAEPADTAALRGRKRHAKTDKTDTRHLRVHLMAGDLPECWIPPEHVLEARAVVRLYKDLLDERGAWHQRIAATLFHQGVPVIGSMAKPEGRAAVGQVDLSPAGRQAVEAGLRQIDRLTGELDVLRRQLGMLARRQPGCAALRTAWFGIGPVTAVAIWAELGDVRRFGNSDDVVRHTGLDITVWSSDGKGPPGRLSRQGPPLLRWALYEAAKCAARAAAPDHGYYTAVRDQRTAGLATLSVARKLARRCYHTLRELGEEALAPAA

SEQ ID NO: 343432 - protein, 386 aa, unidentified
MQKLNDLSRSLTVLEPDGTLIAVIEMSLSSWLVAGIVPGVERQPLKKLAVDESALLKLLHRWREEAEKAGRRIERIAVAFEAGRDGFWLARWLKACGIEAYVIHALSIAVSREHRRAKTDRLDTELLKRAVLGWLRGERDHCKMVAIPTIKDEDAKRPNRERDSLVGERSRIVNRMKAALVRLGIRGFNPKLKRAAERLDGLRTPEGEPIPPNTMAELRRDMERRRLVNNQIRQIEEARLERLEQTPSDGPHAMVRLLARVIGVGIETADMLVHEVLSRNMRDRRAVARYGGLTGSPDESGRRRREKGLARSGNARVRRGMIQLAWRFLLHQKNSALAQWYRARTENARGTRKPLIVALARKLLIALWRLVRQGVVPDGVVLRPAQ

SEQ ID NO: 343433 - protein, 400 aa, unidentified
MTGSQLWAGVDVGKEHHWICVLDASGTVVLSRRCDNDEATIRAVITEIDALGETVSWTVDLTTAYVTLLLTVLADAGKPVRYLSGRSVWQASSVYRGGEAKTDARDARVIADQSRMRSDLPVLRPDDELIRELQMLTGHRTDLVADRTRTINRLRQQLVAICPGLERVAQISSDRGWVVLLARYQRPKAIRRVGAARLATMLTGAGVRHAESIARAAVTAAKAQTVRLPGEDVAAELVAELAQAVIDLDTRINVVDAEIEARFRRHPLAEVILSLPGMGFRLGAEFLAAVGDPDLIGSADQLAAWTGLAPRPRDSGKRTGRLHTPQRYSRRLRRVMYMSALTAVRCDPASRVYYQRKRAEGKRPVQATICLARRRVDVLYALLRDHRTWQPTVPVTAVAA

SEQ ID NO: 343434 - protein, 450 aa, unidentified
MSKGHKTSLSLPVVHQKAAGIDIGSRFHVITVPPDMCPEPVQTFQAFTTDLQKMANWLVSLGIETVAMESTGIYWVPVFEMLESAGIEVILANAREAHAVPGCKSDVNDAQWIQRLHACGLLRASFRPEQNITALRTYLRLRDRFLEYAAAHIQHMQKALNYMNIQLHHVVSDLTGVTGMQMIRAIVQGERDPAYLARFRDVRCRASTEVVIKSLTDNYQPEHVFALEQALMLYDAYQERILACDAQIERILADLNQSKPLPKQPLTQTRKRSKQGNAINFDVRTALYQLTGVDLTQIHGIGPYLALRFIAEWGTDFSKWRTAKHFTSWLTLSPGCKISGGKVLSAHTRKSANRLTAHFRLAAVMVGRTSTALGAFYRWLAARIGKAKAVTATARKIAILFYNMMRYRIAYEDLGADRYELEYRERIIKNLHRRAKEFGYTLQAASECVS

SEQ ID NO: 343435 - protein, 387 aa, unidentified
MGQVIIGMDPHKRSATIEIIDEREKVLAKGRFDTSSDGYQAMLKLGRKYAQRTWAVEGCNGIGRHIALRQVADGETVVDVPAKLSARARVLDTGQGRKTDPVDAHSVAVVAMRTPGLRQVAVDDVTVALRLLVDRRDGLGRARTDTTNRLHRLLLELRPGGAKKFLSAPQARALLNTVRPRDIAGRTRRQLACELITELAAIDKKIKAANVQLTELVAATGSNLQKLNGIGPSGAARLLGDVADITRFASRAHLAAWNGTAPLDASSGDNKRHRLCRAGNRRINRVLHIMAIVQLRNDTDGRAYYRRKLAAGKTAMKAIRCLKRRLSDVVYKQMINDARRQATGPEGQSGATLTSSAASPVPKAGTSDQSLPGPANPQPKTLAFAAS

SEQ ID NO: 343436 - protein, 352 aa, unidentified
MTVTIVETRTQAPAITGGVDTHADVHVAAALDPIGGLLGVQEFPATPAGYACLLGWLGGFGTVSLVGIEGTGSYGAGLARHIAAADIRVVEVDRSDRQDRRRRGKSDPLDAVSAARAAQSGRAAGAPKGRDGQVEAIRALMVAKRTARSERIQTINQARSLIVTGPDDLRARFAGHSADDLVAELASLRPRPGSMIRYHTLLSLRELGRRAEFLDGQLQRLDALIIPLVTARAPGLLALYGVGHDTAAKLLIAAGDHPERLRSEAAWAHLCATAPIPASSGKVTRHRLNPGGDRQANHALYRIVITGMSSHPPTRAYVARRSKEGLSKKEIIRCLKRYVAREVYPHLRPGPR

SEQ ID NO: 343437 - protein, 356 aa, unidentified
MADKPIVGIDISKEWLDLCTSQAVEVERIANTPEAVAAWLERTGPGLIAFEPTGGCERFVSAAARERRIPFLRVHPNDVVAFRQSRGIKAKTDAIDARLLLAFAGDRLARRELRTSVLGDERLRALAARRRQLVETLQAEGCRLGAAALPAVRNSIEAVMAALRHSLDALEAELAAVIAANPQTAELARLLQTICGIGPVVATALIADLPELGLLSSKQIAALVGLAPYTRRSGKTQFRETTGHGRVGVRRALFNAARATLRHPSPFKDFFDRLVSDNRRPGKVALTAVMRKILITANAVARDRQPWRGLRHTTPPPGAVGTLCQPHGEQTGHRPGRVKAAAALRAVARSASLDAA

SEQ ID NO: 343438 - protein, 356 aa, unidentified
MSNATTSNTPEMTIGLDLGDRLAHYAVLDGAGELVASGRFRTTSSDFQAFFAHLKPARVVLEAGAQSPWTSRLLASLGHEVVVANPRRVQLIAKNPRKSDQVDAETLARLGRLDPRLLQPVLHRDEQAQAALALIRSRHALVASRTLLINHVRGAVKSFGSVVPRCDAHSFHRHAPSALPEELRPALLPLIQTIADITLRIRSLDGEVEDQIRDCYPEANLLRQVPGVGPLTAMAFVLVIQDPARFRKSRDAGAYLGLVPRQHQSGSRDPQLGISKCGDAYLRSLLVECAHFILSSRSPDSDLKRWGLAHLQAGDHVSKRRSVVAVARKLAVLLHHLWRTGEVYQPLRLESEAAIA

SEQ ID NO: 343439 - protein, 392 aa, unidentified
MTRYIGLDLHKRVLEVCILDQGGHVEARMRLPVDRDSLASFAKSELRLDDRVAVEATTNTWPVVELLRSYVADVTVSNPMATKAIAQAKVKTDKIDARMLAQLLRADFLPSVWQPDADTSRLRQLTNQRASLVADRISIKNRIHAVLHQRLIPPPSTRLFNEHGRQWLDQLEIDPDGRAALRRDLHLLDELEHAVAEVDRMLFRLAGEDPRIKLLITLPGVDVACAQTILGALGDLSRFADGDHAASYLGLVPSTKQSAEHAYHGPITKAGTYRYAMPARTGDKLRNLRLRSGGARRPTGCPKGTRPIAKLPDGSSRTIKPLATLYADEAVPGLLPPTAAEQSMINRNPAVAAFVASLAEPQVRPRQYRKPQIHAPSVDTGGSTDRARRPAR

SEQ ID NO: 343440 - protein, 367 aa, unidentified
MIYLGMDVHKDSITIAVLPQSAKTPTRLDKLANDLPKLKKWIERIARDGEIHACYEASGAGYVLHRALAEWGYACDVIAPSLIPKRSGVHRKHDQRDAADLARLYRAGELVAVRIPSEADERVRDVVRCRETFQREILKSRHYILKFLARRGFVFREGTNWCTPHLTWLQHLTTDASPLATGDRLIYREYHALLMYKLQRREELDRQIVQLAELPTLAPMVKQLQCFRGISVHSAMVLATEIVDWRRFERPSQLACYLGLVSREDSSGTRQRLGSITKAGNSHCRHVLVQAAWSYRHRPQTSVDLKRRQEGQPPAVIGHAWKAQQRLHARYNHLSYRKRPQIAVVAVARELVGFLWAVMRELEPVQA

SEQ ID NO: 343441 - protein, 341 aa, unidentified
MYYMGVDNHKQRSHLTIMEEDGTIVKAGPVLNYRSEILEFIQGLDTEMKAVVEAGYSSYIVVDILEDLGVEVKVAHPLEVKAIAKAKIKTDKRDSRILADLLRANLIPEAHKRSPETRRAQRVLRQRAFFVAAMTRVKNRIRSLLAQQPEDIQKGIGLEKELFSQKGVARLRSLEMGSVDRALLEGLLKLYEELRALIKTSDKLVEDLFQKMAEAQRIFTVPGFGKFFSVLVATEIDDIRRFETAAKLHSYAGVIPSTHSSGMRSYQGKMTREGNRWLRWAAVEAVWPAIRHDRGLELFYLKYASRKKANAAKVATARRLLTIIYTILKEGRNYVPFYKST

SEQ ID NO: 343442 - protein, 312 aa, unidentified
MNTEIFVGIDISKEHLDVAFGPDQAPQRFPYTPEGLNRLLAYLQALSPTLIVLEATGGLEADLMDALSRAGLPFSRVNPRRVRDFARASGVFAKTDGLDARILAEFGQKMRPPVTVLPDEQTRHLEILVARRRQLVEMRAIEEHHWRTAPETARPYIRKHLEWLDAEIATLEREMADWVNQTPLAETVEILDSAPGVALVGAATLVAEVPEIGRLNRKKIAALVGVAPYNRDSGTQKRQRRVTGGRQAAREVLYMLTIASIRCNPVLRMFYQRLRAAGKPPKVAIVACMRKLLTILNAMVRDRRKWCLELAG

SEQ ID NO: 343443 - protein, 393 aa, unidentified
MFYLGIDIAKNTHVASLMDEKGKTIFKGFSFSNTTEGGKSLLEIIKKHSEFANVTIGMEATGHYWLSIYSFLYDYDFYCIHVINPIQTDGWRKSTEIRKRKNDTIDSVLIADLIRYGDFVETTLSNEDLYSLRNICRMRNYLIQSAGDLKRKVICVLDQVFPEYQTIFSNTFGTTSKQLLLDFSSPADFEELSVETLTETLETLSRKKIGQSTAEKLIDSAKNSFGVTFSKESFTFQLKLLIEQIKFIDNQVKECETKIKELMKKIDSPITTIPGIGPVLGAIIISEFGDISRFDKPSKLVAYAGIDATVSQSGEFEGTHNVMSKRGSPYLRKALFQAALVASNTDPVLKGYYQKKRAEGKHHKTCIGAVARKMCNIIYAVLKNNTPYEVPKQ

SEQ ID NO: 343444 - protein, 392 aa, unidentified
MIYAGVDIAKMDHVVDAVDESGNQVAKAMPFKNSEAGFERCVAWLEGVAEDPADVAVAMEATGHYWMACFTYLTARGYSVVVVNPVHVRAVRKIKNLSGVKNDRIDAWLIAETLRIGEYDPTRLATDELQSLKTLTRYRQSIRDSIAEAKTKATCLMDSYFPEYAGLFSDMFGAASMAVLARACVPSEVSKTRASTLAKLMSDASRGRLGAEKAAELKAAAKSSVGIRLGEDAAAFEIREYVDLIGLLEAKAARADAQIESLLMRIEPLILTIPGVSVTLGAQIVAEIGDVRRFKSAASIVKYAGLNSGVSQSGKFEAEGEPITKAGSPYLRRAMWLAADCARRFDPKLRGFYEKKRAEGKCHRVAVTAVARKLCHVVYAVMRDQVPYDPER

SEQ ID NO: 343445 - protein, 408 aa, unidentified
MEIQHEDCAGLDVHKRSVVACVLAGREKQTRRFGTTTPELLQLRDWLAGLGVTHVAMESTGSYWKPVYNLLEGDFALLVANAAHMKAVPGRKTDVADAEWIADLLRHGLLRASFVPELGQRELRELTRHRSSLVQKRTQAVNELQKALESSNLKLQGVVSDITGVSATAMLRELLDQERPDPGALAQLAQKRLRAKIPELEKALTGNLRPHHKVILRQLRADIELFETQIAELDLLILQRVRDQQGDIDRLDDIPGINQRVGEIIVAEIGTRMERFASAAHLASWVGLCPGNHESAGKRHGGKTRPGNRALRCALVEAAHAAARTKKSSFCGLYRRLSARRGKKKALIAVAHRLLNLVYLLLKTGQPYRELGVDYYDKLNPLRVIERLTKRIQNLGFVVSLDPAPVAA

SEQ ID NO: 343446 - protein, 415 aa, unidentified
MEPIHQRVAGIDVHRMKHVVTILIGQEDGTVSSETREFGGFKRDMRALVAWLQMHRIQQVVMESTGIYWKSVFAHLEAAGIPALVVNAFHVKNVPGRKTDVGDSEWLAQLARFGLLRGSFIPPKDLRELRIVSRYRRKLTRMLAGEKNRLHKLLDDAGIKLGGVVADIDGVCASKMVEGLIAGGKPDELAALGRGKVRATTDILEAAMDGELSARHRLVLDIAHDHLRYLEGKLAALDRYLIAAMQPYAWAWRLLQTIPGIDAISAAMILIEIGDDPHRFRSPARLASWSALCPGNNESAGKRKSGKTRHGNPIVRYLLCEAANAARRTQTVFRAKYESLVIRRGHKKTIIALAHKLVRTIYFVLVRRKPYRDSTVDYEAASVAKNAPRWIRALKKYGYWPQVAVPKSPIDMTAT

SEQ ID NO: 343447 - protein, 426 aa, unidentified
MNCTQNYKIDQVTEQTLVVGIDIAKRTHYACFVDDRGRVLRKSFPIFQSKEGFQQLYKAIQGAMQAFGKSEVIVAVEPTGHYWLNLAYFLEEHGIPLVMVNPAHVCRSKELDDNLPTKHDAKDALVIARLAKDGRFLVPRLLHEIEADLRVGSTLKEKLRKEQTAVKNAIIRWTDRYFPEFWTVFRDLGKTALSVLEWTPFPADMAGRTAEELIEVYRQSEGLKCPQKAKIQALINAAKDSIGVTEGTTMARFEIAALVRRYRQLETEIAALDAELKALVQTTMEYQWLKTVDGLGDATIIDLLAEIGSFAHYRDPRQLVKLAGLTLKENSSGQRKGQKHISKRGRKRLRSVLFRAMIPLIRHNEAFRELHEYYTTRSVNPLTGKQSIVALCRKLLNVLFAICTKKQAFDAERMKQDVLSQVQRAA

SEQ ID NO: 343448 - protein, 347 aa, unidentified
MKFYTKQHKFYCGIDLHTQRMFVCILDAGGNVRVHQNINTDPEAFLHITAPFREDIVVAVECMFTWYWIADLCIEQNIPFVLGHALYMKAIHGGKAKNDKIDSLKIATLLRGGMLPQAYVYPARMRATRDLLRRRNHLMRKRAELFAHIQNTRSQYNLPDPLGCIAKPQNREGIVERFDDPSVQKSMAVDLEMIEAYDHILTQLERDIIACAKEHDLRSYALLQTIPGVGRILALVILYEIESIKRFPQVQDFVSYCRLVKCIKESNGKKYGASGKKIGNAHLKWAFSEAAVLFLKGNEPAKKYLLRLARKHGKAKALSILAHKLGRAVYFMLKNKEAFNQKKFLGL

SEQ ID NO: 343449 - protein, 354 aa, unidentified
MKRTTKYVALDVHQATTVTSVREERGRVLARSVLETYGPSIVEFFRGMRGAIHVAFEEGTQSQWLHDLVAPLVDRVVVCDRRGQARQGNKGDHVDADQLSELLRRGGLRPVYHGSPHRADLKELTRAYRALVEDGTRVMLRLKALFRARAIPTRGTAVYQPRHRAQWLAQLPERGARFRADTLYAELDVLRTLRPQAKAAMLAEARRDPAWPVLRAIPFLGPVRVALLLATMATPWRFRTKRNLWAYAGLAVVTRSSADYAVVAGQPVRRHRAPLTRGLNRNHNRVLKDVFKGAATAATARPGPLQDFYAGMVTRGMRAELARVTLTRKLAALTLRLWKQGEPYDPTQLTRQAF

SEQ ID NO: 343450 - protein, 336 aa, unidentified
MNGNAGWWVGIDVAKSKLDVAVLDDRGKIKSHVFDNCAKGFEALIIWLRQRGCDVALTRVCMEATGPYSEAVSTTLCDAGWFVSVVNPSRIKGFAQSEMARNKTDKADAALLARFAQAMKPEAWTPPALEVRELRALVDRLQALKEMQQQEANRLESAQNQPSMQASINSHIQWLRENIKDLERQIDDHIDRYPGLRADAELITSIPGLGNTTAAKVLAYLGDVRRFKSAKALAAFIGVTPRLKESGSSVRGRSMISRSGHACIRHSLYMPAMVALKYNPLIKAFGLRLKAQGLAPKAVISASMHKLVRFIYGVLKSRVMFNVQLLGNRLDFQDGI

SEQ ID NO: 343451 - protein, 467 aa, unidentified
MTPHKDYFLDPPPAPTTPTLPPSPVLSEALQICHPHAAGIDIGEAEHWVAVPPGCDPQPVRRFGTFTADLDALADWLIDCGVTTVAMESTGVYWIPLFELLEARGLQVLLIDPRQAKRVPGRPKTDRLDCKWLQRLHTYGLLAGAFRPEAHVCVLRSYLRHRQMLLTYAAHHIQHMHKALEQMNLKLTQVVSEITGVTGMAILKAILAGERDPQRLAKLRNPHCHHDEEDIAKALQGTWRAEHLFALRQAVELYAFYHQQITQCDQQIKAHLQTFGDKSAGQPLPPKAHRHKKTNEPRFDARTPLYRLAGVDLTTIEGIEEGTALVLLSEIGTDMHRWPSVKHFCSWLGLCPQHKISGGKVLSRRVRPGAHRVTVALRLAARSLHHSKSALGAFFRRMKARLGTPKAITATAHKLARLVYSLLQHGSAYVQQGLDAYEAQYRERKVTVMAKQAKALGYTLVPLAAQG

SEQ ID NO: 343452 - protein, 360 aa, unidentified
MVPTMTYAGLDVHARSTHAAAVEVRTGELRRARFAGGVTEPLAWLAGLPGPVHACYEAGPTGFGLYRAAVEAGLRVDVVAPSKTPRAPGDRVKTDRKDAELLARLLLAGQLRPIVVPSCEVEAARHLCRAREQVRGDLMRCRHRVSKLLLLHGRVYGEPTTWNRPHRQWLARQRFDQPATELAYLDTLAAVDGLVARKTVLDERLSHLALDGEWGPTVARLRCFRGIDTLTALVLSLEIGDVARFARPGQLASWLGLVPTLDQSGESRTSGAITKCGSSFARRLLVEAAWQYLRQPRIGATLQNRQLGQPAHVLQIAWRAQYRLHDQLMRLRSRGKPGNVATVAVARELACFLWAAALAE

SEQ ID NO: 343453 - protein, 354 aa, unidentified
MTSDHGQTAQTFASIGIDIGKDVFHIVGFDAAGRIVLRKKFKRLALESELAKLAPSIVGLEACLSAHFVSRTLLRLGHTPRIIPAIYVKPFIKGQKNDYNDAEAIAEAALRPNLRVVQEKTQDQLDLQALHRVRARLVSRRTATINQIRAFLIEHGIAVRTGANALRRSLFAILENRADELSPRMSDLIVGLYEDWLWLDERIETLTGEIEQVSHREANCKRLMSVPGIGPIISTAVVAAIGTGEAFERSRDFGAWLGLVPRQYSTGGKSILGRISKRGSRYLRTLFIQAANVILMRPQTWERFSFGAWLKAAQPRLHRNKLATALANKLARIAWSVLRHNTAFDAHRHEVVAI

SEQ ID NO: 343454 - protein, 321 aa, unidentified
MKHSFAPTTAFFGVDVAKKTLVVHRHNGSGTRTLGNDRASISAWLAGLPAGAVIACESTASYHRLLLDLVHAQRFRCYLLNPMDVHHYARSMGLRSKTDHVDAQLIARYVANEHTRLHAWQPASVASQALDGLIKRRAQLVRSRTALAASFAGMPEIGSALTLALKQLDALLKALEARIRAAVKALPEGAATAQRLASIPGVGPLTSSALTNLFTRVPFTGADSTVAFVGMDPRANDSGEKRGRRRLTKRGPSELRRLLYNAAMAAARNPLWKPYFERDRSKGLSSTAAYVALARRLLRLAFTLFRSRSMFDPDKLALKAA

SEQ ID NO: 343455 - protein, 417 aa, unidentified
MKSKTEKIRSINGKTLIVAVDIGKTVHYGYFRAPNGEDFKPFRFYNFKKSFEQFWAKICRFQRQQNLEDIVIGFESTGPYAEPLFHFLRKRPAKLIQVNPMHTKRLKELTGNSPNKTDKKDPRVIADVISLGHALTLVVPEGPAAQLRRLTQARERAMKSHTATVNQLQHLVFVIFPEFFSVMKTLTKSAMYLIKNHTTPESIFAMGFKSLAKVLKRVSRGKLGQGRAKELFEAARDSIGIYEGKESIILEIDHLVSKIENEDRFIDSLEKQMDDYLEQIPYSQSILSIKGIGRITVAGLIGEVGDFGKFNTISEIMKLAGLDLYEVSSGKHKGQRHISKRGRSLMRKLLFFAAINAVKSKGIMHERYQQMLDRGMPKIKALIAISRKLLRIIFALARDNTIYVNNYNQIHHFKLAA

SEQ ID NO: 343456 - protein, 351 aa, unidentified
MLTIGCDFHTRFQQIAMVDTTTGEMIERRLEHENGEARKFYSTLPGPARVGMEATINAQWFEKTLHANHHELWVGNPAEIRAAMVRKQKTDSRDALHILDLLLTNRFPRIWVPSPAERDVRQMLRHRHKLVGFRTSAMNQLHALAMGQGLCRKQKLWTIAGRKELEALNLDPWASRRRQELLQLLDQLDPWIKDLDRAVIEEAERHPGAVQLMKQPGVGPVTALAFVLTIGPISRFRRSKQVVSYLGLNPSEESSGGKQRLGAISKQGNTMMRWLLVEAAQIASRFDPELRRAYQRLKFRRGVSGVAKVAMARKLAVRLYWRLREAAQSVPPAPMQGSPTCPMVDESLSGI

SEQ ID NO: 343457 - protein, 341 aa, unidentified
MSTVALVGIDLGKHSFHLHGQDKSGREVLRKKTTRLQMMRFLGNLPSCTVVMEACAGSHFIARQLKSFGHEVKLISPQFVRPFVKGNKNDFIDAEAICEAASRPTMRFVTPKTEAQQTLSVLHRMRDSLVRDRTKTANQVHGFLLEFGISLPKGLSLVRRLPVTLDEYPLPPRLVSLLSRLHRHFCYLDEQIKELDREMAEQLAEDDLGSRLLTIPCVGPITASLLSAEMGDGKQFGCSRDFAAAVGLVPRQYSTGGRANLLGISKRGDKNLRRLLVQCARVYLQRLEFQKGALADWVRSLRERRHSNVVVCALANKFARIAWAMTANHSEFEAGSSAYAA

SEQ ID NO: 343458 - protein, 422 aa, unidentified
MKVFNPADFAALIAIDWADRKHDVCELDQQNNETTFSVISAKPEAINAWANALKQKYNGQQVAVACELKKGPLIYALSKFKHIVLFTINPSTVAKYRKAFTHSGAKDDPTDAAIQLEILQQHMSKLNVIMPDTQSIRSLAQLVEYRRKLVQDRVNLTNRLSTTLKNYYPQVLDWFNEKDSMIFCDFLLRWPSLAKVKRARKQTLHDFFNLHNARYPNVNEKRIDDIKHAQSLTSDNAIIGPNLLLVECLVGQLKQLMLSIERFEHEIKSIYKQHSDRFIFDSLPGAGPQMAPRLLAAMGSNRERYQSSEEVQKYAGIAPVTERSGKKEWIHWRYSCTTFLRQTFVEWAGQSVRYSFWAKAYYEQQKSKGKPHNTIIRALAFKWIRILFRCWKTKTAYDESTYLEALKRKGSPLLKYAMESKL

SEQ ID NO: 343459 - protein, 423 aa, unidentified
MSTKSSGKNSSRTSTSSPAKSHHRIRRGSNPVVDLSTVGRVLLVGLELAKNRWVMAFGDGRNRRYVTIAGRDWAAFDEALESSKKKFGLPEDVPVVVVQEAGRDGFWVHRYLVSQGIQSLVVDPASVPIPRRKRRRKTDRIDARLLLQCLVRFHLLDDKKVFSVVRVPDYEVQEQRLLLRERSRLIKEQTALRNRIKSKLAEKGLVDVTLDKKFTERIKRFRTPGSNNELSPYLVCELERAYERYDLIVSQLRDVEESIETLARAGTNLLAESDCPVPELALTPAQRASVNCELLRGFRGIGLQGAVGLAYEFYWRPFDKPKETGPAAGLIPSPYNTGNSERDQGISKQGNRTVRALAIEIAWLWVRWQPNSSITKWFNEGFAQGSRRRRKVGIVGVARRLLGQLWRYLNDGVVPEGAILKYS

SEQ ID NO: 343460 - protein, 343 aa, unidentified
MQTVTTIGFDIAKSVFQVHGVDAGGQVVIRRQLKRRSVLAFFQKLPPCLVGIEACASSHHWSRELQALGHTVRLMPPAYVRPYVKRQKNDMADAEAICEAVARANMRFVPTKAPEQQSCLMLHRTRHLFIRQQTAVINSIRAHLAEFGIVAPVGRKGITELLRVVADPNDKRVPEVARACLAALGTQLLGLKGQILAFDRMIMAWHRSNQTSKRLHYIPGVGPMLATALVASVADPRTFRSGRNFSAWIGLVPKQHSSGGKERLGSISKQGDRYLRSLFVAGALAVIRYAKIHGTGHRPWLTALLGRRPTKVAAIALANKIARMAWAIMARGERYKEPVALAR

SEQ ID NO: 343461 - protein, 331 aa, unidentified
MNAHVGIDISARSSAMGWRQNGKAAGNGDIQHTPKGRKAATEKLLRLKPLSVVMEATGIYYLDLAMELHAAGLPVSVINPKSFHNFAKLMLQNSKTDQIDAQLLAEYGERMGPRLWVPPTAEQMMLRAIGRHINRLIGHRTRAKNELHALQATETSIALLIEDEKDAISALDIRIERLKQAARDTIAKCPDLSLQFRCMMAAPGVGEASAIATLAELTTLPVTLRSAQVSRHAGLDVRLTQSGTSVNRPGRMSKCGNAYLRAAMFMPALTAIRCDPYVKAFYEALVGRGKKKMQAIGAVMRKYLTGLWACMRAGENFDTAKLFSKIHLPKA

SEQ ID NO: 343462 - protein, 367 aa, unidentified
MKKVSTVAAKQSRNISQQKLTIGLDLGDRNSWYCVLDEAGQIQLEQRVRTTAKALSEVFGAMRRSRIALEIGTHSPWISRLLSELGHEVIVANARKVRLIGESRKKDDRLDAQTLARLARIDAQLLYPVKHRSAQAQADLMMVRARAGLVRARTGLVNTARGLAKSYGERLHGCNVRNMSPEKAESLSPELQAALEPLLNAIESLSERIVEYNDGIENLAQQSYPQVALLKQIKGVGTLIALTFLLTLEDPHRFHKSRDVGGYLGLQPGRRNSGQSEPQLHISKEGDPYLRTLLVQGAQHILGPFGVDCDLRRWGLKLAERGGRNGKKRAIVATARKLAVLLHHLWVSGEAYDPLHNSNRVTVAAAA

SEQ ID NO: 343463 - protein, 398 aa, unidentified
MTESSDYESVQVFIGVDVGKDTHHAVAINRSGKRLSDKALPNDENKLRSLISDLKQHGQILLVVDQPATIGALPVAVARSEGVLVGYLPGLAMRRIADLHAGEAKTDARDAAIIAEAARTLPHALRTLKLADEQIAELSMLCGFDDDLAAQTTQASNRIRGLLTQIHPALERVLGPRLDHPAVLDLLQRYPSPEKLASLGEKKLAAQLCKLAPRLGKRLAADIAQALAEQTVVVPGTNAAAVVLPRLALQLITLRKQRDEVALEVEQRVLAHPLYPVLTSMPGVGVRTAARLLTEVACRAFASAAHLAAYAGLAPVTRRSGSSIRGEHPSRRGNKALKRALFLSAFAALRDPLSRAYYTRKMSQGKRHNQALIALARRRCDVLFAMIRDGTFYTPQAS

SEQ ID NO: 343464 - protein, 351 aa, unidentified
MDFINQQFFIGIDVHLKQWKVTVRSAGIELNTFSMHPAPLELITYLHKHYPGGMYHLAYEAGFCGFWIQRTFTDAGIHCIVIHPADVPSSGKEKAVKTDAIDSRKLARQLEQGNLKAIYIPSVASEQLRSLMRLRFKLVQQQTRLKNRIKGFLRVSGVEIPAQYLTNARWSGAFIAWIKSVPVATQAGKFTLENLILQLEQTRGHLATALRELHREAAAPAIAPALDAITSAPGIGFVSAMTLFTEIIDIKRFHEFEQLCSFVGLVPSLYSSGDTSYTRGMTFRHNQYLRPLLIEAAWIAVRKDPAMTLAFQQLCRSMPKNLAIIRIAKKILRRIFHLWKNQDRYVYALAA

SEQ ID NO: 343465 - protein, 314 aa, unidentified
MTSLVCAAGIDVGRDHLDFAVAPIGVVRRVRNEGRGIVALIGQLRRDDVVRVVLEAIGPYAARLVRALTEAGFEVGVVDPRRIRAFRTAEGRRAKTDRLDAQLIARFALAMPDVVRPVPDARAQQLRALSARRRQLVELIAMEKTRLKQAPDENVAQSHRLLIAGLGAERARIEVAIATALREAGATDRLALLQTAPGVGPAVAITLLADLPELGRLDRRAIASLAGLAPHIAQSGLDRGHAAIAGGRPCVRAALYLAALSACRLERGYRRDYQAMRQAGKPAKVALIAVARKLLVTLNAMMRDNTPWAPIHPA

SEQ ID NO: 343466 - protein, 349 aa, unidentified
MIIGCDLHTRYQQIAMVDTETGEFVERRLEHESGEARTFYAGLRGAVRVGIEATGHTAWFEAMLAEFGHELWMGDAAKIRAAVVRKQKTDARDAAHLLDMLCTNRFPTIWRPSLAERDLRQLLWHRQKLVWMWGAVKNQMHALAMGEGVCRKKKLFTAKGRTELEGLKLGRWASYRRQELLRLFDELQSSVKKLDQAVELAAKNEPLAARLMTHPGVGPITSLAFVLIIGPVERFDRSKQVVSYLGLNPQEHSSGGRQRLGSISKQGNPMMRSLLVEAGHTAARLDPQLQRVYQRLKFRRGAAVAKVAIARKLAVRLYWMLRSTADYAQLVRMRGSSWATLVEDSPSLG

SEQ ID NO: 343467 - protein, 414 aa, unidentified
MEVVHERCAGMDVSKRDVKVCVRSPGKRRGSYAKAVATFGSVTAEILRLREHLIKAGVTLVVMEATGDYWKPFYYLLEDGPFEVMLVNPAHARNLPGRKTDVSDAQWLAELAAHGLVRGSFVPPPPIRILRDLTRARVILTQDRVREINRLDKVLEDAGIKLSSVASDIMGVSGKAMLHALVDGERDPKVLAGLARMSLRNKTDQLAAALTGRFTDHHAFMVGLHLRLIEQLTVGIADLTNRIETLIDPYRPVLKLLTSIPGVSDKAAIVIVAETGADMTRFPSAAHLASWAGVCPGHHESAGKKKSAAPRPGNSYLKGALGNAAMGASHTNGCYFQARYRRLAARTSPLKALVAVEHSILTAVWNMITNNQSYNDLGGDYYSRRDPTAAMRRITRQANSLGLTVRFEPIEQRG

SEQ ID NO: 343468 - protein, 465 aa, unidentified
MTPHKDFFLHPRPPTSPPPQPPALTGSLQVFNPHAAGIDIGEAEHWVAVPPGRDPQPVRRFGTFTADLDALADWLIDCGVTTVAMESTGVYWIPLFELLETRGVQVLLIDPRQAKRAPGRPKTDRLDCQWLQRLHAYGLLAGAFRPDDQVCVLRAYLRHRQMLLTYAAHHIQHMHKALQQMNLKLTQVVSDLTGVTGMAILKAIIAGERNPQHLAQLRNPHCHHDADDIAKALQGTWRAEHLFALQQAVALYEFYHQQLALCDQQIKRHLETFADKSEGQPLPPKARRHKKTNEPRFDARPPLYRMAGVDLTTIEGIEENTALVILSEIGTDMHRWPSVKHFCSWLGLCPQHKISGGKVLSRRVRPGAHRVTVALRLAARSLHHSQSALGAFFRRMKARLGTPKAITATAHKLARLVYHLLKHGSAYVQQGLENYEAQYHERKVKTMAKQAKALGYTLVPLAAQG

SEQ ID NO: 343469 - protein, 458 aa, unidentified
MEEAAMKYNQQHKRTGKKERQASISLLERIQPDAAGIDCGEKHHFVAVPPDRDPQPVREFRTFTRELYRLADWLAQCGVNTVAMESTGVYWIPVYEILEQRGFEVVLVNARDVHNVRGRKSDVSDCEWLQQLHSVGLLRASFRPAAAIVPLRAYMRERATLVEEVSARIQRMQKALTQMNVMLHTVVSDLTGATGLKIVRSILAGERDPEILAAHRDSRCHASREEIVAALTGNYRAEHLFSLRQNFAAYQFHLQQITECDNAIEALLDTLAAAQPLPTAVLPPARRRNYPKSHEPRFDIRTPLHRLTGGADLSQIDAIGPQAALQLVAEIGTDMSRWPTAAHFTSWLTLAPNNKVSGGRLLSSRTPPSANRARGHPASLRDESRSHLKRTRRLLPAPSRACRQAESHHRHRAQACRRRLPRPVRRSHLSRPRRHRLPPAQSQPRTQIPSQTRQAAGP

SEQ ID NO: 343470 - protein, 447 aa, unidentified
MHSERIGSVMVGIDAAVTARHRVVVRRLEAGGPGVVVDDFEAAPTLAGLDRISKRLSGYSGAVAVAEPTSMTWLPLSAATARAGVPLMLVGNRHSARLRAAMSGKEKSDVIDAEVLSRAPELFRLAPARIPDPGELALRRAVQRRHKTLIEANRWYRRLLSLARWAFPDLWIAFAGSRATAMAVLGRWPHLERLARARPGSIADVVAATTKGVTDATRRAERIRGAARGWVEFWDGHLDLDALGWETAELVADVVNAQARLARADAMVTQRWECLWGDDPLLLSVPGIGFRTAPVVRAFFGDGSQFPTAKEAQAYVGICPSNWSSGTVTQPSRAITKEGPEELRLAFYLAANAARSVDPQLAWFYRKLMCERGHCHTQATTAVARKLVARTWATLTRGSPYELRDLEGNPITRRHASELARSQAVPPEVRRRSRAMTAAIRRGRLTR

SEQ ID NO: 343471 - protein, 429 aa, unidentified
MEKIHSNAAGIDIGSTKVFIGTKDGVVQSFGTFTIDFRLAAEYLKEKQVETVAMEATGVYWVILYDILVEAGFDVWLVDGRQTKQVPGRKTDVKDCSWIQELHSFGLLNRCFVVEGDLKELRSYQRLREDHIRSSSMHINLMQKALIEMNIRLPEVLSQIQGKTGIALIEAILSGERDKMALLSLCHISIQKNKKEEVLKALEGYYTEAGLFALRQAYHAHFFYKKQIEECDEKIQQALQKINNDDEIKETEGPRKPIRHNKPNVKNLGGHLLKIFGGRDAGVLSGFTDYSWLQIFSEVGDDLLRWPTEKHFTSWLGLSPGQNDSGKRKRRVRKGRPRVGQIFRKIAQSLLESKYLALGAFGRRIRSRKGAPVAIKAVARKLAIQYWRLMVKGSIYVEQGIAHYEELVKAQKKRLLNKLALELDIQLSP

SEQ ID NO: 343472 - protein, 442 aa, unidentified
MKTKKFEEKKREIRGKVVVGVDPGKDYHQFAVLDEYGDQMGKSFSAPVSYEGYENKLWQRLGRIAGECGPEEVVFAIENSCNLWKTLAGYLTIKGYKVVLVSPLTTRRSRPLMNHDFSKTDSKDAFLVAQNAQQGNYNRYRFNSLCMESLHQLSISYSKLLKDRVKNIQRLRSFMDNVFPEYMKVFPDISVDTSLYLLENYFRPDHFLKMEIGKELLAIKRISQGNYGKEKLTELRGQAKESIGLREPVEETSQRLILDSWIESVRLIKRRMKEIEKEMVRLASESDNFEILISLKGVSNLSAARLIAECRDFEGVSHYGQIEKFAGLNVRVSESCRSSGARHINGIGNKRLNHILNQMTEQTVRYLPEVGNKYMRRQLKKPSYRKNIIASIPQLLKLIIALLRENRPYEFKEEKLKEMAELKEQYEELRKKRRWSTMKFAA

SEQ ID NO: 343473 - protein, 336 aa, unidentified
MNEFAGLDGHKASVFACVKDEFSGKVLREQNYPTHAIGMEKLYQTVRNAKCVIEASTACYLIYDYLKDRGVDIIVAHPKRVKAISSAKLKTDKVDARILADLRRANLVPEAHIPSKDVRDKRDVVRQHISLTQQHTRLVNQTKAALSRYGLKLPKNIFTKKALKIADATQMPESLRLKLSHARQQHELLKKELNETDSRIKKLAEESRDAVLLSSIRGVGSFLSLGIVLQIDGVKRFPTPEHLISYAGLCPCVKQSGDSYWAGKISHDACSTLSWMFIQAAWSVVFFQPYFKEMYSKLCKKKKPQKAIVIVAKRLARAIYFMLRDQTTFHPNGGGC

SEQ ID NO: 343474 - protein, 466 aa, unidentified
MLTTRPTPTTIHIDGLPAIHPNAAGVDIGSDEIVVAVPPDRDPQPVRVFHIFTPDLEALVAWLLACRIDTVAMESTGVYWIPLYELLEQHGITPYLVNARHVKTVPGRKSDWNDAQWLQKLHALGLLRASFRPDGEIAALRTLVRYRAELIQHRAPHILHMQKALQQMNIQLERVLSDIMGVTGQVILRAIVAGERDPVALAHHRNPACKSSTETIAKALTGTWKDELIFVLTQALVIYDVYTAQIAVCDTQIAHSLAMMESRGEKDAPLPELPPVKDGSKTKNAPPAETRAHYARLLGVDLVAVMGLSASSVQTIISEIGTDMERFPTVKHFSAWLGLAPRNDISGGKVLRSRTMKVVNRATQAFRQAAQSVARSDSALGAYYRAMRARKGPQQATVATAHKIARIVYHLLKYGEAYEAESADAYEQKRQERELRQLSRRAQKLGYTLTPASSNQPATATEPVPT

SEQ ID NO: 343475 - protein, 391 aa, unidentified
MLWAEAKGKSRKEKKRFGTFTHDLLQLADWLEQCGVTHVAMESTGVSWKPMWNILAEQFEVLLVNAQHIKAVPGRKTDQKDSEWIADLLQHGLLRGSFVPPQPIRELRDLTRYRVSLVQEINRVANRIQKVLEDANIKLASVATDALGASGRAILQAMLAGEQDAARLAEMSKGLLRNKIPELKLALEGRMTEHHRFLLRQLFEHLHFTESKLREIEQEIDRRMRPFEDKVTRLCTIPGVDRVTAWGMLAEMGMNMNQFPSSGHLASWACLCPGSFESAGKRLSGKMRKGNASLRRCLSQAAWAISMMKNNYLSALYRRIAARRGAKRAVMAVAHALLEIAYHMLKRKEDYRELGADHFDRIDVNRIRRSLVRRLERLGHKATLEPLAQTA

SEQ ID NO: 343476 - protein, 343 aa, unidentified
MKLMRIGVDLAKNVFQIHGVDRHEQPIWRQRLPRDRWLQTVLEKIEPGCEIGMESCGGAHHWARQLQARGFRVRLIAPQFVKPYVKSNKNDANDAEAICEAMSRPSMRFVAVKTIEQQDIQATHRIRAGLIEQRTAKANQIRGLIAEYGLVAPKELLMLRRAIPCWLEDADNGLTARFRRLLNGLWDDLRALDDRVRELDGEISAIAASDPAAARLQQLRGVGPMIATALVAAIGDASQFDNGRQLAASLGLTPKQHSSGGKDRLLGISKRGDAYLRTLMIHGARSALRTAKSKDDRLSQWAVRLAERSHPNVAAIALANKTARMAWAMLRNGTDYQPDRAAA

SEQ ID NO: 343477 - protein, 348 aa, unidentified
MEMIALDCHKHYSVASVQTPEGRCLAERRIEHRRGSILAFLAPYSPGSPVAVETIGNWYWIVDEIEQAGKVPRLVHARKAKLMLGSINKTDKLDVRGLNRLQQTGTLPTVWIPPAGLRDQRELPRTRMVFATARTRLKNRIHSVLDKYGFQDQFTGVSDIFGAGARPRLEGCIQQLPPQAAYTSDLLLEQLEAVQETIQALEQRMAEVFKPTAELELLDTLPGVGLILGVVLVLEIGDIQRFRCAERLASYAGTVPRVHASGGKIYYGRTRPDVNHYLKWAYTEAANAVAVHREHLAQRHVGQLYNRIRSRRGHASAVGAVARHLAEATYWMLMKKEAYRERGITESP

SEQ ID NO: 343478 - protein, 335 aa, unidentified
MKEITTVGIDLAKTLFTVHGVDAAGRTVLRKTVRREKVMELVASLPPCLIGMEACGGAHEWARKFQECGHRVGIMMARFVAAYRKSSKNDGNDAEAICEAVARPNMRFVPVKSAEQQAVLSLHRVRQGFIEQRTATINRIRGLLAEFGIVLPQRADQVRRAAVVVAEELPVLAREAIADLREHLAYLDERIGRYERQLITLAKQHEPARRIQQLAGVGPLTASAITASIATGHEFTNGRQFAAWLGLVPRQYSTGGKTRLGRITKRGDAYLRTLLMLGARAVLQSAGRQADRLSRWAIALRARRGYHRAVIAVAAKNARVIWALLAKNRDFALPV

SEQ ID NO: 343479 - protein, 375 aa, unidentified
MDTIYIGVDFHARQQTICYLKTETGELVISELLHRDKKQVRAFYAQFSGQVIVGLEASGYSPWFETMLEQLGCQVWLGDATEIRRRARWRQKDDRRDAELIWDLLHHNEFPRLHRPSLESREILRMLRYRQKLTKLRTMSKNSLQALALQAGVAKRSQLFSKVGQEELRAAVMSPAMQWQRDHWWQLLEPLNQQLLETMIWFKAQGKEDVLVKRLRTHPGIGLLTALCIVHTLQPVGRFRNQRKVTAYGGFDPMIRRSAERAIYLGISKAGSRLLRYLTVEAAHTAIRYDEDLKRFYKRLAERRGKPKAKVAVARKLLIRAYIMMRDEIDYAEFRRRAVAARLARPIHRPKMPEVLIGQPASTKGQEQLTAAKSK

SEQ ID NO: 343480 - protein, 319 aa, unidentified
MFIVGIDVSQKSFDSTLIDEAGQRYQKAFKNEEKGFQALQKWLVGHQVKAAHVCLEATNIYWEELAEYLHDQSYQVSVVNPIRIRGFAQSQLRRSKTDEIDSEVIATFCAQTKPTLWQPPQPHQRQLRALTRHQQALQKSLTQHQNRLHVTRDPAVRASLAIIIETLQSQYAAIEAQIQALIDQHAPLQKQMALLLSIKGIGPKVAVILLAEMYDLAHYDNARAAAVDAGLTPAHYRSGSSVRKRSKLSKMGKGAVRGVLFFPAISAMRHNPIVRALADRLRARGKPNMVIIGAAMRKLLHLAYGVLKHQRPFDPNYVN

SEQ ID NO: 343481 - protein, 432 aa, unidentified
MDQIVERPGALDVHKASVTACVRVPGHEGGRVQEVREFKTTVRGLLGLRDWLAGHGVTTVAMEATGVYWKPLFAILEDDFELLLCNAAHVKNVPGRKTDVSDSQWLCKLLECGLLKASFVPPKTVRELRELTRRRKTLVRDRQREAGRLHKTLEDTGIKLDCVATDILGVSGRAMLKALIDGTRDPAVLAELARGRLRAKLPDLREALEGRFTTQHALLVGGILRHIDFLDAEIDALGTAIEAHIDAQSKQAREAKQAGEDAGAENPFDSAVQIACSLDGIQQRTAENLIGEFGTDMSRFATDKHFVSWAAQCPGNHESAGKRRSGRSRKGPEHLNRALNDAAMGAIRVKDGHFARKYRRVKARSCHGVALGAVKHAILIALYHMLKTGELYKPPTPNPDAERRARERATKRLLAQLEGLGHTVTLQGAAAA

SEQ ID NO: 343482 - protein, 417 aa, unidentified
MLVAGIDVGAEVHHVAVVDQSEAVIVKPTAFEEDAHGYQELFALLARAGARGGEDLPLATASAPPSFLVVMEATGHYWQNLFAALVAKGFAVALVNPLRTHRFAGEELARTKTDRIDCLQIARFGAQKRPAASHLPEAAVEELRELVRLRERLMQEMVARINQLHRLVDLGFPEFTRYLKDLNTALATAILQQYPTARAFRGLSRKRLAKLSYDGRHQMGAELAQQLIDAAAISVGSQHSSSHQLGVRYACEDLETLRKRLKRLDGDVAGKLQQHQVGQLLTTIGGIGETTAAMLIAELGDPARFASAAALTAYVGLCPGHKHSGKHQPKSSSLSPIGNRRLRRALWMPTLSAATQSNPWLMVFYRRLIQRGKPHKVALCAAMRKLLAAIYSVAKYRRPFVPFLNPQSAVRLDYEKA

SEQ ID NO: 343483 - protein, 449 aa, unidentified
MRQKKPRKKKTMKLPKHLEHINPHAAGIDVGSKSHFVAIPEGVDDQPVREFPSFTGDLQRLADWLISCGITTVAMESTGIYWIPVFELLESRGLEVKLVNARHVKNVPGRKSDVLDCQWLQRLHTYGLLQGAFRPAEQVCTLRAYVRQRMTLVRYAASHIQHMQKALAQMNLQLHNVVADITGATGMRIIKAILNGERDPKVLANMRDRRCRNSAETIARSLHGNYRPEHLFSLRQAVELYEFYQAKISDCDQHILAQLSGFDAAISEHAPPEGKPPTTPGEALQRMTGVDLTRIDGIDTNTALKIIAEIGIDMSRWKTAKHFASWLGLCPGTKVSGGKVLSAATKPVANRAATALRCAAFALFNSKSALGAYLRRQRSRLGAPKAITATAHKLARLVYTMLKNGTSYVDAGQQYYEEQYRTRILQNLKRKAQAFGFQLVPAQLGSATT

SEQ ID NO: 343484 - protein, 341 aa, unidentified
MMSDSTLYHLYVGVDVAAQTVTVAWMEPGGRPSPALTVAQTPSGFAALQTRLEETGHAPPATLVVMEATGPYWVTLATTLSQAGFAVAVVNPTQAHHFAKALLKRAKTDAVDARMLAQLAATLQPTPWTPPPAVYTEIQQRLLQRDALVGLRQQARNQRHALVRLPTVVAAVKERLDVLIAMLDAQIEATEAELTEVMRQDPRWAANADLLLSITGIGLLTAAWLLVATVNFELCPTVEAATAYVGLAPYPRESGTSVRGRPAIGHGGHRRLRTALYLATLSAGQHNPLIKTFYERLKANGKPKKVARCAAARKLLHLAWAVVRSGRAFDPTYRQDMLAAA

SEQ ID NO: 343485 - protein, 341 aa, unidentified
MGQAHTIGLDIAKRVFQAHGADASGRVVFRKRLVRAKVLAFFAAQPPCTVAMEACAGAHHWARELGKLGHIVRLIPPAYVKPYVKRQKNDRADAEAICEAAQRPSMRFVPVKTEEQQANGVVFRARDLLVRQRTQCINALRGHLSEYGYVFPQGITHADAVIAHVEDPDSSVPESVRAVLKVLIGTFQALEAQIQALDAEITQRAKADPVARRLMTIPGIGPIAATAITALVPAPEGFRAGRDFAAWLGLTPLQKSTGGKQKLGAISKMGERTIRRLLILGASAVVRWAGQRGTPAGSWLAQMLARKPKMLVTVALANKTARIVWALLVKGGVYRAPAPAA

SEQ ID NO: 343486 - protein, 400 aa, unidentified
MNPVIGLDVAKGESQVQAFLQRKKPYKKSFKFEHHLQGLHAFYQFYQEVEQVSGQPPAVIFESTGHYHEPVLQFLEDQAITYYVINPVISYEARKTSLRKVKTDKIDAFHLGELYYKEDLEVFQRKTEQYLNLRQLTRQHSALTDSYVEIKLQFQAALDQIFPEFHSVFSNLCGKLSLNTLLHYPTSADIEGVSQQALATEMRQLGARRSDAWFLDKAAQLQDAAARNPFQEPICRGHVLSLQMYIQMIFQYQEHLSKLRKEINALAKTFDDYALVQSVPGVGEKIAATIISEIGGIDLFERPKQLAAYAGLDPSVFESGKFKASINRITKRGSSRLRQALYTAVQCGIAKNRNKKLIAFYNRKRSEGKPHKVAVIACANKLVHWIHVMLKRQEAFVDQS

SEQ ID NO: 343487 - protein, 341 aa, unidentified
MQVTTIGLDIAKHVFQVHGIDASEKVVVRKQLRRGQVLGFFERLAPCLIGLEACGTAHYWARELMKLGHEVRLMPARDVKAYLKRQKNDAADAAAICEAVRRPTMRFVRIKSPEQQGQLMQHRARDLLIRQRTQLINALRGHLAEFGIVAAQGREGLQQLRAIVADEGDERLPLDARASLIALARQLEAIEAAIGALERRMMAQHRTNAASRRLATIPGIGMIGASAIAATVADPSVFASGRDFAAWIGLVPRQDSTGGKPKLGPISKQGDRYLRRILVVGAHSVLRRAKQNPAKYPWVARLLARRPFKLVAVALANKMARIAWALLASGGHYRPRLAAAA

SEQ ID NO: 343488 - protein, 352 aa, unidentified
MQKNSVSWSGSTIGVDLGDRTSRVCVLDGVGEIVEEAAIATTRASFERKFGRLERARVVLETGTHAGWANDVLVQAGHEVVVANARKVRAISSNQRKCDELDARMLAQLGRVDVRLLAPVEVRASQQREDLMLVRARGAAVESRTSLINSARGLAKAHGFRLKSRSSSSFHKEPLEESLQTALAPLLSMIEQLSKTIAAYDRQIERLCSSRYPQTRLLTQVHGVGSLTALYFVLLIGDPKRFQRPRDVGAYLGLVPRRDQSGAKDPQLRISKTGDRIGRTLLVQCAHYILGPFGKDSDVRRFGSKLAARGGKLAKQRAVVATARKLAVVLFALLRTGEVYEPLRNSSKSQVA

SEQ ID NO: 343489 - protein, 332 aa, unidentified
MIAIGIDIANQTFTASACTATFEPVFFGQTFDQTPAGYAALLTLCASIPRTQLQAVMEATGVYSERLSHYLYHQGVAVFVEPPLSIKKGMYEREKSDPVDSRQIAEYAFRFQNRLHPWQPPAEILDQLKTLLTVREQFAKMRTAGKNTRRALQRKQYVHQETQRYYDQFIAKLDGWIADLEHDLEKILQTNLQIQQTFAHVKNIPGVGFLLAVNVALVTEGFTQHLKYQSLSKYIGTCPLSYQSGTSVYRRPRADGAGPSRLRKLLYLSAMRLKKDSPEFRRYFERKVAEGKAPRLILNNLANKLLKIVCGVIKSGKPYIKGYYSINPQLYE

SEQ ID NO: 343490 - protein, 347 aa, unidentified
MSNHIENGQVRVLGIDLGKSVFQLHGVDASGKSVLKQRLKRDKLLEFMAQLPPCLVGMEASSGAHHWARKFQGYGHDVRLMAPQYVKPYVKRHKNDSVDAEAICEAVQRPNMRFVGIKSVAQQEILALHRVRSLAVKNRTALVNQIRGLLAEYGIVFPKSIKQARRAIVLILSDESSEMSANFRVILEDERDELAHLDERIGKYEREIEALAKAEPQCRLLMMIPGVGPITATALLASVGDVRAFKNGRELSAWIGLVPNQHSTGGKAWLTGISKRGNGYLRTLLIHGARAALRVCENKPDRRSQWAVSVSERRGANRAVVALANRMARSAWAMLVKQEAYGASAAV

SEQ ID NO: 343491 - protein, 392 aa, unidentified
MVLTVYFVILCPQNLAECANGRFSQNRPSLDLSPVVLEGRRACRGAWDRSGVFLNPNSCMGFEPVPSKEGSWMMAQNDPVVVGIDVAKDKVDVCIRSPSLRRTFASTAEGRRELASWLRRNKVGKAVMEASGGYEREWAKALRAAKIEVRIVDPRRVRSFAQSAGRLAKNDTIDAEMIAWFAETFNEAQGQAYDATREQLQQMVNARQALKDMQSKLASQGEHAVPAAVQRIHARISKVIAVELVRIEAEISAMIQATPHFSELAEIIESVPGIGRVTSAALIAAMPELGQVNNKIVASLLGVAPYDDDSGRRRGERHVKGGRRRTRNIFYMACLGAATRHNPVLKAFYDRLVAKGKLKKVALTACMRKLIGILNIMIERRQKWDAKRYAVS

SEQ ID NO: 343492 - protein, 451 aa, unidentified
MSGTKKSRRKRDISPTHSHAAAIDIGATMHVAAVGPDSASEPVRSFGTFTGDLHCLADWFEQCGVRTIAMESTGVYWIPVFEILDQRGFEVILVNARDAKHVPGRKTDISDAQWLQRLHEYGLLRASFRLKGEVAIMRAYLRQRERLLDYAASHIQHMQKALTQMNLQLHHVVTDITGATGMAIIRAIVAGERDPAVLAAQRDPRCHASAETISQAMVGNDREEHIFALTQALELYDVYQAKVAICDARIEAVLKRLRKASSTPVGKLPPARTTKKQSNEPAFDVRSALHSLLGCDVTKIHGLGPYLALKLVGECGTNLSAWPNAKHFTSWLCLSPSNKISGGKVLSSRTRRSGSRAAALLRLAAVAVGRTDTALGAFYRRLSARVGKAKAVTATARKIAVLFYNTLRHGMEYTDPGASHYEERYRSRVLANLTRRAKSLGYVLQAAPEAG

SEQ ID NO: 343493 - protein, 484 aa, unidentified
MMAIGPPNGRNAVRSNRWSSIGIGGVRPMALTNGPGSGQIAILGPRSGCSAAWIGILDILRRPASWRGATTTITSRKLKDAMRRTKAASFFLHSPSSHLTQGDLQMDHANTDTPAETILHGALELSKNSWLLALQFPDRAQPSLYPIRGGDTVGLMAKLMAARDRWAKVSGKAPSIVLCYEAGYDAFWLARFLKARGIECLVVDAASMQVNRRARRAKTDRIDVGMLLRALIAWGQGDRHVWSVVRVPSVDEEDLRRSHRERDRLVRERTAHINRIKGLLFGQGIRDINVKTKYKTLQIDKLVTGDGCPLAPRLSSEITREIARLALIQEQIATLERERDQAPTPCKATEKKRVQLMCLTGIGPAIAAVMTREVYYRQFDNRRQVAGFLGLATSPHDSGDVERSQGISRAGRGQVRGTMIQAAWLWLKHQPKSAITRWFVQRTAGQSGRIRRIMIVAVARKLAIALWRFLEQGLVPQGAMLANR

SEQ ID NO: 343494 - protein, 341 aa, unidentified
MEEYIGLDVSMKETSVSIRREGKRIWRGKCASDPAVIAALIRKRAPAVKRVVFETGPLSIWFYHSLRTEGLPAICIDARHAKAALDMAPNKTDANDADGLAHLAEVGFFREVRVKGFDSMLARTLVAARTRLVRITTELSNQIRGLLKTFGLLVPAGKGSRFEKNVRNLLVDQERLALIVLPMLEAWRSLRSRAIELGRQLIVHARENQVCRILMSIPGVGAITATSFTTAIEDPDNFKTSRSVGAWLGLTTRRYQSGQVDYDGHISRRGDHHLRGLLYEAATVILTRSTADSGLRTWGLKLRERVGFKRAAVAVARKLAVIMHAMLKTGMVFDRSIGASV

SEQ ID NO: 343495 - protein, 388 aa, unidentified
MEPASIQPTAVRIDLGAIFVSLELSRSAWLITSLSPGSGEKMSKHVVAGGNVAELLERFEQLQQKARLRTGKLFPIVTIQEAGLDGFWIHRVLEAHGIESYVVDAASIATSRRRRRAKTDKIDGEALTRTLLAFKRGEPRVCAMVRAPDPSDEDRRRICRERKVLIAERVRHVNRVKGLLFTQGVSGYQPLRKDRRQRLEELQTGDGRELPKHLKAQINRELDRLELLLEQIAAVESERNSLLSMEDQPAVEATSPAAMLLSLKGVGAEFAAVLWTEALSRHFDNRRQIAAYAGLTPTPWMSGTIDHEQGVSKAGNPRLRTTMIQLSWLWLRNQPASALSRWFVDRVQSNGGRLKKAAIVALARKLLIALWKFVTAGVLIEGAVMKTA

SEQ ID NO: 343496 - protein, 347 aa, unidentified
MRFYTTQHPFYCGIDLHARTMYVCILNQAGETLLHRNMTTTPEALLKAIAPYRDQIVLAAECMFTWYWLADFCAEHGLPFVLGHALYMKAIHGGKAKNDKIDAHKIAVLLRGGMLPQAYVYPAAMRATRDLLRRRMHLARKRGELLAHVQNTNSQYNLPAIGKKIAYKANRDGVAERFADPAVQKSIEVDLALITYYDELLRDVELTIVNTAKHHDANTLYLLQTVPGIGKILSLVLLYEIHDIERFPRVQDFASYCRLVKCAKESAGKRSGTSGTKIGNAHLKWAFAEAAVFFLRDNPAGQKWLTRLEKKHSKGKALTILAHKLARAIYYMLKRQTVFDLETFLHA

SEQ ID NO: 343497 - protein, 395 aa, unidentified
MTTAHEGQGSTSGVVLHLAFELGLWGWKLAFTVGLGQAPRLRSVAARDRAAVLREIALAKKRFGLAADAPVVSCYEAGRDGFWLHRWLLSAGVASMVIDSSSIEVNRRKRRAKTDRLDAGALVRLLVRYHLGETKVCSVVHAPDDQAEDERQLHRELTALKDEQTSLVNQIKGHLCGHGLVLATVNESFPSWLAQARRWDDSPVPARMQARLGRIFMRWQLVHGQILALEMEQRKRIRGEAAPAVDQVRRLLSLRGIGRNGAWMLVKELFAWRRGFNRKQLGALVGLTPTPYTSSTSSREQGISKAGNKRLRRLLVELAWCWVRHQPRSALTVWFLCRFANGKRLRRIGIVALARKLLIALWRFLERDEVPAGADLVDWRTKMGGKRPASVLTPA

SEQ ID NO: 343498 - protein, 411 aa, unidentified
MEVIVERAAALDVHKAQVTACVRVPGEGGAREQEVVQFQTTVRGLLTLRDWLKAHRVRQVAMEATGVYWKPVWAVLEDDFELLLVNARHVKQVPGRKTDVSDAAWLCQLLEAGLLRASFVPPKPIRQLRQLTRYRKALIKERQREANRLHKALEDTGIKLDCVASDILGKSGRAMLDALVSGTTDPEVLADLARGKLRAKIPALREALEGRFEPLHALLIGAILAHLDFLDEQIDRLSDAIGEQLGPFGRAAVELLRTIDGIETRTAQAIIGEIGTDMSVFATARHLCSWAGRCPGNDQSAGKRRSGRARKGSKWLHDALKEAAMAAIRTKHSYFAAQYQRLRPRLGHGRALGAVMHSMLTTIWHMLSTGEAYHDLGGDYYRRRDPERQTRRLVSQLQALGHTVTLEKAAA

SEQ ID NO: 343499 - protein, 347 aa, unidentified
MTKLMAGMDLHSNNVMIGIVDLEGQRVVHRKVECDLAKVAAFLKPYKARLEKVAVESTYNWYWLVDGLGGLGYAMVLANPAKIQQYSGLKHGDDKGDAYHLADLLRLGILPEAYIYDKELRPVRDLLRRRMGLVQQRTSLMLSFKSLYTRTTGQAMTLSELKGMAVKKAAELYHHPANRLIAQVQKQHIEQLTESIEKLEKVILKSAKELPYYEKLKTLPGVGVILGQTITLEVGDIGRFAEAGHFASYCRTVDARHLSNGKKKAENNQKCGNKYLAWAFVEAANFARRSDEKCRRWFDRKAAKTSNVIATKALACKLAKAAWHVMAKEVSYDETRVFPELAAKKTS

SEQ ID NO: 343500 - protein, 352 aa, unidentified
MKKIITIGLDLAKSVFQIHGVDPAGSVEVRRKLRRSEVLTFFARQSPCLVGMEACGGAHYWAREIAALGHDVRLIPPVYVKPYVKRGKTDAADAEAICEAVTRPTMRFVPVKSAEQQASAMVLKARALLVRQRSQTINALRAHLGELGIVAGTGVTKVADLQTIVRDHEDARLPAAARFALKALADQIDRLTNEVEALERLLVAEVRRDNDMRRLTTIPGVGPITAAAVKALVPDIAGFTSARHFAAWMGLTPKPHSSGGKERLGSISKMGNATLRTLLIVGATSVLRHVRRKAQTGAGGPEWLIGLLARRPAKVVAVALANKMARIIFALLSKGGEYRKPEWSRGLDPVAT

SEQ ID NO: 343501 - protein, 346 aa, unidentified
MWIIGCDFHPSWQQVAWFNSESGESGEAKLENGNGEAERWYRQLPVPSLIGLEATGNAQWFVEMLQQLGHEVWVGDAAQIRASYVRKQKTDKRDAAHILRLLREGRFPRLWRPSAEQRDIRQLLIHRHKLVEIRTRVKNGLQHLAMNRGMQKKRKLWSEAGQKALRELPLQGWAGQRRQDLLVLLKSLDEQIGQLDQAAEETAQRDKMAQLLKTQPGVGPITALAFAVTIGDVTRFQRSKQVSSYVGLIPREHSSGGRQRLGGISKQGNRFLRQLLVEAAQSAVRYDESLRRPYQQRCHRKPKGVAKVAAARQLAVRLYWMLRTNTAYPEIVRIESSPRVPRVGAS

SEQ ID NO: 343502 - protein, 311 aa, unidentified
MYYIGIDVSKKDLSVFDGKDLKFINQEGLNAFKKYLKKKYPLSEIVIIFEPTGIYSQYLKEFCAENSIKAYIVNPKRSHNFARSLGIRPKTDKIDARTLYQFHKLTEAKDIKVPEIDQQAKTLSSYLVSYEFAVKQRVALSNHLESLRDKQLITLIKKELKRAQELEDKIFNDIKEYVSKNQNLKEDYQRLLTISGVGEKTAIVLLTLFKTYPGTNRAQITALVGLDPTRRESGTSVKGKVKISKNGKGIYRKVFYLPTVCATVHNQKIRIFYQRLLTNHKVKKLAIIASMRKILLIAHAMYRDKTEYVAA

SEQ ID NO: 343503 - protein, 424 aa, unidentified
MKVTYQTCCGIDVHKSFLVATIVKTTGGIEPSYQKKRFSTFNNSILEFKQWFLDNDCHDVCMESTGKYWVPVFNLLEDEINVVIANPKWVKAVKGNKDDTKDSKWIGDLFRLGLVKGSYIPCKIVRILREYTRYRYKLVSCRSSEKSRYQNALTVCNVALDSVVSDIFWKSSMSIIDYLLEQSGTSINHEEIASKLLRSLKSKEDAVIESVEGYQMTDAQKYRVRLVRTHMDYITAEINDVDKMIENMISSNPDFENAVQFLCTIPGVKRDSAITIISEIGTDMSQFSSSKRLCCWAGLTPGSNESAGKKKSVRITRAGVYLKPALVQCAHAAVKSDKSPYYKKKYESLVKRRGKKRAIIAIARMILTAIYQMLSTGEQWNPSDLYKIDMPVALVEKQKAKAIKQAKKLLQREGILPPDEPLAS

SEQ ID NO: 343504 - protein, 408 aa, unidentified
MEVIYPRCAGLDVHKDTVVADARIVSGSEIKHNVETFATTTSGLLALEQWLSAHNVTHVAMEATGVYWKPVWHVLEGSFELVLANARHIRNVPGRKTDVNDAMWIADLLAHGLIRGSFVPPEPIQRLRDLTRTRKQLVREIAQHTQRIQKTLEDANVKITGLITDLLGVSGRAIIAALIAGETDPERLAALAKGRLKIKRPALIEALRGRVNEHHRFLLKLHLGQIEALEKAREELEQHMGKSLEPMRAKAELLSTMPGVSDTVAQVILAEIGTDMSRFPTAGHLVSWAGLCPRNDESAGKRRSTRVRPGAPWLKTTLVQAAWAAARTKNSYLRAQFLRLKSRRGPRKAILAVAASMLTAAYHMLRDEVAYNDLGADHFHRRDQTKLVNRLIRRAADLGFHVEIRPAA

SEQ ID NO: 343505 - protein, 343 aa, unidentified
MDHFAGLDVSVKDTSICIVDDTGRITREVKVASEPGALLAVLMNASHRFKRIGLEAGPLSQWLFSALAEAGLPVICVETRHMRAVLKAQINKTDRNDARGIAQMMRVGLYRPVHVKTLRSQKLRMLLTHRKLLQSKAIAVENDLRATLRNFGLKVGMVGTARFEARIRELVENVADLVVLVEPLLVVRRVVREQIGILHRRLLAIVRDDEVCRRLMTVPGVGPVVALTYRATVDVPARFRKSKSVGAVFGLTCSRDQSGERDRPGAISRCGDEMMRAMLYEAAQAMLLRSAKWSWLKAWAMQIARRRGMKRAIVALARRLAVIMHRIWVDGTEFRWTREAAAA

SEQ ID NO: 343506 - protein, 331 aa, unidentified
MKIKETVGIDVGKMKNEVRIHTNQKYKNFDNTVTGITSMIKWTLASSNYAKEQILFAFEHTGIYSQQLSVYLTENGFNYIMLPGLEIRRSMGITRGKDDKIDAKKIALYAYRRKDELKPYELPSKNIKEIKSLLNLREKLVKQRSGYKVTLCEYKRFLKRKENTTLFSVHEKMINELTKQINKIENNLMDIVDNDENLKKLYKLLTSIKGIGQKTALFMIAYTGGFTRFETWRKFASYCGIAPFPNTSGISIRGKTKVNNLANKKIKSLLDLCAKSSIQWNSEMKLYYERRIADGKSKMGTINIVRNKLLSRMFAVVRRGTPYVDTLAYCA

SEQ ID NO: 343507 - protein, 340 aa, unidentified
MDIRTLGIDLAKNVFQVHGVDGKGRTVVQHQFRRRQLLPFVAQLRPCLVAMEACGSAHYWAREIAQRGHQVRLMSPRFVQPYVKSNKNDARDAEAICEAVGRPSMRFVAVKSQVQQDMLALHRVRSLLVRERTALMNQMRGLLAEYGIVITQGAVPLRRALVQILEPQNHGVSELLRELLGEMSERLHFIEDRLKGYDLRIAEFARADERAGRLMAVEGVGPLTATALIAAVGNARQFRSGRELSAWLGLVPRQHSSGGRGVLLGISKRGDRYLRTLLIHGARATLRFAARKRDPRSRWISAMRERRGTNIAAVALANKNARVLWALLAHNQDYRALAAA

SEQ ID NO: 343508 - protein, 315 aa, unidentified
MTQTNITTAGIDTSKLKLDIAIHGRAERWQVANALPGWRALAANLAKAGVTRVGIEATGGYERGVVEHLRAAGLTVLVLQPMQVKAFGRVHLRRAKNDTLDAVLIAACAATLDQPRIAPDPRLTELAGYLTFLEQAEEDIARFKTRLEHIDEPQLRRLVTSDIKRLKARKAAQLRDIAKRLRVHDDLARRLDLVLSIPGIGERTALALIIRMPELGRISREEAAALAGLAPFDDDSGKYKGQRHIAGGRGRLRRSLFAAALPAAFRWNKALIDLYARLIAKGKVHNAALIACARKLLIYANTVVQRGTPWTEKAA

SEQ ID NO: 343509 - protein, 346 aa, unidentified
MTIVEVDRAIVGGVDTHLDNHVAAALDPLGALLGTESFATTPAGYKLLLSWLGQFGTVTKVGVEGTGAYGAGLARFLRKEGIDVVEVDRPNRMARRLHGKSDPLDAVEAARAALSGRAGGQAKTRDGAVEAIRVLHVAKRSATRARAKALTQMRHLTYTAPDQLRCSMKGLPGNKLVTEARRLRPRSSSDPVTSATKASLSSLAHRIDSLDREIVELEALLAPLVEATAPELLALLGVGIDTAAALLVAAGDNAQRLHSESAWAHLCGVAPIQASSGKVTRHRLDRGGDRQANNALWRIVIVRLAHDPDTRAYMERRLKEGRSKREVIRILKRYVAREVYHYLPRG

SEQ ID NO: 343510 - protein, 387 aa, unidentified
MAQVNDLSRSLTAFDPISTLVVVVEMSKASWLVSGVVPGVERQPLKKLEPDATALLRLIERWRNEAVRAGHPISRIALAYEAGRDGFWLARWLIARGIDAHVIHSASVAVSRERKRAKTDRLDAAMLMRVFLGWLRGERGHCGMVAIPTMEEEDARRPSRERESLVDERSRITNRMKSALARLGIRGFKAHLRKAPERLAGLRTAEGTGLPANIIEEFRRDMARLALVREQISSIEKTRAERLERAPDTGPHAMVRLLARVIGIGIETADMLVQEILSRKLRDRRAVARYAGLTGSPDESGLKRREKGLAKAGNARVRRGLIQLAWRFLMFQKNSALAQWYRTRTEGPSGARKTTMIVALARKLLIALWRLVTTGEVPDGVELRPAA

SEQ ID NO: 343511 - protein, 339 aa, unidentified
MNLYCGVDLHSTNSVVAVINAEGKRVLRRRTPNDLQTISALLKPMRSTLRGVVVESTFNWYWLVDGLMDAGFKVHLANPAAIKQYEGLKFTDDNSDATWLAEMLRLGILPEGYIYPKQDRPTRDLLRKRSHLVRQRTANILSIQNLVARNLGHGVKGDVIKKWDEQDIDVLFPDPNLALAVNGSHAVVRCLDEKITELEKRVLAQVRLNPEYKVLLTTSGIGRVLGLTIMLETGDIRRFPKVGNYSSYCRCVDSKRISNGKKKGKGNAKSGNKYLAWAYVEAATFAVRHNPIIRRFHQRKVAQTKLNVVATKAVAHKLARACYHMMKKQVPFDVERAFA

SEQ ID NO: 343512 - protein, 347 aa, unidentified
MTEAYDGRQVVGIDLHRRRSVIVRMTEDGRTLDTVRITNSPAALRREIARAGKNPRVVIEATYGWYWAADVLEELGAEVHLAHPLGVKAFTYRRVKNDERDAADLADLLRMGRLPEAWIAPPEIRELRELTRYRHKLVGLRTSCRDQVHAVLAKLGIPVTCTDIFGTWGNTWLDGLDLPQPYAGKVASLRQLNAGLSTEIVLLEQVIGDLLAGHEGYRAIQVLPGIGPVLGAVIVAEIGDIRRFPGPGQLCSWAGLTPRHRESDTKVSRGHVTKQGSRMLRWAVCEAIQRQPAGTRPRQVKDGIIARRGTQAKNTAKVAAARELLTLVFYSMRDGRIRRADRPGQAA

SEQ ID NO: 343513 - protein, 390 aa, unidentified
MLIMIYYIGIDISKYKHDFCIISNTGEVIVRNSSFENNKKGFQSLLDQLKPYNKSDVHIAFEATGHYSMNLELFLIDQGYSFIKMNPLVIHQFLKAQSLRRTKTDKADSLTIANYLMSVPYKPNSDILYNIFTLKSLCRSREQLIKERSKYQVLLTNQLDLTFPELKSFLDNRISTTLLFILEKYTNTEHISLMRDYDSIRCISHGKFSYSKFAKLKELAKNSVGHHDENTDLLISTYVSIIKTFNDKIDPIEKQISTIIKELNPRMLTIPGLGEISAATILSEYGDISNFSSPNKMLAFAGLEPSIIQSGTIENNGKMVKHGSGHLRYSIMNTAMIILRYSPTFYDYYLKKRSEGKCHRVALSHVCKKLIRVIYTLEKNNIDFDPSLLR

SEQ ID NO: 343514 - protein, 432 aa, unidentified
MAETSELEWAAFAAIDWADQKHFWILVPTGSRQQETGELENTPEAVDAWAANLATRFDGRPVAVCLEQSRGSLVYMLTKHAHLVLFPVHPTTSARYRETFYPSGAKSDPSDTALLLELLVHHRDRLRPLRPDTTETRLLRLLVEHRRRMVDEKTRHSNRLTACLKLYFPQILRWFDDVDAPLVCALLERWPSLEQLRRANPSVLRKFFHEHNCRSEDLIQERIQAVYAATPATRDAAILEAESLTASQLVVILEGLRRNVAELDRRIAQVYGKHEEAFLYASLPGAGPALEPRLLVAMGTDRDRYQAAAALQCYSGIAPVTERSGHGQWVHFRWPCPKYLRQALHEDASHSIGYSEWARAYYDRQREAGKSHHAAVRSLAFKWIRVIFRCWKDHKPYDEQAYLRTLQRRASPLTGRKWESAAGFQKLSANPS

SEQ ID NO: 343515 - protein, 354 aa, unidentified
MAQSRTLYSGLDVQKASIAVAYAAKDSGADVVYLGSLGTRQCDIDQRVRPLQSKAKRLVFVYEAGPCGSWLSRSLTKKGDDCWVVAPALIPKKAGDRVKTDRRDALQLARLMRSGDLPPVSVPKVEDAAMRDLCRAREDGLRALKAAKLRLQAFLLRHAIRSTGQATWNPAPLRWLSEVVCPTPAQPIVFHEYVRAVNAQTERLQRLEPALQAQGKSWRLTPVVEALQALRGVQCTGAVTTVAALGDLTRLENPRQLMGYVGLTPAESSRGERRRQGASTKAGNTPARRALVEGAWASRYPAQVSRHLPLRLANPPKALPDISWKAPVRLCKRYRRLLARGKHANQVVVAIARA

SEQ ID NO: 343516 - protein, 365 aa, unidentified
MEAYVGLDVHSKSSVFVMQSTAGRVRARGEVLTTPEGFARLRDEYRVPARTCVALETGTMAFYVARQLQALDLVPVVIDAREVRLKAHRPGQKSDRRDAFELCDGLRRDIYRAIVHVPPLAISELRETLSRRRHFVRLQGAQRSAVKRLLRAAGLARLVRTLSTDAAWTQLFDALPSDPLLRSYIEDHHTVWRCARAQVVRLERLLAEHQKPLRSMIARLETVPGVGPIVALTALAAFSDIQRFPSAKHAASYVGLVPTTHQSGDYDHHGHITKHGSTEFRAMLCEAAHQARRPNNPFNPYFTRLCARRGYQRAVIALAHRLCRVMFAMLRDDVDFNIDKLGVEEGPFRRVVTRRYRLKPFAHAL

SEQ ID NO: 343517 - protein, 349 aa, unidentified
MRFYNRQHRFYCGIDLHARLLAVCILDQAGNIVVRTQLPAEKQLLLDTLAPFRPDVVVAVECLFAWYWVADLCQAEGIPFVLGHALYMKYIHGGKAKNDDIDAEKIGRLLKGGNIPVAYVYPKGLRETRDLLRRRMYLVHKRAELITHIQIVNAQYNLPAFEKKLIYAKNRAELKVAERFDHPHLRKSIEVDLALVDVLDERIAEVELYLERTVKVEDPQNYHLLKTIGGVGKILGLTLLYEIHQIGRFPDVGEFLSYARLVRCAHESAGKKLGSGGKKIGNAHLKWAFSEAVCLLVRNYPAVKGWQARKEKKHGKKKTLGILAAKLGRAVYHMLRKKEAFDVRRFLGQ

SEQ ID NO: 343518 - protein, 347 aa, unidentified
MLIIGCDFHSRFQQIALLDTETGVVEERRLDHESGEAQRFYAGLKAPALVGMESMGYTQWFEELLAECGHELVVGDAAKIRAKESRKQKHDRRDAEHLLNLLVKGDFPRLWLPSATERDARVWLEHRHHLVQMRTRTLNGLQAMALNHGLCLRQKLWTKHGQAELQKLPLREGRARRRADLLALRAQLDGWIAELDQRIEREVAQRPDAQRLLTHPGVGPLTALGTVLILGPVARFPDAQHVTSYVGLIPQEASSGGRQRFGHLTKQGNGLLRFLLVEAAQTASRFDPGLRRAYRRLTFRKGRATAKVAVARKLAIRLYIMLRDQIDYAEFCRRGSPAGMLGEVALA

SEQ ID NO: 343519 - protein, 316 aa, unidentified
MPVEKNNQLIWVGVDVSKDFIDVYRDDIAKHERVTMQNIHPWVDVLAADFAGKNFVVAMESTGVYSKKLMLILQGKGIKVALLNAKKVRDFAKSQGHLAKTDKIDSKVIVDFVKVSAPRISEIKAENLDHLKSLFKRRNNLMKLIKIQKNEQHTTLESPIKKMIADTIKYLGKQLQELEKLIDDVYVQSPELKEKYEIITSIPGAGKVLATAILAEMPELGKVNRQQIAALAGVAPFNNDSGKKFGSRMIKGGRKSFRNILYMATVSAIKCNRVINAHYQKLKAAGKPVKLAITACMRKLLLIINSMLANSCKWAY

SEQ ID NO: 343520 - protein, 366 aa, unidentified
MLYLGIDQHKNQITVNVRGEDGSVVLKRQVSTRWEKVRAFFAGLAEKAGPEGGFLAILEVCGMNPWLLAMLQEYGCRETVVIQPTERPKQKTDRRDAGDLSHTLWVHRQQFLQGKHPHGLRRVQPPTAQEADDRQLTTLRASLTRKRTAVLNAIHKILRKHNLEQECPTKKFQTKKVGQWLTEIILPAMDRLELNLQLQQWDLLDTHLKIVEAKIAERAENNEAAELIESVPGIGHYSAVAIASRIGDIDRFQRPSSLANYFGLTPGCRNSGEATQRLGSITKRGSRIVRHLLNQAVIRLLRQDPATRAWFKGIKRRRGSKIARVAVMRRLATILWHVLKRKQKYRYEPLQQQKHEEFAAFEGSAA

SEQ ID NO: 343521 - protein, 338 aa, unidentified
MTIETLGIDIAKNVFQLHGVNRNGRVLLKRRVMRDRLLAVLAQIGPCTVVIEACTGAFYWARKFEAVGHQVKIISPQYVKPFVRRQKNDGNDAEAICIAARQPHIPFVPKKTVAQQDIQALHRARQRMVNHRTAVVSQIRGLLLDRGFAIAKSITRARRAIPEILADLKNELTAMAREALSELYDLFRDLDRRIGSFDKKIERIFRQSEPCQRIAKIKGVGPKTATAVVAAIGDGSEFKNGRHFAAWVGLVPRQHSSGDRKVLMGISKRGNQHLRSLLVHGARAVVRTAPSKTDPNNEWVNQLRERRGFNRATVAIANKNARIIWAVLRTGEPYRAAF

SEQ ID NO: 343522 - protein, 428 aa, unidentified
MIDHLHSTVAANLVAVDVAKDWNVVLIQEASGRRRSFRFANRFADHNEFVQYLHSLSGTVCIGLEPTGDFHRTIAYRLLAEGFQVVSISSLALSRFREARFGNWDKNDPKDAQVMLAMMAQGFVQVYWDPLFSGAHDWQELSNTYFQLTLARTRLQHSLLSHHLPLYFPEFTRYWLSTRSEWFIRFLIRFPTPAAIRALDRAAFIAEAWELVGRKVSKRAKLEEMYTVAGESIGLPVALDSPAIETFRLQLGRYLEINRQRTELDDRAQELLASNADFQRLKTLPGVGAITALTILAEAGDLRRFHHHRQFLKYCGLDLAKSQSGQSKGHEVLSKRGNKRLRLAFWMAGLVAIHQRENAFRDKYERYLSATPFDADRKRKALTAVAAKMARVAYAVVKHDSDYQCFFEHRLPSGSIPLARAVEAISTS

SEQ ID NO: 343523 - protein, 351 aa, unidentified
MIVIGTDAHKRSHTSAAVGATTGELQGSETVKATTAGGEQLLAWARTLDAQRVWAIEDCRMVSAKLERFLLARGERVVRVAPKLMAGRRRAAREAGKSDPIDALAVARAALEEGVESLPSAVLEGPARAIKLLLDHRDDLVGERTRMASRLRWLMHDRWPEFEPPRHALCRLAGLERLAGRLARAPQDPDVRVMRSQVRRMRELTREVDALERELATLVETQAPRLLALPGVGTLTAAKLVAEVAGISRFASSAKLARMAGVAPIPASSGARHRQRLDRGGNRQLNAALHRIAVTQRRYHPPAQSYVERKLSEGKSKREALRCLKRQLVRSVYSTMVADLGGVSADAVVLT

SEQ ID NO: 343524 - protein, 400 aa, unidentified
MNDSDEIGVFLGLDVGKSAHHGHGLTPAGKKVFDKQLPNTEPKLREVFTKLKTKFGTVLVIVDQPASIGALPLTVARDAGCKVAYLPGLAMRRIADLYPGEAKTDAKDAAVIADAARTMPHTLRSLELTDEITAELTVLVGFDQDLAAEATRTSNRIRGLLTQFHPSLERVLGPRLDHPAVTWLLERHGSPAALRKAGRRKLVEVIRPKAPRMANRLIDDIFEALDEQTVVVPGTGTLDIVIPSLARSLGAVHEQRRATETQITALLEDHPLSKVLTSLPGVGVRTAATLLVTVGDGTSFPTAAHLASYAGLAPTTKSSGTSIHGEHAPRGGNRQLKRAMFLSAFAALHDPASRTYYDKCRARGKTHTQALLRLARQRINVLFAMLRDGTFYEPRTPRLA

SEQ ID NO: 343525 - protein, 420 aa, unidentified
MKVVYQTCCGVDVHKSFLVATIIKTTSGVEPSYQKKRFSTFNNSILQFKNWLIENQCRDVCMESTGKYWVPVFNLLEDDINVTIANPKWVKAVKGNKDDTKDSKWIGDLFRLGLVPGSYIPCKPIRILREFTRYRYKLTSCRTSEKNRYQNALTVCNVALDSVVSDIFGKSATSVIDYLIERSDNSINHEEIASRLLRSLKKKSDSVIESIEGYQMTDSQKYRMRLVRAHLDYITSTINDIDTMLDSLIAPYENAVQLLCTIPGVDRNSAITVISEIGTGMTPFSNSKRLCCWAGLTPGNNESAGKKKSVRITRAGVYLKPALVQVAHAAVKSDKSPYYKQKYERIMKRRGKKRAIIAIARMILTAIYQMLSTGEAWNPTDLYKIDIPEPLKEKQKEKAIKQAKKLLIREGILSESQLAS

SEQ ID NO: 343526 - protein, 422 aa, unidentified
MINSNNTYPIHPRMTRTYAGVDSHKDSHTIVFLDCFHGKLGEITIGSAPSEFSKFLKRVKKYLQPNTTFAFGFEDTSAYGRSFVKFLVERGYTVKHVEASKVATERGQTLHKNDSYDAECACRVLINQFDKLPDANPQDKYWILTNLVARRNAIVKINVMVKNSLHGALADSYPHYKKFFSTVTRGSALAFYNAYPSPHHLEDVSLSELTEFIKTASKGILGATKAELILHHVHRDNVQKSEYQDSQDFAVRSLVRQVKNNLVELQAIDEEIEKMLQEFNYPLTSIKGIDNLNCAKLIAEIGDISRFKNAKALAKYSGVAPVTYASGMTNLQRANARGNRKLNEIFFKIALVSITPIGKNKVLVNPIFYDYYMKKISEGKTKNQAIKAVQRRLVNIVFNVMKHERPYNNPERGYAPETKAVA

SEQ ID NO: 343527 - protein, 308 aa, unidentified
MDHFAGLDVSVKETSVCIVDATGKIVREVRVASEPEALLAVLASPAYHFKRIGLEAGPLSQWLFSALAEENLPVICVETRHMRAVLKAQVNKTDRNDARGIAQMMRVGLYRPVHVKTLRSQKLRMLLTHRKLLQSKAIAVDNDLRGTLRNFGLKVGMVGAARFEARIKELIENFPDLAVLVEPLLVVRRVLREQLGILHGRLLAVVRDDDVCRRLMTVPGVGPVVALTYRATIDVPARFRKSKSVGAVFGLTSAKYQSGEIDRSGAISRCVDELMRTMLTKRPRACCSVRQDGPGSRPGRCRSPGTAA

SEQ ID NO: 343528 - protein, 348 aa, unidentified
MNTTHYIGLDVHKKSVSYCTKLADGTIVAEGKVAARREDLRQWAKQLPQPWEGAMEATLFSGWIYDTLKPYATKLEMAHPRMLEAITAAKKKSDGIDASKLSDLLRVNLLPSCYVATPQIRELRRMLRYRNLVVSEAVRMKNRISGLLMETGVEYNQQRLHGKGYFAELMKNLVEVPESVQQLLRLSRAALEMFEVTQLGLLKALRTNALLAQRVQRLASIPGVGEVTALTWALEIADPSRFPSIGQAQSYCGLTAALNSSADKQKRGPLSKQRNPHLQTVLIEAAKLAPRWNAALEVVHEKELACGNPNRATLEVARKLVAYLLAVDRSGRPFQMPTVATTASAAQG

SEQ ID NO: 343529 - protein, 519 aa, unidentified
MARRKHRSAPATTHTSNAPSAPGPRNRAATPLQPPAAADHYHDSLPVRHRHAAGIDVGSRSHWVAALGKEGTIEVAEFDTYTDGLLALVDWLRQRQVTTVALEATGIYGDPLFDLLQAEGFEVIQVNPAYAAQFKGRPKTDKRDCQWIQRLHAHGLLPASFRPAPDIAVLRSYLRQRADLVRAGARHIHHLQKALELMNVKLTEVVCEVTGLTGLKIIRAILAGQRDPQALARLRDKHCKNPTDTFARALHGSWREEHLLALRQALASWEHYQAQQRDLEEVIARHLQRMKKTTALPPLAPKPRQRGRGANEPRFDVRAALYYVTGVDLTELDGIAEVTALVVVSEIGLDMSRFPSVKHFCAWLGLCPKVKKTGGRVVSSRTRPGKGRAAGLALGGAGVVAQPDAVGGVPATPEGASGGARGDHGDGAQAGAAAVPDPAQRAVAGQGDRGGLCGAAAPAGSSGSAEEGEAVGAASSRARGSGGAAGLRADARDSRPQVARRGRETVREVEPERDWRREQ

SEQ ID NO: 343530 - protein, 371 aa, unidentified
MTKHSEVFVALDTSKLRNAVAIAEAGRAGEVRFLGEIENTAAATTKLVRKLEAKYERITFCYEAGPTGYELQRHIHGLGHECIVAAPSLIPKKPGDRVKTNRRDAVSLVKLSRAGELTAVWVPDRRHEAMRDLTRAREAAVIDLRAKRQRISALLLRQGRPYPADKKTWTKVHMNWLASQRFLGVVFAEMMFATRQAQERVERLEQAIRAAVPEWSLAEMVTAFMAFRGIDLVSATCLLAELGDLTRFPTAPEVMGYVGLGCSEGSTGDKIKRGGITKSGNRRARRMLVECAWSYQHPPRVSIAKQANVAAAPAKVREIAWKAQCRLNRRYRVLLRRGKLKTVAITAVARELAGFLWAAARELSSPERVAK

SEQ ID NO: 343531 - protein, 319 aa, unidentified
MTTSAVVVGVDVAKDRLDVAMRPSGETWSEANDEAGITALVARLRPLGPALIVCEATGGFERAAIAALAAAGLPVVVANPRQVRDFARATGQLAKTDQLDAGILALFAERVRPTPRPLPDAAAQLLDAVLTRRRQLLEMLVAEKNRLGFAPKPLHRGIQAHVRWLERQLDDVTKELAGLIEASPVWRAKDDLLQSVPGVGPIVSSTLLGELPELGTLSHKQIAALVGVAPLARDSGTLRGKRLVWGGRASVRTALFMAAMCGRRWNPALKRFYDRLKAAGKPTKVALIACARKLLTILNAMVRDNKRWAVPAPSVQYSC

SEQ ID NO: 343532 - protein, 426 aa, unidentified
MKYNQNEKLKQMDLSTMVVGVDVGSELHYARAFDYRGFELSGIFKISNDAAGFEAFQKWTHELMKKHSKTHTIVGMEPTGHYWFNFGYALKEEGTKVVLVNPMHVKRSKEFDDNSPTKNDRKDPKTIAMLVKDGRYLEPYMPEGVYRELRIAMEIRERYVKQITIIDNKVQRWLSIYFPEFKTVFKDWTGKGAIIALKNFATPEKVKAKGIESIAAMWKAEIKRAVGTKHAVKLVRAAEVSVGVKEGIKSAEYDLLSLIEEYEFAIMKLEATMTLIEELLFQIPNVAELLAIKGIGIVTVAGFIAEVGDIGRFEHPKQIQKLAGLNLKENSSGKQKGKTTLSKRGRKRLRKLLFQAVMILVAKNAEFRQLHMYYTNRIENPLKKKQSLMAISCKVIRVFYTILTKGLAYDGEKMIKDIKRPKQKAA

SEQ ID NO: 343533 - protein, 309 aa, unidentified
MSEFIGIDVSKATLDVAAHASGVRLQAQNEEQGLKELGARLLELTPELVVMEASGGYERLCAATLAQAGLPVAVVNARQVRAFAVATGVLAKTDAVDARVLAHFAAAVRPAVRALPDEQRAALDEIMGRRRQLVGMLVMEKNRLAQARNPGVRRDIKSLIAVLEKRIGGCDGELQRQIQASAVWRAQEDLLRSFNGIGPVNARVLLVELPELGALDRKQIAALVGLAPIARDSGQHRGRRSIAGGRGQVRASLYMATVAAIRANAVIRAFYQRLREAGKPAKVAIVACMRKILTILNAMMRTQTRWQET

SEQ ID NO: 343534 - protein, 341 aa, unidentified
MSNASTYIGVDLHKKTCFITIMNQAGKIKKQTEISTDTDRVAKFFSQHREAQVAVESTMNWIPFYENLESLGCSVVLSNPLQTKAIAAARIKNDKVDSKVLADLLRTNLLPTAYIQSREIRDLKELVRQRVNYVEWRTRLKNKIHSVLFKNNLKHDFTNLYGKAGRKWLKQLKVRDIYRQELDRYLKTLDLLDAQIEEMSEEIMATAKADYDCKLLMTIPGISYFTALTIKSEIGDISRFPTARKLCAYAGLIPSTYASADKIRFGRITKRGSKWLRKSLIDAVTSGSKHPSRLCYFYRRLKKNKGTGKAKVATARKLATIIFALLTDKQPFRDFTPVKQR

SEQ ID NO: 343535 - protein, 351 aa, unidentified
MPMLADTVELVIGVDTHKDTHTAAVVAAATGALVEQVTVPATPAGYQQLRRLADRQDGRRVWAIEGTGGYGAGLTRFLQANAEQVVELDRPKRAARRHGAKSDPLDATRAAREALGRDQLAQPRAAGHRAALSVRLAARRSAVQAATDAQRQLHALVVAAPDPLRERLRSLTTARLVATCGRLRQQAAWDVETAATATSLRALARRIQLLNAEIVEHTRAISALVRAWRPELLTRCGVGPIVAAIVLCAWSHPGRCGSDAAFAMLGGAAPIPASSGQTVRVRLNRSGDRQLNQALHLIVLTRLRYDPATRAYAQRRRAQGKTNREIRRCLVRYVARQLYRLLEANPGFDPT

SEQ ID NO: 343536 - protein, 307 aa, unidentified
MFVGIDVAKDRLDVHVRPSGEAFTVERDGEGVEELAKRLNAVMPSLVVLEATGGFETIVAAGLAAAGLPVAVVNPRQIRDFARATARLAKTDTLDAAVIAHFAEAVNPPPRPLADPQQRLLGELMARRRQLIEMMVAEGNRRRLLTVRRTLKSVDRVLATLKAQLKDIDHDIDIAVRGTPAWREAEDLLISVPGIGPKIARTLLAEMPELGRLDRRQIASLTGVAPFNRDSGTLRGRRAIAGGRTVVRSALFMSVLVSIRRKLPLAETYHRLRAAGKPAKVAIVACMRKLVTILNAILRDKKPWATA

SEQ ID NO: 343537 - protein, 431 aa, unidentified
MNAIQNSQSGKLRDNTLDHDPTQYAALVGIDWGDKEHAFYLKTDDGTLESGSLQHSSEILFQWFSNLQERFGSRPVAFAIEAQSPPLMAAIRQFSWAVVFQIHPVTSKRMRTAFTPSGAKDDLPDAKVLLDLLISHRDKLRPLPEPASPKTRILDGICRERRELVDQRTKWCLQTRAALKAYFPQAFELLSSELFRPVVSKFLTRWPDLFSLKTEKPSTIKRFYTSNGYRNLALIDQRLEIIKSSVAIEIDPSRISEYTRKVKHLLERIELANRQIKELDSQMNSVFKEHENWQFFKELPGAGPSLAPRLLCAINMAPENNAQGMQKYFGTAPVKEQSGSRLWTHRRWNAPKFFHQTWVEWAGLSVQHSRWAKEFYEQAKARGKGRYTALRALAFKWMRVIARCLETKTDYNEELYIQGLKKRRSPIAQHL

SEQ ID NO: 343538 - protein, 327 aa, unidentified
MAKRTTICAGIDTGKRKLDVALDGSSEQLQIDNTLEGYKVLLDWLRCHRVKRIGIEASGGYEQAVVAELRRKRVVVVVFQPAQVRAYAKFHLQRAKNDKIDAALIAACTAAVKKIHPPPDARLLPFAEHLTMIDQIGEDIALLKNRLETCRNPRIQQIWKEDLVRLAKRERTEFKALVAAIREHRDLAERLDLIYSVSGAGLPTAVAILVRMPEIGQLTREQAAALAGLAPYDDDSGKHVGVRHIDGGRERLRRALYTAALPASFRWNPQLITLYKRLIAAGKGHKRALIACARKLLIFVNAVVARGIPWDQERPPTVAATALPQTG

SEQ ID NO: 343539 - protein, 349 aa, unidentified
MIWIGVDAHKRIHEAVAISESGVIGTRTIPNTPPAWASLLAWARQWPERIWAVEGAWYLGRGLAQHLAEQGERVHEVNGRWTAARRRGMRRPGKSDRLDAHSVAQLLREEADTLPRVYAEEDEQASVQLWSRVQAELTKDMTRLVNRLHDLLLTCDPEYAAKLPKLTTKQGIARALAYTAPGQGALARERERVIRATAQQLALLDEQDRELRHKLERASTARFSPLRQIEGIGALIACGLIAELGGPRPGFGEEQLASLGGLSPLEASSAGGVRHRLNRLGNRRVNMFFHQIVLTQARIYPPAQAYLARRRAEGRTAREARRALKRLLVRRVFRAWTACFEQPAEAVAA

SEQ ID NO: 343540 - protein, 355 aa, unidentified
MKYYVGIDEHSNNVIIGIIDENGKIVFKIKLPNDIVLIIETLKAFKKAITGVVVESTFNWYWLVDALIEAGYKVHLANPAAIKQYEGLKHTNDYDDAFHLANLLRLKILPEGYIYPREQRSIRDLLRKRSMLVRQRTANILSYQNIYNRNTGQKIKSSEIKDMAKNSIETAFQLEHINLSGEATLSIINTFTEKIQAIEKKILQSMKLQSEFKKLLTIPGIGEILALTIALETGDIKRFEQVGNYASYCRCVQSIRYSNGKKKGENNRKNGNKHLGWAFVEGANYAKRFYPEVKRFYQKKAAATNKIVAIKATAHKLARAAFFVMRDKVDFSMDRAFGLTKIKVVAVNRSGIVGH

SEQ ID NO: 343541 - protein, 359 aa, unidentified
MDRQEETVRRIIGGVDTHKDLHVAAVVDEQDRVLGTQSFASTRQGYRQMLVWMRSFGNVERVGVESTGSYGAGLLRFLQQAGIVVLEVTTPDRQDRRRRGKNDDFDAQNAAHAAFAGIRTVTPKSRDGMIEALRVLSACRKTAVAARRIALQMIQNTIVCAPESLREVLRHMTRMQLVRTLAAWRPDLTAYRDVEAAYRISLKSLARRYLELHDEIADLDAMIAAIVDELAPNLVARNSIGHVGAAQLLLTAGDNPQRLRSEAGFAALCGVSPVPASSGKTARHRLNRGGDRAANSALHIIAIGRLRTEARTQTYVAKRIGEGHSKMEAIRCLKRYIAREVFTLIKQRQEEINRTRIAA

SEQ ID NO: 343542 - protein, 376 aa, unidentified
MEHNSEAFIGIDTSKLKNAIAIAESGRDGEVRYLGEIETTDAATRKLVAKLATKYRKVTFCYEAGPTGYGLYRLITSLGHECSVVAPSLVPKKPGDHVKTNRRDAVGLAKNLRAGELTAVWVPDARHEAMRDLSRARGAAVDDLKSKRQQISSLLLRLGLHYPGEKTWGKSHRNWLASLKLDQREQRIVLEELFGAERQAQERVDRLASAIIDAVPEWSLAKIVTALMAVRGIDLVAAVTIMAELGDLSRFASPRELMAFLGLVPSESSTGDSVKRGGITKAGNRRARRILVESAWSYRYPPRISRDKLAKVAAAPEPVRAIAWKAQTRLSSRFRALIKRGKRPTIVATAIARELCGFIWAIHRAVTAPGGRQLVS

SEQ ID NO: 343543 - protein, 349 aa, unidentified
MQYIGVDQHKKFSYIVVMDEKGRIVKEGKVVNDREELKEFLRGCREGRAKAVIEAGPNWSVMYDWLEEEIDGVKLAHPLKVKAIADAKIKTDKIDARILAHLLRADLIPEAYVPKIETRKVKNILRQRMFFIRIQTMVKNRIQAILDRHPEVRSEFLGTDLFGKQGIEYLMHIEIPEPDKSLISESIKFLKIIREYIKKTDGLVDRLSKGDRRVDIIRTAPGMGKFFSVLVAYEIDDINRFPSVKKISSYAGLVPSTYASGNKMFHGGITKNGNKFLRWALIEAVWPAIRKDSSLRYYYQKIKERKGANAAKVAVARRLLTIIYYMLKENRGYRINYPAAPYVSVVKAR

SEQ ID NO: 343544 - protein, 356 aa, unidentified
METAYDGRQVVGMDLHRRRSVLVRMTGDGRRLGTAKITNSPAELRRAIARAGKHPRVVLEATYGWYWAADVLAAAGAEVHLAHPLGVKAFTYRRVKDDVRDSADLADLLRMGRLPEAWIAPHEVRELRELTRYRIKLVRLRTSCKDQVHGVLAKLGVPVTCSDIFGVAGSAWLDGLRLPQPYAGKVTSLRHLAGELTTEITMLSEVIASLLAGDRGYQVIQQLPGIGPVLAAVIIAEIGEVTRFRNAGQLCSWAGLTPRHRESDTKVARGHVTKQGSRLLRWALIEAIQRIPRDSVIGAVKDGIIGRRGKEAKNIAKVAAARRLLTLVYYGMRDGQIRCLSRPPAGPPVTETARAA

SEQ ID NO: 343545 - protein, 343 aa, unidentified
MKLSYVGVDLAKNVFQLHGIDRHGQAVWRRRLRRGQWLRVLLETAEPGCIIGMEACSSAHHWARQLQAKGYDVRLVAPQFVKPFVKSNKNDRNDAEAICEAITRPHMRFVPVKTVEQQDIQAIHRVRSTLMSQRNAKANQIRGLVAEYGIVAPQEMLALRRAVPAWLEEAENGLSTCFRALLHDVWRDLQHLQERLAELDRQIERIAKDNPVTRRLQQLRGVGPMVATALVASVGDGSHFRKGRQMAAAIGLTPRQHSSGDKRRLLGISKRGDAYLRTLLIHGARAVVSQAKRRDDPLSLWVTGIAERSHTNVAAVALANKTVRIAWSMLRNASDYNPALAVA

SEQ ID NO: 343546 - protein, 341 aa, unidentified
MDTVSLVGIDLGKHCFHLHAQDGSGRMVFRKKLTRSQMFALLGNFPSCTVVMEACAGAHWIARRLQALGHEAKLISPHFVKPFRQGNKNDFADAQAICEAASRPSMRFVSPRNEAQQVVSALHRVREALVRERTGTINQIHAFLLEFGISLPRGMAVIRRLPAVLEAQALPPRLVAVLERLQAHFKYLDEQIGQVEHELLTQLHEDERSERLLEIPGIGPITASVLMSELGDARQYGSARQFAASIGLVPRQYSTGGKPTLLGISKRGDKELRRLLVQCARVIMLRIERRTDSLGVWVRSLLARRHSNVVACALANKLARIAWAILAKGTHYRSAPAALPA

SEQ ID NO: 343547 - protein, 343 aa, unidentified
MEQYVALDVSLQKIAVCVLNASGRVVIEAEVASEPGVLIAFIRTKAPHAVRIGLESGPTSPWLWHSLKSAGLPVVCMDARHAHAALSVRPTKSDRNDARGLAEMVRMGWYKEVQVKSLAAHERMALLGVRRRLVDMRVEIDGQIRGILKTFGLVVGRGNKNAFAQRARMLAQDHPVLSALIDKLIEVREVAVAKVAVLDKEIRSFVRADPTLRRLMTVPGVGPVTALAFRSTIDEPDRFKRARDVGPYLGLTPRRHQSWETDRQGKISKCGDRFTRTCLYEAASVLLTKVQRWSPLKAWGTRLARRIGSKKARVAIARKIAVILQCIWTDGTEFWWTKEAAQA

SEQ ID NO: 343548 - protein, 366 aa, unidentified
MAFDTSKLRNAVAIADPGRAGEVRFLGEIENTGTATARLVKKLAAKYQRLTFCYEAGPTGYGLYRQIKSLGHECVVVAPSLIPKKPGDRVKTNRRDAVNLAKLLRAGELTAVWVPDRHHEAMRDLTRTREVAVMDLRTKRQQISAFLLRQGLHYPGKTTWTKAHMSWLASQKLEYGEQRLAFEEMMLAARQAQERLERLEQAIRTAVPDWSLAEVVTALMAMRGIDLISAAGFLAEIGDLSRFRTPSELMAYLGLVPSEDSTGDTIKRGPITKAGNRRARRILVESSWSYQHPPRVGKEKQEKVAAAPRAVREIAWKAQCRLSGRYRALIRRGKLKTVAVTAVARELAGFIWAISREVTTARVAAK

SEQ ID NO: 343549 - protein, 348 aa, unidentified
MLIIGCDYHPSVQQIAWVATETGECGERRLMHRAEAEQFYRELKGKQVRVGIEATGHSRWFERLMAELNFELWVGDPAQIRAKQVRKQKTDRRDAEHILKLMLEGNFPSIWVPTPENRDLRQLVLHRHRLVGMRTRVMNQLQAVAMNEGLRHKKRLWSEKGRQQLESLSLMPWTAQRRQELLQLLDQFDPSIAQLSQAIEQEAERIPEVKRLMTHPGVGPITALAFVLVIGTPERFGCGKQVASYLGLIPCEDSSADRWRLGHITKQGNALLRYLLGQAAQSVARCERQWQQQYAHLTMRRNKAIAKTAMARKLAVRLFWMWRQGWDYQQLNKFGSHVGKLADSIGVK

SEQ ID NO: 343550 - protein, 456 aa, unidentified
MPRGTNAPGARFREFFNKVPTLAARSGGEGLMEVIHRRCSGLDVHKETVVACVRLVSDGKITREVRSFETTTCGLLLLLAWLTEMGCTHVAMEATGVYWKPVWNVLSDGDFELVLANAAHIKNVPGRKTDVSDAAWIADLLAHGLIRSSFVPEQEIQELRELLRTRKQLGRQQSNHIKRLQKTLESANVKLDSVITDIVGKSGRAMIQALIAGQTDPVKLAALADRRIKASPQQLREALHGRVTDHHRFLLHLHLQHIDFADAAIQDIDRNVTALIARMDQEVQAGQTRATFQSLILLLMTIPGIDVLSARIILSEIGRDMSRFPTAGHLLSWAGLCPRNDESAGKRRSTRLRKGDLWLKTLLVQCAWAARRKKGSYFNAQFLRLRGRRGPKKAACAVAASLLTTIYHMLKDGTQFQDLGADHFDRRSKDVRAKRLVAQLANLGFDAKLTPFAQAA

SEQ ID NO: 343551 - protein, 410 aa, unidentified
MEPKLVVASIDVHKKMLAVVVVDEDHPHQALEQRKFGTNGGELKHLAAWLASHGVNLVVMESTALYWRPVWLALEGQYILHLAQAQSNAAPRGRKSDYADALRLARRFLAAELRLSFVPDAEQRTWRCLSRGKHQKRRRRVQIQNQIEALLEESQIKLSSVITDLLGVTGYRILKALSEGETDPAKLAAMAAHNLQASQEQLAEAVSGPMQSRHRTVLAMQLEELDLLDKHIAELSRQLGDALRLHQDAVLRLCEMPGLREDAAWQIIAELGPAATAFETAEQMASWIGVCPGRKESAGASKSNRSPKGNRTMRRVLNQVAWSAVRTKDSFFRELYHRLIPRLGVHKAIWAIAHRMAKVAWKILHDKVRYIERGPLALDPAAMKRRVTRLARQMRRLGYTIEVKPVVATT

SEQ ID NO: 343552 - protein, 391 aa, unidentified
MLICGIDIGKFKHEACLIDETGRQIAKSLRFANTTEGGRKLLDYFNGCNPEKEVIVIGMESTGHYWLSLYSFLFDQGFQVNVINPIQSDAIRNLFLRKTKNDAKDSFLIAETIRIGRFSSTKLAEEDILALRQLCRHRTDLVDYISDQKRKIIGVMDRIFPEYQHLFSDMFGKTSVELLSKAVTPEEILEIPTEELCAILKSASRGRFGDSKVEEIRNAAKNSFGITIASSAFSMQLRQLLEMIELLERQVEELEFEICDYMDGMDSCIMTCPGVGKVLGAVILSEIGDISRFSEAKKLVAFVGIDPSVHQSGEFSGTQSSISKRGSPHLRRAIWLAAIVAAFHDPVLSAFYQKKRAEGKHHYTAIGAVARKLTLVIYAVLRDNKPYVPRC

SEQ ID NO: 343553 - protein, 296 aa, unidentified
MDPTTRKTTARLFAGVDVSKDRLDVCLRWSEPESHQKEEAFVVAYDDSGIDALLSRLLKEPTVLVILEATGGFERTVVGALAAAGLPVVVINPRQVRDFARATGTLAKTDRIDASILARFAEAVRPAPKPLPDREIRALQAIVARRRQLLGMIAAENNRLSSATKAVAERIKAHIRWLEKELSRTERDLKAAIESSPALGENEALLRSVPGVGPILARTLLAGVPELGTLTHKRVAALVGVAPLNRDSGTLRGRRSVWGGRADVRAALYMGALVAARRNPVVKEFYERLLVAGKPK

SEQ ID NO: 343554 - protein, 370 aa, unidentified
MKNAITYVGLDAHKKDIYVAMLLGHEQVPVTWQLANEPTAVRRLVRKLERETSGPVRCCYEAGPCGYALQRQLTSERVSCQVIAPALIPRKPGDHIKTNRRDARKLAELLRAGLLTEVAPPTAADEAVRDLARARDDAREDLLRARHRLSKLLLRRGVHFAGPSRAWSQSHRRWLRSLTWDYAADRRVADDYLLAIEQLEARLAELDAALTEVAQTEPYREPVAWLRCFRGIDTLTAIIIVAELHDFGRFLSARAFMAYLGLVPSEHSSGEHARRGRITKAGNTFVRRVLIEAAWHYQHRPGVGRALRRRQEGQPARVIAIADRAQQRLCRRFRRLVATHKPTPKVAVAVARELAGFIWAALQRPVSAAA

SEQ ID NO: 343555 - protein, 353 aa, unidentified
MVVVGVDAHKRTHTCSAVDGIGRRLGVKTVPATTTGNATMLRWALSTFGPELTWGIEDVRNVSRRLEEELIRSGQRVVRVPTYLTARTRAFARTRGKSDAIDATAVARAVLREPDLPVACHDSVSRELELLTERRETLVDQRTATVNRLQWRIHELDPIRSAELKPLIFAKHRAPVAAWLADQPGLVAELARDELDDIARLTQTINAVEKRIVQQVRAHATHLLGIPGCGELTAAKIIAETANVTRFKSEAAFARYIGVAPLPYSSGSTDGHMRFTRSGNRQLNAAVHRIAVTQIRMAGPGRQYYDKRRTKGNSSSAALRLLKRRITRAVFSRLKADEADRRSQATADSPERR

SEQ ID NO: 343556 - protein, 349 aa, unidentified
MTNANDRTGTAWAGLDVAKGTFDAAVHPAWIPGRPVPLPDLPKASFPRTGEGVARFVEWLDGTTPPAAAVRAVMEATGRYSVELAELLSAARPSLAPAIVDPKSACHFARSLRLRNKTDRSDAAALARFGAERCPEPWCPPTPEYGELQEMSRQRAFLVESLVTARNRLAETEAVPAVARVQKQVVTGLEKALARIEELMRKHVAKRPGLAGAVRRLDTIPGVAFVTATTVLGELGDLTRFPTSRSLSAFAGLSPRRFESGTSVHGRTRMCKQGSPRVRQILYMAAIAAVRRPNNRLARSYAAMVEAGKPRMLALGATMRKMLVIMRAMLANGTDYHDEPAPKRQGSVA

SEQ ID NO: 343557 - protein, 355 aa, unidentified
MAAITYLPSNYDVFIGIDVDKKSFAFTVQDNNIMSRSKKIPSNPEQLYNYIHNNFGDKNVLCAYEAGPTGYNLYDYLIKKEQACVMVSPASIPKAPNERVKNNRLDSERIARYLKSGELKPIRVPSEPYRELRQLMGIRHNYSNQGKVAKQRIKALVLFEHLGDPINDSDLRWSCKYIGHLKQLPCSSVIRSKLDMLLNDLDYAREQQLKVIKELKRFCATHAEIDSYRRYLQSIPGIGFITALAILARIGDPSNLSNVREIGAFTGLVPRERSTGDTVHRSSITHLGNSELRSLLVEASWVAIRHDAELAQFYYRIKSRHHPQASAKKAIVAVARKLTQRIYKVLKEQRIYEIR

SEQ ID NO: 343558 - protein, 456 aa, unidentified
MSKRRGKAKRVQKASNQEPENLPVLNRDAAAIDIGSEEHLVAVPPGRDTESVRSFAAFTIDLHAMAGWLKQCGIKSVVMESTGVYWIAPFQVLEQYGLEVLLIDARLAKNLPGRKSDVLDCQWHQQLHTFGLLRGCFLPVAEIVPLRSYLRLRDELVKASTQSIQHMQKALFEMNLQLANVISDITGETGLAIIEAILAGERDGKKLAELKHRRIVASKETIAKSLEGNWRPELLFALQRALDRYKFYQQQLAQCDGQISQALAQLPTRELQVQTEPEKKTEPSARGQKLTPLEAELQRIAGVDLTSIDGIGQQIAQIILSELGPDLQKSFQSEKHFSSYLGLCPGTKISGGKVLKRKSCKVKHRVATALRLAARSLHSSDSALGANFRRLKARLGAPEGHHRNGNKLAKLVYRLLVYGKDYFDRGAQIYEQKFRLQQIRRLQKQAKMLNLKLIPA

SEQ ID NO: 343559 - protein, 482 aa, unidentified
MKKRNIYQNQSQELLSLFEQAENNAKVMCVPIDYAKKDHVVMFCNGYGDILRKPFSVKNSPQGVDYLTDQVIRSCRQRAISEKHVFFGGEDVGSFADNFVSTLRCQGWLVAGVNAHEAKTQRENLQASTDRLDLMGIAKSLLNRRANCSPAQSGIYLNMRTVVRHRRKLVDIKTEVRNRIHTVVDRLFPGFLDESKSGITPFSKSSLWLMKERFSAGQIRRRRRSTLIESLRRLGTKKPEYTADQLQQYATQVLRPPQDYVHMLQLSLAQHVKHFCCLQESIGQLEKEIALNLAQTQGAYLTSVRGIGIVLAAGVSAEIGNPFEQKPLNNLVSYCGIIPRVKQTGGPQGETKTGKVAKRCNRILKDYVVQSASHLGLHGPADLMSDYKRRDAAGQHADFGMARRYLRMAMCLMRTSQIYLPSGLRKAQAQMDERADYYLITWPYLRDKWQKLGALETAFKADHPLGQWRKIVQQFYGIKLTL

SEQ ID NO: 343560 - protein, 381 aa, unidentified
MRQVCGLDVHKDSVFACIINENGVILQEKFGVLTPELEHLAAALQEHDVGEVCMESTSIYWMPVWRVLEPYVAELKLVNPYFIKQLPGKKSDVKDAEWIATCLLKDLIRGSYVPADIIQQLRQYYRRISDLNAECVRKLGKLDAALQRCNIRISNYVATTDGKSYKDVVRLISEGIRDPAELIKVIHGRITNRVGKDVILASLTGVISDTDIDVIRQLREEVDLAQRHKDECQSKMDAICQQYFPEQLKNLQTIPGVKGRSATAIIAEVGSDVSSFQDAAHLVSWCGLKPRNEESAGKIKARSITHGNRYLRKTLIECSWAASKTQNCYLNRFSYYQTIVRRKNKMKVQVAIARKILTSVWYVLHDKVAYRDYTPDIDPAA

SEQ ID NO: 343561 - protein, 451 aa, unidentified
MAKPPKPTQPSKSLPVIDPNCAAIDVGATRQFACVPADRDDQSVRDFDSFTDAIHSMADWFKRCRIETVVMESTGVYWIPIYEILEARGFKVHLVNARHVKYLPGRKSDVLDCQWLQQLMSFGLLRGAFRPNEQICALRALWRHRDMLLSDQGRHVQRMQKILTQMNVQLHNVISDIMGHTGQAILRAIVAGERDGATLAKLRDRRIKADHATIERSLQGNWRAEHLFCLKQVLSLVDAIAEQVRLCDQQLMSMLIELHAHDLPENGMPKHKRSSKQKNAPAFDMRSSLYQVCGADLTTLPGFEVNTVAKIISEIGVDLSRFPTVKHFTSWLSLCPGTKISGGKVLSAATKPSANRAAQALRLAAGNLRQSQSSLGAYFRRLCARMDKPKAITAAAHKLARLVYMMLTKGQEYTDAGQQYYEERYRQRVVANLARRAKDLGLQLVPVANPA

SEQ ID NO: 343562 - protein, 400 aa, unidentified
MNEYDETGVFLGLGVGKSAHHGHGLTPAGKKVFDKQLPNTEPKLRQVFDKLREKFGTVLVVVDQPASIGALPLTVARDTGCQVAYLPGLSMRRIADLYPGEAKTDARDAAVIADAARTMPHTLRSLQLTDEITAELTVLVGFDQDLAAEATRTSNRIRGLLTQFHPSLERVLGPRLDHQAVTWLLERYGSPAALRKAGRRRLVEVIRPKAPRMAKRLIDDVFEALDEQTVVVPGTGTLDVVIPSLTRSLGAVREQRRAAEAQITALLEDHPLSKVLTSLPGVGVRTAAALLVTVGDGTSFPTAAHLASYAGLAPTTKSSGTSIHGEHAPRGGNRQLKRAMFLSAFAALHDPASRTYYDRCRARGKTHTQALLRLARQRINVLFAMLRDGTFYEPRTPRLA

SEQ ID NO: 343563 - protein, 385 aa, unidentified
MNILAIDLGKFKSMCCFYDTDTQKYRFQAVATTRPYLTAVFTHHKIDLVVMEACGPSGWINDLCQEFGLKTLVCSTNDEAWRWKNVKRKTDKDDALKLSRMAMMRQLTPVHVPSHTVREHRTLIKYRKKLVGRINQIKNSIRGLFACRGIEIDRGQPAWRTGRELINSHRKSLVECSLEELWRGQLDAELTQLDSLADQLADVERRLDVIANEDERIQRVRTIPGVGRKTAEVIVTALDDVDRFKNARQVSAYIGLVPRQYQSGETDRNGRITKRGSRLLRTMLVECAWLSLRYNEWSRTTYDRIHGGQKTRKKKAAIALARKIAVVAWSMLKHKTDWDPERAGIVAKEPAKEGPTRDTNQGRCDRGTHTDASSVGQVAESSMTS

SEQ ID NO: 343564 - protein, 343 aa, unidentified
MTHYIGLDVSQKLTAICIVDSTGRRLWRGQCTSDPEQIERVVRRHAEKDARIGVETGPMTPWLVHELRGRGLEVTCLDARHARAALKMQINKTDPNDAEGLAQIMRTGWYRSVHVKSFGSHRARALLGARVQLVGMTTRLSNHIRGVLKTFGLLPGSMRGVPFDRRVEAMLADRDDIAPIIRPMLIAWRQLRQQIATFDKAVRILVRSSPACRHLIGVPGIGVLSVLAYVSMIEDPARFGRSRSVGAHLGLTPKRYQSGEIDRSGRISKCGDTLARTLMYEAAVVLMTRVKRACGLKEWAQAIARRSGAGKARVALARKLSVIMHSIWRSGEPFRWSEQPVAA

SEQ ID NO: 343565 - protein, 343 aa, unidentified
MDHFAGLDVSVKETSVCIVDDTGKIVREVKVASEPEALLALLKNPAYHFKRIGLEAGPLSQWLFSALAEAELPVICVETRHMQAVLKAQINKTDRNDARGIAQMMRVGLYRPVHVKTLRSQKLRMLLTHRKLLQSKAIAIENDLRGTLRNFGLKVGMVGKVKFEARIKELIENLPDLAELVEPLLIVRRALREQIVILHRRLLAVVRDDEVCRRLMTTPGVGPVVALTYRATVDVPARFRKSKSVGAVFGLTCSKYQSGEIDRSGRISRCGDEMMRVMLYEAAQSMLRSKKWSWLKAWAMQIARRRGVKKAIVALARRLAVIMHRIWVDGTEFRWTREQSAAA

SEQ ID NO: 343566 - protein, 415 aa, unidentified
MKSSIETTFAAFVGIDWADLKHDVCLQQAGSDRRECSVIAHRPEAIERWALSLHERFAGRPIAVCLELAKGPLVHALRRHPFLVLFPVNPTTLAKYREAFCVSGAKDDPTDAEFALELLIMHPEKLQALRPQSPAMRTLEQLVEQRRMLVNEVGRITNRMSAALKEYFPQVLEWFKDKDTLVFCDFVTRWPTLKQAQRARKARLCAFFHEHNVRYPNVIEKRVQAIVAASPLTTDASVIGPHSLLAVSLAQQLRVLLQSVERFDAEIAAVAPTLPDYELFAVLPGAGPVFAPRLLAAFGEQRERFQNANQAQSYFGVAPVTERSGNKCWVHWRLRCPKFVRQTFVEWAALSIPYSFWAEAYYRQQRNKGASHQAALRALAFKWIRVLYRCWQTRTPYDEATYLNALKRRGSPLLA

SEQ ID NO: 343567 - protein, 457 aa, unidentified
MNKKMEMEIVNPHCAGIDVGSKSHYVAIGQSLDDVREFGVYADDLTDICLHLKSYDITSVAMESTGSYWQNLYVELVRHGFEVVLCNGKFTKNAKGKKTDVKDSRWIQKLHTLGLLTGSFLPDFTTEQLRTYCRQRTNWIELSCEASQKMQKYLRLLNFRLDVVVNDICGLTGMTIIEDICKGNLDAQQLASHRHYNCRKSEEEIARALKGNNRADYLFGLKQEFESYRFYQKQIDACDKQIALFLKTQINAHPEKKKLKAEAKSHKRINKNTVKNLDINQAAFQYFNGVDLMRVEGLSHSTILTIMSEVGPDGFFNFKTAKQFTSWIRLAPNNKVSGGKILSNHIPRGSNRLKIALRQAANAIGNLKDTHLSNFFRRVAYRKGRQAAVSATARKLAVIIWNMVTRKMQYQPPTQYLFLDQKRKLKMVSRIKQNIVKFELKPEDVGFCNTLILSAGD

SEQ ID NO: 343568 - protein, 359 aa, unidentified
MTVKCMAGIDLHSNNLFCAIVDLAGKRVFEKRLPCDLESVLQALKPFKKRLEKIVVESTYNWYWLVDGLQDHGYTVVLANPAAMEQYNGLKHADDKSDGFFLAEMARLNILPTGNICDRKIRPVRDLLRRRMGLVHHRTSLVLSLKSLHTRMTGRDLETGRLKRLEPQDAEKLFAHPADQLITRLDLQLVEQLGRSIQEIETRILAEAKRMPDYQVLQTMPGVGKILGLTILLETVDPRRFAGPGHYASYCRCVDSRRLSNGKKKGENNSKCGNKYLAWAFVEAAQFARRHDLACRKFHDRKSAQANGIVATKALACKLAKAAWHMMSENTHYDGGRRFPASQDEQIDLGRAGASQRKC

SEQ ID NO: 343569 - protein, 355 aa, unidentified
MKRRHFIGIDVHCLFCEIAVVDHRGTVVLRQRCDTTIPALTQVLEQVPRPRSLVIEEGPLAGWLWRNLRPLLDEMVVSDPRRNRLIAKDGDKDDDIDAEKLAQLLRGDFVKPVHQCDSEEQAVFKQQVSLYQHRVRQRVREAQRISALFRQHGVMIRERAFVAVESRQELVQQLPANEVLAEAIALLWQSYDDAVSHEEQWRTRLVKLAQQHEVVRRFEALPGFGWIRSATLFAYLDTPWRFRSKQALWKYLGIGLERQRSGNGPERVGVPKLVHRLIKSTILGAAQSAVAQGDNPFADLHRRWTAQGLSSRLARRNVARSLASTLWGLWKNGSVYEPKWVGAAGAASAVNKQSR

SEQ ID NO: 343570 - protein, 342 aa, unidentified
MQQTIFVGLDLGSSHCHQTVINVDGAIVRSRSVPTGEQHLRAAFADLQGDVHVHAEASELSNWVRSIIHPMVSRFIISHPRSLAWVAKDSVKDDSVDARKLAELLRLGHVHEVYYEDRADRRSFKQLVVHHEQLGREQARLKSKIKARLRTLGIIRKDACLFSEAGQIELLASINEPLLAQMFRQSFAVLNQMLVSLSEAKTAMLEFSRQLPEIKLLQTAPGVGAITACRFVAYVQTPLRFSNKRKLWHYARLGITRRESNGKRLSHPHLDAAGVGSLKDCSRKIFEAARRTKKDNSFKRFYEQSLDNTKNAVRARLSTQRKILATLRAMWLSMKPYRDDGG

SEQ ID NO: 343571 - protein, 309 aa, unidentified
MTSQSPMISCSYIGIDVSKAQLDLADATSSRCLPNTKSGVAALLKTLPPRAHLVLEATGGYERPLVAAAHSAGIAISVLNPARVRHFARASGRLAKTDPIDAALLRDFGQALQPSAEPTPHPARAQLAQLVHARQQLIDLRTQLSNALEHLSLPLLRQSFASQIRSLNTRIARIEAAIEHTIADCSELASRASALCSHRGVGLQTTAVLLAYLPELGQANRAQIAALAGLAPFNRDSGQSQGPRFTNGGRPQVRRALYLAALTTIRSKNSKVGAFYHLLRSKAKPAKVALIAAARKLLCHLNSSLKSLH

SEQ ID NO: 343572 - protein, 348 aa, unidentified
MNFYTQQHKHYCGIDLHAKAMYVCILDQHGTKLVHKNLPTTPEAFLRIIAPYREDMVVGVECIFTWYWLADLCQKEGIAFVLGHALYMKAIHGGKAKNDKIDAHKIAVLLRGGMFPLAYVYPAEMRATRDLLRRRCPLVRKRAELLAHIHNTNSQYNLPEISKKLAYKANREGVEEHFPDPSVRKTVELDVSLIDHYDKLLGEVELYLTRTAKGHDGPTFTRLQSVPGIGPILALVLLDESQDLARFPRVQAFVSYCRLVKCAQASKGKRLGTSGKKIGNVHLRWAFAEAAILFLRQNQLGKAYFTKLEHKHGKAKALTVLAHKLARAVYYMLAREQAFDLQRFVPAS

SEQ ID NO: 343573 - protein, 420 aa, unidentified
MDEITEEPAALVERVAALDIGKASLTACIRVPHEDKPGARRQEVRTYATLTPALLELRDWLVCQGVTLVVMEATSAYWKPPFYLLEDDIECRVVNARDVKNVPGRSKTDKLDAVWLARLTERGMLRPSFIPARPQRQLRDLTRYRRTLTQERTREKQRAEKLLEDAQIKLSSVISDIFGASGRAMLDALVGGQANPHELAALARGKMRAKTSVLHEALTGHFTDHHAFMLGMMLDRIDALTDQIGTLTTRIEQAIAPFAAQVAQLDEIPGIGPAAAQDLLAEIGADMSRFPTAGHLVSWAKFAPRARQSAGRSKAATTGKGNPWLGGTLGEAAAGAARTKTFLASRYKRIVRRRGKQRALVAVGNSILTIIWHLLSDPSAHFTDLGPDWHDRLAPLRRKRQLIAELERLSGKKVTLHDAA

SEQ ID NO: 343574 - protein, 345 aa, unidentified
MKITTVGIDLAKNLFQVHAVDERGRAVLRKQLRRDQMARFFANLPPCLIEIEACASAHYWARTLQKFGHTVRLMAPQFVKPYVKTNKNDVADAEAICEAVSRPNMRFVPIKSVEQQAVLSLHRVRQGFVRARTAQGNQIRGLLGEAGLIIPKGIVNVAKRVPALLEDAGDEVSASFRRLIQRLIEHLKELDRQVDELEAQIKAWHRGSELSCKLEKIPGIGPLGASALVASIADATSFDNGRQLSAWLGLVPRQDSSGGKPKLLGISKRGDVYLRTLLIHGARSAILAAQRKAVNTNVWLASLLNRRHPNIAAVALANKNARTVWALLAHGREFRADYAPEVSAA

SEQ ID NO: 343575 - protein, 367 aa, unidentified
MSKSSTVFVGMDVHKDSIEIALADAAEVRRYGQIGGDAGAVDRVVRKLRSVHRDLMFVYEAGPCGFWLQRRLAAQGLACMVVSPSMTPRRPGERLKTDRRDAVKLARLARAGELTAIYVPDEGDEAMRDLVRAREDAVAMQRQARQRLQALLLRNELRYPQRTTWTQAHRRWIAHLKLPHPSQQIAFEEYVMAVAEASARLERFTVAFTMHLEQWRWKPVVEALQALRGVQALHAVRIVAELGDLTRFESPRGLMGYLGLIPSLDSSGPRRRQGGITKAGNSSARRALVEAAHAYRFPARVSRGIARRQSTIDKDVCALAWKAQVRLCARFRKLAARGVNRNKVVVAVARELSGFVWAIARNVKPLQ

SEQ ID NO: 343576 - protein, 267 aa, unidentified
MEQQALNLSNATFIGIDAHPTEHTALAITRFEEEKGQLRFENTLAGIKEFLSWLPTISPDPTSIIIGIEGGSTARYALVSSLRDFYTHVYEVNPVFTKQRRSLGTKHGKSDPADAKLIAEVLTRKLSVLPRLRRDELSSQQLCLRKTVWFYEDLSVQTARIKNMLYQLERECGLARTREERRVLKLIIQEKRKEQTRIKKVQKKLKDELSALLTSQGKNLTGMKGVDTILAARIIAHANGIDRFPTVSKFIRYAGIAPVERSSGKRR

SEQ ID NO: 343577 - protein, 410 aa, unidentified
MEVLYQRCCGLDVHKESVVACLRIVSGGEVVREVRTFETTTASLMALSEWLAENGCTHVAMEATGVYWKPVWHILDDGDFQLILANAAHVKNVPGRKTDVNDATWLADLLAHGLIRASFVPDTQTQELRTLLRTRKQLVREKSSHILRVQKMLEDANIKLDSVITDVMGMSGRAMIEALIAGESNPAKLARLANYRLRASQEKLREALRGRVTKHHRFLLRLHLNQIDALDASIVMIDEQVEAGIAPFRAAVGQVMTIPGIRDIGAQVIVSEIGTDMSRFPSEGHLISWAGLCPRNDESAGKRRSNRLRKGAPWLKTTLVQCAWAAVRKKGSYLQAQFLRLKARRGPKKAIMAVAASILTAIYHMLKDGTLYQDLGSNHFQNRSKGQQTKRLAKRLADLGYKVALTPLAG

SEQ ID NO: 343578 - protein, 418 aa, unidentified
MAKIHKRNSIINAKTMIVAIDIGKDKSWAIFRAPAGQDSKPFVFTTTREGFGKFSDRLRWYKAHYKAREVVVGFESTGVYADPLIHYLRARGIRLVLVNPVHTKRVKEIRDNSPNKTDKKDPGVIADIIQLGCVLSVIVPKGEAAELRQLIHARERAIGGRNALLSQLHAFVYKIFPEFNQIFKSLKGKTAQYILKHHTMPEDIAELNTHELISKIRTLSRGRIQQTKVNKLQALARTTVGIKEGKRAVVKEIRHLIAQMNSQELFIKDTEKDISETLKRVPFSARIMSIKGIGTITTAGILGETANFEGMNSSKEIEKLAGLNLFEISSGKHQGQRRISKRGRSLLRKLLYFAALNVIKNDGVFREKYQSYLINGKPKNQALIAIGRKLIRVIFALTRNDVNFNGDYQRTENYAKAA

SEQ ID NO: 343579 - protein, 354 aa, unidentified
MDENATHWAGIDVAKKTFDGAVVFCGQHFPHTPLREVPAGSFERSREGARLFVDWLHEQVNAHGQPAMGVRVVMESTGAYSLELTQWLLECRATLSPAIINPQRTANFLKSLGLRNKTDRLEARALAFYGAERRPAPHEPLAPALAQLRDLNRYRDFLVAERVAVKNREDDASGTKLVCQMSKRRASQLDRDIKAIEKQMRSLISETDDLKRKHALLASIPGVGFLSVCTILAELGNLRRFERSRQLSAFVGVNPRLYLSGTSVHGQSHMSKSGSSRVRQALYMSALAAIRMAGPQQAVYDRLIASGKKPMVALGAVMRKLLVLMRAMLITETPYNKDYQAGLKPVDKLAFNGG

SEQ ID NO: 343580 - protein, 359 aa, unidentified
MMVLGIDPHKKSHTVVALEAATGELVAELTVAADRCGHERLIAWARRLTPERRFAIEDCRHVSGHLERALIAAGERCVRVPPKLMAQTRRSARRRGKSDAIDAACVARAALREPGLPEARLAGPERALRLLVDHRSDLVGERTRLQSRLRWHLHDLGLGLEVPPKALGRACWLARLEEELAPLAGVQARIARELVARCRTLSAEISGLGREIAVLTEELAPELLALPGCGALSAASLVGETAGAERFASAARFAMHAGVAPLPVSSGQSNRHRLNRRGNRQLNAALHRIALTQLRMYEPAQLFVARKRAEGKSTREALRCLKRHLARIVWRELRNAEARRGALHTDACPATQPALALAS

SEQ ID NO: 343581 - protein, 332 aa, unidentified
MNHFIGIDVAKSTLQVHIPQDQVDLEVANTKSGLQRLYNTLKRSYKSEFEHIVFVYESTGSYSRPLEEFCQEKSVRCFKVGAYQSASFSKTVKNRNKTDRVDARMLSAMQMLAGDGDIKIPHRDEVAHKLRSYIKYYQSLNKEKTRLKNYREAATFNQEDTYVLHQVEKRIKQIGKEQDNLMVLSMKLVKSNDDYFNAYENITSIKGIGQKCSIVLLYFFLRYPHTSRQQITALAGLDPVKKESGTSLKRKTRISKQGISLVRGILYMPMLCIVRHNDEMKSIYEHLVKAGKPKMSAQIAVMRKVVLLAHSLYKNNQKYDDNKYLTFAKKAA

SEQ ID NO: 343582 - protein, 494 aa, unidentified
MRTIGLELAVAGPHKAIVLDDATGAFVTPVLTVQPTAGSLAALLERSRQDASAPDVRVVMEPTGMVWFPIAAYLHDHQITVYLIKGQEVADLRRYYSRHAKSDRIDVRVLARLPGVNPDGVHPLSLPSADRLACQRACREVDRLTADITAISNRLRDTDRWAWPGLDGVVFAHHLNPAARWFRTHWYDPERVVTAGADVIRQRWQESGCDPTDAGDWCPRLVLVAQQLVALYGEQRAHVNYAMLSAEVSRQQEILAMTVEMRTTVSKTTVRPLYRTIDTTRHLETIRGIGEESAAVYASVVGDVQRFASVSAFRGWSGMIPGSSQSGESQAQGMRITKAGPDLVKKVAFLNADVARRWDPQIAAIYYDQMVRKGKHHTQAVCTCATHLLGRVFRVLRDQRPYELRDVDGHPVTAQEARIIIAERYTVPDAVRQERTKLARRLRRDRRAEKKARESSPAGMRGKHDASSATGHTLPPPHSIALWGKRQDADISNC

SEQ ID NO: 343583 - protein, 317 aa, unidentified
MEQGKLITKVAGVDVGKAWLDVAVHGLEDEARFANTTGGIGELISWLKAREVGRVGLEATGGYERQLRSALEGAGLVAVVHQPIEVRLFARLTRRRAKNDSLDARLIAAATMRIETVRAASDPRLAELAERLTAYEQVSDQLATLKTCMEHVTLKDLAAELRRQIASLIRLKARLLAAVLLRIKRHDDLLARRRLLLSLPGVGPVVAASLLIRMPELGAMNRGQAASLIGVAPFDRDSGQHRGKRFIAGGRSRPRRMLYLAALAAKRFDPDLKAFAQRLLDNGKPPKLAIVAVMRKLIEAANLVLQRGQPWLNRATA

SEQ ID NO: 343584 - protein, 370 aa, unidentified
MLDTTTFVGLDVHARSIKAVSLDVMTGEVRSATFGYDAGAVAGWVRSVDPRARCVHESGVTGFDLQKRLSGLGVGCAVGAVSKMIKPSADRRRKNDRNDAEFLARMLSVGNVVEVWVPDDECEAARDLTRALEDARDDLSRAKQRLSKFLLRHGLVFDERTPTGRRKGNWTRAHWSWIESIRFAEGADNEALAYYVDAVRRAAEEKARLEGLVEAEARKPRWRRRVDSLRCLKGVDTATAADLVSEAGEFSRFGNARSFASWVGLTPSEHSSGESDRRGAITKAGNKHLRKALVEAAWHYLTCSARPKDLARGQDPDRGARRHAAKGVRRLVERRGALLARGVHGNKANVATARELACWVWAVGLMAEGA

SEQ ID NO: 343585 - protein, 433 aa, unidentified
MEFEVTRYQQFCQLNRNIRSSSDHLIVGIDVAKEKHHAFFGTATGKTILKRLIFENDKAGFDRLLSQTESLRVQNGFSRTVFGLEPTGNYHKSLAEWLLAQGQELVLVAGKAVRDNRELLDNRWDKHDAKDSANVADLISQGKCMFYETPDARICEIRSLLSLRRRLKKQEHSLRMRIRNGLLAKFFPEMDRYAGSCVEENLLIVERCLNPRKIAAMTFPDFVKQVTSTDRGTRQLARLRSIHDAAGCSVGLRMGQADEFEAKLLVEEYRGVRKRIAQLMEKIEALCDEFESYKLLQTIPGFGPYISALVLGAIGDPFRFNNFKQVKRMAGLDLCASRSGKTSDQAVPVISKRGDADLRYALYQAAVIATYHNKDFRALFNRVLTGRERERGIKTKMRVKLAEKMLTIAWTIMKKQEPFTPLYLRVANTRAES

SEQ ID NO: 343586 - protein, 424 aa, unidentified
MQNTAAKKRKQVPEGYLVVGVDPHKKRHAAAAITQDFTTQAKFKFDNTREGLETMLDRAKVEMVKSGCRGVMFAIETGGHYWRNVAYFLDEQGIPFRFINQFTLKRRREGKDLNRRKNDYRDSEVAAQLLCTGEFTESKLPKGVYAELRTAHNAYRRLVKERTRITNLVKGLLDALFPEFTQVFKDPGGLTAMSVLSTCPIPRVIAGMMEDEFEATIEAQHKGRRLMRKKLRALHYLAKTSIGIDAGACSLSSEIAFLVDKLELIRQQICIMEGTLVRLVDETEEGKYLLSIRGLNYIAVAGLLAELGCFKAYRSARQMIKMAGTNPTESESAGKKRARTPMSKQGRPVLRYCAWTSVIPMLRFNPDFRAWAKQRRERPVHANPLGAREVVGAALNRLLRLAFALVKNQTYYQVSKAELTLVAV

SEQ ID NO: 343587 - protein, 335 aa, unidentified
MVKGHSQKPSAKELLDFLKKHYPGGEYHAVYESGFSGFSTYYALQETGIDCIIIHAADVPTTQYEETMKTDKVDAVKLVKSLKAGLLSGIYIHKRDDIDARAVVRLRKTIQKQLGGYKSRVKHLLHGNGVIFPERFSRPGSHWSKIFIRWLKEEVVLLSSSRTSLDLLILQVESMRHTLLEATRKVRELSRSVRYRNDYRLLTTIPGIGLNVAMTLLTEIGDFKRFRNEREFASYLGLVPTSHSSGDKITHGEKTFRGNKRLGTLIIEASWMSIYRDRGLGCAYVSYKKRMEPQKAIVKVARKLSNIIFSVLKTEKDYEPYKWNEEEKHTDRQAT

SEQ ID NO: 343588 - protein, 361 aa, unidentified
MPTIADTAQLVTGGVDTHAEVHVAGVADQTGRVLGTKEFPATADGYVAALAWMRGHGELVKVGVEGTGSYGAGLARYLAAQGVEVAEVMRPNRQARRRRGKSDTADAIAAALAALNGEASGQPKSGDGAVESIRALQVARRGAVKARTQAGNQLRDLIITAPQALREKLAALPTPKRVRLAARFRPGDLTSPAEAAKAAMATVARRHQALTAEIAQLDHALETLLGHAAPAGFLARTGVGTRTAASLLVTAGDNPGRLRTEASFAALCGASPVDASSGKQRRHRLNRGGDRQANSALWRIVFTRMATDPRTQAYMARRTAEGKTTREIIRCLKRYVAREVYKALTACPATQPAPTTPKEIP

SEQ ID NO: 343589 - protein, 324 aa, unidentified
MIDGILGIDVSKNTLDASISSCNKVRARSFANSSDGWRHLLDWLITQKIRRVHACLESTGRYSLGIARALYEAGHVVSIVNPAQIRDFARTKLGRNKTDGVDASHIREYCELFKPQPWTPPSDAHRRLGELQAIRAGIVAGLTEWKNRKNSGMVDAVAQSLADVTILHFTSQLGAVDEAIAQTIDNDSSLRRKRDLLLSISGVGETLAGVVLAELPGPDMLRSSAEVVAYAGLNPRQHQSGTSIDRVTRISKIGNAVLRAALYMPAMSAMRFNPAIVALVTRLKSRGRLNPKQIVVAAMRKLLVLCFGVLKTGKPFDPAIAMGC

SEQ ID NO: 343590 - protein, 346 aa, unidentified
MEHYAGIDVSLELSSVCVVDAQGKIVKEAKVSSEPEALVSFFKGLGIPMKRIGLEAGPLSQWLHAGLAQAGFETVLLETRHVKAALSAMTVKTDRKDARGIAQLLRMGWFRAVHAKSMGSQEIRALLVARKQLLGRLIDVELSIRGILRGFGLKVGPVTRKGFELRIRELVTGQATLERIAEAMLLARAALKVEYEKLHKAVLAIVREDAVCRRLMTVPSVGPLVAITYKSAMDDPNRIAKSKAAGALFGLTPRKYQSGEKDVTSGITRTGDEMVRTALYEAANVLLSRITRFSKLKRWGMDVAKRRGSKRAKVALARKIAVILHRMWVDGTTYRWAAAEPMAAQT

SEQ ID NO: 343591 - protein, 415 aa, unidentified
MKAWKESTYYAGFDWARDHHDVVIVDRRGQIVADFAIAHTAEGWQRWREQVAALGAENFAVCVETSQGMVVEQLLESGVTVYPIAPVSSKAYRERKAPSGTKTDRLDAWSLADALRLDGHSWKALAKEDPLIAELRLLCRDEIALIEERTALLNQLQSALQQYYPAALEAFEDWTLPAAWAFVELFPTPAALAAAGKRKWEKFLHLHKLARPQSYAKRLEIFARGSELAAGEALTRSKSRLALARIRMLRVLQHQIEAYRAEIEKLFAQHPDHHLFGSLPGAGPKIAPRLLGEIGSDRARFDDPNALQALAGTAPVSYQSAQIHKVYLRRHCNKSLRATIHLWANLSRRASPWAALYYQALRARGKSHASALRSLGQRWLKILGKIWQTRRSYDPDLHTANQLKHGSWVLTLQSA

SEQ ID NO: 343592 - protein, 340 aa, unidentified
MTIATIGLDLSKRVFQAHGVDGTGATALTKRLHRKQMAPFFSKLPPCLIAMEACGTAHYWARTLAAMGHEVRLIPPSYVKAYVKRGKSDALDAEAICEAVQRPTMRFVPIKTVEQQSILMAHRARSLLVRQRTMLANALRAHLAEFGLVANPGIANLAKLAQQALSDENGLPASARTTLEALVRQIMTLSEEITALDRKLLAWHAESEASQRLTAIPGLGVVTATAIAATVTDANQFRSGRQFAAWLGLTPQQHSTGGKTQLGGISKQGDRYLRRLLVVGATAVIRHTKDKPTPMANWIRKLLVKKPFRVVSVALANKLARIAWVVLTRKEAYRPYQLAA

SEQ ID NO: 343593 - protein, 356 aa, unidentified
MCDHQIKQEESDVKNTTIAIDLAKSVFEVGVSDRPGHVAANHRLSRAEIAPFMANQPATTVVMEACSSAHYWGRTFQSFGHDVKLLPPLYVRPYVQRGKTDRADVKGMLEAWRNSAIRPVPVKSESQQQLTALHRVRAGWMTTRTMRINSARGLLREFGMIFPLGAATLADRVREVIADDHTQLTMPTRELLHQLVLEIGELEKRVTGVEKQLEALAAQTPVVALLRTIPGVGLLTGTALVGFVGDVQRFRSGRHFASYLGLTPREYSSGLRHRLGRISKLGDVYLRTLLIHGARAVLVGAQAKSNPDRLRAWALQIQGRCGNNKAAIALANRLARIVWAVWKSGKPFESRLQVSD

SEQ ID NO: 343594 - protein, 315 aa, unidentified
MTSTQVFVGVDISKAQLDLALRPEGQFSVPNNEAGFAQVLEHLNAVHPTLVVLEATGGLEIPLTGVLAAAGVPVVVVNPRQVRDFAKATGRLAKTDALDAQMLAHFAEVMRPEPRPLPDEQTQALAAILARRRQLVEMLTAEKNRLGTAGKPVRKSLRTHIAWLERELSHTDRGLAQTIRESPVWREKEALLRSPPGVGPVVTTTLLATLPELGTLTGKQIAALVGVAPLNRDSGTWRGKRTVWGGRAQIRAVLYMAALVAARCNPVIRACYQRLRAAGKTKKVVLTACMRKLLIILNAMLKHRTPWRAELVQCA

SEQ ID NO: 343595 - protein, 345 aa, unidentified
MDIRTIGIDLGKTVFHLVGVNARGEVVVRKKCSRTQVLRFTSNLRVCLIGMEACGGAHFLGRALREQGHDVRLMPAQYVKPYVKTNKNDYIDAEAIAEAVTRPTMRFVPIKSDDQLDLQSLHRVRERWVIRRTAVINQIRGFLLERGITMRKGRKHLEASLPGILEDAENKLSGALRALLTQLRIEMQYLHRQIEECDQLIVRIASELEPCRRLLAIPGIGPVIATATIAAIGNGAAFKKGRGFAAWLGVVPGEHSTGGKQQLTGTSRRGNKYLRKLFVLGAHTVLLQRTKQAPGLSTWLASLIARKRKQVATVALANKMARMVWAVLFKGEAYRPPLVPQLNAA

SEQ ID NO: 343596 - protein, 370 aa, unidentified
MKKHSTTPKSPKQASACKGGPITIGLDLGDKTSRYCVLGANGEVMSEGSVATTRKAMAEKFAKMRRCRVAIEVGTHSPWLSRWLSSLGFEVIVANARQVQLISASSRKNDRLDACLLARLARVDPQLLRPIRHRSETAQADLMRIRVRAALVEARTRLVNAARGFAKAMGERLPACDTDSMGVERMESLPEGLRDTLKPLLEQVESLTEKIKESDVKIEQIARTQYPETELLRQVSGVGTLIALTFVLTLEDRERFRKSRDVGCYVGLRPKQSESGQSQPQLRISKEGDVYLRTLLVQAAHCILSRRGPDTDLKRWGLKLASRGGKNAKKRAVVAVARKLAVLLHRLWVCGEVYEPLRNSQASGSSKKAA

SEQ ID NO: 343597 - protein, 321 aa, unidentified
MEPTIVGIDIAKKKFDVALPLGEKAKSAAFHNTAAGFAIFARWLTKHDVERAHVCMEATGTYGEELALYLYRAGHVVSVVNPAKIKGFAQGELSRTKTDKSDAALIARFCRAMKPEAWQPPAPELKKLQSLVRRIEELNGMLTQERNRLATANEVVKPSIEGVIRHLQDEIKNTQQLISDHIDQNPKLRANRDLLQTIPGIGPTTSAMILAEFGDVERFGDARHMASFCGLTPRHRQSGSSVRGKSRLSKTGSSRIRKALYMPALSAIRYNPVIIAFRTRLLANGKSRMVIVGAIMRKLVHIVFGVLRSGRPFDPALAAAA

SEQ ID NO: 343598 - protein, 343 aa, unidentified
MQIAVLGIELGKNSCSLVGLDSQGTVVKRRRMRSSSVVGFTKRLPSCIIAMEACCGAHHLGRLLKAQGHEVRLMSPEYVRPYVKVQKNDDRDAEAIAEAATRPTMRFVELKSEEQLDMQTLHRARDRLVGERTALINQLRAILLERGIVIAQGRRNLERELDAMLGEENGLKVSPRMRLLIEDMREEWRVLDRRIAAFDDEFAARAKNDEAARRLATIPGIGVLNATALAAAIGDGQTFARGRDLAAWLGLVPRQITTGGKPRLAGITKRGNCYLRKLLIHGARAVLPTLSKSETPLGGWLRALLARVHKNAAVVALANKLARIAWAVLRRKETFNPNSTALA

SEQ ID NO: 343599 - protein, 332 aa, unidentified
MENFYFIGVDVSKKKLDFCVMFEGKVVHEEETVNHQTAIMSLLRHLEEDYGITSDRMLVCAEHTGQYTFPVACACKSVECKLWLENAAEIKYSSGVQRGKNDKVDARRIAIYAGRFQDKVRYYERPTEDIERLKQLESERTLYVTDLAKYKGQMKDQKDYMPKALYERKMKRLQALMDDLEEAIQAITDEMDEVIASCPVLFRQRELLMSIDGVGRVVATNMIIATEAFTRFDDPRKFNCYAGVAPFSYSSGSSLHSKARVSHRADKVMKRLLHLAAVAVTHRIGGELKKYYERKVAEGKNKMSVINALRAKIVARMFAVIKRNEKYKPILS

SEQ ID NO: 343600 - protein, 414 aa, unidentified
MYYVGIDIAKRSHVACVMCDDNTLAVKPFEFLSDESGFKKLLIHLQSLSCDLSEVIIGMEATGLLFENLYRYLKELSYRVVLLNPYQTSKFREMDTMKRVKNDNIDSVMIAALIKSGRFSEGYVSAEQLQSLRELYRHKASLDDQLKAIKRQTGTLLAVVFPELEQIISDPFNVTGLALLEKYPTAKHYEYASVERILKTFRGIKGNNFNSNKAEKLLALANKSIYFGTAKDARAMSIRSNIALLRLLKAQMDECDEQMIRLFDVTHTQASSKEQEVMSQLIDNLRTIPGVGDKTILALLAECGNLDRFTDAKALVGYLGLYPTLEQSGGSIKHGHLAKRGAKLAKKAIYLAAVAAIRHNRELRTVYAKYRSKGRAKKECVIIVARKLIAIIYAIYKRNTPYDPIRVFVAKPNQ

SEQ ID NO: 343601 - protein, 357 aa, unidentified
MAANTSVETNVILGVDTHKDNHVAVALDELGRHLGILSVPTTTEGYRKLLRWARGLGTIEQAGVEGTGSFGAGLARFLKAEGIQVREVIRPKRRDQYRSGKSDPIDAEAAARAVLAGTATGEPKGADGTVEMIRALRAARRSAVKVRTQASNQLKGMLLTAPEELREELRALSTAKLVSRAARFRPGESPQSVEAATKYALRSVARRYQHLQEEIKELDEQLDRLVQQAAPELLRVDGVSTDTAAALLIAAGDNPQRLKSEAAFAHLCGVAPIPASSGKTIRHRLNIRGNRDANRALYVIAFGRMGRDERTRAYVAKRTAEGRSKREIIRCLKRYIARELYRILVPPLRTTPSISVP

SEQ ID NO: 343602 - protein, 419 aa, unidentified
MAQRHNRPIISVVHPICCGLDVHKASIAVCCVATAADGGEDMEIAEFDTFTDDLLRLRDWLIERDCPVVAMESTGVYWRPVHNVLEGYVKVVLVNARHTKHVPGRKTDLADSQWLAGLLRHGLLRGSFIPPQQVRQWREMTRLRKAYQESLADFKRLTHKLFECANIKLGVVVSDLFGATGRYIMNLLATQEAELSADDIAAGAHGQLKQKINELCRALQGFFTDHHRYQLRLLLATVTELEHQSEQISQRVKELMADHYPVLSRLQEIPGVSEVAAASILSEVGATLDEFPRCAALTSWSGLCPGNNQSAGKRKSGRSPVRAHRLKTIMVEVAWSAIRKPGSYYKDKFQRLRARRGAKRAIVAIAHRLLKAVYYIIKHSQRFRDLGAEYLTHKHQASKLGSLKKQAKLLGYELTPLAA

SEQ ID NO: 343603 - protein, 379 aa, unidentified
MTMIGAERPESSTGVEVILGVDTHLDFHVAVALDHLGRRLGDSSVPTTPKGYERLLRWAEGFGPLRCAGVEGTSSYGAGLARHLRARGIEVLEVERPKHRRRSSRGNLQKKSDPSDAEAAARAVLAGEASGVPKSGDGEVEMIRALRAARRSAIKARTQAANQLQALRVTAPEQLRRRLRGLSTKELVCVAARFRLADDPRDVPTATKFALRSVARRYEVLSEEIAELEAHLDRLVAQAAPELVSLPGIGTENAATLLVVAGDNPQRLGSEASFASLCGVAPIEASSGKVVRHRLNRGGNREANRALYMTCLARMRRDRRTQEYVARRTQEGKSKREIIRCLKRYVAREVYRVLISCGVRSSPIGPQAEVHIASGSSAA

SEQ ID NO: 343604 - protein, 376 aa, unidentified
MNQGTTYVGMDVHKNDIAVCLLSGEGNEAQEWTVAHTKQSVNRLIRRLKRAGGSDVESAYEAGPCGYALRRQFEAAGVGCQVVAPSLVPVRPGDRIKTDRRDARKLAEMLRAGLLVEVHPPSEEEESLRDLCRCREDLKQNLMRARHRLGKMLLRRGLVYREGGNWTRRHREWLQKLDFEQEIDRFVFAEYLAGVEIVEARLSAVDQKLIEVSEAEPWAERIGWLRCFRGIDTVTAMTILAELHDFRRFHCPRQLMCYLGLVPREYSSGESQHRGGLTKAGNSHVRRVLVEAAWHYRHRPAVGVKLRQRRRGQPAAMIALADRAQQRLYGRYGRLVLGRGKPPTKAVAALARELAGFIWAALYLYPQQRGMEAEAK

SEQ ID NO: 343605 - protein, 456 aa, unidentified
MQQYYLGIDVSKGYADFVILDSKKQLIKENFQMDDTFVGHCHLYDRLHEFYINHPDSKIYAAVESTGGYENNWFNSLIKFQSSFNLETARLNPLGVNANSKAGLKRNVTDKISAQNVAEFLIAHPEKVSYQQQDYLASLRKQWGFIKMLTKQSTQLLNQIESLIYSANPELLVYCKDGMPDWILKLLLRYPTAANLSKAKASSVASIPYVSFARAKELVATAKQSVASSTDRITEQLIVATAKQILHLKKTIASQTKIMAKDCSLPEVDLLKTFSGINDLSSTGLMIEIQAVERFSSVKKFASFFGLHPVFKISGDGTSGFRMSKQGRKEPRRILFMVALTAIRSNPLIREIYQDRVQKGMEKMAAIGLCMHKILRIIYGMLKHNRAFDPEVDRKNREKMAKGHKQVRQDKNRRYQGFDPKAPISRRQKMKRKEWEQSHSDNNTKSGIIAPIPASA

SEQ ID NO: 343606 - protein, 426 aa, unidentified
MNAIGIDVSKGKSTVAVLRPFGEIVAKPFDVMHTSAELDELVKLILSLEGESKVVLESTGKYSEPVIKKLCEADIFVSVVNAKLIHDYSVDTIRRVKTDKVDSLKIAGFCLDKWAKLKRHEPVEQIRQTLKTYNRQLHEYNKVKVMLKNNLISLTDQVFPAINTLFSSPSRESDGHEKWVDFLARFWHVECVSKVSLSAFTQSYQKWCKKHGYNFLQAKADKIYTLAKDHFGILPNDDFTKILITQAISQLNNICETIAALKTEMNSIAATLPEYETVLAMHGVGKTLAPQLIAEIGDITRFPKRSSLTRFAGIEPPENQSGAYNQHSRRISKQGSPYLRKALFQVMRCVLQNKNPDEATWRFIDRKRAEGKPFKVYMIAGANKFLRIYYARVIDSLKSGNNAVTSEQDRAMQECNPSGYAGSQYR

SEQ ID NO: 343607 - protein, 346 aa, unidentified
MEKTNIELNAVATVGLDLAKHVFQVHAVDAAGRVVMSRALRRKDVLAFFERLPSCLIGIEACGSAHHWARELAKCGHDVRLMPPAYVKAYVRRQKNDAADAAAICEAVTRPSMRFVPVRSVENQAALMHHKVRELLVAQRTQMLNALRSHLAEIGIIAAQGPNNARALAVLIMESNDMIPAVVRSALLPVVRRLNELDEEIGESDRAILALARADDTARRLMTVPGIGPVTASALAASIQDISAFSGPREFAAFLGLTPRQSSSGGKERLGRVSKMGNRYLRKLLVVGAHAVLFHRKRCSDALRSWADRLMETKPFKLVAVATANKLARIAFALMRDDARYAGTPA

SEQ ID NO: 343608 - protein, 339 aa, unidentified
MTLYTGFDLHSNNNYLGIIDNYGKRIFKKKLHNQPEQILNTLNPYQHDIAGIVVESTYNWYWLVDLLMENGYKVHLANPSAITPYKGLKHCDDNHDAFWLAELLRLGILPEGYIYPKEQRPFRDLLRKRGHLLKTRSSLIISLQNIISRNCGHRINVNDVKRLKQDMVYPLLQDNEDLALSGKASKETIDFLTRKIRDIESAIEKKAMLTSNYRHLLSMPGVGKILGLTIQLESGPIERFPKAGNYVSYCRKVNSKWTSNGKQKGKGNKKNGNKYLCWAFSEAAELARRYDESVRSYFNRKMHRTNRMVAHGALSHKLAKAAYYIMKDGVPFDSAKLFS

SEQ ID NO: 343609 - protein, 379 aa, unidentified
MRHVCGLDVHKDSVFVCILNEKGVVFQEKFGVLTPELERMVGVIMEHGVTEVGMESTSVYWMPVWRVIDPYVEQKLVNPYFIRQLPGKKSDVKDAEWIATCILKGLVRGSYVPEERIQRLRQYDRRIFDLNDDIVHKLARLDAALQRCNIRLSNYVSTTDCKSYGDVVDAIARGETSPDALLRCVHGRIVNRHGADVIRSALTGVVTPVDVDVIRQLREEIELARRHRDECQRRMDGLCSEWFPEQYANLQTIPGVKARSATAIIAELGTDMSSFEDAAHLVSWAGLRPRNDESAGRIKARGITHGNKYLRKTLIECAWGASRTRGCFYSRFSHHQTVVRRKSRMKVQVAIARKMLSAIWFILHDGVAYRDFEGDANAA

SEQ ID NO: 343610 - protein, 408 aa, unidentified
MEVLYPRCAGLDVHKDIVVACARLVGDAGVTRDVETFETTTQGLFALNDWLTERGCTHVAMEATGVYWKPVWHVLEGHFELVLANAAHVRNVPGRKTDVNDAMWLADLLTHGLIRASFVPPMSIQELRDLTRTRKQLVREQGQHVQRIQKTLEDANVKLASVVSNIVGMSGRAILDAIVAGETDPEKLVALASGRLKASRKTLIEALRGNVTPHHRFLIKLHLDQIDAIGRAIAAVEKEAGSALEPFRARADLLTTIPGVSDTVAQCIVSEIGVDMSRFPSVGHAISWAGLCPRNDESAGKRRSTRVRKSGTWIKTILVQAAWAAARKKNSYLHAQFLRIKSRRGPKKAIIAVAASILTAAYYMLRDGTAYRDLGPQHFDRVERTKIAARLVRKLENLGYEVDVKKAA

SEQ ID NO: 343611 - protein, 396 aa, unidentified
MFGPIIAIDVSKDSSHAQLFESFKKPMGKPFVFDHDKQGFDLLSEKLKMLEEFTGEKVSVVLEYTGHYSIPVVRWCLQNDVKVYAISPLLSAKFRKKDLRGTKTDKKDCANIAGVYFSQDNLRVARPTDPLQELSRRYQRTNKRIVGLKCQFMKCLDQVFPMFEKKIGDPYADKSINVLINYSHPEKILKAGRGNLGKFIAKVTSHTEKVSEKYADELIRFAKDCVSGCSIDSCVTEELSEYGQAIIDLTEKCESIIARIKEIEGERQIESVRKVCNFKSSKLIVLILAEIGDISRFKAKENLVSYAGMDPVVYQSGEQTGKGLSITRKGNSLLRKYTYLAVCCIIREDPSSPITQYFQKKIKEGKPAKVARIACCVKLLRLIHASLTLQDNFKLV

SEQ ID NO: 343612 - protein, 349 aa, unidentified
MEAYAGRQFVGMDLHRRRSVLVRMTAEGEVLERVRIVNGVDGLAAVIARAGESPEVVLEATYGWYWAVDALREQGARVHLAHPLGVKAFEYRRVKNDERDATDLADLLRMGRLPEAWIAPPATRELRELVRHRAKLVGLRSHCKAEVHAVLAKCGVPVRMSDLFGVDGTALLDRLELAAPYAARIGSLRRIMDELDFEIDHFAGMVRGRLATDPGYVAVQQIPGIGPTLAAVLVAEIGDIDRFARPEQLTCWAGLTPTHHESDAHVHRGRITKQGSRLVRWAVVESVQVLPDTTVVGQFRDRVAARRGHNIGVVAAGRRQLEYVYYALRDHHVRALHNHHANPPARTAA

SEQ ID NO: 343613 - protein, 404 aa, unidentified
MAAVMIGVDPHKASPTAVAISAAEEPLGQLRVRACVAQAERLLAWAQAWPQRTWAVEGAGGTGHLLAQQLVSAGERVLDVQPKLGARVRLLAAGNVNKNDPNDARSVAVAALRSAGIREVRPDDHAAVLKVWSKRYRDLGRNRTQAACRLHAVLAELVPGGVPKAVTTARAARVLKALRPEGAVETARWELAAELLDDLRRIDARLREARKKLAAAIAAAGTCLTGLFRVGPVIAAAVIGEVRDVSRFGSRDRFAAYNGTAPIEVSSGQRKVHRLSRRGNRRLNHAIHIVAITQVGHRHSQGRAYYDKKLAEGKTPKEALRALKRQVSNAIFGCLQADARQAAARFGNPGGQRGNGSVASAAGLHPRHRLFGQATPGPAHHTTTAAGNPAPSHSRNRRKTGRTP

SEQ ID NO: 343614 - protein, 338 aa, unidentified
MKIYVGIDLHSNNNFVAFINEENKVVYKKRLPNELVVLLEALKPYQNCIEGIVVESTYNWYWLADGLQEAGYKVHLANVTANVQYSGIKCTGDESDAMWLANLLRLNILSTGHIYPKEKRGLRELLRKRLILVRQQTACLLSIKGLITRYENVCATAREIKSSSNSKILDWIKDENVKFAAQSQLKILNCIMEQINLLEKKIQKEIKQNPLFDLLKSIPGIGVILAMTILLETGEISRFKSVGNYSSYCRCVESKRVSNEKKKGVNNRKNGNAYLCWAFIEASNCAINHYPEIKKYYQRKLNKSKRVVALKTIANKLSKACYFILRDKVEFDMKKLFI

SEQ ID NO: 343615 - protein, 355 aa, unidentified
MKSKKSENMEDIAVIGVDIGKDTFHLVGFDHAGQRVLRKQIKRLALMATFEKLPRCVVGMEACMSAHFVSRTLRELGFEPRIIPAIYVKPFNKGQKNDYNDAEAIAEAAMRPNLRTVTEKSQDQLDLQAMHRVRSSLVARRTATINQIRAFLVEQGITVRAGRHRLQSSFEAILENRRDEISSRMRSVLMGLYGDWLWVDERIKSISSEIEEISRSEENSANIMTIPGIGPLISTAIVAAIGKGEMFDRGRDFAAWVGLVPRQFSTGGRTILGRISKRGNGYLRMLLVQAANVILMRPHRWDALGLGPWLRGVIGRMPHNKAAVALANKLARTAWSVLRHGSKYAVQRDEALDAI

SEQ ID NO: 343616 - protein, 323 aa, unidentified
MKHILGIDVSKDTLDLVLDQRFHRKVFNDIRGFQQIHQWLVSQHVDRVHACLEATGQYGDGVAEYLYEMKHFVSVVNPARIKRYGESKLHRSKNDKADAALIAEFCMKEKPACWKPISNNMKHMRALVRRLSDLQTSRQQEQNRFGSGEKNEWVLSDLQSHIHYLDDCIHNTTKAIHQFIDQNTSLKSQRDLLISIPGIGKLTAARLLAEIGDISSFENAPQLAAFAGLNPRGFSSGSSVHKKTKISKQGRAFLRCILFMPAIVAQKHNPVIRQFCNRLADRNLPKMAIVVASMRKLLHLCFGVLKNQVPFDPTYGDQFNFAT

SEQ ID NO: 343617 - protein, 344 aa, unidentified
MDHFAGLDVSVKETSVCIVDDTGRIVREVKVASEPEALLTALKNPSYHFKRIGLEAGPLSQWLFSALTEAELPVVCVETRHMQAVLKAQINKTDRNDARGIAQMMRVGLYRPVHVKTLRSQKLRMMLTHRKLLQSKAIAIENDLRGTLRNFGLKVGIAGKTKFEARIKELVENLPDLAELVEPMLVVRRTLREQIVILHRRLLAIVRDDEVCRRLMTTPGVGPVVALTYRATVDVPARFRKSKSVGAVFGLTCSKYQSGEIDWSGRISRCGDEMMRTMLYEAAQVMLTRTNKWSWLKAWAMQIARRRGMKKAIVALARRLAVILHRIWVDGTEFRWTREQAVAA

SEQ ID NO: 343618 - protein, 407 aa, unidentified
MRLYIGIDWSQSKHDICYLNPAGSTVAQHVIPHSQEGFWQIENIRQKLGVGVEDCFLGLETTHNILLDFLWEQGYAQIYILHPSKVRSSRGRFRQSAARSDPGDALLIADILRTDHARMQTWQPDHLVTRQIRSKISFVSYLTRQIVSLTNRQRALLLRYYPVAADLFTTLKAPIAQHFIRAFPTPHDAASLDLDQFRAFARQHHYVHYRKLPGMVAKLHQPYPQAAPEIILACQQEAKMLAAILLEMIASKKATLREIKALFAQHPDREIYASLPGTGEYLQPALLAKFGDHRDRFPSPSRVQTLAGTCPVTISSGRRKRVQFRKSCDHDFRHIVQQWARISLRHSVWANVYYSRVRPHCESESHAYRCLANRWLAVLWRLWQDRMPYDEAYHLRQRALRSQPRAA

SEQ ID NO: 343619 - protein, 358 aa, unidentified
MINQVSKVKDFTGQNIFIGMDVHFKSWKISIFSEEFELKTFSQDPDIEQLSGYLNKHYPGANYKLAYEAGFCGFWMQRAFAAKNIECAVVHPGDVPSSDKDKKRKTDKVDSRKIARGLRSGDLTSVFVPDEQQEADRQLVRSRAKITKDITVVKNRIKAFLKIKGIEVPDSFSERSWSREFIGWLANIEFGALSNRIALTAYVDELNFLVDKQKQLLKAIADLAKTDHYKNNMRLLKTIPSIGSLTAMVILTEIGDINRFQKPEHLFSYCGITPNCHDSGERESIRTMSKRGNATLKNMLIECSWVAIKKDPALLLYYKQLLPKMKPAKAIIKVARKLANRIRYVLKQQKEYEIGIIE

SEQ ID NO: 343620 - protein, 448 aa, unidentified
MKKQTTTRESAINMQLANPNAAGIDVGDTIHAVAVPEGRDTLPVRSFGTMTCDLEAIAAWLLECGVDTVAMESTGVYWRPLFNLLTQHGLEVYLVNAKQVKNVSGRKNDEDDARWIQKLHSCGLLRSSYLPDDQQEALRTLVRHRRTLTQDRGRCVLRMQKALELMNVKVHTLLRDITGKSGLAIIEAILSGERTAENFLTCVHFKVKADRATILKSLQGNWRAEQLYLLEDCYMSYKYLTERIALCDVAIERQLEHYYREIRPEAAPECEAVSAKRANRNKPSFNTCSYLKKVLGVDVMAIYGISDIAALEILSETGTDMSKWETAKHFASWLNLCPNNKISGGKLISSTLMKKKPNPASQAFRNAANAVQRSDNWLGDYFRRMKAKGGNKYATVATANKIATIYYKMVSCQQEFSPVEPTAYQKKYKQAKIIYLERRLFELKMEAA

SEQ ID NO: 343621 - protein, 418 aa, unidentified
MEIIYERVAGIDVGKKIIAVAVRTPGARAGKRRQELRKFNTYYRTLTEMVAWLVAEGVTHVTMEATGVYWRPVFHALCEAQRPLEVLLVNARHVKNVPGRKSDALDAVGLAKLTECGLLRGSFIPPPQIAAIRELTRYRKKLIEARTSELQRLAKVLEDGGIKIDSVASALTTLSARDMIEALINGERDPAVLANLARGRMRSKIPDLRLACAGRFSVQHTLMCTLHLEHIDHLTDMIARLDTRIDEASLPFAQPIELLATIPGISERAAQVIISEIGVDMARFPTAAHLASWAGLCPGNNESAGKHRSGRTRKGSKELRALLTECAWSAGRTSTYLGAQFRRFHRRFGKKGGQKAATATGHTMIVIIWHVLAETTAYRELGADYLTTRIDSPDARKRRLIRELEALGHKVTIEPAAA

SEQ ID NO: 343622 - protein, 366 aa, unidentified
MSSVTPAAGPIHLGMDTPENTIVVGILMPGDEVPVIDRIWNEEGSVRHLVSRLGDPAALRACYEAGPCGFELHRLLASMGVACDVVAPSLIPRRAGDRVKTDRRDASRLARLHRAGELTPVRVPSAAEEAVRDLVRVRAALLADRKRAQQRLTAMLLRHGRVWRSGSSWTQAHEQQLAGQRSGEPALAAALAHYRAGLDTRRAELDAIEAELAPWAGREPLAGTVARLGCYRGIAELHSLALAAEVVDWHRFPSARAFMGFTGLVPGEYSSGDKTRRGSITKAGSEPVRTALVEAAWAYRFKPAIGVTLRRRQRDAEPGTLARSWKAQRHLHARYKTMTARGKPQGVAVTAVARELAGFVWAEMTS

SEQ ID NO: 343623 - protein, 361 aa, unidentified
MLKAIKITQKRIEEQILFIGLDVHYKQWNISVIGQEQVHIKGQSVAPNSKKLVEFIKSKFECNQIKLAYEAGFCGFYIVRELIAEGIDAIVINPADVPTSDKDGRYKTDERDSLKIAMSLRANMLDAIYVPELEDEQNQGLFRRRMDLVKKQTRIKNQIKSLLKKYGIKPEEKLDKIKVWSAEYLYWLNEVVKQNNLLKNQLESMLRELDFIKKDKGIVEAQLAELAQSERYKSKYDSLIKIPGIGKIIAMSIILELIDMNRFKRFSNLASYVGIIPTEHSSGEKRHLGRMTRRSKAQFRTLLIEAAWITVSKDEVFKQFYKTLLLRMKPQEAIIRCAKKLLRRIYFILITDKEYEINHAA

SEQ ID NO: 343624 - protein, 370 aa, unidentified
MPQSSTLYVGLDVHKDSIAVAYVTKDHDAHVISFGTIGTRHADIDQLTRKLQSKAKRLVFVYEAGPCGYWLYRYLHKKGYDCWVVAPSLIPKKAGDRVKTDRRDAMQLARLMRSGDLTPVYVPKVEDEAIRDLCHAREDAIQDLKAAKFRLKAFLLRHDIRYTGQATWNPAHLRWLSEVVCPTPAQQIVFQEYVRAVNEHTERLQRLEQELHEHVTTWRLHPVVAALQALRGVQFTVAVTTVAELGDLTRFDNPSQLMAYLGLTPSESSSGPRRQQGAITKTGNSHARRALVEGAWAYRYPAKVSRHLQLRLETQPKVIQEISWKAQVRLCKRYRQLLARGKNVNQVVVAIARELIGFMWAIAQEVPVTP

SEQ ID NO: 343625 - protein, 344 aa, unidentified
MKFTRCGLDIAKQVFQVHGVNEHGVVKVRKTLPRAKVLEFFAQLLPCLIGIEACGSAHYWARELSKLGHTVKLMATQYVAAYRKRGKNDANDAEAICEAVGRPNMRFVAIKSEEQQAVLMVHRARTLTMANRVAQVNQIRGLLAEFGVVVPTGVSRLRRELPGILQDAENGLPALAREVLSGLLEQLREADGRIGAYDRQIRALAEASEPARRLMRVESIGPQTATALVATVGDPHVFKNGRGFAAWLGITPRQHSSGDKKRLGQITRQGDSYLRTLLVHGARAYLRVVDKKTDAKSDWARRLKQRRHVNVAAVALAAKHARIAWAILAHGTEYRPAGPQTAVA

SEQ ID NO: 343626 - protein, 453 aa, unidentified
MDTLPSDSSCTSSPGLSAADRFHALTHFGAVDWARGHHDLCVVDGAGKIVLEMSIDDTPEEWAGVRARITALKTSDASPAVVGFAIETSSGPAVERLLEAGYALFPLNPKAAGRYRDRKAPSGSKSDRLDAFCFADALRTDGHAWRELHPQDPLTCELRLLCRDEVSLIAQRTALVNQLRAALVEFYPTALEAFDDWTSLGAWEFIIAFPTPHHLASGGKRRWEKFLHTHGSTELAEVKLYRPETCAKRMELFQIAGRSASPNPAVTAAKSLLAVMLAKQLRLLQSQLDEYRARINELFGKHPDRDLFGSLPGAGEKLAPRLLAELGADRQVFDSPEGLQCLAGAAPVTQKSGQTRRVIFRRACNTMLRSTIHRWADRSRAKCSWAEAYYQQKRKEGHGHANALRCLGIRWLKILWKMWQEHRCYDAERHMRNQTRHGSWVLSLIPQPTMQLN

SEQ ID NO: 343627 - protein, 411 aa, unidentified
MHNRQNYLYVGVDLHKEHHTAVMINCWQEKLGEIQFDNKPSAFSKFLLEVETYVRDGLSVVFGLEDVGGYGRALAKYLVDHEQVVKEVNPALSFLERKSQVMIHKNDSWDAECVARILINKFNQLPDAKPNDLLWSIQQLVSRRNALVKAQSALKNQLHIQLNHHYPSYKKFFSELDGKTALAFWQQYPSPSCLEGANIKQLTAFLLDVSNNTCSVKKASDILKLVKEDGHTMKEYQDTRDFLVRSIVREIEFKKKEMKYIEKELKQLVNLLDYQLETMPGIELVTASALIAEIGDVRRFPNANKLARFAGIAPVYFGSGGKGKTYKSKQGNRALHALFYNLAVQQVQVAKGSKMPRNPVFHAYYQKKLKEGKTKGQALVCIMRRLVNIVYGMLKYKTAYELPIVQEKEVV

SEQ ID NO: 343628 - protein, 345 aa, unidentified
MNESYGGHQFVGMDLHRRRSVLVRIDESGEVLGCDRILNDRDRLAAVMVQAGEHPDVVLEATYGWYWAADLLAELGATVHLAHPLGMKQWSFRRVKNDFLDSRDLADTYRMGRLPEAWIAPPQTRELRELVRHRAKLVHLRTSLRCQVHAVLAGQGVQISVSDLFGVKGLKLLEELVLPEAYRYRIDSLCRLITVFDVEVDAAARLAGERLKHDPGYAAVQTIPGVGPILGAVFVAEIGDVSRFARPEQLASWAGLTPKHYESDTTVRRGHITKQGSRLVRWAAVEAVQRCPEGSRLWRVRQQVESRRGRNIAIVAADRQLVESVFYALRDHHVRRPLTRRAVAA

SEQ ID NO: 343629 - protein, 347 aa, unidentified
MAHFVGLDVSVQETAVCVVDEIGEVVLEQKVPTEPDDIVALLTSIGEACGRVGIEAGPLSQWLVNGLAAAELPVVCVETRHMQALLKGQQINKSDRNDARGIAQMMRAGLFKPVHVKTLIAQEQRMLLTSRKLLQRKLLDIECDLRGTLRNFGLKVGTVSTRGYEARIRELVEDFPKLAAIVEPLLTVRRVMRHQFAVLHKMLLDTVRHDPICQHLMTAPGVGAVVALTYRATIDQPQRFVHSRAVGAHVGLTPKRYQSGEIDYDGRVSKCGDTMLRTMLYEAAQSLLTHSRKWSWLKAWGMRVAQRRGMRRAIVAVARRLAVILHRMWVDGTEFRWSNGPGVTEAA

SEQ ID NO: 343630 - protein, 288 aa, unidentified
MEESTKVHVGLDVHKDSITIGAAEPGRAPARVIGKTAHDVNKLLKVLVKLGRPEQLHIVYEAGPTGYGLQRALQARGYLCEVIAPSQMPRRPGDRVKTDGRDCVQLAECSRAGQLRAVWVPDPADEAIRDLSRAREDAVNSRTKVRQQLKGFLLRHGVRYTGKTSWTKAFYRWLATLSFGAGASQTAFTEYWLAVQAADDRVQRLTQALQPSIAGWRFEPVVAALQALRGIDVISAIGLVAEIGDLSRFDHPRKLMGYLGLVPSEHSSGERVSAAASPRPAIRTPADC

SEQ ID NO: 343631 - protein, 343 aa, unidentified
MEYYVGLDVSLKVTAICIVDRRGMIKCEATVRSDPEAIAGFVRSKVTNVVRIGFESGATSTWLWTELDRMGLPAICIDARHAKAALKMQINKSDRNDAAGIARIMQTGWYREVRVKNLDSHATKALLVGRALLVKIKRDLENQIRGLLKNLGLVIGRGRRGPFVTRVRELIEDKPHLQAVIEPLLRARETVEQQVGDLDRKIMRLARRDEQARRFMTTPGVGPITALCYLATIDDPARFNKSRNVGAYVGLTSRRYASGEIDWTGRISKCGDKLLRTYLFEAANVLLTRNAKWSSLKAWGMRIAKRSNMRKAKVAVARKLAVILHRMWIEGTEFRCPAREAVA

SEQ ID NO: 343632 - protein, 408 aa, unidentified
MEVVYRCCCGIDVHKKIIVACLDQGGEQSLREFGTTTSEIKSLATWLTESGCEMIAMESTGVFWKPLYNLFELMDLDAMVVNAAHMKALPGRKTDVKDAEWIADLLRHGLLKASYIPSREQRELREITRYRKSLTEERCRETNRLQKILEGANIKLDSVVKDINGKSARKLLEKIIENDVPTSEEEVSKVVHGRMRSKLGQLVTAIEGITTPLQRKLLAQVIDHIDDLNRRIADLDRLVQDYMDEYAAAIAALCDIPGIARRSAEVILAEIGLDMSRFPSAAHLCSWAGVCPGNCQSAGRRKHGKTTKGNKPLKTILTQCAKSARSVKGSYFSAQYQRIAARRGKNRATLAVAHSMLIAIYHMLKNSVPFRDLGSDYYDSFNRDRKIHSYLKRLKALGWEPDVLPGSA

SEQ ID NO: 343633 - protein, 329 aa, unidentified
MMSLGIDVSKAKLHTALELNEQERVKIKTKTVPNTAAGVEALIDWLGRQGARPEAVHVVLEATGPYHETAAELLHGRGLTVSIVNPAQARDFARGLAVRTKTDAVDAKVLARFGALLKPAPWTPPSPEVRFLRALLARQRALIEDLRRERNRLEKVEATHTPALVRDSVRESIAFLEAALAKLQQQIDDHLDGHPQLREDVDLLTSIPAVGLKVAQRFVALLQSRPFTSAQQFAAYLGLVPVERQSGTSVQGRARLSKAGPAHARATLYMAAVTAIRYNPHVKDLYERLLARGKPKMVALGAAMRKLAHICFGVFKNRRPYQPDYASAA

SEQ ID NO: 343634 - protein, 465 aa, unidentified
MAKKRNNKSKDSKRHRQSLKTIQPNSAGIDLGSREHWVAVPPSKDGTSNVERFGTTTPELLRLADWLKEQQIVTVAMESTGVYWIPIFEILDSRGFEVLLANARQISHVPGRKTDILDCQWLQLLHACGLVRGAFRPSDNICQLRALIRERNKMVQQRSDWIRRMQKNLDQMNVCVHHAVSDITGVTGMAIIRAIVDGERDPHTLARLRDSRCRKSEKQIAEELTGNWRPEHLFNLRQALKVYDQLCAVITDYDSEILTYIAMLQPQDATDTSAPPPASKTKAKNISKRGQEPLRQALYRLSGLDLTSIDGIAVDTATVIVSELGLDFTAFPDESHFVSYLRLAPNLSISAGKKVPSKFKATTCTRVSTALRMAALTLRNSNTALGAFYRRVSWRKGASVAVFATARKLAQLIYRLVRYGQAYVDAGAQAYETRYNQRRLISYTKALNKMGYNVEPLSTGEAIPT

SEQ ID NO: 343635 - protein, 318 aa, unidentified
MNQSPSPFVGIDVSKDRLDVAVLPSGESWTAANQDEDIQSLVKQIRSLKPELIVLEATARLELPLAVALAAKGLPVAMVNPRQVREFARASNILAKTDRIDAQVLARFGEKMRPEVRPLKDEETRELTALMARRRQLVGMLVAEKNRLAGAPKSVHRDIRTHLTWLKKRLGDIDDRLADKVKNSPMWHEKDALLQSVPGVGPVLSTSLMADLPELGTLNRRQIAALVGVAPFNRDSGSFRGKRCVWGGRRHLRSSLYMATLAATRSNPVIRTFYHRLCEAGKPPKVALTACMRKLLTILNAIVKSQTPWQAPFASFTT

SEQ ID NO: 343636 - protein, 400 aa, unidentified
MSQMWAGVDVGKEHHWVVVVDDTGTVKLSRKLVNDEQPIRALVAEIDAMAERVSWTVDLTTVYASLLLTVLADAGKSVRYLAGRAVWQASGTYRGGEAKTDAKDARVIADQSRMRGTDLPVLHPHDDLITELRMLTAHRADLVADRTRTINRLRQQLVAVCPALERVAKLAQDRGWVVLLSRYQRPKAIRQSGLSRITKTLTEAGVRNASTIAEAAVTAVKTQTVRLPGEEVAAALVAELAQGVISLDDRIKATDADIEGRFRRHRLAEVITSIPGIGFRLGAEFLAAVGDPTLIGSADQLAAWAGLAPVARDSGKRTGRLHTPQRYSRRLRRVMYMSALTAIRCDPHSRTYYQRKRDEGKRPIQATICLARRRTNVLYALIRDNRTWQPDSPHITKSAA

SEQ ID NO: 343637 - protein, 362 aa, unidentified
MNHIGIDVGKRKCRVALKDDKGKILDEFFFGNNSDGILELIKRIYDHGTKKCNAVLESTGNMWMRIHDTLEDNGIDTILANPYKTKIIAQAKIKSDKLDARILSDLLRTGLIYESYVPVKEVREKRSLVRHRIVLSRTKTKLANKIHAILDKYEYKTELTDIFGRSGINWLKSLPVSPIDKIILNTTLASIESIDNQIEIVSKEIARYAWQDSQDVKILLSITGIDIFSAMLISTEIVDIQRFSTPWKLVSYAGLSPSTRESSGKIKTGKITKQGSPLLRWILVQCTLSAIRYDHHMRTFYERIKSRKGHGKAIVATAKELLVIIWYMLTRQQLYRFMNRIRYEEKLERLKKIGSQERQVVS

SEQ ID NO: 343638 - protein, 326 aa, unidentified
MKNFIIGIDVSKDTLDFCMLERDSRRKLQQGVIANKEREILTWLKNIDKKNVVFALEHTGHYGALLSWLLEEQLFTYYLINPLDLQRSLGLQRGKSDIVDAYRIADYIITSHHKLSPFNLPCESLRKLKALMEARERYVKMSVQIQNSLKAEMILSEKVALKQLIKLEQKQLKSIKNTIQDLEKQMMEIVKSSQDLNTTNTKISSVIGVGTITSIKCIIETDNFTRFTDARKFNCHCGLAPFPYQSGSSVKGRTKTHFLRDKTLKSILFKAAGSAIQHDPQLKKYYEQKLEKGKHKLTALNAVANKIVLRIFAVAKRNEPFVKLIA

SEQ ID NO: 343639 - protein, 408 aa, unidentified
MNAVGIDVSKGKSMVAALRPMGEVALLPQEFLHTEVGLEQMAYAIIALGEDTRVIMEATGRYHDPVAAALHEYGIYVCVLNPLFIKQSGGGSIRKVKTDKADAMKIAKYGLDNWVDLREYTPMDTVRQQLKLCSRQYNLYMKTVVSLQNNLISLTDKTFPGVNELFSSPERADGHQKWVDFVMTFYHCDCICRVSENAFAERYQKWCKRKGYHFSAEKAQDVYLGSCGHFTTLPKNDNTKLLITTAAQQLLAGKMTLAALRTEMTRLAKQLPEYDIVRAMYGVGETTAVQLMAEIGDVRRFPRRSSIVGFAGVDPAVDQSGKHSAKSVPTTKRGSPHLRKTLYQIVCTYLKKSPVDEPVYQFLDKKRSEGKPYFVYMTAAQNKFLRIYYARVKECLEAFDAQQDTSQR

SEQ ID NO: 343640 - protein, 319 aa, unidentified
MTSSTKYIGMDVHKESISIAVRNAAGKIVMESLIETKASMILQFIDGLRGDLHVTFEEGTSAAWLYDLLKPHVTKLVVCDPRKNKSMREGNQNDKIDARRLAELLRLNHLNPVYHGEHGLRTLKELVRSYLTVTRDLARVMSRVKAIYRSWAIPCSGKQVYAQCHRAEWLAKITEPGVHRRAEFYYQQLDALRGLRREVRRDLLAESKKHKAWKRLCQIPAIGPIRAAVLLGILQTPHRFRTKRQLWNYGGLAIEMHSSADHRSVDGELQRSRKNVLVRGLNRNCNHDLKNLFKGGRRRGFPASPAPSRSSTLLWWPRA

SEQ ID NO: 343641 - protein, 344 aa, unidentified
MDQISRIGMDTPKHIFPLHRVNAAEAPVLRKKLRRKEMVTFFQKLAPTVIGIEACSASHQWARLLQSFGHSVKLIAPQLVKAYVKRGKNDAADAEALCEAMSRPTMRFVPVKTAEQQAALMLVGVRDRLIRNRTQLSNAIRGHAAEFGLTAAKGMAHLVPLLDHIKADENLPALARELFAMQAEEYARLQAQIDEVDAKLTAWHRADECSRRLAKIPSIGPIGAVLLRMKTPDPTQFQSGRQFAAWIGLTPKDHSTAGKVRLGVITRAGDEGLRSVLVVGATAVIKQVLRGGKTSAWLVELLKRKSPKLAAVALANKTARIAWKMMLTEEPYTAKSAAALAGAR

SEQ ID NO: 343642 - protein, 374 aa, unidentified
MENTITYVAMDTHKKQHKIALHYPCQEEIVEFAISNTVRDIKKMVNKIKKQAPGEVEFCYEAGVCGFTLKRRIEQFDCRCIVIAPSLVPRKPGERVKTDRRDAKKLLMMFKAGLLTEVHAPNEQQEAARELTRLRETAKDNLKRIRHQLLKLLSRHGYVYRDGHHWTQKHITWLRTIEFTEAMLTSVFENYFNEMIYCIGRLEALDKEVELLAGSEEYKEIVGLLRCLHGIETLTAITVLAEIFEFGRFESSRHLMSYLGLTPSEDSSGDKQKKGSITKTGNKRVRRLLNETAWHYRHRYVPSKALKRRRKGQPQWAIDIADAAGRRLSKRHRHLVNNGKMPCKANIAVARELAGFIWFVVTQYHARKNTKGVA

SEQ ID NO: 343643 - protein, 421 aa, unidentified
MNKNDDSRLAGFRQLKREIRGSTHHVVVGIDVAKERHHAFFGTPSGKTLLHRLVFDNSKEGFEKLCFQAEALKTQKGLTDLVFSVEPTADYHKPLGEYLIGKGHSVVLVAGTAVKKNRELLDGRWDKNDTKDAANIADLITQGKCLFYDLPSMDLRELRSLLSLKRRLRKSEQGYKVRIRNHLIAQYFPEMDDYFAYIEGPDIVRRCLDPKKLAGLEFQEFARMVPSGNEKQKERLGEIYAKASSSIGCSAHPSVGFEASTLLDGLKGLRLTIRETDKRIAEVCMRFPEYPFLLSIPGFGPDVSAQVLGAIGNPSRFENHRQVLKMAGLDLSADRSGKRTATTPVISKRGKADLRYGLYHSAVVASTRNPHFIGYFTDKLKGREKEKGITTKMRTKLAAKLLVIAWTLMKKKEVFDPDRMK

SEQ ID NO: 343644 - protein, 477 aa, unidentified
MRLPSPTIYLEAKMTQSPRRPSRPLRRTTLPRELQHVNLNAAGVDIGAEAHFAAVPAGRDPQGRDVRQFGAFTADLYALADWLTACRIQTVAMESTGVYWIPLFQVLEARGFEVKLVNPRHVKNVPGRKTDVLDCQWLQQLHTYGLLQASFRPEDQICVLRSYLRQREMLARYASHHIQHMQKALEQMNLKLHHVVSDITGVTGMRILRAILAGERDPYRLAQFRDHRCKNDEATIALQGDWRPEHLFALRQALELFDFYRQQIAACDTHIEDYLSTFQDRRAGQPLDKPTHRRSRQKNQPAFDVRSHLFRISGVDLTAIQGIDAQTALKLIAEIGLDMSRWPSDKHFASWLALAPGSNISGGKRLSGRTKPYPNRPAAALRLAAYGLQNSHSALGAFLRRKKAHLGAPKAITATAHKLARLVYTMLKNGSQYVELGQEECERRYRDRLICNLKRKARALGYDLLPRDAPYPPSAPQ

SEQ ID NO: 343645 - protein, 349 aa, unidentified
MSESYEGRQIVGIDLHRRRSVLVRMTETGERLEAVRISNDPEYLREVMTRAGEAPEVVLEACYGWYWAADTLAELGATVHLAHPLGVKMFSYRRVKNDERDAADLADLLRMGRLPEAWIAPPATRELRGWVRHRAKLVGLRSNLKCQVHGILAGAGITVPMSDLFGASGQHLLATAELTTESRSRIDSLQRMITALDFEVELFAKLVAGRLRTHPGYQAIQLIPGVGPILAAVFVAEIGDITRFRRPEQLASWAGLTPKHHESDTTVHRGRITKQGSRLVRWAAIEAVQRLPGHTRIGQVRDRVAARRGRNIGVVAAARELTELVFYGLRDHRVHALAVHSPARTPLPA

SEQ ID NO: 343646 - protein, 386 aa, unidentified
MQKLNDLSRSLTALEPDGTLIAVIEMSLSSWLVAGIVPGVERQPLKKLAVDESALLKLLYRWREEAEKAGRRIERIVVAFEAGRDGFWLARWLKACGIETYVIHASSIAVSREHRRAKTDRLDTELLKRSFLGWLRGERDHCKMVAIPTIKDEDAKRPNRERDSLIREQSRIVNRMKAAFVRLGIRGFNPKLKRAAGRLDGLRTPEGEPIPPNTSAELRRDMERRRLVSNQIRQIEEARLERIEQAPSDGPHAMVRLLARVIGVGIETADMLVHEVLSRNMRDRRAVARYAGLTGSPDESGRKRREKGLARSGNARVRRGMIQLAWRFLLHQKDSALTRWFRARTENARGTRKPMIVALARKLLIALWRLVREGVVPDGVVLRPAQ

SEQ ID NO: 343647 - protein, 353 aa, unidentified
MAQPVRALVEGVDEFIGIDHHKKRCQVMVKDRQGHVLRRGNIPTQRQALERFLGERNGAVRMAVFEAGPRYRPLYRWLVGLADEVVMANPGRLKIISETAYKDDEIDAEKLADFGMLGMVPEAYVCGDEAWDHRQWLRQRAALVKMQTSVKNRVHALVDQHPDALPARPEATDLFGSLGRAWLGEVALPEADRKRLDQLLEVYEFLHGQVRRSDGGVRRMVKADARCGYLATIPGIGDFFAALVMAEVDDIRRFPTSKDFVSYTGLVPGRDRSDEVDKPRRIHKRGSKWLRWALVEAAVPATRSNLALKNLYDRVCRKKGPLAGPNVAKVAVARKLAEIVYRILVEERPYEVR

SEQ ID NO: 343648 - protein, 412 aa, unidentified
MQRMTDVTATVHAGEPAWTVGIDLGRRAAHEAVLRAPDGSERRTRFAHSRDGIDGFVGELSDLRGRVLVIIEPTATRWQALVEELSGQGIEVRQVNAATVAKLRGARDITGAKSDRVDARTLAGALDYSHLVRPGSPALSCAHALCLERLRLRRERRRLRGAVKVCLDTIWPEFLQTFRGGERGVTARAVIAVTGGDPARARRLGAQELERRVRAAAPGRKIGHTKLKQLTEKTSRPAGYRAARAAYAARLQRLMRRRALVEGQLDALEEELLRLYPQLPGAQRLRSLPGLTPLHRVLLLAAAGDVRRLRSPRALGKLGGCAPIARDSGKSTPQRKISERCRYQLRDAAFHAARHIIKACPAFRALYHALRGRLTATQAVIACANRLLRVIWRMVNSDIDYNPAKVAPALSR

SEQ ID NO: 343649 - protein, 348 aa, unidentified
MRPVDVRPDYQLFVGADIAAASVTVAWQAPGAAVSRPITIEQTPAGFAALRQRLLATGEAPATILVVMEATGSYWLALAQALAAHGFAVSVINPLQAHHFAKALLRRAKTDAIDAQTLAQLAALLQPAPWTPPPAIYEELRQRLTQRDALLALRQQVRNQRHALLHGPAVVPSVQARMEDLIDTLTAQIAAVEAELAAVVDQDAAWAAAIRRLQSIPGIGRLTAAWLVVSTLNFTLCTTAEQAAAYAGLVPLPRESGTSVRGRPTIGRGGNGRLRTALYMATLSAAQHNPIIKPFYDRLRAVGKPKKVARCAAARKLLHLAWAVGTTQRPFDPGYQQQQHAPVPAQAA

SEQ ID NO: 343650 - protein, 380 aa, unidentified
MKKIRFIGLDVHAETISVAVAEPGRNGEVRSLGSIPNRAESVRKLVKKLGSVDQIQACYEAGPTGYVLYWQLTEMGVKCEVVAPTLIPVKAGDRVKTDRKDAEKLARSYRAGDLTPVWVPDAAHEALRDLVRARLAAKRDQLRARNRLSKFLLRHGRRPASKMSAWTAAYLNWVKNGVHFDQPAQEATLADYLHEVEHAQDRIARLEKAIDNSIETMPEKMRAVVDALQSLRGIAKISAVTIVAELGEVSRFNTPRQLMGYSGAVSSEHSSGERMRRGGITKTGNAHLRRIVVEAAWAYRHRPCIGAGLKTRQKTASQEVKDIAWKAQHRLHQRYIRLMAKGKIKQKAVTAVARELLGFIWAIAVEVEQKRNSSQQKQAA

SEQ ID NO: 343651 - protein, 352 aa, unidentified
MSTPPRCSNLEESDRGRFIGVDLHRNCFTVCLIAENGREYISEYHLEEIDRFLGRLRETDEVAVEVTGNTRLFYDLVAPHVARVVVVNPSEFRVIRQSTKKTDKHDARALALFLSKNLLPEVRMKDKQHAELASLTQTRDALVKQRTALKNKVNNLLSSRGVNLKREALTSEKGLRAVLGMKFAPLMEFELEVLVEQIRAINTSVAKLESTIKQEGVKLPGHKNLKSIKGIGDLGATILLTVIGDVNDFANEGKLAAYFGIVPRVNNSNQTERSGRITKRGSKLGRTTLVQCALIAKRYSPYLARFYERIKTRRGTGKAIIALAKKFLGIIYNTLKENWVFVDFPNFELATE

SEQ ID NO: 343652 - protein, 317 aa, unidentified
MNRQDNQNEINIGVDTGKTQLDIYIRPVGVYFTVSNDEVGIKQAISKFKRYPIERLVIEATGRYEHPFVLACAEAKIPFVIANPVNIKRFAGAIGRRAKTDKLDAQLIAHYSENIKPPLSTLKPEQMRLMSDLLARRRQLIEIQTMEKNRLQIMPKEIASSIKPVLTAIKNQLEKVEEKLLKLIDTCEEYKEKNDIIQSMPGIGNIVAFNLLSDMPELGYVNNKQAASLIGVAPFNRESGSYKGKRMIRGGRSQIRTVMYMAMMSAIQCNPKFKAIYQRLVASGKPKKVAIIACIRKMIVVLNSMVREGVMWNPKMI

SEQ ID NO: 343653 - protein, 426 aa, unidentified
MQYALPLVLPDVPAGGVCAGIDWATADHAACVVDLAGRVTDRFSAAHDKAGITTLITRLRRNKVTEVAIERGDGPLVDALLGAGLTVVVITSRQVRNLRSRFGAAGAKDDRFDAFVLADTLRTDRARLRPLVPDTPATISLRMAVRARRDLVRHRVAVCNQLRAHLAVAFPAGITLFHDLDSPISLAFLARFGSQDAAAELDEQAIGAWLATIAVRGRPAPASELHARLHAAPPGTTGVDGAAQAGVTAALTATLTALSAQIKALQAQISGQLAAHPDAHIFTSLPRPGTVRAARLLAEIGDCRSRFPDPESLAGLAGVAPVTRRSGTRIAHGFRWAVNRQLRDAICDFAADSRHASPWAAAIYDDARARGKDHPLAVRITARAWSYVIWRCWHDGTAYDPAKHNALQAVLARQAAQTAGARQQDQ

SEQ ID NO: 343654 - protein, 349 aa, unidentified
MTFYAGLDVHKEFIYAQVLDEQGTSKIERKFMNTPEALDYFLEHVDGTTEFVLEACGMYEPVYDRIEEQGFSVKVAHPLKTRAIASARIKTDAIDAKVLANLLRTDLVAESHVPSKEIRELRSLVRRRTSLVRQRSHLKHQAHSILLKNGIKAPMTDIFGKMGKKFLQQVELPYAERLALDNLLAITESFDERVSLSDTAINGTVEANQSIKRLTTIPGVGNFSALLVYADIDNVKRFKSAKHLCSYAGIVPSVYQSGSTIRRGSITKTGSRLLRWVLVQNAHKAVRSDPLLAKYFNHLKKKKGTQKAIVAVARKILTYMYIMLTEGVEYQALYVNRKKRETPENPLGL

SEQ ID NO: 343655 - protein, 385 aa, unidentified
MTNQLQGITLVPRDYDIFGGLDVDKKSMAITFTDHGTMRKSLRLPYSATQLLNYTRKHFAGQRVAFVYEAGPTGFGLHDELTAASHPCLVVSPSMVPTVQRKRVKTNRLDSNKLSEGLRGGQLRGIHVPAPGYRELRHLVQLRDTQVGQLRATKCRIKSLLLYEGIPFPAANGKWSGRVLRQLEALPCNATVRFKLDQLIDALQFHFLAAAKVQKQIRHFCQEDPELRHSISFLVSLPGVGSITATHALARLGDWRQISNVRQIAGFLGLVSSEHSTGDKENRGEITRIGDSRLRNKLIQCAWTAIRKDPELRAFYRRIYERQPKKVAARKAIVAVARKLTTRMYAVLKEQRLFVIRADSSIAPLTAEETVGPRERLDAAQNEQP

SEQ ID NO: 343656 - protein, 347 aa, unidentified
MALTIVETPITGGVDTHADVHVAAALDPVGGLLGVAEFPVTPAGYARLLSWLSGFGTVCLVGIEGTGSYGAGLARHVATAGIRVVEVDRSDRQDRRRQGKSDPLDAVSAARAAQSGRARGAPKGRDGSVEAIRALMVAKRSARAERTQTINQARSLIVTGPDDLRARFARHTVAALVAETASLRPRPGSTVGYATRIALRELGRRAQFFDGQLERLGELIVPLVTARAPGLLALYGVGPDTAALLLIAAGDHPARLRSEAAWAHLCAAAPIPASSGKRTRHRLNPGGDRQANHALWRIVITRMSSHPPTRAYVERRTAEGLPKTEIIRCLKRYVAREIYPRLRAAAD

SEQ ID NO: 343657 - protein, 326 aa, unidentified
MKKNFIGIDVSKLKLDVYSNTHSQHCIFPNDEEGFDQMIKWLKSMKITVKSMAFCFEHTGIYSEDLALYLSAKKICFYMVSSLNIKYSIGLQRGKNDKIDSKRIASYIALHADQLSPTTLSKTAVAELRKLLSMRSHLEKEKIGIKNRLKNSSKTTGLDLVFQIETDLLKTFKDKLKMVENEIKSLIKSDVHLCQVDELVQSIKGVGPISSWYLIATTNGFEHFENARQYACYSGIAPFERSSGSSIKGKTQTDRRSNRKINGILTMAARSAVLNNPEMSEYMERKIQEGKHYNCALNAVKNKLVARVFAVVKRKTPYVDLKKYAA

SEQ ID NO: 343658 - protein, 350 aa, unidentified
MLIIGCDYHPSFQQIAFVDTETGEFQEQRLSHREEAERFYRDLAAQGMKGRVGMEASGHARWFERLLAELKVELWRGDAAKIQAKRVRKKKTDREDARHILQLMLKDDFPQIWVPSWDNRDLRQLLWHRHRMVQMRTRIMNQLQAVALNEGLRCKKRLWGERGRQQLESIGLAPWATRRRRDLLELLDRLTPTIAELTKQIEQEVEKYPAAQRLMTHPGVGALTALAYVLIIGEPERFECGKQIAAYLGLVPEEDSSGERRRLGHISKQGSGLMRFLLVEAAQVTVRSDPEWRSKFFHLALRRGRKIAKVAMARRLAVRMYWMWRQQWDYEQLKKFGPHAGQPGTAHGVK

SEQ ID NO: 343659 - protein, 310 aa, unidentified
MEHTTVVGIDVSKDRLDVHVLPSEEAWAVTRDAEGLAELCRRLHGLSGVVALEATGGYENIVAATLSSAGLPLVVVNPAQVRAFAKALGQRAKTDPIDARVIARFVEATKPMVRPLPDQATRMLADLLARRRQIVEMMASESQRLRRTDLARVRKSIERLVVAMKRELGDIDHDIDDTMRGSPVWREKENLLASVPGIGRIIARTMVADLPELGTLGRKQIGALAGLVPFVRQSGKWKGQARIGGGRPVVRTVLFLGAQVAKRHNPVLKAFYERLIAAGKSKMAATIAVAHKLLTILNAILRDKKPWQTA

SEQ ID NO: 343660 - protein, 345 aa, unidentified
MKQYAGIDVSLEYSSVCVVDADGRIVHEARVLSEPDALIAWFGEHGVAMERIGLEAGPLSQWLHAGMIKAGLTVELIETRHVRAAFKTMPVKTDKKDARGIAQLMRLGWFRPVHCKSLPAQEVRALLTARKLIQGKLHDIEMSLRGILRGFGLKVGPTMRRTYAARIRELIEGHPTLEAIAASLLKVRDALAGEFAGFERKLRGMARQDDSARRLMTTPGVGVLVALTFVSAVDAPERFRSSRAVGPHFGLTPKKYQSGETDYTGRISKIGDVGVRTALYEAANVILTRPVKGSDLKTWALAVARRAGPRKARVALARKLAVVLHRMLRDGTDFIPRKATPAMAG

SEQ ID NO: 343661 - protein, 421 aa, unidentified
MLTTTQDNEEIIERVAALDIGKAEVMCCVRVPDEDHPGKRLQEVQAYPTMTRSVLGLADHLASLGVTRVVMEATADYWKPVFYLLEAAGFETWLVNAKDVKHLPGRPKTDLDAVWLCKVAERQMLRPSFVPPPPIRKLRDLTRYRADLVAARTAEKQRAEKLLEDACIKVSAVIADIFGVSGRDMLTALAAGERNPKVLAQLARRSMRAKITVLEEAFTGHFTDHHAFLLRTMLGRVDAISADIAALDDRIAEQAAPFADAAGRLDEIPGISLASAYVILAEIGTDMTRFPTAGHLASWARLAPGIKESAGKKKGKGSTGHGNAYLAAILGNAAAGASKTDTFLGDKYRRIARRRGSKRAIVALGRSILVIAWHLLSDPDAHFYDLGPGYYAARIDPERRKRSHIRQLEALGYTVTLEPAA

SEQ ID NO: 343662 - protein, 427 aa, unidentified
MKQEDLSRIEHFRQFRKQIRGSDTYLIVGIDVAKSKHYATFATTQGRIGHKGLVFENNASGFEHLLTQVQFYQDRDGFEQVVFGLEPTSVYQKPLAEFLIQQDYLVVYVTNEAIKDNRRTLDGRWDKHDKKDSANVADLVGQGKCQYYDLPNIDLRDIRNLLLLRKRLKKQLHGCRIRIRNNLVAQYFPELDRLWHQCEAENLAIVRWCLSPAKINQLRFEDFFQMVTTGKKGLRQYQRLRKIWEMAPYSIGCRPGQTLELEAQIMVGLVEYIKKQLDQVQKMIEDLCRSFVEYEYLLSIPGFGSYIAATVLAAIGNPLRFNKASELIRLAGFDLSAKRSGKTSSSAVPVISKKGKVELRYALYQAALIASSRTPRFKAYYHRVLEGRQREKGIRTKMRVKLAVKLLVIAWTLMKKREYFDPDCITI

SEQ ID NO: 343663 - protein, 354 aa, unidentified
MIIIGVDYHPSFQQIAFCNQDTGECGERRLNHSDGEAKRFYRDLQQPGIRVRVGMETTGYSRWFEQLLAELGFEVWIGNAAEIKTQRVRKQKTDRNDARLLLKLMREDRFPRIWVPSPENRDLRQLLWHRHRLVQMRTRILNQLQALAMNEGRHWKMKLWSEQGRAELEKLALAPWASRRRRELLELLDRLHPTIEDLTAAVEQEARKRPEVLRLMTHPGVGALTALAYVLILGTPERFRRGKQIGSYVGMIPKEDSSGGKQRLGHISKQGNSLLRFLLVEAAQAAARINSEWRRRYVHLAMRRHRSIAKVALGRRLGIRLYWMWRNGCEYSPSLEFGSYAGQLGTGHGVTAAP

SEQ ID NO: 343664 - protein, 461 aa, unidentified
MAKKAKKVKTAKGAELRIVNPDAAGIDIADGIMQVCVPADRSKDNNRAFGAYTSDLHAISAWLRECGIKTVAMESTGVCWIPLFCRLQEDGLDVVLTNARDVKNITERKTDESDAEWLMLLHQYGLLKASFQPHNDAKRMRTLTRHRDTLSREASSIVLRMQKAMQQMNIKLTLVLSDITGKSGIRIIEAILAGERDPKRLADLADIQCKTPKEEIAKALEGNWEEDLMFVLRQNYDTFKHYCTQLGECDAELEKLMENYRAEVAKVEDTSYSPAKKRRDYKKTRHTVGFDVERKAYEMWGVNVFEIPGISHLTALELMSELGHDFTRKFPSSKQFCCWCNISPNTKISGGKRISSHVPHRRNNVGLIFRSIASSLANAKNQLGNFYRRIRSRAGGKAAVIATAHKVAEIFFAMVANQTTYNPERVGIDEKVLLEKRITRYKRELERITGTHIEIGNACVP

SEQ ID NO: 343665 - protein, 373 aa, unidentified
MKKVRFLGLDVHAETIAVAVAEPDGEVRSLGIIPNREESVRKLVKKLGPAEQLQACYEAGPTGYILYWQLTALGVKCEVVAPSLVPVKAGDRVKTDRRDAMKLARSYRAGDLTAVWVPNQEHEALRDLVRAREAAKQDQLRARHRLSKFLLRHGRRAPAGIKVWTQKHEEWIKKQVHFEQPAQEYTLWDYLHEVEHMDDRILRLEQAIAEAVKLAPPRMQEVIQSLQALRGIAQISAVTVVAELGEISRFEGARQLMGYSGAVSSEHTSGKRMQRGAITKTGNAHLRRIAMEAAWAYRHRPAIGPRLRKRQEDLSEEVKEIAWKAQHRLHKRYRTLSAAGKEKQKVITAVGRELLGFIWAIGVQVERNSKRVA

SEQ ID NO: 343666 - protein, 406 aa, unidentified
MNLNAVGIDVSKRKNTVSVLRPGGDVLMKPFDISHRTADFQTLADKLKALDGETRVVMECTGHYYEPVARELSQAGLFVSAVNPQIINKFQGQGNPLRKVKTDKADSVKIARYTLDNWANLKQYTLMDELRSQLKNMNRQFDFYMKHKTAMKNNLIALIDQTYPGANTYFNSLAREDGSQKWVDFLDTYWHVDCVRKMSLQAFTEHYQKWCSRKKYSFRKSKAEEIYGIAKELVPVLPKDNFTKCIIKQAVAQVNAASQTVEQLRSLMNETASKLPEYPVVMAMKGVGPSLGPQLMAEIGDVTRFTHKGAVTAFAGVDPGVNASGDYSQKSVHASKHGSPMLRKTLFQIMDVLIKTKPDDAVYLFMDKKRAEGKPYYVYMTAGANKFLRVYYGRVKEYLSALQESY

SEQ ID NO: 343667 - protein, 357 aa, unidentified
MTKLLKKLDFTGQPIFIGIDVHLKSWNISVYLQQQYLTSFNQPPTTLALQTFLQNSYPNASYKCAYESGFCGHWIQRELLSLGIECIVINAADVPQTDKTAKNKTDTNDSKRIAQALQAGFLQPIYIPDEEVEADRQLVRCNEKFTNDLTRVKNRIKGMLYHLGIKLPEYFSNSNWSNLFIKWLKELELKNPSAKRAIQHQLTMAENIRIQKLAVLKDIRALLKKDRYSATAKYLLTVPGIGTVTTATLLTEIDNMKRFSNFEQLNSYIGYYPPQFSRGENTRQGTIIGRQHKRLRSLIIEAAWTAIRTDPAMTMVYNQFKLKVGGKRAIIKVARKLLSRIRHVWLNQVEYEKGVIR

SEQ ID NO: 343668 - protein, 393 aa, unidentified
MRTELRVAVDVGSRFHQVAVGDGKGRLLDEFRIDHLRSGFEGFFERIARHRARDIRVAMEGYNGWARPLDQQVLDRGWRLYNVNNLKLARYKEIFPAPAKTDAIDARRMLELFAFDGQRSMGRDVLQEIAAASPQQRELKYLTRRRRVLVAERASRLTRLHTDLQAVCPDLSALTRSVANLWFLHLLTCRDRLTALPRLQANTLRAIRGIGAKTLPRILAWQKTAEFSAMIDLADSDIVADAMAILALNDRIKAIDKRIEEAGSTCAMVARLRSIPGFGVTGSAELAGEIGSLQRFATEASLALYLGMAPLDQSSGLQNRARRSKSINRRCQTALMTCVIRHMACVTESRTFYDRKRAQGKRHNQAVRALGRHLIRVIWRMLQNDRDYETKTT

SEQ ID NO: 343669 - protein, 343 aa, unidentified
MQAVTTIGLDIAKSVFQIHGVDAAGNVIVRRQLKRRYVLPFFQRLPPCLVGIEACASSHHWSRELKALGHTVRLMPPAYVKPYVKRQKNDAADAEAICEAVTRANMRFVETKTLEQQSCLMLHRTRHLFIRQQTAVINAIRAHLAEYGIVAAVGRNGVEELLGVVADPSDKRVPEIARACLAALGAQLRMLKAQILEFDRMITAWHRSNETSKRLDAIPGVGPALATALVASVPDPKAFRSGRNFSAWIGLVPKQHSSGGKDKLGSISKQGDRYLRSLFTAGALAVIRYAKIHGTKHRPWLTALLARRPAKVAAIALANKIARMAWAMMAKGERYKEPVALAV

SEQ ID NO: 343670 - protein, 370 aa, unidentified
MVKRSMFVGMDVHKESIDVSLAEEGRAGEVRHYGVIAGDLEALAKVVRAVRAPGRRLRFVYEAGPCGFGIHRYLTAHGEDCVVVSPSSMPKRSGDRIKTDRRDSEALARLHRAGELTAIYIPTADDEAQRDLVRAREDAVGLSTQAKHRLKGFLLRQGRRYPGRAGWTIPYRRWLADLSFPLAPQHIALQEYRDTIDEAERRVERVTDQLRQLVPTWRWAPVVEALQALRGVSFVTAAGLVAEVGDFRRFRHPRHLMAYLGLVPSEHSSGPSVRRGGITKAGNPHARRLLAEAAWAYQGIPRIGRQMLYRQEALPKPICAIAWKAQLRLTSRFRRLVARGKAKPTVATAVARELTGFIWAIAREVPAPPA

SEQ ID NO: 343671 - protein, 353 aa, unidentified
MVVVGADVHKRTHTFVAVDEVGKELGHKTFPATTPGHQDAVRWARARFGEELLWAIEDCRHLSARLERDLLTAGQSVVRVPPKMMAEQRRVARTRGKSDPIDALAVARAAQREPDLPVATHDETSRELKLLVDRRDDLVKHRTSTICRLLWHVHEIDPEFAPPKASLDRAVRQQQLADALARLPGIVAELARDELADVIELTRRINALERRITGLVEHAAPTLLAMPGVGALTAAKIVGETAGVARFKSEAAFARHAGIAPIPVWSGNTAGRVRLTRSGNRQLNAAVHRIAVTQIRLDGLGKTYYEKKKAEGMSTPEALRCLKRRLARVVFNHLVTDQITHKAASAPGLAAAA

SEQ ID NO: 343672 - protein, 320 aa, unidentified
MTTVYKRFIGVDVASRKLDLFDSVAKVHQTIDNTPEAINAWIKLLRRKRAKTIVVMEATGGYESNLVDALHEADTDCCVCNPAQVRSFAKGIGLIEKNDPIDARMIARFGEVVTPKLREKPSPEERKLKALVHRRDQILSQQSAERNRLAQARDEEVREVIQEALDFYKRQIVGIEKKIAALIDASQPLSERAALLASCPGVGTATVAMFLAELPELGSLNRGQIAKLVGVAPIVRDSGQKEGKRSTFAGRSLVRKVLYMAALVATRHNSIMKAFYQRLLAKGKPPKVAIVAVMRKLLVTLNVMVREGTPWRESTLAPAG

SEQ ID NO: 343673 - protein, 406 aa, unidentified
MLFVGDDWAEDHHDVEVQDEAGRRLGKAKLQEGIGGIARLHELIAEHLDQDAEAEQVVVGIETDRGPWVQAVLAAGYRVWAINPLQVARYRERHSVSGAKSDAADAHTLADMVRTDRHQLRPIAGDSDLAEAIKVVARAHKTLIWERTRHVLRLRVALREFFPAALEAFAELSAAEALELLGRAPDPVSAARLTTAQITAALKRARRHHAADKAQAIRAALGAEHLTQPTVVATAYAATVRAQVAILATLNAEIKTMEEQVAAHFGRHPEVEIYRSQPGLGQILGARVLAEFGDDPTRYADARSRKNYAATSPITRQSGKKKLVLARYVHNDRLVDALQRQAYCALTASAGARAYYDELRGRGVGHHAALRQLANRLVGILHGCLKTGTTYDEATAWSHRQQQAAA

SEQ ID NO: 343674 - protein, 420 aa, unidentified
MKVVYQTCCAIDVHKSFLVATIIKTTSGVEPSYHKKRFSTFNNSILQFKEWLIANKCRDVCMESTGKYWVPVFNLLENDINVTIANPKWVKAVKGNKDDAKDSKWIGELFRLGLVPGSYIPCKPIRILREFTRYRYKLTSCRSSEKNRYQNALTVCNVALDSVVSDIFGKSATSVIDYLIEQSDNSINHEEIASRLLRSLKKKSDSVIESIEGYQMTDSQKYRMRLIRAHMDYITSIINDIDTMLDSLITPYENAVMLLCTIPGVDRNSAITIISEIGTDMTQFSDSKRLCCWAGLTPGNNESAGKKKSVRITRAGVYLKPALVQVAHAAVKSDKSPYYKQKYERIRKRRGKKRAIIAIARMILTAIYQMLSAGEVWNPTDLYKIDMPEPLKEKQKEKAIRQAKKLLICEGIISESQLVS

SEQ ID NO: 343675 - protein, 347 aa, unidentified
MENSTTIAVDLAKAFFQISISTVPGRVNERMRLTRQKFVSFLATRPPTEIVMEACGSAHFWARTARELGHRPVLLPAHYTKKYVLRDKHDRADADAILEARRREAIRPVPIKTVEQQTIAFFHRMRSSWIQTRTARINAIRAILRELGKVIPVGPRNVVPHLPELMADIPEALHPVLLAIADEIRQLESSIKDADRQLKALLVDSDGARSLLSVSGIGLITCSAMIAFVGSPSRFRSCRAFSSYLGITPKEHSSGAKRRLGSINKEGDTYLRTLLIHGARSVLVAAKRSKNPDRLQAWALRVQERRGHNRAAVALSNKIARIAWAVWSKGTLYQPRPAAARPAAATN

SEQ ID NO: 343676 - protein, 321 aa, unidentified
MNKYKEIYGIDISKAVFDVYGSETGHTQFKNDEKGFKSFLKHLPQGVLVVMEATGYYHYCLAQFLFKSNILVSVVNPLSVKRFIQMKLAKVKTDKSDAKAISEYGQMNEVPLYNALSEVQAECLQLFRLLDSYLKHRTATKNKLKGEEVLGVPSKFVYNSLKRNLKHLNKEVDVLESRLLELVKQDQQHQLTLLKSIPGMGVKTALFLIVVTDGFKKFETASQLCSYAGITPTIRESGSSVRGRSRISKVGNKKLRNLLFLCAFSACKHNKGCRELYERIVNKGKSKKLALIAVSNKLLKQAFAIAKSGLPYDENFVSKLA

SEQ ID NO: 343677 - protein, 415 aa, unidentified
MRRWWAGIDWSYGKQDFVILDNDGKVVTHLRVEETPEGVNQILGALRALNPTSHRFTRRQVPVAIEDGNRLLAVELRRHRQPVVLVPPAVTARHRGRHATAVSKSDRGDATLLADIVRQNPHRRVSSALPETSDEATAIAVLARAQATSTNSARAVMLRLRAHLGLYFPAAVEAWSGRDRGLRRPEARAVLALAPTPRQAAAVSKRQFLDALAAAGRTRLLDQEAARLRDLFAEPTLRQRPGTEQAMGERTRLHLAELAVACGHAEQLAELTDRRFSAHPHYPVYRSFPACGPLIAARLFAEIGDDPQRFPTDRGLRAYAGTAPITWSSGSSHAVTYRKVCNRTLKMAVHQWSFGSLTRSPGPPALYDARRLRGDGHAGALRHVGNRLLSGLHHCLSTGELFQEDIMFPPRSGAD

SEQ ID NO: 343678 - protein, 478 aa, unidentified
MVTARPSHLNRKQRRDLARRLRGEDPGLAVMHPHAAGIDVGNSAHYVAVRPDRDPDSVRRFDCFTADLHRLADWLQRCGVTTVAMQSTGVYWIPLYEILDARRFEVYLVNARHTRNLPGRKSDVQESQWLLKLHTYGLLRNSFHPPAAIRVVRTYWRQRGDHVHAVSTCIQRMQKVLTQMNIQLANVISDLSGWTGQRIVRAILAGERDPDALAALSHPGIHATRETIAKSLEGTWQPDLLFVLQQEVAMYDAYEQRITECDQALERHLKGVADKVTDPSSDAAPSTPPPQAPPRARPKRRRKAGSHAPQFDLGHELHRISGVDLTRIDGIDVGVAQTLISEVGMDMMRWQTEAHFASWLGLCPDNRITGGKVIRKGTRHVVNRAATALRLAATTLLRSQSYLGAQYRRLRGKLGAPKAITAMAHKLARLVYRMLKWGHDYVDKGLQYYEERHREQQVRLLKKRAAKLGLQLVAPEVT

SEQ ID NO: 343679 - protein, 343 aa, unidentified
MNSVTCFVGLDYHQDSVQVCVLDGQGEQRLNRACRNDWRAIQDAVAEVGPVQAAGVEACGGSADLAQELRDHAAWPIDLAHAGYVAKLKQSPDKTDFSDGRLLADLTRVGYLPKVWLAPAYERDLRALVHYRQGLVDQRRTVKLRVGALLREQRAFPPEGPGPKKQRLRAWTGLWLIWARTAAPLSAPGRWILDRLLDQIAPLDRQIRQVEQQLHKLTAHDPRVVRLRQEPGIGPVTAWVLRAYVGPFERFRNGKHLSRYCGLSPCNRSSGAKRADAGLIQGCNKLLRATLIQAAHRLIRTVPRWRSLALALSRRGKKRCVIVAAVGNRWMRGLWYRHLPTPA

SEQ ID NO: 343680 - protein, 314 aa, unidentified
MVGIDVSKGSLDAAFADPNNRQRLWSQKVPNTLEGIQKLLDKTDPTIPWVVEPTGRYSSLVVKQARDAGRIVLLAPNRAAHLFLKSTSPRAKTDKIDSYGLALFGLSRPLTTFPIKSASVEKLDQLLSARKGLANSLQRIRMQRSELPAAAAALDPVIEVLVAQMKVLDKSIQEVTASAPEFALVKTLLQVPGIGSVAAPALASRLLGKQFAHPDAFVSYIGLDVAVRQSGKSEGRVKLTKQGDAELRRLLYMAALANLRTKESVFKAQYERLRASGRSSTAALNIIARKIAHVCWALYRHGGSFDPQKVYRQP

SEQ ID NO: 343681 - protein, 343 aa, unidentified
MQAITTIGLDIAKSVFQVHGVDAEGNVVIRRQLKRRHVLAFFEKLPACLVGIEACASSHHWSRELQAFGHNVRLMPPAYVKPYVKRQKNDMADAEAICEAVTRANMRFVPTKTPEQQSGLMLHRTRHLFIRQQTSVINAIRAHLAEFGVVAPVGRKGIEELLHVIADPSDKRVPDVVRACLAALGSQLISLKKQILDFDRMILTWHRSDQTSKRLNCIPGVGPLLATALVASVADPSAFRSGRNFSAWIGLVPKQHSSGGRARLGSISKQGDRYLRGLFVAGAFAVIRYAKIHGAKYRPWVAALLARRPTKVAAIALANKLARMAWALMARGERYNYPPALRV

SEQ ID NO: 343682 - protein, 347 aa, unidentified
MTLTIVDEARPVTGGVDTHADAHVAAALDGIGGLLGVQEFAATPAGYSRLLGWLQGFGTVGLVGIEGTGSYGAGLARHIAAAGIRVVEVDRSDRQDRRRQGKSDPLDAVSAARAALSGRAAGAPRGRDGQVEAIRALMVAKRTARAQRTQTINQARALIITGPDDIRTRFTGQTPTELVAELAALRPRPGSMVRYHTLLSLRELGRRAQYLDDQLTRLDQLITPLVTARALGLLSLFGVGPDTAAMLLIAAGDNPGRLRSEAAWAHLCAAAPIPASSGKVARHRLNRGGDRQANHALWRIVITRMGSHPPTRAYVARRSKEGLSKPEIIHCLKRYAARETYRYLRSR

SEQ ID NO: 343683 - protein, 354 aa, unidentified
MVVVGADVHKRSHTFVAVDAVGRKLGEKTVKATTEGHQVALMWARDQFGVELRWGIEDCRNMSARLERDLLGAGQAVVRVPTKLMAQTRKSGRTRGKSDPIDAESVARAVLREPDLPVASHDEVSRECKLLTDRRDVLVAQRTSAINRLRWNVHELDPERGPAPRALKATKHQQALQAWLQTVPGLVAELARAELGDVIRLTSEINALEQRLSQRVREVAPALLQIPGCGDLTAAKLVGETAGVSRFKSEAAFACHAGVAPIPVWSGNTEGQMRLSRSGNRQLNSAIHRIAVTQIRMPDTEGHAYHQRRIANGKTKAAARRCVKRGIARRVYRALLADHHTRTQPHQPHQPTAA

SEQ ID NO: 343684 - protein, 372 aa, unidentified
MPKSSTLFVGMDVHKETIDVAIATNRLNGKVRHYGQIYNRIDAIDKLVAKLKREASTLKFVYEAGPCGFGLYRHLTRKQHQCAVVAPSLIPKKPGDRVKTDRRDALRLAQLYRAGDLAPVYVPDVDDEAIRDLSRAREDAMLDQKAARQRLKSFLLRHAIRYEGRADWNEAHLRWLTEVIMPTPAQQIVFQEYVNTITERTHRIERLERMLKEHVKNWHFAPLVSALQALRGVRFINAVTFIAELGDLTRFDNPRQLMCFLGLVPSQYSSGERIRLGPITKSGNRHARRILIEAAWAYRYQAKVSREIQLRQENLPIRIREIAWKAQVRLCARYRKLVGRGKNKNVVVTAIARELAAFIWDIAHHVHLKQVH

SEQ ID NO: 343685 - protein, 346 aa, unidentified
MMIVGCDFHPSWQQVSWLDTETGDCGERKLVHASGDAQQFYQQLAAPVLIGMEATGNSQWFVELVEDLGHAMWIGDAAQIRASYVRKQKTDKRDAAHILKLMLENRFPRLWNPDREQRDLRQLVLHRHKLVEIRSRVKNELQHLSLNKGMQKKCRLWSQAGQKMLRELPLKPWASCRREDLLGVLTMLNQQVGRLDAAVQTAAEENPQARLLMTQPGVGPNTALAYVLTIGDVSRFQRGKQGASYLGLIPREESSGGRQKLGAITKQGNRMLRSLLVEAAQTAVQHDPGMRKQYLHRCHQKPKGVAKVAAARKLAVRLYWMLRTNVAYPEIVRIESSPRVALVGAS

SEQ ID NO: 343686 - protein, 369 aa, unidentified
MKQVTTYVGIDAHKKDLFIAMLVGDGTTPVTWTVPNVPHAVKRLVRKLERDAPGPVRVCYEAGPCGYALQRQMTTARVSCQVIAPSLIPRKPGERIKTNRRDARKLAELFRAGLLTEVRPPTHEDEAVRDLCRARDDAREDLQRSRHRLGKLLLRRGLHYSAGRNWTKGHRRWIDSLAWAQPAERVVVDDYLLAIDHLEARLGELDARLVEVADTEPYREHVGWLRCFRGIDTLTAILLLAELHDFRRFPSAPALMAYVGLVPGEDSSGEKHRRGRITRMGNALVRRLLVETAWHYQHRPSVGGALARRRTGQPGRVIAIADKAQQRLCRRFRKLSAEHKPAPKVAVAIARELAGFLWAALQPAPATVN

SEQ ID NO: 343687 - protein, 489 aa, unidentified
MNFTALTATVQPNLDVNYIGMDVHSDNVVVCVRRNTINSSGQLVGKTIKTKKVVIKSSQEPLVELLSKYADGQQHIMTAESTFNWYWLADIAEDHGWNFRLADPCTVSQANIKAANDETDAECLADRLRTGSLKSTSVLPRKLRGVRDLMRHRLRVMQEVSDKKVRLSNLYHNHCAHPMHGKLLTALQDAYDEISVDAVLESGICNNGSELIIGDLLTGLREAEARLAKIEAAVYERIDEVDEYKAERLLLKTSMKGCGDVLSAIIVTEIGDISRFRTMGDFVSYCRLAPTSKLSNGKSKGQGNAKNGNAYLSWALTELATLMARFNEPIRRYLERKQDKTGLRVVAVRALAAKLARCVYQVLRKNESFDLALAFGGKPTRAPTALAEKPAAEVVQSPQEPEVPPITTAPEPHLQAPLSEAPIVVKEPSPVKAKRGARKKAVSPASSAPAVTAEGRQTARKADRVKARCALTATPPSCAGTSCVKSRRE

SEQ ID NO: 343688 - protein, 407 aa, unidentified
MRPIYERCCGLDVHKKTVVACRLTPEGSQTRGFGTMTGELIQLRDWLLEAGVTHVAMESTGVYWKPVFNLLEDQGMELMVVNARHVKAVPGRKTDVKDAEWLAELLQHGLLKASFIPDRESRERRELVRYRRSLVEQRAHLVQRIQKLLEGANIKLGDVASDVMGVSGRAMLQALAAGVDDPAAVAGMAKTALRNKIPELERALTGSVREHQRFLLRSQFRLLESIETEIAALDEEVAERMRPFQTALDRLDEIPGIGRRAAEQILVETGTEMSRFPTSGHFASWARVCPGNNESAGKRQYASIGGGNRWLRTALLEAAWTVSHSRKPTFFTARYRRLAARRGRKRAAVAIAHSLLIAVYHVLKDGVVFQDLGPTHFERRNQEAIVRRSLHRLESLGYKVTVEAMPA

SEQ ID NO: 343689 - protein, 443 aa, unidentified
MRVMHKRVAGLDVHKKTVVATRMQVTEEERLEWETQTFETNTPDLLRLHDWLGEWACSHVAMESTGDYWKPVYNVLEGTYQAMVVNARHVAKVPGRKTDVKDSEWLAELLMYGLLRASFVPPKAQRALRELTRYRSKLIAERSRTVNRVQKVLEGANIKLGAVVSDIQGVSAQAMLRAIVAGNTNAAEMAQLARGRLRHKIEALEKALTGYVQDHHRFVLAMQLGHIDFLDEQIHAISAEIASRMEALSSPPAAPPRAPDPGTGEGESEDSGPSGLSWEEAVTLLSTSPGIDRRSSESILTEIGLDMHQFPTAKDLTAWSGLAPGNYTSGGKRYSGRTRQGNQTLKSTLIQVAWAAVRTQGTFLKARYHRLAARRGKKRAIVAVARSILVSIWHMLSRGVPYVELSESYYDQRRKESKITRLTRELEKLTGGQVQIELSPMPS

SEQ ID NO: 343690 - protein, 324 aa, unidentified
MSDSILGIDVSKETLDAYCARGQRKQGRTFANSPDGWKLVRAWLKAMGSKQAHVCMEATGRHSLGVALALHEAGHVVSVVNPAQIRDFARTKLGRNKTDKVDAALICEYAELFKPEPWTPPSPAMRRLCELQTMRAGIIRGRAEWKNRIGSGLGDSTATKLAAATIDHFTSQLEAIDRAIGETIEQDAELRGRRDLLLSVIGVGETLAASLMAEMPEPGVLRRSGEMVAYAGLNPSHHRSGTSIDRPTRISKIGNATLRSSLYMPALSAMRFNPAVAILVARLKSAGRLKPKQIVVAAMRKLLVLCFGVLKTGKRFDLAIAMPA

SEQ ID NO: 343691 - protein, 338 aa, unidentified
MQEQQYVGIDLHRRRSVIVRMNDAGEVLGTVRINNDPLKLAMAIAEAGPDPEVALEACYGWYWAADLLVAEGARVHLVHPLGLHWDSRRVKNDVKDATELANRLRRSDLPEAWISPPEVRELRELVRYRARLVALRTSAKAQVHAVMAKLGILPTQVDMFSSTGQVVLDEMPFEGVYGLRVESLRDLLEIFDREIAMVEREIHRFLKDDRGYKAIQVLSGIGPITAAIFVAEIGDVTRFPTARHLCSWAGMTPKLHESDTKSRRGRITKQGSTIVRWAAVEAVVRYHGGDVIAPAYRRIAERRGNSIARVAAARRLLTLVFYGLRDGEIRCVARKEAA

SEQ ID NO: 343692 - protein, 392 aa, unidentified
MFYIGIDIAKRSHQAAVTDISGNIIVKPFNFKNTAAGFTQFLSVLKTNSVSKDNCVIGLESTGHYWYPLYFFLVEQEFSVKVFNPIQTAAFREITIRKVKNDNLDSIMIADFTRFGRYSETYIPSENMLALKNLSRFRLSVCDICGSLKKRTIVLLDLVFPEYATVFCDIFGTTSKQLLEKYSTPDEFSEISTTKLANFILKASRGRNGREKAELIKTAAQTSIGISYAIDTFSFEIKQLIEQIEFMENQLSEIDAEMAKLLAQSEYSVITTISGIGPTLGSIIVSEIGDIERFETSSKLVAYAGLDASVKQSGEFNSTQNKISKRGSPYLRRALWMAAFMSLQCDPALYDYYSRLRARGKSHRLATTAVARKLCIIVWAIMKSKKPYSPHV

SEQ ID NO: 343693 - protein, 412 aa, unidentified
MEILYPRCAGLDIHKKSLVACILLPDAQGHPSKQFHSFSTMLSDLQRLRDLLTSLCVTHVAMESTGVFWKPIYNVLEDHFTLLVVNAQHIKAVPGRKTDIKDAEWIADLLQHGLLRPSFVPSRQQRDLRELTRYRTSLVQERARTILRLQKILEDANLKLASVVSDLTGASAKAILHALLDGTTDPSVLAQLARGRLRPKRDLLEKALAGTLRPHHRFLVTEQLALIDALDDSIEHLNMQIAELVRPFEDLCTLLCTIPGIGRRLAEILLAELGPDMAHFPSARHLASWAGMCPGNRQSGGKRLKSPMRKGNPWLRSAQVEAAHAAARSSSTYLSAQYQRLTARRGANKATVALGHTLLIIIYQVLSKKEVYHDLGSNYFDEHDRQAVQRRLVHRLETLGYQVQLTMTATGT

SEQ ID NO: 343694 - protein, 331 aa, unidentified
MLNSQGGATSANGRLNAGVDVSKAHLDVCVGLDESRTANDEEGWAQVVEKLRQCRVDLVVIEATGGYERGMVSSLQQAAIAVARVNPRQARDFAKSMGQLAKTDKVDARLLRDFADVISRHKDRSKYVTAMVDPARTLLHELVTRRRQLVTMRVAEGNHLEHATKATRRGILSVVKLLDKQITAIDKEIDDHLDGHFKQQKELLDSVKGVGPATIMSLVADLPELGKLNGRAIGKLVGVAPLANDSGERRGKRRIWGGRAKLRSAVYMAALVAKRHNPVIKAFYERLVAAGKPKKVALVACIRKLLTILNAMLRDGRMWAAAADLNAVSAA

SEQ ID NO: 343695 - protein, 347 aa, unidentified
MLIIGCDYHPSWQQICWMDTLTGETGERKLEHAQGEAEKYYRTLPSAALIGMESTGNCQWFTELMASLGHQLWIGDAARIRAAEVRQQKTDRRDAALLLKLLLEGRFPRIWTPSVEERDQRQLLLHRHKLVEMRVRVKNELQHLAMNRGITKGRRLWSKAGERVLCELPLAPWASRRREDLFRLRKMLDEQITALDEAVKKVAERNDRARLLMTHPGVGPITSLAFVLTMGDVNRFPRGKQVGSYLGLIPREHSSGGKQRTRSISKQGNRFMRTLLVEAAQSVVRYEPEFRKEYLHRCHRSEKGVAKVAAARKLAIRLYWMLRSNTAYPEIVRVESSSRVPLDSSPA

SEQ ID NO: 343696 - protein, 393 aa, unidentified
MSFFVGLDVSKEKFDVCCIGEEGERVFTLTCSMDRGGFEKLITQLPEDKTSFLLGMESTASYHIPLFTYLISHDYRVVVINPLLINGFSKRSLRKTKTDKKDALTIAQFLLREEEALPVKTPDYLVPELKELARRREKLADHMTSLKGNMKIILSVVFPELEYITGVFTKATLRLLMQYPSACAIRNADHLAIADVFNKGRGNRPRITVKALIDAATSSVGVASPAKELTLRQEASLLVHVEEQMKETTKVLMNTLNERMKQDTGILCSMKGIGENTAMNFLIEMGGSVEIYENDKKLIAASGLDPSTYESGKYAGKSRISKRGNRHLRRVIWLMATRVIINNNLFKAYFKKRKRDGLHYKKAVLATAHKLIRTIFVMLSRKTCFVEGGIKYS

SEQ ID NO: 343697 - protein, 403 aa, unidentified
MNMNAVGIDVSKGKSMVAILRPYGEIISKPFEVKHTVSGIRSLIEQIQSIDGESRIVMEHTGRYYEPLVRELSKADLFVSAINPKLIKDFGDNSLRKVKSDKADAVKIARYTLDSWTELRQYSLMDEIRNQLKTMNRQFDFYMKHKTAMKNNLISILDQTYPGANTYFDSPAREDGSQKWVDFSATYWHVDCVRKLSLNAFIDHYQKWCKRRKYNFSKAKAEEIYGAAKELIPVLPKDNFTKCIIKQAVAQVNAASQTVERLRALMNETASKLPEYPVVMAMKGVGKSLGPQLMAEIGDVSRFTHKGAITAFAGVDPGVNESGSYEQKSVPASKRGSSTLRKTLFQVMDVLIKTKPQDDPVYLFMDKKRAQGKPYYVYMTAGANKFLRIYYGRVKEYLSSLPE

SEQ ID NO: 343698 - protein, 346 aa, unidentified
MLIVGCDYHPRWQQVAWFDTETGEIGEQKLVNGDGEAERWYRQLPVPSLIGLEATGNSQWFLDLLNQLGHEVWVGDAAEIRASYVRRQKNDRRDAGHVLKLLREGRFPRLWVPSAEQRDLRQLLIHRHKLVQIRSRVKNGLQHLAMNQGMQKKSRLWSVAGQKAFRQLPLVGWAQCRRQGLLQLLVYLDQQIAPLDQAAQQAAEQDPQARLLLSQPGVGPITALAFVLTIGDVTRFARGKQVASYVGLIPREHSSGGRQRLGAISKQGNSFLRMLLVEAAHSVVRLDEGFRKQYAHRCHSKAKGIAKVAAARRLAVRLYWMLRTNTPYPEIVRIESSPRVPLVGKS

SEQ ID NO: 343699 - protein, 374 aa, unidentified
MHNHNEVFVAFDTSKLRNAVAIAESGRSGEVRFLGEIENTDAATAKLVSKLAAKYQQLTFCYEAGPTGYGLHRLIESLGHDCIVVAPSLIPRKAGDRVKTNRRDALGLVKLLRAGELTAVWVPDARHEAMRDLVRAREAAVDDLKSKRQQVLSLLLRLGRHYLGKRTWTQAHMNWLASQKLDHAEQRIAFEEMLLAVRQAQERIARLEQAIRAAVPDWSLAEVVTALMAMRGIDLVSATAFLAEIGDLSRFRTARELMGYLGLVPSERSTGDTVKRGGITKAGNRRARRILVECSWSYRHPPRVGKEKLAKVAAAPRAVQEIAWKAQSRLSARFRALTRRGKRPTVVVTAIARELSGFIWAISREIVRPRIPAM

SEQ ID NO: 343700 - protein, 427 aa, unidentified
MLKINYMSTLFVGIDVSSKSNVVCAIDFYKNQLIKTSVSNNQPGAYNLICQIVSALQKHTDLNTVVVALEATSIYSVHIANYLSSCEELMPYHPYVFCLNPKMTANYRKSFIGMNKTDLLDAFIIADFARVGRIETDPWRGSQFLALQRLTRHRLHLVEAQTREKTYMVSNMFLKFSELPILPKEEQPFCDNYGATASSVLTEYLSMEDIINSSPEELIDFLGEKSKNRISDLAKTADLLKKAARDSYRLDKCLYEPINISLASSFNCIDAFKQEIKIIDKAIIKAIAGLNPNAYTILNSIDGIGPVFAAGILAEIGDITAFYSQDALAKYAGLTWTKSQSGDFEADESRMTKAGNRYLRYYLGEAANSMKNHVPEYRDFYYKKYNEVPKHKHKRALALTSRKLVRLIFGLLTKEKLYSTDRADALS

SEQ ID NO: 343701 - protein, 349 aa, unidentified
MLADEVDYVVGVDTHLDEHVLVIVAAPSGALVARRSVRASARGYAAALRFAAELAAGARVWAIEGAGHYGAGLARYLAARGETVLEISRTPRAERRLRGKDDSLDAARTARAALAGETLALPRSGQRREALRLLLVARRSAVDVRREALGQLRGVIVTAPDRLREELRQLPTGRLLERCRRLRRSSSASADELATRLVLRSLARRIEAATIEAAELERELLGHVRALAPQLLDEPGVGPIVAAQLIVAWSHRDRLRSEAAFARLAGVAPVPASSGQTIRHRLSRGGDRQLNRALHMIVLHRRQHDPTTQAYIERRIAEGKSRREATRLLKRYLARHLYRVLQHAEPLMT

SEQ ID NO: 343702 - protein, 348 aa, unidentified
MNLKRIGLDTSKAVFTLHGVDQDETAVLRRNMRRAEMEAFFAMLPPTHVALEACGGSHHWGRRLASFGHTVQLIPPQYVKPFVKRGKNDRNDAEAISEAAARPGMPSVAVRSAEQQAEAIVLSARELLVRQRTQLVNAVRGHAAEFGIVAAKGTSQLPALLEVVAAGEAVPDAAKEMLAFLGGQVAQLDERIGELERRMKQQHKANPVSQLLAEVPGIGPIGALSLALTIDPGRFQSGRHFAAWLGLTPKEHSTGGRQRLGGISRAGNERLRQLLVLGAMAVIKYAKPGSKTASAWLLALLERKPRKLAAVALANKMARVVWAMMATGEAYRGSKTVATQAAGVAVVA

SEQ ID NO: 343703 - protein, 309 aa, unidentified
MSSFVGIDVSKATLAVAVRPAGSPLSFTNDAQGHHDLLQSLKGLSVSRIVLEATGGYERALLVALLDAGLPAVRVSPHRARAFATAMGRLAKSDPIDAAVLAHLAEVLDVGSTPVVSPKQQALRDLVQRREQLIQWRDDERRRVQQAASPFVRHSLQRSLVATQREITRCDREITAALAAVDLESSQRLLAVPGIGPVTTASLLAYVPELGTLDRRQVAALVGLAPYNSDSGAHTGKRRIHGGRPRIRRVLYMAAWSAIRSQPDFKARYQDLRQRGKCAKVALVACMRVLLIRINAMLRDKTEWKMAKI

SEQ ID NO: 343704 - protein, 378 aa, unidentified
MKRILKIGMDVHTTNYTLCAMEPIIGEDDRVFATIKVTPDYKNILMFIENLKMKLGLNDEYDIQCGYEAGCLGYSLYNQLTAAGVKCVILAPTTMLTPQGVRIKTDMRDAYMIAQCLSYGGYHAVYIPTEADDSVKEYLRMRNDHKLALKKIKQQINAFCIRHGFCYDGTKWTLAHLKWLKKLEITNELYRETLNEYMGSYEEQEAKIERYDKRIKEIAEQTKYQDKVKKLECFLGIKTHTALSLIVETGDFKRFAKGNQYASYLGLAPGENSSSDSIHRLGITKAGNSHLRQLLIEASGGICKGAVGHKSKELRARQNGNKAEVIAYADKANTRLRSRYYKFIRHGKKRNVAVAAIARELACFVWGMMTDNIEMKAA

SEQ ID NO: 343705 - protein, 320 aa, unidentified
MSASVEPVYVGIDVSKAKLDVCLLPSGQTFVFDNDAAGIRQLVALLQKQPRVARCLLEATGRYERRGAADLMEAGFHVAVVNPRQARDFARSMGRLAKTDRLDAHMLAEFAKLGHVRLSEKTPENRAVLDDLITRRRQVTSMLAAEKTRREGLTHKLARASVDKVIRLLEQQREDLDREIARLIESDDDRKNRRDLLSSLPGVGNTTASQLVASLPELGKLNRQQIAARVGVAPLNRDSGTMRGHRTIFGGRSAVRAGLYMATISAMRFNPVIKRFAQRLAAVGKAFKVVMIACMRKPLTILNVMVKNNEHWRSPVLQNA

SEQ ID NO: 343706 - protein, 320 aa, unidentified
MMAQNDLVVVGIDVAKNKVDACIRRFALRQTFPNTAPGHRKLVAWLRKHKVDKVAMEASGGYERDWAKALRQAGIEVRIVDPKRVRSFALSAGRLAKNDTIDAEMIAWFAETFDEAPGQTHDAAREELAALVKARKNLIDVKTRLQSQNEHAVPGPVQKAHVRVLKSVAAEIAKLEAAISARVKATPEFVERAEIIESVPGLADTSSAVLIAGASELGKVSDRIAAALIGIAPFDDDSGKRRGERHIKGGRRWVRNALFTPCLGAATQHNPVLKAHYERLIAKGKEPKVALVACMRKLIVILNTMIARGEKWDPSRYALR

SEQ ID NO: 343707 - protein, 317 aa, unidentified
MALQRIFVGIDVSKDWLDLWLEPVKRFERVSNDAAGWVATIGLLNSLGVEAGLVVAFEATGGYERGLRQALLEAGFEVRRLNPLRVRLYAKSLGRNAKNDRIDARVIARYAAAAETMPETLDPARERLAELVSHRRRLVDERVALGNQTDMLGCRLLQAQNRKRLALIERHIEQTDTLILEAISQIPGLLAKVELLKTLKGVKDVTAIALLALLPELGRITRRAVAALVGLAPFDHDSGKLKGTRSIAGGRTAVRTALYMAARAAARSKSPLGDFYKRLIAAGKTPKVATVALMRKMLVTLNAMTRDNQAWKHAKAC

SEQ ID NO: 343708 - protein, 327 aa, unidentified
MMFIGFDISKDKVDLCWLRDPATNKKKTKVFKNNQLSFKDIEQWLLSTTQAVAEKVVIAVEPTGLYHEPLMYFLYQQGFNIVLANPGKAKKYAEALNIVHKTDKSDAIMLASYGYAKHSIVNYWQPEAKEIRELKALLRRLDALESSKQREHNRLEASEFNAASERVIQSLKETINFFDDEIKKLKLDIDNHIDSFPNLKKDRALLETIPGIGPVMSRELTYIFAAKKFNQAKQAAAYCGLIPKLHESGKMKGRTTLSKLGPSRIRSKLYMAAVVAGQWNYQIKQQKIRLMNHGKTSMQIIGANMRKLIHICFGVVKNQEAFKLQES

SEQ ID NO: 343709 - protein, 374 aa, unidentified
MLFQPTPPSFQTRYFIGLDVHHATIASCVYDVDLRCFCDEREFSAQKPERLSQFVASMRSRYGDFRCCYEASFCGTALYEALTALSVDCAIIAPGSIPRSNGDRIKTDRRDARKLAEYFAAGLLTECFILDSELRSVRSLVRSREALIKNLHRSKMQVIHFLHGRGHSYNAGGYWTQKFMVWINKVELDQSNDAQVLRGNLEDIIYIQSRIREVEQQIRTASESSRFQEPIQILQGFRGIGLITAMQLVCEIGDFRRFEKPTALMAYLGLVPSQRSSGNTIRSGSITKTGNVHARKALVSVAWKYIHYPRISASLGERHCSARTVTISQRAQKHLHQRYRALTKRKSPKVAMVALAHELVGFLWEAMQSPVQTA

SEQ ID NO: 343710 - protein, 316 aa, unidentified
MVRRSEFVGIDVSKDALDVAVFEGPSWRFANDETGFAALVAELRSRPVRLAVLEATGGLEVPVAAALASAKINVAVVNPRQVRDFARATGLLAKTDRLDAQAIARFAEAVKPDPRPLPDAQARELNALVTRREQVTEMTVMEKNRLKQALPTLHPVIQAHIEWLRGQRDELDAQLHQVVKESPLWLEKEELYCSMNGIGPVIAHVLIADLPELGTVSNKRISALGGLAPFNRDSGTLRGKRTIWGGRKRVRTALYMGAVSASRSNPVIRSYYLSLLARGKEKKVALVACMHKMLIMLNAMARTGREWEPVRVVRAA

SEQ ID NO: 343711 - protein, 342 aa, unidentified
MNEVSIIGLDLAKNVFQAHGAGVDGSVIFRRKLSRAQLLKFMSEQPPCVVAMEACASAHYWGRAISDLGHDLRLIPPAYVKPFVKRQKNDMADAEAIAEAASRPTMRFVAVKSEEQQAASMAYRTRDLLVRQRTQTINALRAHLAEQGIVAPVGPAHAGRLAAVVDGEGGVLPATVRDLARLLLNQIADLSEKIAGLDTELRRRAGTDDTARRLTTIPGIGPITAAAITTFAPPMETFSKGRDFAAWVGLTPRQHSSGGKERLGRTSKMGQRDIRRLLIIGAVAVVRWATRKGAPEGAWLARMLARKPKMLVAVALANRMARTAWALMRKGEDYRVPAMATA

SEQ ID NO: 343712 - protein, 338 aa, unidentified
MNSNVVGLDLAKSIFHLYSLSAEGKPVKKKLKRHELLAYVAQMPVSLIGMEACGGAHHWAREFMKLGHEVVLLNARFVKAFVVGNKNDFNDAEAIFAAVTRPNKRTVVVKNLQQQEMQMLHRLRQDLIDQRTALTNRIRGFLSELGVVLPQGVNQVRKQLPLVLANAEYGLPSLSRELFAELYAGLSKLDDDIKAQDRRINRLCEQNALSRRFLDVPGVGPITATILASDIGDGKGYAKSRDYAASLGVVPRQHSSGDKQVLLGISKRGNRYLRTLLIHGARSVIRCCTDKSDPLSRWLQAVVERRGFNKAAVALANKNARVLWAMARQDSAYEAAAA

SEQ ID NO: 343713 - protein, 423 aa, unidentified
MPSQHPNAADFVAVIGLDWADRKHDICLLETGQESPEYSVLEHDPVAIDAWAAKLRKRFAGRPIAVCVELARGPIVSALLEYDFFVIFPINPAMLAKYRRAFTPSRAKDDPKDAFLALDLFRHHFDRLAPLRRERPAMRALQRLVQARRTLVDDRCRLINRLTYALKEYFPQVLRWFRDKHTDVFVDFVMRWPTLDAAKRAHRDTLVEFFHAHNVRYGKTTDRRVDTIKAARALTSDLAVIEPNRLMAESWLAQIAALSKAVSRLDAEIAARAAELPDFKLFAALPGAGAALAPRLLAAFGENRERFPDAASVQKCTGIAPVVERSGNKCWTHWRFIASSFLRQTFVEWAGETVPHCFWAKAFYESRRAKGVAHQAILRALAFKWIRILWRCWHDRQPYDEARYLMALQKRHSPILAHAAQSP

SEQ ID NO: 343714 - protein, 411 aa, unidentified
MQQPIEVEVDEPERIVERVAAIDVAKATGMVCTRVPHDTVAGKRVTRVWEVKATTAALVELADHLVCQGIERVILESTSDYWRGFHYILEAGGLTVWLVNAAQVKNVPGRPKTDKLDAVWLAKLAERSMVSPSFVPAEPMRHVRDLARAQFDLVRGPRPGQAARVEKGQARVRLAALAEALDGRFTDHHARLARMLLDQIDELTARIGTVTELLDAAIAALPAEPATGPAGPLAPPPATDAAAPARFAATVQRLAEIPGAGPDSVRAVIGEIGLDMTVFGTHQRLCSWAKVSPRTVQSGRKRGRGRTGKGNPYLKAALGQMATGAAKTDTFLGARYRRLVKRMPKAKALAAIERSILVIIFHLLADPTAEFADLGADFYTRRIDRARRTDQLTRQLRALGYTVQLTPAEAA

SEQ ID NO: 343715 - protein, 384 aa, unidentified
MNKHSILFIGLDTHKEFNEVAYIEEHRGAKPVHLGRVSSSKVAVQKLVRQFESKYPGATLHFVYEAGPCGYWIYRLVTSLGHCCYVVAPSLIPKKPGEKIKTDKRDALKLAKLLKSEDLTPIYVPEPEDEAVRDLSRAREVAMKDLKDAKYQLKALLLRNNINYRGTANWSQKHLRWLTELVLPHPAQHIVLQEFLHTISERISRLERLDNELTHHVHQWRYYPVVKAIQAMRGVRLLVATGVVAELGDLSRFDHPRKLMSYLGLVPSEHSSGGKRHIGAITKCGNGRARRLLVEGAHTYRYAANISTDMQKRQEGLPKDIIDIAWKAQLRLCKRYKKMIAKGKHYNLVVTAIAREMIAYIWAIAKEVVLTPVNTKLRLARVPA

SEQ ID NO: 343716 - protein, 405 aa, unidentified
MEFVVALDVSMGKSYSVIYQDQRCLYEEEIAHNQLGFQQLFDHIQTLPGSVTVVFEATGIYSKPVETFCQRNALRYCLLNPLEAKKQLELGTLRSWKTDKHDAHLLAQSHSLHRREENQTHSIIYQHLRDLSRFYQEIEEEIKRMRMYLHNALQLSFPELEQFFSSRITPYALSLIALFPHPDLVLRSSITKIKNQLINHTLKNISQNRAKQKAVEIMSYAHSSYPAVSIESVQTQKVRYYARQLLHLLEEKERVSKELIEEAKNLPEFDLFLSVPGIGEISAALVMGELGDLSRFSNHKKVNAFVGIDIRRYQSGKYHGQDHINKRGNPKGRKILYLIIRNMIRQQKAAPNHIVEYYYKLKKQPTPKKDKVAVVACMNKLIKCMYSMARNHTEYDYSHAVSMDQ

SEQ ID NO: 343717 - protein, 414 aa, unidentified
MKPCLFVGVDIHKNSHTAAVLDGYFEVLATIDFANNQEGFCHLDLKLKKLAGGRSLTFGLEDSHGLGSFLAQYLVNKDYPVLEINPVSTDRARRHTVARDKSDTMDAIAIAKTLIRERANLNPVRINKNSIALKEMAGYRQMLVRESTRIKNRLHVALFNQYNGILGQFGSLFGKCALAFFARYPDPVMLKGVTLSTLTGFLKANSKGRYKSEEARAILSNPDNSIATTLASTRAHIIESHAERLIQIQQELKKIEGILEDLIEASSYSCLTSIPGIDTATAAKIISGVMDIARFSSSSKLAKFCGIAPTEKSSGRKEKYQKSKYGNKSLYTTIYFMALAHISRTRNGRDKNPISRAYYLKKISEGKTKKEAITCLARRLVDLIYAVMRDRSIYNFSKSRFTKQLDSVLNTAVA

SEQ ID NO: 343718 - protein, 311 aa, unidentified
MSEFIGIDVSKARLDVSAHGGSSFAVENTEADIGRLCEQLKALAPELVVMEASGGYERLCVAALAAAGLPVALVNPRQVREFARATGVLAKTDRLDARVLAHFAAVVRPPVRPLPDAQHQVLEELLARRRQMVAALVAEKNRLGLARTRLVKRTVREVVSTYERLLELIDRELDELIKASPLWREKEDLLRSFKGIGPVSARTLLAELPELGLLNRKQIAALVGVAPIARESGSWRGRRSIWGGRGQVRAILYMATVTAMRANAQIRVFYLRLRQAGKPAKVALVACMRKLLTILNAMVRTQTRWQPPSTA

SEQ ID NO: 343719 - protein, 345 aa, unidentified
MEITTIGIDLAKNVFQVHGVDQRGKVILRKQLRREQMVEFFAKVPPCLVGMEACGSAHHWARVLQGQGHTVRVIASQFVKPYVKSNKNDAADAEAICEAVARPNMRFVPVKSVEQQAVLAAHRARQGFVKARTAQANQIRGLLAEFGLVIPRGLWHIHQRVPALLERAADTLPLALRHLIERLLAHLRELDRQVAELETQIQAWHRSSELSRRLEQIPGIGPLTASALVASIADARSFDNGRQLSAWLGLVPRQSSSGGKPLLLGMSKRGDVYLRTLLIHGARSAILAAQRKAATTDSWLGKLLQRRHLNVATVALANKNARTAWALLAHDREFQPDYRPSLATA

SEQ ID NO: 343720 - protein, 389 aa, unidentified
MKIFVGIDIAKLNHFAAAISSDGEILIEPFKFTNDADGFQLLVSKLESFDKNSIIIGLESTAHYGDNLVRYLVAEFYQVCVLNPIKTCQMRKNNVRKTKTDKVDTYVIAKTLMMQDNLRFVSFFDLDMMDLKALGRFRQKTIKQRTRLKIQLTTYVDQVFPEIQYFFKSGLHQNAVYALLKEAPSPKEIASMHMTHLANLLKVNSHGHFTKEQAKELRILAQKSVGANDSAISIQITQTIQQIELLDSQLEKIEAEMTDIMKFNDSVIMTIPGIGYINGGMILGEIGDIHRFSNPNKLLAFAGLDPSVYQSGNFQAKTTRMSKRGSRVLRYALVNAAWNVVRNNATFKAYYDAKRAEGRSHYNALGHCAGKLVRVIWKMLTDEVEFNLE

SEQ ID NO: 343721 - protein, 455 aa, unidentified
MAGAALRPAYGEYTMTTPPSTSSARYVGLDVHKRMIVVCIMDAAGKVISTERLSTTREAVESFAKHVLKPTDHVALEATTNCWPIAALLKPFVQSVTVSNAMATRAIAKAKVKTDKVDARVLAHLLRCNYLPPVWHPDEQTQRMRQLTGRRAALVQQRTKLRNRIHSVLHMRMIETPSQLFSTKGLEWLKNLLASGELDDDAVFMIESDLRLLESLQQEIDHFEKLLAQEAYACDQVRLLMTLPGVDMLVALALLAALGDISRFRSPREVASYLGLVPSTRQSANKCYHGPITKCGNVQARWMLIQACQHLGRNPGPLGNFFRRLKKRKNHNIAVVAAARKMAMIAFLMLRNHEPYRYAIPRTTEAKLARLRIRATGKKRKGGPGKGQKGVAKRPGGGRTIKSLDRVYAEEGLPQRKQELPPGERQMLKATGCEEFAESLASDRVVPRKSAPISC

SEQ ID NO: 343722 - protein, 346 aa, unidentified
MEHYVGLDVSLKQTAICIVDRTGKIVREGVAPSDPEAIAACIKVHAPHVARVGLETGATSTWLWTELNKLGLPVICIDARHAKAALKMQINKSDRNDAVGIARIMQCGWYKEVRVKDLDSHAIKALLVSRALLVKIKRDLENQIRGLLKNLGLVIGRAKMNVFAVRAAELAEARPELAAAVEPLLKAREAIGQQIADLDRKVLRLARNNAQVRRFMTAPGVGPITALCFLATIDDPTRFRRSRSVGAYAGLTTRRYASGEIDWTGRISKCGDKMLRSYLYEAANVLLTRVAKWSALKSWGMRVAKRSSLRKAKVAVARKLAVILHRMWIDGTEFKWSSKEAANQPA

SEQ ID NO: 343723 - protein, 369 aa, unidentified
MIQHTTNTIWVGLDVHSASITAAILHGDSPDPEIVRLPGDLNATRRLFRRLADSGTPRACYEASGAGYVLQRTLDYDGFHCEVIAPSLIPSLPGDHRKTDRLDATHLARMYRSGHLTSVTVPDVDQEAVRHLVRARLFMRRQITRSKHRIMGILRTTNHRFTGTKSYWTKKHREYLAKLRREITGPLQIVLGSELQHLEYLESSQLALDAQISEIAQHHPWREAVEALCCFRGIKTLTAMTIMSEIGDIKRFKSPRQLMGYTGLVPRERSSGERQRRGPITRAGNRYLRRVLIESAWHYSKRASSTLRIQRRRMGQDPVVVGIAVKAQHRLQRRYQHLIKTKHTNKAVTAVAREFCGFIWDMLWELDSR

SEQ ID NO: 343724 - protein, 351 aa, unidentified
MKTQSKQIDFKGQNFYCGIDTHKKNWTVTIQTDELFLKTFTQNPDPELLVKHLKKNYPGGNFCAGYEAGYFGYGTQRKLESMGINCVVLHPADIPTSDKDRDQKRDPRDSRKIAKALKNQEVIPIWIPPVSLEQDRQLLRTREKLSKDKTRTKNRIKAFLQLYGISYPQAFSQPGSHWSARFINWLDTIQLNESTGTESLRSLVRCLRFQRGEILTISKQIRKLSQSDKYDKQYLKLIKKPGIGLIAAMTILTETGDIRRFKTVDSFRSFMGMIPRVHDSGDKEHPGKITKRANNHLRYLLVEITWMAIRYNPYYLNIYKNYRARMKGNKALIRTAGKLTNEIYFCLKNDV

SEQ ID NO: 343725 - protein, 451 aa, unidentified
MKSGKYSSVHVNSVDQKEIDSQLRGDTLIMGLDVAKKKEYAALADETGKVVRVIRWEHPWESRKFADFIDGLKPPKVQMVMEPTGSYGDPLRHLAYERDWEVWKMSPKRVHDSKEIADGVPSLHDSKAAHILVWLHKQGLTEPWEPKKVSRRRVKTLIRRLSRLQENWQRHLGYLEARMARYWPEIIQAWELKRATLLGMLINFGGPQKIVENEEEVRTYMRKKGGSFLKQKRIDEVINAAHNSLGVSTLKSERVSLKNLAEHTDRLRRDRKKFKRKLNQVIEKKEIRRIGDEVGLPTAALFWDKLGSFQNYDQVDQLIKAFGLNLKEKSSGTYNSPLHITKRGPSDARSSLYLATWRKINTDPLFQAWHRDKVTRDGGEDNAHKNVSVVALMRKYVMGLWHLARGKEFDSSLLFDADKLKAQRSMVTAKLSHNAKELNRLTKKEECLMNR

SEQ ID NO: 343726 - protein, 342 aa, unidentified
MKQYVGLDVSQRETAVCVVSETGQLIFEGKAKSDPGVLTNLLRKHAPLAERIGFETGAMASWLWHELRRVDLPVVCIDARHAHAALSVRMNKSDQNDARGLAELVRVGWYREVKVKSEESQKIRAILVARSRLVSMRRDIENQVRSLIKECGLLFPRAIGQRFRNQVSELLGEDHQLLSVIAPLLSIHEHICQQQSKFDDEVRRLAKSDETTRRLMTVPGVGVVTALTFRHTIDDPSRFRSASTVGAYLGLTPRRNQSGETDINGKISRWGDRLLRTYLFEAATVLLYRTKKWSSLKAWGMKLAKRIGMRKAKVAIARKIAVILHCIWVDGTSFDWGQAKPA

SEQ ID NO: 343727 - protein, 342 aa, unidentified
MNYHTGCDAHSKYCKFQHIAEDGSLGLHMTVKTTKEDIHKFLDHLDAPTTMTLEAGRNYWWLSQLFMQHPIVSKVNVVDPRRSRQLAEELSVISGYGRAKNDRIDAEMLADQERRGLAPAIHVPTEEQLEKRTLTRYRSVMVVNRTRAKNFIHSLMAMHGFKAAIKTLLVDQAEKQEMMNLFPAYLQFMVEQLLDQIRFLDNHIPNCENKLNELLPPTHPQMKILMSAPGIAIVLARIISSEILDIHYFKEPKYLISYSGLAPIDKDSAGRKGPIKLNRHCNYWLKYAFVEAAHNASDYPKYRRKYELDVKKHGKTIAKLNLARKLAKAVYWMLSRQQLYKS

SEQ ID NO: 343728 - protein, 367 aa, unidentified
MTIVAQAHPFVVGVDTHARTHALSILATPHGEVVDDGEFPATSAGMARAIEWAGRRTGGDLEVLWVIECAATYGAQLARAVSAAGYQVVEAARMNAKANRGIGKSDPLDARRIAAAVLPVQVDRQRHLRKDDGVRAGLRILMAARDHMTSERTATINALTGLLRVLDLGIDARKPLTSKQIAEIAKWRTRTEDIQAVMARAEAVRLAKRTLDLDDELAANVKTTTALLKDSPARVLLDKPGIGPVTAAVALTAWSHVGRLHSEAAFASLAGVSPIPASSGNTVRHRLNRGGDRRLNKALHMAVIVRMTHDAGTKAYVERRVAEGLTKREIRRVLKRYLARQIHRALTAASRADDIAEDTIAGTPLSD

SEQ ID NO: 343729 - protein, 365 aa, unidentified
MPSVTPPAGLIHLGMDTSKNTIVAAVLLPGEQIPAVDRIFNDEAAIRRLIGRFPDRGLLRACYEAGPGGYDLYRLLASMGVACDVVAPSLIPKGGSDKVKTDKRDSFRLARLHRAGELTPIRVPSPAEEAVRDLARVRAAVLADRKRAQQRLTAMLMRHGRVWRNTYWTGPHRAWVAAQSFPEPALATALAHYRAALDTRESELACIEAELAPWARREPLAAAAGRLCCYRGIAELNGLTLAAEVAGWRRFASARAFMGFTGLVPAEYSSGQRTWRGHITKAGSGPVRTALIEAAWAYRFSPAVGVTLRRRQQGAAPDTIARSQKAQRRLHGKYRRMVTGGKAAPEAVTAVARELAGFVWAEMTS

SEQ ID NO: 343730 - protein, 406 aa, unidentified
MNAVGIDVSKGKSTVAILRPGGEVIASPFEVSHNPRELNELVTLIKSLDGDSKILMEYTGNYYLPVALFLQKSGLFVSVVNPILVKDYNNKSLSVRKGKTDKKDSLKLAAFALDRWNELPLFSAQSDTRTLLKAFNRQYNQYNKLKVMLKNNLISILDQTFPGANTLFSTPARKADGHEKWIDFVLKFPHCECVSKKSFSAFSKGYLSWGRKFGYLFSEAKAKEIYAFACNCTPSLADSEATHTLVSAAILQLNTLNETLASLQREMDLLASSLPEYDTVMGLYGVGSVLGSQLIAEIGDVSRFSDKKALVGFAGIDAPPFQSGNFNPQSRNISKRGSAALRKTLFQVMSVILQKAPANDPVFLFMDKKRSEGKHFYVYMMAGANKFLRIYYARVMEHPNSLQKAA

SEQ ID NO: 343731 - protein, 346 aa, unidentified
MLYAGLDLSRQRLEVRILDEAGGTVEMTAVRPDRDGLRGLAAQVARHRQPVTAVVESMNGARFVHDTLERLGWQVEIADALRAKALAPLVAKTDKIDAWVLAELARRELVPAIWLPDPTVRAERERARFRLHLVRLRTALKNRIHATLITFGHPVPVSDLFGVAGRGLLAALDIPEPWATTLATSLSLVDELDRQIERCEAELRAMGADHPDVALLRTLPGVAWVLGYTLAAEIGDIARFVGAKQFVGYTGLCPRVRQSGTRDDRGPLTKQGPKYLRWALIEAATHAASHPRYRGHYQRTRRRLGRQRGPAVARVELARELATSIWHMLTKREPFAAAGPIRALVA

SEQ ID NO: 343732 - protein, 338 aa, unidentified
MSIYAGLDVSDKTTHICVVDVDGKVLRRDVVASDPDVLAKWLNKHCTDLVRVVLETGTLSTFLYHGLVERGVAIECICARHAKGVLSARVNKSDVHDAEGLAQLARTGWYKRVHMKASATHIDRAALRIRAQLITARTSMANQLRGLLKLFGLRMGTARTPGRRAERLAAFYAQRPDLRALFAPLIASLEAIEEQLRAYNRLLNDRAKADQVCARLMSVPGVGPITALTYTSTIEDPRRFARSDDVGAYAGLVPRRSQSGERDVSGHISKAGDPMLRKALYEAANVALTQVKRPFALQAWGRKMAEAKGARRARTAVARKLAALLHSLWLNETEFRWA

SEQ ID NO: 343733 - protein, 293 aa, unidentified
MIYVGIDIAKLNHFAAAISSEGGILIEPFKFSNDYDGFYLLLSKLAPLDQDSIIIGLESTAHYGDNLVRFLISKDFKVCVLNPLSTSAMRKNNVRKTKTDKVDTFVIAKTLMLQDPLRFISLKDLDYIELIHDSSLSIQITQTIEQIELLDSQLFHTELGMANLVTCLHSVIMTIPGIGTTNGGMILGEIGDIHRFPTPGKLLAFAGLDPSVYQSGNFQAKKTRMSKRGSRVLRYALVNAAHNVVKNNATFKAYYDAKRAEGRTHYNALGHCAGKLVRVIWKMLTDEVEFNLE

SEQ ID NO: 343734 - protein, 318 aa, unidentified
MSTGKSEVFVGIDVSKTQLDVATRPEGTKFSVANSEEGIADLVKILKTSPPTLIVLEATGGLEMPALSALAAAGLPVVMVNPRQARAFAKALGKLAKTDGIDADVLAHFGEATRPEVRPFKDHETQELTALVARRRQLIDMLTQEKNREARAAQAILQNIRLNIEWLEKRVQEIEAQLNKNVRNCPAWREKDNLLRSTPGVGKVLSFTLIADLPELGALNQRKISALVGVAPLNNDSGQRVGTRSVWGGRSHVRHVLYMATIAALRHNPVIKAFHQRLIQAGKKPKVAIVACMHKQLIILNAMVKKNTPWRTLPEFTG

SEQ ID NO: 343735 - protein, 422 aa, unidentified
MQNSAAEKRKQVPEGYLIIGVDPHKKRHAAVAITQDFTVHAKFKFDNTLEGLEYMIERARAEMTKTGCRGVIFAIETGGHYWRNIAYFLDGKGIPLRFINQFTLKRRREGKDINRRKNDYRDSEVAAQLLCTGEFTESKVPQGVYAELRAAHNAYHRLVKERTRITNLIKGLLDGLFPEFVSVFKNPCAITALSVLSTCPVPGIIAGMTEDEFVVTIEAHFQGRRFMRRKLRQLHQTAKTSIGIAAGARSVASEISFLIEKYELIKGHICSIESTIAGMVDETEEGKYLLSITGLNYIAVAGLIAELGCFNLYRSSKQMIKMAGSNPIESESAGKKGFHTPMSKQGRPVLRYCAWTSVIPMLRFNAEFRAWAKQRRERPVHANPLGGREVVGAALNKLLRLAFALVKNKTFYRSPLLAPAIN

SEQ ID NO: 343736 - protein, 343 aa, unidentified
MKLHVLGIDLGKTVFHLVGLDSTGRVVIRKKCSRPQLLAFTANLQVQLIGMESCSGSHFLGRALREQGHEVRLMPAQYVKPYVQTNKSDFLDAEAIAEAVQRPRMRFVPIKTEEQLDLQALHRVRERWVMRRTAVVNQIRSLLLERGLTLPKGRGYVDRQLPRILEDGELRLSGSFRVLLAQLKIELEQLTARIEEMDRVIQKTAKENEACQRLTEIPGVGPVTATALIAAVGNGSTFQKGRNLAAWMGIVPGEYSTGGKQKLLGISKRGNKYLRTLFIQGARSVLQQRDKQAPGLSSWLAQLLARAHQNVVIVALANKLVRMAWAVLCKNERYRAPVLAVTT

SEQ ID NO: 343737 - protein, 349 aa, unidentified
MNYYAGLDVSLEETAICVVDGSGLIVKEVRAASEPEALIAALKAIDVPLERIGLEACSLTAWLHDGLWGAGLPAICIETRQANAAMKTMPNKTDRNDARALAQIMRTGWFRAVHVKSRQSRLWRSLLVARRRLVNERRAIENVVRAVLREAGLKFGRPSFAAFAGRVRELAGDDPTVRPVVEPLLAVLATMLGQLARLTKQALAITRREEVCRRLMSMPGVGPITALAFRATIDRPERFRRSRDVGAHLGLTPTRYQSGETDIVGRISRCGDELTRTALYEAAHSLLVRSRKWSALRAWGMKIAKARGMARARVAVARKLAVILHAMWKAERAIPLRRGSRLILSAAPL

SEQ ID NO: 343738 - protein, 375 aa, unidentified
MGDHIEAFVGFDTSKLRNAVAIAEGGRGGEVRYLGEIENSATATTKLVRKLEAKYAQLTFCYEAGPTGYGLHRQIKGLGHQCVVAAPSLIPRRPGDKVKTNRRDAVSLAKLLRADELTAVWVPDSHHEAMRDLTRARETAAMDARVKRQQVSAFLLRLGRHYPAGKSTWTKAHLKWLAQQKFDYPEQRIVFEEMMLAMRQACERQERLEQAIRAAVADWSLAELVSALMAMRGIDLIAAATLLAEVGDLSRFPTAQAVMAYLGLVPSEDSTGDTVKRGSITKASNRRARRMLLECAWSYQHPPRVGQAKQAKVDAAPTAVREIAWKAQYRLYRRYRALIRKGKLKTIAITAVARELAGFIWAVSRAITRARVATS

SEQ ID NO: 343739 - protein, 448 aa, unidentified
MAQRTRVKLEIANPNAAGIDVGSASHFVAVPPDRDDQPVREFRSFTEDLERLADWLVACGVDTVAMESTGVYWIALFELLESRGLRVYLVNARHVKNVSGRKSDVLDCQWLQQLMSYGLLSGAFRPRDEICALRAVMRQRAMLLSYQARHVQHMQKALTQMNVQLTNVISDVAGETGQRILRAIVAGERDPLKLAELKHARIRASKEEIARSLRGNWREEHLFVLAQSVELFDAYSQALQRCDVQLESMLRTLSRTQAEPGPSKRRRISKVKNAPKFDVRTYLFQICGVDLTAIDGIDVSTALKVIAEVGPDLSRFKSAKHFASWLGLCPGTKISGGKLLSGATKGNANRAAQALKLAAVGLRPSQSALGAYYRRMCGRLDKAKAVTAVAHKLARLIYAMLTKGTAYVDQGQAYYEERYQQRVLFHLKKRAAAMGLDLVPIQPQGQSD

SEQ ID NO: 343740 - protein, 350 aa, unidentified
MFVGVDVHKHSLCVCYYRSAKQYRYQSYPFTEQGFQAFLDSLTRRDEVAIESVTQAYYLIEQLTPRVKRAVVVNTFAFDLIRRSRAKTDEKDAFHLAQQLSYGHLPEVHLPERTIRDLRVYQNARVALVEERTRLKNRIHAAFLMHGVVTARKHLSSRKGREMMRRESSTYAGYPELELVALHLDRIDQVEEQMGAIERKMFELGSHLPDLPVLLQVGGISPLLAITILAEVGDFRRFPRSSKVASYAGLVPSTRSSAGRAKSGRCGYGRKRLRTAMVQAVRSLTVHEPENPLAQHYQILKARRGAGRATIAVARKLLEILWIMVTTEVPYRQLVPSLYETKLRSFKTAA

SEQ ID NO: 343741 - protein, 494 aa, unidentified
MKKPTYQSSQSIYRNQNAAIRAIFDAASSPRKVLCVALDYAKAKHVALCCDGNGDILKKPFPVDNSAEGVSYLCDQIDATARRRKIAKRGIFFGGEDEPSYVANFATALRGRGYVVARVNAWEAKENRENFLASTDNLDLLGIAKTLLSRRARLTGSGGEEDSESYRQIRELLRARRGLVRQQTAASNRIHTIADQLFPGFLDASKSGVTPFTEASLELMRERFSAPQVARRQQPALAKFLRGHHSRQAEETAGKILALARGALPPEAGRVPAMQKTLAATADLYACLRRNSKGLRTDAALALAGTPYAMLTSIPGIGFVLAAGVAGELGSPKKLPRTDSLCAYAGIVPRVSQSGGPDVLAQHGSTGPRCNRILKDWVVQSAQKIALYGPPELKDRMAKWQANGQHAAFAGARRYLRLLRTLVISEVPYLDPSGRGCAVAPDAQASACEQTWEVLVTKWRTIPDWREAAFAEDRPLGFWRRVAMEMHGVHLRLD

SEQ ID NO: 343742 - protein, 449 aa, unidentified
MEQPQEVEDEEYERVYQRVAAVDVAKASGVVCTRVPDEDRPGRRKMHVWTVTATMGAVTELGDHLRCEGIEVVTLESTSDYWRIWYVVLEAAGLTVQLVNARAVKNVPGRAKTDKKDAAWLAKLTERGMLRPSFVPPRDIRRLRDYTRLRAGLVHDRTRQWARLEKLLERALIKISAVASTLDTQSVRAMLEALIAGQRNPKVLADLAIGRMRAKRKELAEALDGRFEDHHAELARILLDQIDALTRQVNALDERISELIAQIPAAWGVDADGTTGPEAGRGPDAAVLPAVARLDEITGCGITAAAAIIAEIGLDMTVFGTPGRLVSWAKRCPQTRQSGQKAGAGKAAKGNPWLNGILGEIAASASRTDTFLGERYRRLARRRGKRKALAAIARSILVIIFHLLADPAARFRDLGPGYYDNRISRERKINNHVRQLQALGLNVTIEEAA

SEQ ID NO: 343743 - protein, 341 aa, unidentified
MSERQYVGIDLHRRRSVIVRVDREGKHLSTVRVPNEALEVARAVEEAGPHPEVVLEATYGYYWLVDLLEELGATIHLANPSGLNWGNRRVKNDERDALDLVKKLRLGELPEAWIPPPAVRELREIVRYRAKAVRLRSGLKAQVHAVMAKNGVLPTRYDMFGPGGNAQLDSLGPKLPVNYVIRIESLRDLIEIYDREVGQLEREIHRQLKDHPGYRAIQEIPGIGPTLGAIFVAEIGDVSRFSSAEKLCSWAGLTPKHRESDTKVIRGRVTKQGSKLVRWAAIEAISKNHAGTRLRADFQRLAERRGKHKARVAVARKLLVYVYYGLRDGVVRSLNPTGEAA

SEQ ID NO: 343744 - protein, 422 aa, unidentified
MKRTNRKRSCNIPDSRKLPLETLAACIGLDWGDTRHAGALLPAGSQQVETFDLEQTPEALDEWTRQLRERFGGRPVAVCLEQSRGPLIYALLRFDFLILCPINPKQLARYREALQPSGAKDDPGDAAVILDFLVKHSDRVRVWKPDRADIRLIAQLCEARRDLVDRQVALSNAWKSHLKHFFPQAIALFGGELNTPLACAFLKKWPTLQRLQRARPQTIRRFFYAHNSRSESRLQERLALIAAAKPLCTDPTVVETHSRMAQALRAQLDSLRKPIADMEQRIEELLEGIEEAKLFQALPGAGAALAPRLLAAFGTDRGRYESADEIACYCGEAPVTQQSGKTMHNVRFRRACPKFLRQTFHEFAWSSTKHCGWARAYYDRKKAQGKRHHAAVRALAIRWIRILFRCWKNHTTYDELSYLNAL

SEQ ID NO: 343745 - protein, 427 aa, unidentified
MKYTQNEKILQVTEDTLIAGVDIAKESHYARAFDYRGVEYGKYLRFENNREGMTKFFRWAKDLMERHKKNKLIVGIEPTGQYWLCFAQYLKDNNIKVVLVNPFHVKRSKELDDNSPTKSDKKDPKTIAMLVKDGRYVEPTIPEGVYAELRVAMDIKDRLNKQIGMTKNQITRWMDIYFPEFNTVFSDWEGKAALITLREFPTPEKIAKKSAEEIISIWKKEVQRGVGEKRAIKLIETAKESIGKKQGIKMAEYEIKTLIEQYEFLKKQIEEIEKKIEELMVEIPGVKELLEIKGIGVNTVAGFIAEVGDIEKYEHPKQIQKLGGLNLVGNSSGKYKGETTISKRGRKRLRRVLFTAVMALVAKNEEFRELHKYYTTRAQNPLKKKQSLIVLCNKLIRIFYVILKKGVKYDPIKMIKDIKRPLLQEAA

SEQ ID NO: 343746 - protein, 344 aa, unidentified
MKITTVGVDLAKMCFQLHGVDARGKAALKKQLKRDQVLTFFANLGPCLIGLEACGSAHHWARKLSGLGHTVKLMAPQFVKPYVKTNKNDAADAEAICEAVSRPNMRFVPGKTAEQQAILAVHRARQGFVKARTAQANQIRGLLSEFGIVIPQGISSIAKRLPAILEDAENGLPDPMRPLMVRLAAHLKVLDREADELEAQIQVWHRQNDASRKLEKIPGIGPITASALVASIGDAKNFDNGRQLAAWLGLVPRQHSSGGKQTLLGISKRGDAYLRTLLIHGARAVVRVSERQAQTDSWLKRLLARRHKNVVAVALANKNARTVWALLAHERDYRPDYRPAPVAA

SEQ ID NO: 343747 - protein, 335 aa, unidentified
MKHYAGLDLSMETTQVCIVDENGRKLVSEKVESSPEAIAAILKRDGPIERVVIETGRMSPAICLGLRELGVPIVCIDARQAHQSLKAMKANKTDPHDAAGLAQLARTGFYKEVHVKSPAAHGVRSVITARSHLVEARVRLDNTIRGLCATFGYRPGTGQGKAFLERIMQAAHIPGLGEAIASLLAVRAELVEQIKAMDCRLRIIASQSQACEILMTIPGVGVQTSAAFAAAVDEAGRFRQSRNAGAYFGLVPRRHQSGELDWTGRITKQGDGTVRKLLYEAANSILTRSRETFALKTWAMKIAKRRGLKKARVALARRLAVIMHAMLRDGTLFQA

SEQ ID NO: 343748 - protein, 341 aa, unidentified
MKKLFVGIDFSKEKIDVAIIFAEGLTETSMRVSNEFKNSVSGYKQLVKWVENSSNETEPSLWLFCGENTGDYSKPLCNFLYGRGFDMWLENAKSIKDASGIRRLKSDRADANMIAEYAMRNYDKAIIYEPLSESLSQLRELFLYRQMVVRHRCSFQVRRGEKRLNMEKSPVKTMISQSGRHIVTELNKEIEKIDKRIAELIDSDEELAQVFTIVTSIPGIGTQNAVCLMVYTDNFRRFNFDSRKIACYYGIAPFGRDSGTSVHTDPHVHYMANRQIKAMLSQAALSAARFNPVIASYYSRLIAKGKKRQIVLNNVKNKLVHIVTAMVRNKQLFDKDYKISA

SEQ ID NO: 343749 - protein, 354 aa, unidentified
MKGTAVTIVEDKPVITGGVDTHADLHVAAALDPIGGLLGVRQFPATAAGYADLLEWLGGFGDVGLVGVEGTGSYGAGLARHLAAAGVAVVEVDRADRQDRHRQGKSDPLDAVSAARAAQSGRASGVPKGRDGAVEAIRALMVAKRSARHERTQAINQARALIVTGPDELRTRFAGHGPASLAEEIAALRPRPGDVPGYATRVALRELGRRVQFLDAQLERLDELIGPLVTARAPGLLSLFGVGPDTAALLLVAAGDHPERLRSESSWAHLCGAAPIPASSGKTSRHRLNRGGNREANHALWRIVITRMGSRPGHPATRAYVERRTKEGLSKKEIIRCLKRYVAREVYHQLRDGT

SEQ ID NO: 343750 - protein, 339 aa, unidentified
MKLYSAFDLHSNNCYLGIIDQAGKRIAKKKLPNDPELILQALIPYSDDIVGVVIESTYNWYWLVDMLMENGYQTHLANPSAIQKYSGLKHADDVHDAFWLAEMLRLGILPEGYIYPKQDRPIRDLLRKRGHLVKLRTSLIISLQHIITRNYGVNVSVNDIKAVKTNRVESLFGQDDDLALSGQVSKQSIDFLTGQIRMIEQVVGKRKELSKPYQQLKTIPGIGKILALTIELETGSISRFNKVGNYVSYCRKVPTKWTSNGKSKGKGNKKNGNKYLAWAFSEAAELSRRYDEDVRRFYNRKLQRTNRMVAHTALAHKLARASYYIMRDEVPFMPDKLFC

SEQ ID NO: 343751 - protein, 367 aa, unidentified
MKKHTTMNKPVSATDVSVCMTVAVDLAKKVFQVAGEDAQGQLAYEQRIKSREAFQVFLQKLPEGVTVLMETGPGAQAWARLLQAQGNPVRILPAQRVAEHRSGAKNDRNDAHAILRAGRDSSIASVPVKSVAALAMQAWHRVRRGYVRRRTAMGNQIRGLLLEQGIALAQGDVGLKQGVTRVLEDASQPLPALLRELIDEMLNEWQRLGERIAALTGRLEACAAADPTAKRLMTVRGIGPITATALLAKQVEPERFANARQFAAYFGIVPDQHSSGQKVRLGKMTKRGDAYVRSLMVVGSHAVLKQLRPDSEHPDDRRLQRWLQRLGRKGAAVRLANRNLRIAWVLLCSEQTYQRKPNAYREMEMSH

SEQ ID NO: 343752 - protein, 338 aa, unidentified
MTCIGFDHHKKWTQAAAVDDQGKIIREMRVLNDNSSLKGFLKGLPQPLKGVVEAGPTWGWIYDTLTELGVKMIVANPSAVRAIAEAKIKTDKIDARMLATLLRVGLIPEVYVPTEEVRSQKMLWRERIWLVRMHVRLKNRIHRLLNHYHLEVPEFSDLFGAAGRRFLEELKLPEPGNRILNAQLKLLQSYRLQIEEVQRWAVKATQGHPNRAYLESLPGFGKVFAPIVALEIDDPKRFASPGKLASYCGLVPSLYSSGGKSWQGGIGKEGNHWLKWAFVEAAWAAIRSSAYFRVVYQRLRQRKTAQVSIIACARRLCEIAYHLLKERRCYEERPFRCA

SEQ ID NO: 343753 - protein, 325 aa, unidentified
MRQPQSPVKPQTQVGLDVSSQTLDTHIRVDGKAFSVPNTDEGFDRLCELLSAYDVTMILMEATGGYEDNVACYLQLKGYDVVVINPRHARRFAQSMGRLAKTDRIDAAILAHMAFMIDSGPDRERYIKPVTDEQRKQLSRMSSRRCQVVDLITIEKQRLTHADEYARESINEIISLLNAQLKRIESDILRYVKKNFSELANRLLAIPGVGVQAVTVLIADLAELGHVNRRRISALLGVAPFNHDSGKFKGQRRIRDGRQSVRNVLYMGVISATRFNPVIRAFYDSLLSRGKPKKVALIACMHKLIRIINAMMRTGKPFDMSLHGV

SEQ ID NO: 343754 - protein, 345 aa, unidentified
MNKLMAGIDLHSNNLVIGIMDMDGKRVASQKLSCKLKEVVGFLSPFKQRLEQVAVESTYNWYWLVDGLQALGYPVVLANPAGMEQYSGIKHADDTNDAFFLAELLRLKILPTGHIYDEQLRPVRDLLRRRMTLVHQRTALMLSFKSLYTRTTGHEMSLGELKELAIKEAQDLYDHPANQLIAGMQIKHIEQLTGSIEKIEEAVLDCARELPFYSKLTTLPGVGTILGMTITMEVGEIKRFAEPGHFASYCRTVAAQRMSNHKKKGENNSKCGNKYLAWAFVEGANFARRYNEQCRKWYDRKAAKTSNLIATKALACKMAKAAWHVMAEGSDYDSKRMFGQAVSRK

SEQ ID NO: 343755 - protein, 443 aa, unidentified
MGYKTHVACACPGLLFNAKRYPDGWKRAKTLHFSSDAAGFKKLQGYLDKFSTKPADFLVLSEPTGGYYGLALQMYLLGRGYTVFQVGNTAVKEYRKNVYGSETKTDDADARLMARMGFLHELVGEEFSIHTVHLANPDESVLRLMTRDYIKLGKDIRRRRSQLLQILAFTFPELKTFFKGSVTGKAARDLIKQYPTPYELKSASNEEVAQLLHTSRAYHHEKRVGELLELAETTSGLQVVSHHRWRQEWILSQLDVLEEAQKSLLTQISQLISTHPYTPIIESFPIKSQIWTATLISVIGNIDRFNNYGQFRAYVGWFPKIAQSGTSLNSSRLAPGGARLARNVLGQMAMTLVTPNVRETPFRIYYKRLIGRGMRPISAIGHLSGKLASVLYQCLKTKTFYDEETHRKQMGLIPTTDNVHHDTPIEMQDVTIDEMKFTDTDDA

SEQ ID NO: 343756 - protein, 408 aa, unidentified
MNTLYVGIDVSSKSNVIYLMLPNGDKHSNFSVANSHEGSTQLVKRILSALTSHSLDTVLIGLEATSVYGDNLVYFLREDATLAPFNRKIHVLNPKQVKKFHDAYNDLPKNDYVDSFVIADCLRFGRINKEVYMGDYRYKALQNLTRARFFAVQNLVKEKQRFMNVLFKKYSTMTQEKVFSDTFSTTALAVYDEFESAEALANMDLHELTDFIIEKGKNRFPDPDAVAKAIQKAARSSYRLPKTVNDSVNQVLSISITSMKALESQIKEFDKAIKAQMELLPNVLISIPGIGPVYSAGIIAEIGDINRFNSQAALAKYAGLAWKQHQSGGFESEVTRLIPSGNRFLKYYLCEAAFSLVRCDKEYSDFYHLKYKEVNRCQHKRALALTARKFVRLVFRLLKGNRLYCPAK

SEQ ID NO: 343757 - protein, 410 aa, unidentified
MEVLYPHCAGLDVHKQTVVACARHMVNGTVTREVRTFGTTTKELLALSEWLASHGCTHVAMEATGVYWKPVWHILSDGEFTLVLANAKHVKNVPGRKTDVNDATWLADLMAHGLIRGSFVPDAHTQELRGLLRTRKQFVRERSGHVQRLQKTLEDANIKLDSVISDILGLSGRAMIEALIAGETDPGALAALAHRRIKALPAVLREALRGRVTKHHRFLLQLHLCHIKALDTALEAIDREVDTQIEPFRIAVLLLTTIPGVNDLGAQVIRAEIGGDMTRFPNEAHLLSWAGFCPQSDESAGKRRSTRLRKGAPWLKTTLIQCAWAATRKNGSYLQAQFRRLRARRGAKKAICAVAASILTAAYHMLKDGTVYHDLGPDHFDHRAKAVHTRRLLTRLQNLGYAVQITPLAA

SEQ ID NO: 343758 - protein, 419 aa, unidentified
MSQFSTNQTKKQDGTGTLHVGIDFALEKNVCVVTNGNGEKLDYFSFPQDRGGYDYFLKRVKMISQKQSESRLIVAMEPSNYFWKLMARELEENGITYHLVNAYTVKKHREGNQLDRSKDDRRDAVQIAELSRNGHYTETKLQKGTYEEIKQYAVVYHQLSRAIRREQHILWGLVGQAFPEYFQIFKNLNGETSRAILISNACAAEIRKMKEDDFLAEVKAAYLGKRLSITKAQQIYQLAANSIGILEGLQAIQLSIQIHFSNIQRFQMQLNQVTDAMTNCLVSLPEAEYLLSVKSLGVVSIALFLAEIGDPKRYKSASQWVKLAGIQPTPSSSGKKQHGRTPISRQGRPHLRTMLYFSCLRMIQYDSHFALLYSKLQRRSKNPLTKMQALGVLMNKLLHILWALIHHQTMYNPAFAQSI

SEQ ID NO: 343759 - protein, 408 aa, unidentified
MDVVYDRCCGLDVHKKSITACVRTPKGKEIQTFGTMTHNLIQLIDWIKSKQCTHVAMESTGVYWKPIYNLIELEDIQPLVVNAAHIKAVPGRKTDVRDAEWIAKLLRHGLLQPSYVPNRDQRELRELVRYRRSLIEERSREISRIQKVLEGANIKLSSVATDIMGVSGKSMILAIIDGVDDPQELAGLAKRSLKKKKDDLERALFGSVGLHQKLMLKTQLSHIDFLNEQILLLNEEVQQRMEPYKEDIELLDSIPGIGKSHAEQLLAEIGLGKDISNQFPTAAHLCSWAGMVPGNNESAGKKKSGRTRKGNKKLRSALVEAAHSAAKTKNTYLSSQYQRLSARIGKKRAAVAVGHTILTIVYHMLNKRQPYIELGADYFDRRKKEIVIRQSIKRLEILGCKVTVEEIA

SEQ ID NO: 343760 - protein, 341 aa, unidentified
MTKNIYYVGLDIAAYNFVASIYQSPQKPVITKEGFENTFDGFNMLSSWLEIQKINPTNCVICMEATGVYGEGIAHFLVTQGFKVSVEPPLKVKRAFDPIGHKTDPVDSRQIAEYAYRYSDELRFWQPKDEIIEKIRHLLTAREQFTKQSVSLQNAMGAYKKHVVQVNLITDAHSHILKELKKQIVEIDKELDRLIRNNPTISQMNNQLTSLPGYGLLLSSSLIAMTGAFCEITSYRTLAAFIGICPYQHQSGSSVYRPPHIRPFGPAYARKLLMLAAWSVVTHNADFKKYYLRKLAEGKAKKLVLNNVANKLIKIACAMIKNNSRYVSTYRSVNPMCLISA

SEQ ID NO: 343761 - protein, 359 aa, unidentified
MLVERTSVGLDVHARSVAAAAIDGVTGELKRARLTPSHDHIRSWLGELAGPVAVAYEAGPTGFGLYRSLTALGIRCVVAAPSKLQRPSGDRVKTDARDAVHLARLLRLGELTAVCVPSVDQEAARDLVRAREDCRGDLMRARHRLSKLLLRQGIVYCGGNAWTDAHDRWLRRQRFDSPATTTAFESDYDTILTVAARRDRLDNTIAELAADSEFTPVVRRLACLRGISTLTAFALAVEIGDWHRFTGNTIGSFIGLVPSEHSSGASRVHGSITKTGNTHARRLLVEASWHHRASYRPGKTMHQRWELAPAAARARGDAGNRRLHTRWITFNLRRKRPVIANVAIARELAGWCWSLAVMD

SEQ ID NO: 343762 - protein, 447 aa, unidentified
MKTEPEEIPDADHELIIERVAAIDVAKASGKVCLRLPRPGRPGHRVSRVWDVEATTAAVCELADHLVAGQIERVTVESTSDYWRIWYYLLEAAGLSVQLVNARDVKNVPGRPKSDKLDSVWLAKLTEKGLLRPSFVPPAPIRQLRDYTRLRVDLTRERSRYWQRLEKLLEDALIKVSAVASTLDTLSVRDMLEALIAGERDPRRLADLARGRMKTKRAALIEALTGRFDDHHGELARMLLDQIDALSGQINTLTIRIDQLLAATANVVPGHDDGDSGAGGQPSADLTVVQRLTEIPGIGPTGAQVILAEIGLDMSRFPTAAHLVSWAKLCPRTIQSGAIQRCGKSGKGNPYLKGALGEAAAAAAKTNTFLGERYRRIVKRRGKLKALVAVARSILVIIWNLLSDNHARFRDLGPDYHATRINTERKLRNHIAQLAALGYHVTVEPAA

SEQ ID NO: 343763 - protein, 371 aa, unidentified
MADYKEVFVGIDVAKLKNAIAVAESGREGEIRFWGEVDASDTSMRRIIQRIAAKFDRVQFCYEAGPTGYGLHRLIRSLGHECVVVAPSLIPRKPGDRVKTNRRDALALARLLRAGELTAVWVPDEGHEAMRDLVRARAAAVETLRVHRQQISAFMLKHGRIYPRKKGWTMRYLCWLQEQQFDHPAHQIALQEMVEAVRVSKERVGRLETVIEEFVPNWSLAPVIRALQTLRGVDLIVAVTFATEVGDVSRFESPRQLMGYLGLVPGERSTGETVRRGSITKAGNGRVRHMLVESAWTYRHPPKVGARKLYRLAEAPPAVREIAWKAQSRLTARYRLLVARGKRTTVVCTAIARELAGFMWAVAREAQAIRT

SEQ ID NO: 343764 - protein, 407 aa, unidentified
MQVIHRRCAGLDVHKQTVVACVRSARDREAAQHVQTFATTTTGLLALADWLASHEVAVVGMEATGVYWKPVWHVLEGHFELVLANAAHVKNVPGRKTDVSDAMWLADLLAHGLIRASFVPPQAVQELRTLTRTRKQFVRERSSHVQRIEKVLEDANLKISVLLSDIVGKSGRAVLDAIVAGHDDPAYLATCISVRVKARRAELIEALRGCITPHHRFMLKLHLSHIDALNAAITNIEKEVGLGLEPFRESAEHLSTIPGLSAVSASVLIAEIGVDMSRFKTAGHLVSWAGLCPRNDESAGKRRSTRLRHGGNWLKTTLVQAAWAAVRVKGGYLQAQFHRLRARRGAKKAILAIAASMLAAAWHMLRNQTDWHDLGANHFDRADRTKTVNRLLARLRQLGVNAEVLPV

SEQ ID NO: 343765 - protein, 420 aa, unidentified
MDEITEEPGALVQRVAALDIGKASLTVCLRVPQEDKPGARRQEVRTYATLTPALLELRDWLVCQGVTLVVMEATSAYWKPPFYLLEDDIECWVVNARDVKNVPGRPETDKLDSVWLCKLAGRGMLRASFIPSRPQRQLRDLTRYRRTLTQERTREKQRAEKLLEDAQIKLSVVISDIFGASGRAMLDALIAGQASPHQLAALARGKMRAKTSALQEALTGHFTEHHAFMLGMMLARIDALTAQIATLTTRIEQATAPLAAQVAQLDEIPGIGTTAAQDLIAEIGTDMTRFPTPGHLVSWAKFAPRARQSAGRSKAASTGKGNPWLGGTLGEAAAGAARTKTFLASRYKRIARRRGKNRAVVAVGNSILTITWHLLSDPSAHFTDLGPDWHDRLAPLRRKRQLIAELERLSGKKVTLQDAV

SEQ ID NO: 343766 - protein, 415 aa, unidentified
MALKIVYKICCGIDVHKTFVVACIASTNDKGVTSYESHRFSTYTSGLKTLLQWLLDRNCKDVCMESTGKYWIPVYNILEKDCSIVLAHPKYVKAIRGKKTDKKDAKWIADLFKHDLVAGSFMPPAGIRQLRDLMRYRFKLTCFKSSEKNRLQNCLTVSNIQLGNVVSDTFGKSAQAILDKILENPADTSFDLEPLVFKSLKKKLPELRDAIDGYITPEQAGKLKIIKAHYESLESRKAELEELILALATPYQQELAILQTAPGISSDVTAIGIISEIGTNMEAFPSAKHLCSWAGLTPTNNESAGKKKSVRVSKAGCYIKPLLVQCANAVVKSSKHPEMRNRYLRLKKRRGHKKAIIAIARMLLTALYYMLKNGENYNAELYRKSDLPPVDREITVEQALMIARNQGYKIKSATA

SEQ ID NO: 343767 - protein, 352 aa, unidentified
MGIVVALDVHRSQITYKALDRETGELRRGRIAPATRAEVRAWLRQFADSQAEFAVEGTTGWRFVVEEIERAGHRARLADPAETAARRGRKRRAKTDSADCDLQLRLLLAGELPESWIPPAQILELRTLVRLRKTLIDQRTAWQQRMHAQLFHQGVPGGLRLRTQAGREALRRAELSPAGRGLVALGLRMLDAFDRELAPLDRELRAYARRQPGCRALIERLYGVGPVSATAILAELGDCRRFSSSDDAVRHAGLDITVYQSDDKRAPGHLSHEGPEVLRWALYEAAVSAARASSPDRSYYLQVAERLGHNRACLSVARKLCRRAYHILRELGEEALAPIEQPTDEEAIAAAA

SEQ ID NO: 343768 - protein, 405 aa, unidentified
MEVIYPRCCGLDIHKKTVVACVITPEEKEIRTFSTMTEDILAMVDWIKSKRCTHVAMESTGSYWKPIYNILEIEGLNPMVVNANHIKNVPGRKTDVKDAEWIAGLLQHGLLQGSYIPSREQRELRELIRYRRSLIEERAREINRMQKVLEGANIKLASVTTDILGKSSRAMIEAIINGEEDPAILSELAQKRLKNKKEELKKALNGLIGPHQRLILKAQLEHIDFLDEQIALLDEEIKRRMHPFEEDLERLDTIPGVGRRTAEHIIAEIGTSMDQFPSAAHLCSWAGVAPGNNESAGKRKSSRTRKGNEKLRSVLVEAARAAAHTKDTYLSAQYHRIAARRGANRAAVAVAHSILTIVYYLLKRKERYNELGVNYYEERKKEIIVKQSIKKLEALGLKVTVEDTA

SEQ ID NO: 343769 - protein, 414 aa, unidentified
MSKPAIRFEQVIEKGCGIDIHKKVLVATIRGLGIEEETRTFNSFTEDIEQMRDWLKDHEVSHVAMESTGVYWKPVFNILEQDFIVILVNARHIKNVPGRKTDKKDSKWITKLLLSGLLQGSFIPPKDTRELRDLTRYRRKITGYIASEKNRLQKILEDANIKLSSVVSSMSGATATKIISAMIDGEENIRELVKFRHGKLQVSKEDLAKSLKGNLTDHHKFMLRTIKSSISERQVTIVKLDARIEEHLKANEQILSSELLQTIPGVGKDAAAGILAEIGNNMNQFPSERHLASWAGMSPGNNESAGKKKSSRITHGDKYLKVMLVQCAWAATRTKNTYLRSKYDSLVVRRGKKRALIAVGHKILIAAYFILKDQVAYKDLGVQFLDNKRKVHQIQHHIRRLKELGMDTEQLKVA

SEQ ID NO: 343770 - protein, 338 aa, unidentified
MLYTGIDLHKRTVVIATVDETGKVHSEASLPTSRSAVARYFHGLPEPTTATVEATSSWYWLRDLLEQQDVPLTLAHAKFVKAIAYAKVKTDAVDALTLAQLHRADLIPRAHMVSPELRPLRALLRTRLHLVEKRTSAKNSVQRLLEQYNVPEPLRLPDEATLQASLYAEQIELLGNQIHRIEKRLEPELIPNPDIQRLLWIPGVGKIVAFTLYLEIDGIERFPTVRQFFSYCRVVPGADNSAGKRRHGRRKDGNRYLKLALSHAAIRAVQYFPDIKRFYQRKARQKNPAIARTLVQKELARSAYIVLKEQVDFNHTFKGQPLSKRKASKWPRQASPDI

SEQ ID NO: 343771 - protein, 414 aa, unidentified
MDVVHPRCAGVDISKRDAKVCVRIAGAGRTKAKSTVTTWGAVTNQVLALRDHLVAEQVTLVVMEATSDYWKPFYYLLEDGPFEVMLVNARHVKNLPGRKTDVSDAAWLAQLGAHGLVRGSFVPPEPIRQLRDLTRTRTTLVRARAKEIQRLEKLLEDAGIKLSSVATDITGVSGRAMLDALIDGQRDPEVLADLAKRRLRSKIPELTEALTGRFSEHHGFLAQLHLDLIDNHTRAIDELTGRIEVVVEPFRHVRDLFVTIPGISTLVADVIIAETGGDMSRFPTAGHLASWAGTCPGSNESAGRIKSTQTRPGNPYLKGALGIAAMSASRSKDTYLAAKFRRIASRRGPIKAIVALEHAMLVAIWHMITTDTAYTDPGGDYFTRLNPDKAKHRALDQLHKMGYSVTLEPLAVAG

SEQ ID NO: 343772 - protein, 380 aa, unidentified
MYAAQKRERYLYIGMDLHKKTHTAVLVNCWNEKLETLVIENKPAEFEKLVRHVNKKALTMCLTPVYGLENAYGHGRSLAVYLIENGYTVKDVNPALAYDRRRSAPTMKKNDEYDAYCVAMALIDQLHILPDAKPEDNCWTLAQLVNRRDTIVNDGIRLKNGLHEQLSVPYPSYRKFFSEIDRKSALYFWKTYPSPLPLKDKTAEDLTAELKTIAANFSKSKAAVILDCVKNDGDTLRDYQSSRDFITQSLVHDLERQVFELSQVDVEIEKMLETFDYKLTTLPGVGSAIAGKLIAEIGDIRRFPNADKLASFAGIAPKHFSSAGKGRDESNKQGNRALHGLLYFLAVSMVCVPKSGKPNNPIFYDYFCRKLGEGKTKSQE

SEQ ID NO: 343773 - protein, 351 aa, unidentified
MDRPALFVGIDVGSETFTASIGKIEEGRGWQITAKPMSFENNYDAFGQFIYWLNKNMALAKDCVVCMESTGVYGEALAYFMVSNSYKMVIEAPLKVKRAFDPEGHKSDPVDSCQIAEYAYRFFDQLRYWRPKGVVIEQLKTLLTIREQLVEQRTAHKNANQAIKRKVIRTRLAEDVHEKAIQELTEHIKSVEKEIKRLIDDDPSSRELQRLIESVPGIGSILATFIVVTMYSAPEPYNPKALAAYIGICPYENSSGTSRNKKATSRHYGPSPIRRLIYLAAMSVRQHSPVFERYFLRKLAEGKQKQLIINNIANKLLKIVCAIARTRTPYISGYRSIHPELLRAKLPLTVS

SEQ ID NO: 343774 - protein, 398 aa, unidentified
MTESSDYESVQVFIGVDVGKDTHHAVAINRSGKRLFDKALPNDENKLRSLISDLKQHGQILLVVDQPATIGALPVAVARSEGVLVGYLPGLAMRRIADLHAGEAKTDARDAAIIAEAARTLPHALRTLKLADEQIAELSMLCGFDDDLAAQTTQASNRIRGLLTQIHPALERVLGPRLDHPAVLDLLQRYPSPEKLASLGEKKLAAQLCKLAPRLGKRLAADIAQALAEQTVVVPGTNAAAVVLPRLALQLITLRKQRDEVALAVEQRVLAHPLYPVLTSMPGVGVRTAARLLTEVACRAFASVAHLAAYAGLAPVTRRSGSSIRGEHPSRRGNKALKRALFLSAFAALRDPLSRAYYTRKMSQGKRHNQALIALARRRCAVLFAMMRDGTFYTPQAS

SEQ ID NO: 343775 - protein, 312 aa, unidentified
MNTEIFVGVDISKEHLDVAFGPDQAPQRFPYTPEGVNRLLAHLQALSPTLIVLEATGGLEADLMDALSRAGLPFSRVNPRRVRDFARASGVLAKTDRLDARILAEFGQKMRPPVTVLPDEHTRHLEILVARRRQLVEMRAIEEHHWRTAPETARPYIRKHLEWLDAEIATLEREMADWVNQTPLAETVEILDSAPGVALVGAATLVAEVPEIGRLNRKKIAALVGVAPYNRDSGTQKRQRRVTGGRQAAREVLYMLTIAGIRCNPLLRTFYQRLRAAGKPPKVAIVACMRKLLTILNAMVRDRRKWCLELAG

SEQ ID NO: 343776 - protein, 460 aa, unidentified
MQQPVEVQVDEHEPIVERVAAIDVAKASGMVCLRIPHETIPGRRVTTVWPVAATTAALVELGDHLRAERVTRVVVESTSDYWRPFYYLLEAAGLIVWLVNAAQVKNVPGRPKTDKIDAVWLAKLAERSMLSPSLVPTEPMRQVRDLSRARFDLVEDRTRVKQRIEKLLEDALIKISAVLTDLLGVSGRAMIEALIAGQRSPKVLAELARGRARTRRADLERALHGRFTDHHARLARLLLGQLDELTARINQVTLLLDTAINALPTPATTTDAGPTDRADGDHGDGDHGDGPTTQAGYNRAVARLCAVPGAGPDSVRAVLGEIGLDMSVFGTPQRLCSWAKVAPRTVQSGRKTGRGRTGKGNPYLKSAIAQIAIGAAKTDTFLGERYRRLIKRMPKAKALVALQRSILVILFHLLNDPTAEFTDLGSDFYQRRIDRARRTTHLLRQLHALGYDVQLTEAAA

SEQ ID NO: 343777 - protein, 347 aa, unidentified
MAFIGVDLHTNSFTICRLQGDGSEAFETFTLSAGALQAFCLSLDANDEIAVEATGNTAWFCDEIRACVGRIVVVNPRQFQVIRKSVNKTDKNDARALAFFLSKDMLPETRLKSTAEAELGSLVATRDVFVKQRTMLLNKIHAMFVRRGTKLKKEGLASKKRLRDLDVSQFTALEQFELHALRNQALGLTETLAELDKAIESAGADLPGHEGISSIKGIGSRSAAILLAGIGNIDDFESADKLAAYVGIVPKVSQSNDTDNRGRITKRGNKLMRTTLVQCTLIAIRYSGYLNAFYQRIKERRGAGKAIIATARKLLSIIYDTLKNGWIFEDFTEFKIKQNQCPTGQPS

SEQ ID NO: 343778 - protein, 347 aa, unidentified
MHYVGMDCHITTLDFAVVDDAGRLVKSCKVDTSAKNFMEFVKSVAPPRVVYMEESALAAWALETCIRFGEKLVITDPKQNHWIGSSTQKDDPLDALKLAQLGRGDFIKEIRHPVGDRRRFRELMDSYHDTVKRTTRIKNKIKSQFRQNGIQCTGMTVYSETYREEWRQKLPQDQTLLLIVEGLWNQLRESEQTEKNLLKAARNFAKHYPEIKLFEDIPGIGFIGAATISAILETPHRFANKRKVWMYAGLGITTRSSGGKTYSEKLSKDYNRLLKYTLKQVAETAVQAKDNPFRQKYMAMTTLRGIAPHRAKLTISRDLLATMWAMWKKGEEYNPEIRTNPGYKQVS

SEQ ID NO: 343779 - protein, 458 aa, unidentified
MAPRKRKTTAPADALPPQLATVNLHAAGVDVGAEEHWAAIPPCDDPQPVRRFGANTADLEALADWFWDHGMTTVALESTGVYWIPLFEVLEARGFQVLLVDPGKMPRNGRPKSDVHDCQWLQRLHTYGLLSACFRPEDQVVVLRSYLRQRAALLADAARDIQHMQKALTQMNVKLQHVVSDITGVTGLAIIKAILAGERDPHTLAQLRDHRCKQDAAAIAQALYGTWRAEHLFALQQALERYEFQHRQLAACDDRIHAQLQTFADRSQGEPLPPKAGQRRRHRNRPAFDPRGPLHRMTGVDLTRIEGIDETTALIVVSEIGLDMSRWPSEKHFTSWLGLCPHQKVSGGKVLSSRTRPTTNRAAAALRLAAASLHHSNSALGAYFRRMKSRLGPPKAITATAHKLARLIYSMLRHGTAYVAQGLEAYEQQYRDRTVKHMARRAKELGYDLVRTPEEALA

SEQ ID NO: 343780 - protein, 387 aa, unidentified
MIKKRGRVVGLDVHPDNFAGAVVEGTDPASAQVLSTSTRVELEQLEQWALRHTRREDTLVLEASGNAFAVAARLRAIGREVEILESHRAGKVGKVYCANDRVDAVKMARIYLSALSPIVWQPDQKTIERREIFSAYQAVVKESTRAKQQLRSMLNEHCVRLEKGFRLCHPNAIRRLLALREWTPARTMLLQQLHGSLLAARARRTLLRRHMAQEIAAEEALLRLTRLCGINLVTLYGVVAAVGDVRRFSHSKKLVAYLGLNPSVSQSGNFEGSGALKRHGRGALRALLIQSGKKLLEVNNPLQKWGLAIAARRGRNKAAVAVARKLCVALWHVLMGHVIGALERLDTLETKLSKFATEIGPAALRAFGYNNKAEFVERKLYVLRSYP

SEQ ID NO: 343781 - protein, 349 aa, unidentified
MDKDITIGMDLGDKTHELCVLDGAGEVLERREIPGTRQGLRKALGSYPGALVVVETGTHSRWVNQEAEGLGHEVLVGNARKLRMIWQRSHKSDVRDAEMLARIGRFDRKLLYPVKHRSEEAHLDLELIKARDLLVRSRTNLINHVRSVVKSHVERVPKHSANAFGGKAQVPQPLREGLEPLLQTIRELTERIKGYEKKISILAGEKYPETKQLTQVVGVGPLTALAYLLTLEDPGRFQDSRMVGAFLGLVPRRDQSGRSDKQLRITKEGNAYLRRLMVGSAHYILGPFGPPSDLRAYGVKLMKRGGKNAKRRAIVAVARKLSVLLYALWVSQAEYEPCRWSRRRAGQES

SEQ ID NO: 343782 - protein, 369 aa, unidentified
MKSIAHVGMDVHKESISIYGLPEQGNEAIFEQRVVNDSLRVKKLFSKWSGSYDLRCCYEASGAGYVVQRWLSQIGVSCEVVAPSLIPRRPGDRIKTDRRDARKLARLYRAGELTPIRVPSEEDESLRSLVRCRETFAKEARQSQQYILKFLRLRGIVWDGKSNWTKKHWDWLERLEFEGYDEIVWREYLNLAYYKLSRLSDLDTEIQKAAFSDGLKEQVSLLRCLRGIDTHSAMVILTEIGDFRRFSTPGQLMSYVGLVPSENSSGDIERRGRITKCGNARCRRVLVESAWKYAARPALGRALKLRQSGQPVEVIRQSWNAQHRLYKKFHSVAHRKERCKAAVAVARELVGFIWAIMTQQEAGTYAKAA

SEQ ID NO: 343783 - protein, 354 aa, unidentified
MDKYIGLDVHVRSTTCAVLDETGKKQRGEVVETTARALVEWVLGVTGERHICFEEGGQSAWLHELLLPYAKEVVCIQRRRREGPKNDARDALALAEDLRRGTLERVVYKGSGPFGGLRQAVRAHRLITQDLSRVKSRLKAVYRSRGLCCEGEEVYVPERRAPWLAQLPPTSRELAEMLSHELDAIQKLRDHAVERLAEEAAQHAVIDRLSTVPGIGLVRAAYLVAIVVTPWRFRSKRQFWSYCGFAVVTASSADWVRQKGHWVRAKSTRTRGLNLNRNPVMKDVFKGAALSAMQMPDEHPLKQDYLQMLARGMRPNMARLTLARKLAATVLAIWKHEEVYDSTKRYRPPKSSAA

SEQ ID NO: 343784 - protein, 342 aa, unidentified
MDHYAGIDVSLECSSVCVVDANGKIVREGKVASEPEALINWFGSLGYELSRIGLEAGPLSQWLHGGMKQAGLAVELLETRHVRDAFKAMPVKSDRNDARGIAQLMRLGWFRPVHCKSIVAQETRAVLTARKLVQSKLQDVENHLRGLLRGFGLKVGKTTKLSFAARIRKLVDNHASLEMIAEALLSVHAVLLREFRAFEKQVRSMARHDAKARLLMTTPTVGPIVALTFASAIDDPGRFKSSKQVGAHFGLTPKKYQSGETDFTGRISKIGDRSVRTALYEAAHIMLTKPIKGCSQLKSWAMRIARRAGMSKAKVALARRLAVIMHRMLADGTPFNAAAAAA

SEQ ID NO: 343785 - protein, 459 aa, unidentified
MKKKSISQKSVKGNPKFLCLTVCNPNSAGVDIGSKEHWVAVSPHLAKDNVRHFPAYTCGLRAISKWLKRCHVKTVAMESTGVYWLSLYDILEQDGFEVYLCNARNIKNLPGRQKTDAIDCAWIQKLHSFGLLTSSFIPNLDVRGLRGLLRYRDILTQENSRHVLRMGKNLTQMNVLLHKVLSNIMGESGTKIIKAIIAGNTKPEKLLKLKNYSVKASDALFLKALDGNYDSLQIELQYYEYTTEIITQIDFKIGQKLIEMIKSTSDNFDDPSFDVENLSEVDILTFLFGVDLTQIPGISILSLRKLISETGTDMSKWEDASHFTSWLGLSPNNKISGGKLLKSDTKHNKPRAATIFRMCASTLRRSKSHLGNFLRRKMAQKGYPKALTATARKLAVVYYLMIKNRTPFLELGEDSYMINYRYRAIRNLQKKARRLGFAVIPNKVEVVPNQESDENCPKT

SEQ ID NO: 343786 - protein, 337 aa, unidentified
MTYYIGLDVSVENTAICVIDATGHIEKEFSARCHPDNLATVLDPFSKMIGAIGLEAGPMSAFLADGLKQRGLDSVLMETRRDHAALSAVPVKTDRRDARGIAELLRMGWFQPVHLKIPVARDLRLMLSARDTLGRRVRELDNSVRGLVRGFGLRVPTGARGRFCDLVRDPIADNPVLEAAISPLLSARDAMAEEFTKLDKLVRDQSRNDDVCRRLMTIPGVGAVVAMTFRAAIDDPKRFRSSKSVGACFGLTSRRYQSGETDRVTSITKAGDASVRAALYEAAHVMLVRTNRWTPLKAWVMRVSARRCAKRAKIALARKLAVIMHRMWIDGTEFRTA

SEQ ID NO: 343787 - protein, 344 aa, unidentified
MNHYAGIDVSLKSSAVCIVDGAGKIVREAAVESEPAALIDWFKQLGLELDRIGLEAGPLSQWLYAAMQEAGLRVELLETRHVRDAFRAMSVKSDRNDARGIAQLMRLGWFRPVHCKSIEAQEMRAVLTARKLLQSKLHDVENCLRGVLRGFGLKVGKTTERSFATRTEALVAGHSGLTLVVQALLAAHTVLLREFKKLDKQVQQLAKIHPQATLLMTTPAVGPIVALTYVFAIDDPKRFRSSKATGAHFGLTPRRYQSGETDHSGRITKIGDASVREALYQAAHIMLTKPVKNCSQLKSWAMRIARRAGPRKAKVALARKLAVILHRMLADNMPFNPPAKAAAT

SEQ ID NO: 343788 - protein, 416 aa, unidentified
MAHQWFVGLDWSKSHHQICLLDRERQTRGETVIPHSGAGFQQLATWLAEQTQHAPPERIGIVLETSVGSVVQSCQTLGYQVYAINPIQLDRFRDRHYPAGTKDDRRDALLLATALCLEPQLVRQVEIEDEYTLQLRLRNRRRKAFVATRSALITQMRTLLEEYFPSFETMFGDQLASPVAATLWHRIPNPQTAHQTRLSTVATILKKHRIRCVTAAAILEQLRAKPLPMPRYVVAARQQEVTMLWEHMRLVNQQIQTLDRQIAEQLDARVNAWDDIVDPATEEPARPTDEAILASMPGIGNTVLATLLGEAGSVIRDRDYWALRCLTGVAPVTKSSGKYRRVQRRRTANKQLVDCVYHWGRVAMIIDPTCREKYRKLRAKGHTHGRALRSIVDRLLYVACTMLNNRTLYQKPLTES

SEQ ID NO: 343789 - protein, 382 aa, unidentified
MRMAIGMDLHSKKTVAYSVYADNGEVPSRHQKFLDSFNKEFEEFPTTPKWFEKMADFVSKHECHVLIENSTVAHDTYWFLTNLGIDTVVAQAQDLYRITRSVKKTDKNDSRELAGYMRRRLNGEDEFSECYMPSPEWMTKREMCRGLSSEKDYLANVKRKVRAHLLLHGIKLRNKYSDITCDKALRELASYKDPYLMMMIRYAVDARKRIDLMEKTIQQLFCEDRMFQLIYSIPGFGVLSAAYFTSLIVDVSRFPDGSRFSASFGVVPKMRASADSNPNCATTHRGDELARYLLMFCVLSHVKHMPDSVVSRMYRRLVANGKKKREALVAAGRKLLTVVYAVLRDDRMYVSDPEELMLARETEDSEREDTGLTDKREDERFD

SEQ ID NO: 343790 - protein, 318 aa, unidentified
MNILGLDISKDTIDACLLEGETWKKVSNNEKGFAQLKSWLKNRRVGEVHVCMEATGSYYEGVAESFADGGYLVSVVNPAQIKAFSQSLLARAKTDKVDARIIALFCRSQQPSAWVPLSPKERTLRGLVRFCGNLKDTRASYQTQLQTPHLLPQVASTIKELIETLTEQIRDVEGQIGELIEGDSDLRRRRDLLVTVEGIGQTTAALILAECPRLEEFPNAKAVAAHAGLSSGIRESGSSVRGRGGICKIGNARLRRGLWWPAIVAMSCNERLVAFARRLRQIGKPNKKIIVATMRKLLVIAYGVLKSGQPYQRALASS

SEQ ID NO: 343791 - protein, 343 aa, unidentified
MTYYAGLDVGLRRTSICVVDETGRQAHASEVATDAEVIVKALAKLKRKQVTVGLETGQLSIFLTKALRAKGWKVVCMDARQVAAALSTQVNKTDRNDARGIAHLLRCGLYREVHVKSDAACDRRIVLASRRQLMTQVAGLESTLRGLLKIHGVVLGPANRLAFLPRVRKVMKGLGDGARTGLEALLSSLEHMRSVLASLDRQVRNGAKEDARSALLMTMPCVGPLTSTSLVTVLDDATRFKASRSVGAYLGLTPRQYASGETQRQGRISRCGPAECRSMLYEAAHCLLHFYKGPSHLKRWGERIAKKKGMKRAIVALARRMAVIMHRMLITGEPFADARLKPA

SEQ ID NO: 343792 - protein, 337 aa, unidentified
MRFCGIDLHSNNSVVAIIDENDRVLYQRRLPNDLEMVLKALAVHREELSGVVIEATFNWYWLVDGLQAAGYVTHLANPGALKRYEGLKHSDDDTDAVFLAHALRLGILPTGYICPPEQRALRDLARKRMQLVRTRTAQVLAVENIVARQCGNRITCNAVKRLDAAGIEALELPARVARAVAANVAVIGVLNKQIAPLEAELHAALRDDEGYRWLLSVPGIGRTLAAVIVLETSTVTRFANAGKFASYARCVDSRRLSNGKQKGQGNVRNGNKYLSWAFVEAANFARRFCPEAQRFYERKKARTNGIVATKALGHKLARACYHMLKEGCAFDVQRCFT

SEQ ID NO: 343793 - protein, 407 aa, unidentified
MDLLKTVFGIDVSSRKSNVCIMVNGQKVNDYAISNDMVGFNQLLGDLKQVTKPQIIFEATGVYSRRLQAFLDMHELRYVMMNPLEAKRKTKDDLHQNKTDKLDALYLAKLQSEHPQRLAYVQSKEYQELMANNRIYEQASHDLITNKNRLHKAVQLTFPEIEHLLANPRGKNYWSIALRFPHPDIVLETKEADIIDFLKGLSGIGKKRANDITQSLIRLAKVACPAVKKNSAHVRGLKMAINNILSAEEECQSALQEMAKLAPKRDLEILTSIPGIGENTALRIISELGDIRRFNNPSQLNAFVGVDPQVYESGNLTAHLSISKRGTAIGRKVLYLAINQIQSAKKAGNPCHIADYYEKRKRSSETASHKKAAIASIHKLLRTIFALIKNDQLYSYDVAKHNQRLLS

SEQ ID NO: 343794 - protein, 450 aa, unidentified
MSKTEKSKSKKIKINEFAIVYPNAAGIDVSSKDYVIAVPPDRDKEPIKTFGCFTCDLKLIAMWLLACKIDTVAMESTGVYWKQLFVVLQEHGIEVYLVNSRHVKNVTGKKTDEEDARWIQRLHACGLLSNSFQLKEDIRTLRSLVRQRKKLCDNKSTYVNRMVKSLEEMNIKLNIVLSDITSVSGQKIIAAIVKGERSPEKLIKLVHHKVKAKREDILKALEGCWREECIFELKQTHELYNFLQGKISECDNKIELQLETIAAKVNKGDITGLREGAKKKNNRKNEFNFNVSNYLSVILGTDASDIYGISDDTALVLFAETGGDLSSFKSADHFTSWAGLAPNNKISGGKIISSHLPKKKHPIKRALLRAANSVYRSDNAFGNYYRRMRARLGPKGAKCAVARKMLIIYYHMVTNKQPFNIELFEQQQKKNNQKRIIFLKKQLAELETAA

SEQ ID NO: 343795 - protein, 350 aa, unidentified
MIIGIDPHKLSHTATAMDAATNTATSSLRVGASLAGYRELLGWARQFPDRRWAVENAKGLGCHLAQWLVARGEAVVDVATTATSRVRELTRGGRRKNDVIDASAAASVAALQGDAQVVDAADETTVFAVLEERRANLAAQRVRCVNQLHAVMRDLVAGGVRAALTAKAAGEALRKVRPTTRTERIRKIIAWDLVRDVRNLDRQLNTIAAQMTETLDGYDNQLLEIDGIGPVLAVRLIGRTGRPSRFRSSDAFASYTGVAPIEVSSGQRSTHRLSRSGDRRLNSTLHLIAVTQVRMRDSAGHRYFERKIEQGKTRNEAMRCLKRKIASHVWRRMLAAELRRQHHVALPEAA

SEQ ID NO: 343796 - protein, 344 aa, unidentified
MLTTARYDCFTGIDIAAVTLTTSSTTGTTPPSRAVTLTQTPEGYAALIQRLQATGAAPDRTLVVMEATGSYWITLATTLHAAGFAISVINPAQAHYFAKALLKRTKTDAIDAQTLARLAAVLQPEPWTPPPDVYYELQQRLVQRDALIQMRQQVRNQLHALIQGPVVVAAVRERMETLIAALTGQIAAVKAELEPTLAMDEAWAAAAERLQSIPGIGLVTAGWLLATTLNFSVCASAEEATAYAGLAPTKYLSGTSVRGQERLGHSGNGRLRTALYMATLRAAQSNPAIKTFYDRLVAAGKLKKVARCAAARKLLHQAFAVVTKERMFDPDYHHHQTPRLNIAA

SEQ ID NO: 343797 - protein, 320 aa, unidentified
MRNTVGLDISKLTFDATAIVGNAEYSAKFDNDSKGLDQFSDRLKSLGCQNLHICMEATGNYYEEVADYFAQYYSVYVVNPLKISKYAESRFKRTKTDKQDAKLIAQYCRSAQESELVKRQKPTDEQYRLLRMTAAYAQIKSECAAMKNRHHAAKDEEAAKAYAQIIKAMNEQLEVLKEKIKEQTEKPNCKEGVKRLETIPAIGRMTAAVLFHHLTSSKFETSNKFAAFAGLSPQQKESGTSVRGKGKLTKFGNRKLRAVLFMPAMVAYRIRAFPGFIKRLEEKKKPKKVIIAALMRKLAVIAYHVHKKGGDYDPSRYKSA

SEQ ID NO: 343798 - protein, 328 aa, unidentified
MCTLGIDVSKNKIDLCLLTAGPGGKKKHKVLTNEPAVARKVVDWLNAQKCVPESVTVVLEATGIYHENLAYGLHEAGVSVCMANPCRVREFAHGMDILNKNDAVDAFVLACYGELKSPAVWVPPSPEVRKLRALLRQRDALREDVQRTVNRLEKANSTSTPQEVIRSLERTKSWLNEELARIEKLITDHTDNDPGLKADLDLLKSIKGVKDQVGREMLALLKDGMFKSASQVAAYLGLTPVEKTSGSSVRGRPHMSKTGPSGVRAKLYVAALTASRWNKQAKAIYERLVAKGKAKKAALGAVMRKLVHLCFGVLKTRLPWDENYVATA

SEQ ID NO: 343799 - protein, 338 aa, unidentified
MKLYGGIDLHSNNSVVALLDEQDQVVYRKRLPNDAAVILEALAPYQAGIEGLVVESTYNWYWLVDALMEADYRVHLANTAAIVQYDGLKYSDDDSDAQWLATLLRLGMLPEGYVYPKGERAVRDLLRRRSRLVQQHTANLLAVQNLFARNRGQALSANAVKRLTPERVSELLPDPNQALAVQTTLLAMRALEGSIELLEGHVRKQVKLRPAYRHLLSVSGIGNVLGLTIMLETGEIGRFAHVGNYASYCRCVGSERLSNGKRKGRGNTKNGNKYLAWAYVEAANFAVRYNDTIKRYYQRKRAKTSGVVAIKTVAHKLARACYYILRDGTDFEVSRAFA

SEQ ID NO: 343800 - protein, 364 aa, unidentified
MYYSGIDLHKDNCFITTINDAGKRTHQERLPNVPAIILAYFTAMPGPHRAVVECTAGWYWLNDLLEAHGIELVLAHAKYLKAIAYAKVKTDKVDSETLAMLLWLDTIPRAHKIVREKRDLRDVMRARLRIVQKHTSCCVSIHNLGRKFNCDDLIDIEQRSVPDDLPDPCKLQLQCHYQQIDLLHEQILSLERFLHPMLIPNDDIQHMLYIPGIGKVTAFTIYLEIDGIERFASDSQFFSYCRLVPGAKNSNRTLRHKSGNKDGNKYLKIAFSDAAVHAMQYYPEIRAFYQRLRRRANEPIARTVVAKELARIVYYMLKNKTEYRGFKGRPISRQKSLQWPRLKTYHLSLNARRHEAGPSPASSM

SEQ ID NO: 343801 - protein, 372 aa, unidentified
MEERSKIHVGLDVHKDSITVAAAEPGRDKARLIGKIAHDVPKLLKVLSKLGGADELHIVYEAGPTGYGLQRNLTAKGYLCEVIAPSKTPRQPGNHVKTDARDSIELAEYSRLGKLSAVWIPDPADEAIRDLARAREDAVNSRRQMRQQLKGFLLRHDRRYSGKTSWCRTHDRWLAEQSFEAQATQTAFTEYWQAVKSADERVERLSKALQSSMEGWRFESVVGALQALRGVAAITAIGLVAEIGDLSRFEHPRKLMGYLGLVPSEHSSGERTSRGRITKTGNGHARRLLVEAAWNYRFKARVGKDLNARQEGVSEVIRNMAWKGQLRLTERYAALQKRGVQANKVSVAVARELAGFVWAIGRQAQGEKGALV

SEQ ID NO: 343802 - protein, 427 aa, unidentified
MSGKDYSKQVEKRQKIKKTTLVVGLDIGSEFNAMGMMNKAGEIIGRYPKVYNSRKGFEYFKRTIEMTKKRYGLRKVLIGMEPTGHYWRKIGYYAKEQGYEIRFIRTTALRHQREVDESSSAKSDMRDALTITNIVREGKYIDTVIEEGVLRQLRTLAKVREKMQRGNTSAKHRLAAVLDDYFPELRSMFWSMKAKGLWALLEKCPYPEDVLKLKEEEVAEIICKSSRRKAKAIEKAQKVYKAAGESIGLKYIGEADRYRMKVTLEEVKRSETEIKEVDKQMEKLLEEIPYAEIIRSIKGVGLLTTAVFLGELGDPKNFSGPKQIIKYAGYDPMEDDSGKRVGGKRISKKGRWLLRKYLYFMGMRVITHNEFFKKYYDRKLEGKNRFGRSLAKKEALCAVIIKLIKVIFALLRDNRRFSAGQPVIAAV

SEQ ID NO: 343803 - protein, 329 aa, unidentified
MFQVHGIDANEKVVVRKQLRRSQVLAFFKALPPCLIGMEACGTAHYWARELTKLGHTVRLMPAKDVKAYIKRNKNDAADAEAICEAVRRPTMRFVQVKSAEQQSQLMLHRTRDLLMRQRTQVINALRAHMAELGITAAQGTAGLKELLKIIAGDADGRLPVDAHASLVVLAAELQAMQTLIGSLEKRIMAQHRTSDESKRVATIPGIAVIGATAITATVTDPKVFRSGRDFAAWIGLVPRQDSTGGKQKLGPISKQGDRYLRRILVVGAHAVLKQAKQKPEKYPWLTQLLARKPFKVVAVALANKMARTAWALLAHGGTYRAPRLAAAG

SEQ ID NO: 343804 - protein, 309 aa, unidentified
MKEELVYLGVDIAKSYLDAAIGSEKRRFANDAVGHRALIKWIKEIEGLVQVICEPSGGYERALIRALVGTQIRVSLVPANRVRQFARAAGILAKTDRIDAKVLCIFAEAMQPGTISGSQLEQEHLRELESQRRHLTHLLVMEQNRGARVGDSSVRRLNRSLNKQIKKQIEQLDLLIKEHIEQSADLSAKAAKLTAITGVGARTAALLLAQMPELGKLNRREVAALVGVAPFNRDSGRMRGTRTIYGGRRQVRHGVYMAALVAARHNPILRAFYQRLRTAGKPAKLALTATMRKLLIVLNSALKSDLSYA

SEQ ID NO: 343805 - protein, 346 aa, unidentified
MMHAGLDLSRRRLEVQLVNEQGEPVERLAAVPTVDGLRDLAARVARHQESVRAVIESMTGARFIHDQLELLGWDVAIADAVKAKGLAPLTCKTDRIDAWVLAQLSRLNLVPEIWLPDPAIRADRERARWRLHLVRHRTALKNRIHQTLISFGHACPVSDLFGARGRELLRGLALPEPWQGAVIASLQLIDHLDRQIDACEAELHSLGEEQPYVSLLRTVPGIGWVLAYTIAGEIGDISRFASPAKLVSYTGLCPSVRQSGDRDYRGPLTKQGPKYLRWALIEAAQHAAMTSRYRERYQTIKRRLGRQRGTNVATVAVARELAKAIWYMFIRNQPFAPRGANVSVAA

SEQ ID NO: 343806 - protein, 306 aa, unidentified
MTLPQNVLGVDIAQDWIDVFDLSACTSSRIATSDLRAFARDLCDVLVVLEATGGYERPLVEALEARGVAYVRVNPRQAREFARATGRLAKTDKVDARILAHMGRALELKPDVPLSPARKRLAELVARRDDLVRMTTAESQRLAMARDAYVRQDIACVLILLKTRKAALETQIDAAIHEVSELAGQQACLRSAPGIGPATAAILLARLPELGHVDRRAIASLAGLAPHACDSGHRRGKRHVWGGRSDVRRALYLAAFVASRFNPDLKAMRQKLQDAGKPVKVAILAVARKLITILNAMARDKRNYAK

SEQ ID NO: 343807 - protein, 348 aa, unidentified
MVTIGIDPHKQTHSSVAVNPLGVQVSQKTAPARRDGFGQLLEWGRKLDSERVWVIEDVRHVSGSLERFLLDRGETVIRLPPRLMANARVGVRERGKSDPIDALAIARAALREGIDTLPTAKLAGVELEIRLLGLHRERLVGARTRLINQLRWQLHDLWPDWEIPKRVLIGPGWQTKVTRRLQRAEITVQVQIARDMIARVRELTRTITQLYEQLADLVKQAAPQLLAEKGLGVLIATKLIGEVAGIDRFTSDAQLARLSGCAPIPVSSGRTDRYRLDPGGNRQLNHAFHMLAMTKLMNDPQTAAYIARQRTNGKTNKEAIRSLKRHLVRRVYHLLHDPNEVPITVCLT

SEQ ID NO: 343808 - protein, 405 aa, unidentified
MVENVWVGVDIGRHAHHAAAIDGNGVVLWSRRIRNDQAEIEMLLGRLVDVESVVWAIDMTAPESALLRGVLTVHGQHVRYVPGRVVHSMTGAFAGEGKTDARDAVVIAQSARLRGDLAQVSVPDDLAIELELLTGHRSDLVDERTRGINRLRVLLTRIFPGLERCFDYSTLTGLSFVIKYVTPSSITAASNEEIYDHLRSHGVRRPTIPKMIDAARAAALAQSIALPGEETTAALIQQAAGSLILLTRQITDLDKQIAGVFRRHRHAHILESVPGIGTRSGAELIAITGGDLTSFGSAAKLAAYAGLAPVPHDSGNRHGTLRRPQRYHRGLRKVFYMAALNSSQREGPSREFYQRKRTEKRSAVHALIALARRLVDVVWALIRDDREWTPTIRCSADNSSPPVAA

SEQ ID NO: 343809 - protein, 288 aa, unidentified
MAELSHCGIDVSKDRLDVVVLPNEQCFSVVNAAAGWAELIEKLRGLNIAAIGIEASGGYERGIVRALLAARYSVRLINPFKLRQFAKACGVLAKNDRLDARMIARFVATMPTRPMQRNVAVERLAELLTARRQLSEEKVAAENGSKLLEDSMLQRLYRRRITRMEADIMLLDKRLADMVAADAALAQRYELLISMPGVGPVLACTLVALLPELGQMSRKQVAALVGVAPYDFESGKLKGMRCIWGGRAPIRRVLYMAALIASRCNPALKVFHDRLQATGKNRRSSSSQ

SEQ ID NO: 343810 - protein, 348 aa, unidentified
MYKVGGQCPILMRIIVEEFVMSKDVLYVGIDVGCKELWVSIDGFKPRKFRHSREGIRSLNAWSQRKSNHEQVHFCMEATGVYSISVASQLVERYQAVVSIVNPAQIAAFAKVLMKRSKTDQIDAKVIRNYAEVQSPPVWMPASRSLRQLTSLVTQADAIRDCLGQWRNRRHAQDFIPDLPEEVKKTQRSIERSLTVQLKKIEMAISNLCAQEATLAHQVALLCTIPGVADQSAVKLLAYGQEWLTERSAKALTAHAGLAPHHYQSGTSVRGKSRIDKRGNPKLRKTLFMPALVAVHYNPVLMKFYQRLLKNGKPKKLALVAAMRKLLLISRAMLIAQKTFNPKYSPLT

SEQ ID NO: 343811 - protein, 314 aa, unidentified
MYHYIGIDVSKKVLAVFDGKKDLIFDNKENLSSLKKYLKKRYPDFSSLVILFEATGIYSYHLKVFCADNHIKAYMINPQASHNFAKSLGARSKTDTIDARTIWAYHKLIGDKDISIPRVDQRLMTLSSYLASYRLTLKQRLAFSNHLEEIKDKALYRLLKKEQERLCKLEQELLIRMDSYIKQYPKLKEDYQRLLSISGIGQKTAIGLLVLFHTYKKTNRNQITALVGLDPIQKQSGTSVKGRSRISKHGNRMIRKCLYMPTLSCIRHNHKIKVFYERLVLQHKPKKVAVIAAMRKLLLIAHAVYKNKTVYIPG

SEQ ID NO: 343812 - protein, 322 aa, unidentified
MTEKALCVGVDVAKSTLDLAVSDSQERWQFSNDGEGISQAVHCIADLKPSIVILEATGHLEMPLGAALQARRLPVVIINPRQVRDFARATGILAKTDTIDARILALFGARVKPEIRPVPDRETREMRSLLTRRRQIVEMLTAEHNRLLQADEDVRVGIQAHITWLEEAISEISDDLARRIRQSPSWCEKDNLLKSVPGVGKVVSSSLLIELPELGKLNRRKIAALVGVAPLNRDSGTMRGRRTVWGGRAKLRAVLYMAALVASRRNPVIAAFYQRLVDAGKAKKVALTACMRKLLTILNAMMRTMTRWQPGTILRCAPKEVK

SEQ ID NO: 343813 - protein, 356 aa, unidentified
MNEITTVGVDLAKEVIVVCAGDAQGRTRYFKQLSFAGFAQWAVKLPPCTFGMEACSTAHHWGRFLSAHGHTPKLMAAEFVAPFRKSQGAKNDRNDAQAILAAVRQPDMRFVSVKSVDQQAMLAWHRTRSGFTVERTALLNRTRGLLAEFGIWIGRSTAVLIHQLPELVRDQRLPEVFRPILTGTLEHVRRLEQCIAECDAQIHMHIMHSEEAKRIQALTGVGELTASALLATVASPRDFKNGRQMAAWTGLVPRQNSSGGKQRLGVITKRGDSYLRGLLTQGARSTLQVALKREPLRRSRLEQWIVALHGRVGYHKTLVAIANKHVRILWAILVHGESYDPNAWRRHAPQRSPAAA

SEQ ID NO: 343814 - protein, 331 aa, unidentified
MNYSHFVGLDVGKKTFDASLMSAAEKELSHKSFDNTPEGIQSLLDWIAGYHLSLSKLLFCAENMGSYVTELSVSSVSMGFSLALVCPLTIKKSIGLQRGKNDRIDAKRIANYAVLHYRKLELYKLPDKDLVRLRGWIIIRDNLVKQKVSSIKLLETFSQMAKLADVTESISFLEEQLKSIKEKILEVEEDMEQLIAASTSLYTNYLLLRSIKGIGIINAIVLLCVTDNFQRFDNPRKFACYCGVAPFEHTSGISIRGKTQTSSLANKEVKVYLTRAAITAISWDPQMKAYYKRKIAEGKHKASVINAVRAKIIARSFAVIRRQTPFVTLAV

SEQ ID NO: 343815 - protein, 346 aa, unidentified
MCSLPVYVGLDYHDSSVRVCVEDTDGSELGNADRANDWKTIADFGDRFGRPVRAAIESCCGAADLAEELVSCAGWSVALAHPGYVQRMKQNPDKTDCQDAQLLADLERVGYLPRVWLAPRYIRELRHVVRYRLQLTEQRRATKLRLRALLREQRCHAPEGWNAWTKAWQQWVRQTAELSEQGRWLAKQHLRELARLATRIRQVEKRLERITANDVEVQRLQQQPGIGPVTAWTIRAEIGHFDRFRTGKQLSRFCGLSPRNASSGQRQADAGLIRAANPALRTVLIEAAHRLARCDPSWQKFAQRLRARGKPGSVVAAAVANRWMRRLYHEMKTPSGELAVAVGPAQ

SEQ ID NO: 343816 - protein, 372 aa, unidentified
MKEDSVIFIGLDTSKLKISVAIADGSRNGEVRFFGDISSEPAPVASMVSKLSKRGAKLHFCYEAGPTGYGLYRQIVELGHDCVVVAPSLVPKRAGDRVKTNRRDAMSLARLHRAGELTAVWVPDEGHEAIRDLVRAREAASDALKQARQQLKSFLLRHGRIYAGREPWTRAHRRWLTCQAFDHPAHQILLAEYCQAVADASVRLDRLTKLVVETAASWSMAPVVAAYQAMRGVAFMTAVTFVVEIGDVRRFDNPRQLMAYLGLVPSESSTGERVKRGGITKAGNTRARRVLIEGAWTYRFPARVSPKIQARLDDLPRTVREIAWKAQVRLCARYRKLIAAGKPKVVAVTAIAREMAAFLWAIGQEVAPTAKG

SEQ ID NO: 343817 - protein, 388 aa, unidentified
MSQEKYIGMDVHQATISVAVMDAQGKLIMECLLETKAATIVEFIQGLQGTLSLTFEEGTSAAWLHDLLKPHVDRLVVCDPRKAALLKDGNKSDRIDARKLAELLRTNQLKPVYHGEHGVRTLKELGRSYLTLTKDVTRVMNRIKALYRSWAIPCSGTTVYAPRHRAEWLAKIGEPGVRVRAERLYQQLDVLQPVRQAARHDLLRESHQHPAVKLLRQIPSIGPIRAALLVALLQTPHRFRTKRQLWAYSGFAVETHDSGEYRYVRGKLQRNRERITVRGLSDNYNKDLKNLFKGAAISARHPSWPAPRLLCCSGCQRDAADDGPSHPGTKDCHDYSNPLEERSEFRPPTVASASSLSLSGEEGFPSQDFLRWWSLRFGELGSRVSISQ

SEQ ID NO: 343818 - protein, 338 aa, unidentified
MKLYGAIDLHSNNNVTVLIDEKDKVVYQKRLTNDLSMIVEQLSPYTSSIEGIVVESTYNWYWLVDGLMENEHRVHLANTAAIQQYEGLKYTDDDSDARWLAHLLRLGVLPEGYIYPKEQRPVRDLLRKRSQLVHHKTAHLLSIQNLYSRNTGSSISANRIKQLSSEKVDALFTNSDLALAVKANLTVMRSLETEIAILERIVKERVKLKSAYRYLLTVSGIGQILALTIMLETGDIRRFSKVGNFASYCRCVKSEKLSNGKRKGSGNTKNGNKYLSWAFVEAANFAIRFEPLIARFYQRKKAKTHRVVAIKAVAHKLARACYYIMRDEVPFDVDRAFA

SEQ ID NO: 343819 - protein, 391 aa, unidentified
MIYIGIDVAKDKHDCFITNSEGEVLFNAFTIPNNADGFHDLFQKISSLTNDFSNVKVGLEATGHYNYNLLGFLIDKGLPTFVINPLHTNLFRKSLSLRQTKTDKVDAHTIALMMMSGVNLQSYSNTSYHNEELKSLTRYRFDKVQERAKLKTSISRLVNILFPELEKLVPSLHMVSIYALLAEFPSSAQIASCHLTRLTNLLANASKGHYNKEKAIEIRNAAKHSIGSNMPAKSLELKHTIRLIQELTSEIDEIECFIKSIMDEIRSPILSIPGINYRMGAMIIAEIGDFNRFSSPDKILAYAGLSPSTYQSGQLDGCYSHMEKRGSRYLRYALFNATKFVCIWDNQFSAYLAKKRSEGKHYNVAISHAAKKLVRVIYQLEKSGQLYHRVA

SEQ ID NO: 343820 - protein, 406 aa, unidentified
MTSCSYFAGIDWASQSHVLRVIDAAGGVALRLEIAHSREGIEHLIRQLKSFAGNGGLAIAIERPSGVLVDALVEAGLRVVPIHPNVLKASRPRYRSAGKSDPGDAYMLADLLRTDGHRFRALEPQNDKIRALRALVRTRDDLVAERVALANQLRSLLESFWPGAAEIFFDIDSPIALAFVARYPTPQSTTHLGEKRLAGFLAQHGYCGRRPAGALLERLRSAATGCTGELEAEAKGELARSLASILERLVAELAKLTARIEHTVASLPDGQIIMSFPRSGRICAAQILAELGSVRERFPTEAQLAAEAGVAPVTYQSGKQRSVTFRRACNHRLRRAITCFADQSRHANTWAANVYHRARSRGCDHPHAIRVLARAWVRVLWRAWFTKTPYQPHLHHTAAAFAATTG

SEQ ID NO: 343821 - protein, 366 aa, unidentified
MGKISTMALDRIEIFKDQKLTIGLDLGDRFSHYCILNEAGEVIWESQLPTAPRGIEEVFRRIPRSRIALETGTHSPWVSRQLNQLGHEVIVAHARNVRLIGESSRKDDRLDARTLARLARIDPGLLSPVRHRSAKAQIHLTVIRARATLVSARTALVNAARGLTKSYGARLPKCGSEQMNREIAKGLSEELRDALDPLLGEIESLNERIAEYDRRIARVSKEVYPEVALLQQVKGVGPLIALTYVLTLDDPHRFRRSRDAGCFLGLRPGRRNSGRSEPQMHISKEGDRYLRTLLVQGAHYILGPFGQDSDLRRWGLKLAKRGGKNAKKRAVVAVARKLAVLLHKLWVSAEVYEPLRNNHKVMAAVA

SEQ ID NO: 343822 - protein, 418 aa, unidentified
MQEILERACGLDVHQKTVVACIMTGSGKNVNKEIKTFGTFTDDLRDLGLWIKGHNIQNVAVESTGIYWIPIFNVLEGEFELNIILANAGHIKNVPGRKTDVKDCEWICKLLRNGLIEASFIPSVDIRHLRNIVRHRQSLVSDLTAAKNRIIKNLEIGNVKLSSVLSNVFGVCGWKIIRAIADGQCDPTELAKLIDRKIKASRDSITKALSGTLQQYHIDTIKIMVKHVDELEKIIELVDDTIKICTKNYEEHMRRLQTIPGVGEKVAASILAEIGINMDQFHSPQHLASWAGLAPGNNESAGKKKSCAIKDGNIHLKTKLVEGAWSAVKTKNTYWQSVYHRLKSRRGAKRALIAIAHKMLICAYWLIKNEEDYKELGANYVDQNTQEKKAKYYAKQLKKLGITGVDEFINPQLQGQYA

SEQ ID NO: 343823 - protein, 406 aa, unidentified
MIFVGDDWSVEHHDIEIQDDQGRRLAKRRLPEGVKGIVELHALVAAHAGNPAEVALAIETDRGLWPAALVAAGYQVYAVNPKMVARYRERHSSSGAKSDPADAAVLADLVRTDRHKHRQVTGDSELAEGLKMLTRAHQRLVWSRHRQVQQLRAVLREFYPAALVAFATDLGDRDGDRDALAVLDKAPTPAAGRGLSRSSIAAVLRRAGRRRNVELKAAEVQAALRSEQLVPPETVARAYGAVVRSTVAVIAEMDRQLDALETELADHFGRHPDAEIIRSQPGLGVLVGARLLGEFGDDLGRYPDAKARRNYAGTSPVTVASGKLRVVRARYVGNHYLTDACYWWAFCALAQSAGARVYYDQLRARKIDHPAALRALANRLVGILDGCLRARTLYDEEIAWGHRKAA

SEQ ID NO: 343824 - protein, 411 aa, unidentified
MDLLYARCGGLDVHKATVVACVRKPGHQPDARHAETQTFATTLRGLAALAAWLTAHKVTHVAMESTGVYWRPVFAVLEGTVQVQLVNARHVKMLPGRKTDVRDCEWLAQLLECGLLRGSFIPPAAVRDLRDLTRLRKTLIRERGHHVNRIAKTLELANIKLGTVVTDIMGKTGRAILQALSTGVEDPAQLAACAHGSIRKKQAALHEAVEGRLTPHYAFLLQQHLALIDTLDAHIATLDTRIEVAMVPFAETAALVQTMPGVAARAAPAILAETGMDMRPFPTAQHFASWARLCPGNHESAGKRRSTTTGKGATWLRATLQEAAWAAVHTKKSYYRALYYRLKARGGPKKAIVAVQHAMLVALWHMLTRRVPHQDLGADYFAQRNTERTLRHHVRRLKQLGYQVLLAKEAA

SEQ ID NO: 343825 - protein, 348 aa, unidentified
MDTIGVDLHKRETQLCIGQADGTITEQRIVTSRERFTAVLGHRPPARILVEASTESEWVACHLESLGHEVIVADPNYAPMYATRARRVKTDRRDARTLMEACRAGTYRPAHRLSAARRHVRAELAVRDAVVRTRTRYVALAKALVRRDGLRVPSSAAERVGAHLAALAVSPPLAAELAPLLTLLPPLNATIAAADQRLAELERTDPSVALLMTAPGIGAVTASALVATIDDVQRFASAHQFEAYLGVVPGERSSGELRRIGPITKAGNRRARWLLVEAAWRILRSKDPASAPLRAWARPIAARRGPRIAAVALARRLAGILYAMWRDSVPYDARKVRRPRRAPGGPAS

SEQ ID NO: 343826 - protein, 310 aa, unidentified
MKTVIGIDVGKFELETYIKNKSLTLKNNDSGIKKFLRLLSKENKNLLNSFIIFEATGGYECLLKKKLEENNIPYHMAHPNKVRAFAKAKGLLAKTDKIDAKLLANYGDVMKPTADLCQDNAEIKELLKRREQLLEEKNREKNRSDKELNDLVRRSIKKHLKWLDNEIDIIEKQLKQLSKEDSNQNQMKLLTSIPGIGDLTAMYILSYLPEIKTANKSQLAALTGIAPMNYDSGSYRGKRFIQGGRAPLRKALYMSAVPSIKFNMQMKRFYERLRANGKTAKVALVGVMRKLLLLAASIIKRGTPWVYQDC

SEQ ID NO: 343827 - protein, 338 aa, unidentified
MKLYGAIDLHSNNNVTVLIDEQDQVVYQKRLPNDLPLIAEQLTGYRDRLQGIVVESTYNWYWLVDGLMEQGHRVHLANTAAIQQYEGLKYTDDHSDARWLAHILRLGVLPQGYIYPRQERAVRDLLRKRSQLVRQRTTNPLSIQNLITRNTGRSMNSNRIKTLDAEQVDELLPNPDLALAVKANVALMQCAGEQITILERAVRDRVRLRPEFSFLKTVPGIGQTLALTIMLETGDIGRFAGVGNYASYCRCVGSQKLSNGKRKGSGNTKNGNKYLSWAFIEAANFAIRFSARIQSFYQRKKARSHRVLAIKAVAHKLCRACYDIMENKVAFDVTKAFA

SEQ ID NO: 343828 - protein, 363 aa, unidentified
MNYVGVDVHKKYSVLCALDERGRKLREARVEGNASCGFAQFFRSLDGPSKAVVEACWNWGLIHDELERLDQVEEVMLAHPAKTRLIADAQIKTDRLDAHALGTLLRGNLVARAHVPRRETRARKNLLRQRLYWARLRTMLRNRIHALLDRQRGLELPQCSDIFGQRGLFFLRQLQLPEPDGTLLREQLALHDLIAQQMKAQEKRIAAEFKSEVIHRQLLSVPGIGTTLAAVIACEIDQIERFSTSEKLCAYAGVVPSTHASGGKVAHGRLLPFCNKWLRWALIEASWVAIGCSPYFGALYRQHRARGKKANTAITIVARRMCRILWQLLSEKRDFEKRPFSHRIRTFPGCSAVRLTARSAHGS

SEQ ID NO: 343829 - protein, 394 aa, unidentified
MKKVCGLDVHKDTIFLCILAGNGQTFLKEFGTLTAEVEEMRDLIKEQQVSEVAMESTGIYWMPIWRILQGHVERKLVNPYFIKQLPGRKSDMKDSQWIATVLQKKLIKGSYIPGKHIQELRQYERRYVHLCENVTRVEQAIDRQLHRCNIRITNFTSKVGSVSVMGVVRGLVNGETTPEELIKHIHGRITNKHKEKIAASLKGVVSGSDRFIFRQNYEELELLTRQQQECVVEMEQICDTLYKEEMKLLCSVPGIQKLSAMTIIAELGIDLKTFITAASLVGWAGLRPRNDETAKKIRSRKITNGNKYLRRILVQCAWAMTRTKGCWLSGKFSELAKRRSQKKALIAIARKLLVIIWHILSKHEVYKEYKPKLSPEQKQKRIARLEKQILELQA

SEQ ID NO: 343830 - protein, 346 aa, unidentified
MIKYLKQVVGIDVAQKELVVYFGQLNDELRIEMKGFKTFPNTLDGFTKLVSWTWKLKDSSIPVYFVMEATGVYHESLAYFLDTESLEVSVVLPNKIANYFKTLEIKTVTDKTAAETICRFGLERKLDRWKRPKKIFKLMRQLTRERDQIVMERTVAKNQLHAELSEAEPHERSIVRSQERIRLFDQQEKEVLAELIALVKKDESINKLVTLLCSIPGIGPLTAIIVLAETNGFELIKNKRQLTSYAGLDVKEKESGTSVKGQPKISKRGNKYLRKTMHLPALAAIRHDQRFKAIFTRLVARHGIRMKAAVAVQRKLLEMIYTMYCTQTPYDKNYLKSKEELLSEAI

SEQ ID NO: 343831 - protein, 339 aa, unidentified
MNPIPVGVDIGKNVFQIHYIAPGSGEIINKPLKRANFLEYFANLQPCLIGMEACGGSQHWARSLAKLGHQVRLMAPRFAKAFNIGNKNDAADARAIWLAVQQPGNKVAVKTEAQQAVLALHRLRQQLVKFRTAQINCIRGLLGEYGEVMPASRRAFDANIATVLDRVGDHIAAPLIDTLREQWAALAPLDEQIARIEQRLKQWMSADLSAQAISAIPGVGLLTATAAVATIGDARTFKSGREFAAAIGLVPRQVGSGGRTTLLGISKRGDAYLRTLLVQCARVVCFQLRSNNPWIEQLLKRRPYNVAVVAMANKLARVIWAVLAHGKPYEQGFVSAKPA

SEQ ID NO: 343832 - protein, 403 aa, unidentified
MNSVGIDISKGRSTIAVMRPFGEIVISPFEVRHTDSELSELARRLKSLNGETRVVMEATGNYHAPVAKLLHDAGLYVSVVNAKLVHGYGNNDLRRVKTDRKDAVKLANYGLDRWLTLPRYVPEENTRLLLKNCYRQYRQYSKVQTVLKNNLISLLDMTFPNANRLFVSPARADGSEKWVDFVAEFWHCECVSERSLKSFVNKYWRWCRKHGYNFSEEKAHAIYDEASGHIGVMPKSETTKLLVEQAVSQLSATSAALAALKQEMQSLSSQLPEYPVVMGMFGVGPILGPQLIAEIGDVRRFYSKKALVAYAGIDAPPNDSGDVIGRHKSMSKVGASSLRRTLFLIMSAYLQNSPPNEPVYQFLNRKRSEGKPYYVYMTAGANKFLRIYYGKVKAHLRSLEQNE

SEQ ID NO: 343833 - protein, 289 aa, unidentified
MNHYAGIDVSLECSSVCVVDASGKIICEDKVASEPEALISWFASLGVSLARVGLEAGPLSQWLFAAMRQAGLAVELLETRHVRDAFKAMPVKTDRKDARGIAQLMRLGWFRPVHCKSMAAQEMRAMLTARKLVQAKLHDVEMSLRGILRGFGLKVGKTTPRRFEGRIKELVAGHPSLEGVAAALLAVRAVLRREFDTLEKRVRSMAREDARAWLLTSVPGVGAIVALTFASAIDDPARFKSSKSVGAHFGMTPKKYRNISRARPTSAAGSRRSATAGYAPRSMRPPTSS

SEQ ID NO: 343834 - protein, 352 aa, unidentified
MIVLGADTHKRSHTIAALCATTGELLGEQTVPAGAKGSAALLRWARGLADERVWALEDCRHVSGSLERFLIERGERVVRVHSKLMSASRREARGRGKSDSIDALSIARAALREGLDALPAAHLDGPELDLRLLVDHRERLVRQRVAINNTLQWHLHDLWPELRLPGSSLFHGTWGPRITRRLARAEQTMRVRIARDELRRIRELTQTINELEAEIADLVAEIAPHLLCEPGFGPLTAAKLVGEIAGAQRFASDAKLARAAGVAPIPVSSGNTNRHRLDRGGNRQINATIHRIAVTRLRCHPETQDYIARKRAEGKSTKDAIRCLKRHLTRRVWHLLRAPTPITGETLTPSIP

SEQ ID NO: 343835 - protein, 342 aa, unidentified
MKFYCGIDLSARDCHVCVIDQQLKILVQQKLRNELPKICQLLEPYKANLKIVVESTFNWYWLIDGLQAEGFEVVLAHTLGLYLITGAKVKTDRRDAYSLAKLLLVGAVPAAYIYPVETRPVRDLLRRRLHLVQVRAGEYGSLRRLLLRQGILSSKQQEIKTATEAELEQWLEHPLVRLHASQELQRIELYSQQIGELEKSILQIAVTNQSYELLRQLPGVGQTIALTILYEVGELSRFANVKVFSSYCRVIPGIAQSGQVTRRGRGSKQGNHYLKAAFSQAAVHAVRCYPQVRRYYERQLKRHQGPGRKLVGYNIIAHKLAQAAFHILKEQTEYRAELLFGR

SEQ ID NO: 343836 - protein, 361 aa, unidentified
MQPDHTDPHNSPTVVLGVDTHRDVHVAAVLDHLGTLLNARSFPATADGYRGLLAWARTFGQVRRAGVEGTGSFGAALTRYLRGEGVQVVEVDQPNKALRRRRGKTDAVDAEAAARAVLSAQATAVPKAGDGHVEAMRIYKLARDSAVKSRSQAINQLKAVLVNADPTLRESLAGLGTKTLIRTCAELPDPSPASTPAFAAAVHTLRLLARRIRQLSAEAYELEKQLRAAVLEHTPQLLERPGIGPDSATTLLITMGDNPERVRSQASFAALCGVSPVQASSGKTQRLRLNRGGDRQANAALYRIVLTRLRRHDPTRDYLERRTSQGKTRREIIRCIKYYVAREVYHLVRPQPDAVELTQAA

SEQ ID NO: 343837 - protein, 371 aa, unidentified
MSVSSSAGYLTQCLVFGFGYLEQEEHAVMYIGMDVHQKSTTFCLFDPSAAPEGHYRWVTQPTTEEAIRRALAPLGGQCRVAFEVGTQAQWIAWIVRPLAIEVQVANPSRIPWLFRDGRKNDRLDARKLATLLYLKQLPTVHLPAAEVSGWRALINHRRGLVTQRTQIKNQIRAILRAFGVVCPFRKLWTHRGQVWLEAQTFDEARQLMVVSLQDELTFFDQKIVSLEKKLDALAKTRPTVGLLRTVPGIGPRTAEAIVAFTDGVDRFPDRKPFASYFGMTPTEDSSGDVRRLGHISKRGPSVVRWVLGEAAQVAVRKNPELKTFYERIHRGNKDRKKKAIVAVGRKLLTIVYAMMRDGKPFDPTKVLRAAA

SEQ ID NO: 343838 - protein, 377 aa, unidentified
MSNIIKWPGEADGPNPNQFLYVGVDIHKDKHTAVATNCFGHKLMEMEFANTAKDFKQFVASMQSLADRQNREFIFGLEDSFGYGLHLAKHLFDSHLPVKMIPPVLVDRSRKYETHPEKSDSLDALGVAKVLIQRIDTLPDYSISITDELAKEIKELAMDRDFLVKEQTRIKNQLHRLLHKTYGSEYQKKFKDIFALKALRYWKKYPTGKAYILVDDSILKNQVRRKINRLMDIRQECKEIKNELKILLDRTGQKLPTMNGCGTVLASAVMAEIRNIERFHSLAALAKYADLAPRQKSSGKTIRHVKSKSGNRKLNMAIHRIALSQISNSGNQYAKAYFKKKITEGKSKNQALCCLKRKLVNIIYMMLKHKQAYNYQK

SEQ ID NO: 343839 - protein, 309 aa, unidentified
MDARYVGIDVSKDRLDVHVQPTGEAFAVARDGEGLASLVARLKPLAPHVVAVEATGGFEMTVAAAIAGAGLPLAIVNPAQVRHYAQALGRRAKTDRIDAEVIARFAAAVRPEPRPLPDEATQALADLVTRRRQIIAMMVAERQRATRLPKRLKRSCERVVRVLEKELAALDQDIDTTVRGTPAWRVKEDLLASVIGIGTITARALIADLPELGTLNRRQIAALVGVAPFTRESGQWRGKSFIAGGRPTIRAALFVATMAAVRHNPSIRDFRDHLIARGKPKMVAMVACMRKLLTILNAILRDQTPWKPA

SEQ ID NO: 343840 - protein, 363 aa, unidentified
MKKIAYVGIDYHLKTLTCAVLIENEKDFYDTIRFKNNDKNIKKYMKKLSDKYDIKTCYEASCNGYSFQRKMQSWGYHCDVIAPSLIPKKPGDRRKNDFRDARNLTQHYAYGMLAIVHPPTEDEESVRHLIRCRMAMKKNEKRIKQQINSLLLTQDLRWPKTKWTGQHRVWLSKLKLRDKYSQQVLDEFLGLLEYLGSRIQYLDKQIEEVAQSEIYAPSVKKLKAFKGIQTLTAMLLIAEITNFRRFPNPRALMAFLGLIPSEDSSDDVKKPGAITKAGNSRCRTQMIESVIHYIKKPIISAQMKNDLKEVDSHSANIAIKCMKRLHKRYWFLVMRGKNSNKAKTAIAREFVGFIWAMMQPAEV

SEQ ID NO: 343841 - protein, 354 aa, unidentified
MRFYQPPADQPAHRFYCGVDLHARCMYLCILDATGQTVLHRDYPANAAAFLDAIAPYRDGLAVAVECMFAWYWLADLCHEHGIAFVLGHTLYMKAIHQGKSKNDRLDAAKIAGLLRGGLLPQAYVYPKAMRATRDLLRRRSFLVRRRADLLAHLVNTNSQYNLPALNKKLVYPGNRGELDLPARFSEPSARKMVECDLALIDALDGQIHELERHLIRTAKVHDAQAYARLQSVPGIGKVLGLVLLYEIHDVGRFPEAGHFLSYARLVRPRQESAGKASGFGNKKIGNAHLRWALGEAACLYLRSSERAKRWQARQAKKHGPAKTLGILAAKLGRTVYHLLRTKQVFDEARFFAS

SEQ ID NO: 343842 - protein, 360 aa, unidentified
MENKLSETTVILGVDTHLDVHVGAVINEAGKLLGTRSVSTSTPGYRDLLDWAAALGTVSSAGLEGTGTYGAGLCRFLIDNGITVLEVNRPDRAKRRLKGKSDPTDAESTARSVLSGISTAIPKEQSGACESMRMMSVVRRSAVKARTQAINQLRAILVSAPQDVSDSLWKTKASDCVDACLQSSSLGESELCETLTVTLKLLANRWLELSKELKQLDRSLERLTRQYAPQLRARFGVGPATAAVLLSVAGDNPERLKSEAALAALCGVNPLPASSGKTIRHRLNRGGSRAANNALWTIAMVRMRSDPRTRIYVERRTSEGLTLKEIHRCLKRYIVRELFPLILRDLAAVDSAAYSGDRDR

SEQ ID NO: 343843 - protein, 378 aa, unidentified
MKNDNRYVGLDVHAETIAVAVVETDGEVCFLGTIPNRAETVRRLVKRLGSVNRLRFCYEAGPTGYVLYWQLTSLGAHCDVVAPTLVPVKPGDRVKTDRRDAEKLAVLYRGGHLTPVWVPDRAHEALRDLVRAREAAKSDQLRARHRLQKFLLRHGRRPPQGIKAWTQKHLDWVRREVRFDAAAQEAVLVDHLAEVEHARERIRRLEGSIDVAVEAAPACMRAVIEALQGLRGIAKVSAATIVSEVGSLSRFRKPRQLMGYSGGVPREDSSGDRVRRGSITKTGNAHLRRIVGEAAWSYRHRPTVRGELLKRQAGLSEEVKAISWKAQHRLYSRYRRLIGKGKTKQQVITAVARELLGFIWAIGVHVEQQHGTAARRAA

SEQ ID NO: 343844 - protein, 379 aa, unidentified
MEVFIERCAGLDVHSETIVACVITGNGENDLFKETETFPTLTKDLFRLLKWLEHHGVTHIAMESTGVYWKPVYNILEGFFDITLANAQRIKNVPGRKTDVSDAEWIAKLLRHGLIEKSFVPPVDIRELRDLTRLRKKWVGHLTSEKNRIQKVLECSNVKLGTVISDIFGVSGRKLLAKLIEQGYVDDSDVESSIHGRMAGKKQKITDSLFGTLNEHQIFLIRQSWQHIIYLESLISEIEERVDILLKNYKEEMELLLTIPGIKKDSAAIIIAEIGVDMGQFPTSQHLASWAGVAPGNHESAGKRKSTRTTKGNPHIKSALCEASWAISRCRNRWLAKKYWSIAARRGKKKALVAISHRMLRIIYSMLLNKEPFKEYQIK

SEQ ID NO: 343845 - protein, 358 aa, unidentified
MRESYFIGLDVAKNVFQVFTADSKGREISNKKLNRNAMTRYFAQLPESVVGIEACGTAHHWARMLTALGHTVKLINPLRVKAFLGFRNKTDAADAKAICEALMHPGTTFIRAKSLEEQDIDHILARRELLVQNRTQLVNQTRAFLCERGIIIPQGRHSFMNILPQIIAEKWDEFGGKFQAILTDNYADYQDLDEKIAKLDKMIQVEATNTEPCKRLMQMSGIGPQTALALFAHVGNATHFKNGRQMSAYLGLTPREHSSGGKQILLGISKRGNVRLRTLLLLGARAAILGIGRRRRGEDGQPNRLSYLDKWILGMVERIGLFKAAVALANKLCRIAWALLAKGDEFNPMKLSRLIKAA

SEQ ID NO: 343846 - protein, 353 aa, unidentified
MTSVTRLCEVVDVVIGVDTHVQTHTAAAVEARTGALLGQITVETTPAGYEELAAFADEHAALRAWAIEGTGGHGAGLARHLAHDQEVVVELDRPERARRRNGAKSDPLDAERAAREAMARTRLGTPRAGGDRQALSILLAARRSAVEAATLAQRQLFSLVIAAPEPIRARFRGKKIPAMVATAAVLRLHPSWDTETTTTVTVLRSLARRARDLAAEAAEHEKAILALVRAWRPDLLDQIGVGPIVAATVLCAWSHPGRVRSEAAFAMLAGVAPIPANSGQTTTRYRLNRYGDRQLNRALHTIALSRQRYHQPTRDYTARRTSEGKTPREIKRCLKRYIARDLYRLLENPSPTT

SEQ ID NO: 343847 - protein, 337 aa, unidentified
MEQRYVGIDLHRRRSVIYTMDGEGQKLSCIRIANEPAALMAAVAPAGEGAHVVVEATYGWYWAVDLLRDNGLDVHLAHPSGNDWGKRRVKNDERDARDLADLLRLGRLAEAWIAPPAVRELRELVRYRAKLVNLRSGLKTQVHAVMAKEGVLPNVVDMFGPGGGRQLDALALAEPYTLRIESLRDLVPVYDREIAMLERKIHQRLRHDQGYEAIQALSGVGRTIAAIFCAEIGDVSRFRSAEALCSWAGLTPRHRESDTKVVRGGITKMGSRLVRWAALEAVARYHGGSWLHADFCRIAERRGKKKARVAVARKLLTLVYYGLRDGEIRCLRDRRAA

SEQ ID NO: 343848 - protein, 411 aa, unidentified
MHNRQNYLYVGVDLHKEHHTAVIINCWQEKLGEIQFENKPSAFSKFLLEVETYVSDGLSVVFGLEDVGGYGRALAKYLVDHEQVVKEVNPALSFLERKSQVMIQKNDSWDAECVARILINKLNQLPDAKPNDLFWSIQQLVSRRNALVKAQSALKNQLHIQLNHHYPSYKKFFSELDGKTALAFWEQYPSPSCLEGTNIKQLTAFLLDVSNNTCSVKKASEILRLVKEDGQTMKEYQEMRNFLVRSIVREIEFKKKEMKYIERELKQLINLLDYQLETMPGIELVTASALIAEIGDVRRFLNANKLARFAGIAPVYFGSGGKGKGHKSKQGNRALHALFYNLAVQQVQVARGSKLPRNPVFHAYYQKKLKEGKTKGQALVCIMRRLVNIVYGMMKYKTAYELPVVEEKEVV

SEQ ID NO: 343849 - protein, 457 aa, unidentified
MNNYYLGADVSKGYSDFMLLDDKKRRIEEDFQLDDTFDGHQKLYHILASLRDRHPETQIYAAVESTGGYENNWFNALVKFQSSLPLKTVRLNPCGVHNNSKAGLERNITDPISAENVAKYMIEHPEKIRYQQQDPLASLRKQWSFIKMLSKQKTQLLNQLESNLYGANPEILGYCKNGVSNWVISLLQRFPTAAKLAKAKKSALISIPYVTEKKAKDLIQNARKSIASASDQVTAQIIKATAKQIQLLSKSIETQEKILTENCSVPEVQLLKTFPGISDISAIGLILEIGSAERFATAKKLASYFGLHPIFKISGDGKSGFHMSKIGRIVPRQILYMVSMVAIQCNPLIAEIYLKHTEKGMKKKAALGVCMHKICRIVYGMLKHNKPFDPNIDRKNREKSLKNKTKTSRDKTRRYQSFDSKAPISARQNKKRRERKQSQSVNNAQRRINEASVPISE

SEQ ID NO: 343850 - protein, 333 aa, unidentified
MCIYSFFIGSDISKSVIDISYIVDGVPIYLGQFLNSEEGFNDFVKALLKITDVPFCEWFICFENTGVYSKPLLNWLISKDIACKEENAMKIARSLGLRRGKNDKVDSKDISRYAFEKRDSIQATILSKPLIISLRKLLSRRDLLVRQKQSLSVSLTEQKSYIDENLYETLKQGDDILLKAYNDQIKIIEKLIQELIQSDPEVALNDQLAQSVIGIGKVTSAYIIAFTANYTTFKNARKFACYSGIAPFSNQSGTKKGKTKVSHIANKKIKSILSNCIASAITHDPEISWYYNRKVGQGKEKGIVLNAVKNKLIHRVFSVVQRQTPYVKMMRYA

SEQ ID NO: 343851 - protein, 333 aa, unidentified
MWDKATGEMLERALSHERKEEVRAFYAGLQGPVRVGIEASGQSQWFEQLLAELGHEVWIGDAAKIRASCERKQKTDRRDAELVVKLLDEERFPRIWVPTPAERDARQLLLHRHKLVRMRTQLKNQLQALALNQGVQRKRKLWSEAGRKQLEALPLLPWASRRRAELLVLLDQLEASIGELDGAAAEQANTRPAVRRVMTHPGVGPITALAFVLTMGPAQRFRRGKQVARYLGLIPTEHSSGGRGQRLGHISKQGNPFLRGLLVEAAQSAVRHEPEMRRAYQRLAQRKCRALAKVAMARKLAVRLYWMLRTEVDYAQLIQGSHAGQLESFRGRV

SEQ ID NO: 343852 - protein, 341 aa, unidentified
MNSNVVGLDLAKNIFHLFSLDADGKPMKKKLKRSALLAYIANLPVSLIGMEACGGSHYWAREFKKLGHEVVLLNARYVKAFVIGNKNDFNDSEGIFTAAQQPKKRVVTVKNLEQQDMQMLHRLRQSTVKERTAVVNQIRGFLSEWGIVLDQGVNKVRKQLPDILEDAENGLSVISRGLFAKQYEKLKDLDKTITDYDTQIEQLCQQNTLSKRFLSVPGIGPLTATMVASDIGDGKGYAKGRDYAASLGIVPKQHSSGDKQVLLGISKRGNGYLRTLLIHGARAVLKNCQDKTDSLSRWLQGLIERRGFNKAAVALANKNARILWAMATQNKDYETATVEAV

SEQ ID NO: 343853 - protein, 406 aa, unidentified
MKQIVSVGIDVSKGKSTVCAMIHPNTIIKESFEVLHTVEEMSMLADYIGSLDGEIRIVMESTGHYHLPVAQFLYQKGFFVCVENAYIIRQFSRIMLHDAKTDPLDAKKLAKYGLAYWSELKPYKFHPSCYTELSLLSKQYQTYIKLLIAAKQNVIHLMDEMLPGFKEALDTASSVQFSKVKYVDFAKEFYHVDMIKSMGKEIFRENYKQWCKEKGYRFQSEKADELFHLAEDGIPTLPTEFPSTRLCMEVATEQVSQLGYALEQILSQMQNLAKTLPEYQTIRQMGGMGEKLCVRFIADIGDVRRFHNGKALVAYAGIDAPPYQSGQYTGTKRRISKRGNSALRKTGYEVMKSLKSHPPKTDTRVYDFIIKKENEGKSKKQAKIAGLNKFLQIYYARVMEIYKNIV

SEQ ID NO: 343854 - protein, 422 aa, unidentified
MMMTTHPKARWTYIGLDSHKDTHTAVFIDCFFGKIKEIQFDNMSSSFEGFLKEAQKYKVIGTSLAFGLEDVTAYGRALAVFLAGKKEMVKHVNASLVASERKAGNILQKTDSFDAECAARVLLTRFDDLPVANPQDKFWILGSLVARRNAIVKINIALKNQLHALLTDNYPNYKKYFPSIATKTALVFFEHFPSPLALTGITAEELTDLFKNITNNRFTPERATEFLAHIAKCGFTASEYQGEKDFTVVSTVRQIKANLHEIAEIDKRLADFIKKFDYKLTSMRGIDTVMASKLIAEIGDIRRFESPAKLAKYAGIAPVTYASGKSDVQYANARGNRNLNEIFFRLALTLTMASGRNTKITNGYFYDYYRKKLSEGKTKKQALKCVQRRLVNILWGMMRTGSEYKNPPVYEKPKEPETKKSA

SEQ ID NO: 343855 - protein, 342 aa, unidentified
MSSLKNVVGVDTAKQVFQVHWVDVETGEVFNKQIKRAKFLDHFANKAPCLVGMEACGGSQHWARRLMGMGHQVKLMPGKAVKAFVGGNKNDVADARAIWLAAQQSGVKAVAVKTEAQQAVLALHRMRQQLVKFRTMQSNGLRGLLTEYGEVMPVGRAALERAMRDVLERLSDRLPALLIDTLREQWEMLSKIDRQIAGIEQRLQAWMKEDAACKTIADIPGVGLLTATAAVATMGDAKAFKSGREFAAWLGLVPGQTGTGGRVRLMGISKRGDTYLRTLLIHGARSVLAHTRELDTWLQGISKRRPPNVVAVALANKTARTIWALLAHDRRYEKTYASVRPT

SEQ ID NO: 343856 - protein, 338 aa, unidentified
MQHVAIDLGGRESQICVRAPDGKIIEERRYPTRNLDKLMTRWPQSRVIVETSAEAFRVADAAKAAGHEVRVVPATLVKTLGVGARGIKTDQRDARTLSEVSCRIDLPSVHVPSELSRELKTMCGNRESLIECRTRLINNVRGWLRTQLWRIRTGATTSFPTRLRDSASSDKRVLPEHVEETLQIIEQLTVQIRSATARLEEIAEKHPVCVRLMSVPGVGPVTAVRFLAALDEASRFRNAHAVQSYVGLTPGEHSSSDHQHRTSITKAGPAPLRRVLIQAAWTALRTRPNDPMVIWAAKLRARKHKFIAVVALARKLTGILFALWRDGTSYQPHRGAAA

SEQ ID NO: 343857 - protein, 353 aa, unidentified
MAIVTDQYDFVIGVDTHAASHTLALITAGTGALGQQAQFPTSPSGLRRAVDWIQRHTHHAPTLIVIDGAGSYGATFTEQLSAAGLTVAEAPDVAATTRRRRGKSDVVDALAMAQAARTLDINELCWPRAGGDRTALRVLTAAREQMSGERTRAVNALTALLRTVDLGIDARRALTTTTIAAVAAWRTRSDNATLAVCRAEAIRLARRIRALDTELAANHTALHKAVTAQAPQLLALPGVGAVVAATVLLAWSHPGRVRSEAAFAALAGASPLPARSGNTTRYRLNRGGDRRLNRALYTVALVRMGHDPRTRDYVTRRTREGRTKREIMRSLKRYISRQLFRTLNGAHSATSTT

SEQ ID NO: 343858 - protein, 425 aa, unidentified
MKVTYKTCCGVDVHKSFLVATIIATTGGIEPSYQKKRYSTFNNSILEFKQWLLDNDCHDLCMESTGKYWIPVFNLLEDEINVTIANPKWVKAVKGNKDDTKDSKWIGDLFRLGLVKGSYIPCKKIRILREFTRYRYKLVSCRSSEKNRYQNALTVCNVALDSVVSDIFGKSSTSIIDYLLEQSGNSINHEEIASKLLKSLKSKEDAVIESIEGYQMTDSQKYRMHLVRAHMDYITAEINDVDREIEKLISSDPDFENAIQFLMTIPGVKRDSAITVISEIGIDMTQFSSSKRLCCWAGLTPGSNESGGKKKSVRVTRAGVYLKPALVQCAHAAVKSEKSPYYKKKYESLMKRRGKKRAIVAIARMILTAIYQMLSTGESWNPSDLYKIDIPEALLEKQKAKAIKQAMKLLQREGLYPLPQESKAS

SEQ ID NO: 343859 - protein, 362 aa, unidentified
MKVFVGHDWAEAHHDVHVEDGDGRRLGGGRLPDGLEGVARFHELVALHVDTAGDVVVATETDRGLFVGALVAAGYTVLAVNPMSTSRYRERHTTSGAKSDPGDAKVLAGLARTDGHNHRPIAGDSELAEAVKVLARTHQSLIWTRQRQLNQLRSMLREFYPAALEAFEELGHSDALAVLTIAPTPTLGRQVSASKIASALRGGGRQRRVDERAEQIRTALRTDQLAAPPLLSEAMGSTVIALVAIATELTAQIGRIENDLATSFDQHPDAEIIRSLPGLGMILGARVLAEFGDDPNRYADAKCRKNYAGTSPITRASGKSHVVLARYARNRRLADVLLPLGLRHAHPQPWSPGPLRPAPSSG

SEQ ID NO: 343860 - protein, 339 aa, unidentified
MNRTAVGVDIAKSVFQLHYIDQETGEIVNKPIKRAKFLEHFANRAPCLIGMEACGGAHHWARQLTKMGHEVKLMPGEFVKAFNIRNKNDAADARAIWLAVQQPGKPVAVKTEMQQAMLGLHRMRQQLLKFRTMQINSLRGLLTEYGEVMSKGRSKLDKEIPVVLERLAERLPAVIIDTFREQWSGLAKLDEQVAQIERRMREWKKEDQSVKAIGEIPGVGLLTATAAVAMIGDPKAFSSGREFAAWVGIVPRQTGSGGKVNLHAISKKGDTYLRTLLIHGARSVLEHTKEPGEWIEQMKKRRPKNVVVVALANKMARTIWAVLAHDRPYRKDYISVKPA

SEQ ID NO: 343861 - protein, 428 aa, unidentified
MNNQETIRRQQYCQIIKEVTGSDQYLVVGIDVAKEKHHAFMGSATGKSLFRKLIFENDLSGFSRLINTTDQIKAQNGLTKVVFALEPTGNYHKPLARHLIRCDRDVVLVAGQAVKNNRQILNGRWDKNDTKDAANIADLVSRGRCLYYDCSPPSIIELRSLLSLRRRLKREEHSLRMRIRNNLLAQYFPELDRFYNACESENLAIVRWCLNPGKIASMEFEAFFKMVTRTRRGIAQKLRLRKIYQTAIDSVGCPMGQAAEFEAELLVEKLKQVRNQIQKTDDLIEDFCLEFSEYSYLLTIPGFGPYISARVLASISDPFRFENRKQLIKMAGYDLCANRSGRTSDKAIPVISKKGNSELRYALYQAANVAAARVDLFRKYFTRLLRGREQERGIKTKMRVKLAVKMLIIAWTLMKKKEPFNPDYLNIE

SEQ ID NO: 343862 - protein, 352 aa, unidentified
MRYLGMDVHAASTVWCLLEAQGDVVGEGRTATTAGALTALMRELGPADELLAGQEVGTLTYLVHDAVTAAGVRLLSFNAAQLRMIAASRKKTDRRDAYWIAKALQSGMYPHPVYIPTGEIRELRALLSQRQVLHADYNRWRHRARTYLRAGGYPVAAGVAAVRAALVAGSPLTRGAPASLTDALARCQRQEAALRAELAQLDAALRTRTQTVEAIQRLMTVPGIGPLTATMLYAWIGDVRRFPHAKQLAAYAGLVPSVRQSGDTVQLGRITKQGTPLLRATLVQAAHVLLSRCRGPAATPLQAIGLRIRGIRGRRKIAVVAVARHLVRLAFYILRDGTIYDAGRVAVMPPAA

SEQ ID NO: 343863 - protein, 369 aa, unidentified
MEQVVPHGWAGVDVGKGHHWVCLIDEAGATLWSAKVVNDESAILEAIAAVLGRAEQVVWAVDITGTAAGLLLALLAVHGQQVRYVPGRTVNRMSGAYRGEAKTDARDAYVIAETVRHRGDLQEVEVPTALVTGLRLLVAHRTDLVTDRVRMVNRLRDVLSGYFPALERAFDYAHSRGALILLTGYQTPAAIRARGHSRLLAWLAKRKVRSADQIATDALAAAKAQHTSVPGQDVGASIVADLAAQILATDARISDLEARIATTFRAHPQAEIIESLPGMGPILGAELIAAAGDLNGYTNAGRLASAAGLVPVPRDSGRRTGNMHRPMRYSRKLRRVFYLSAQASMMREVPRQGGGRFWGSGKLGTAGSA

SEQ ID NO: 343864 - protein, 387 aa, unidentified
MVIIGIDPHKRTHTASALEPGTHRVLATLQIEATLAGYRGLLRWAARFEVRRWAVENARGLGAHLAQWLAARGERVDDVPCTATARVRELSRGGRRKNDVIDAAAAASVAALAGDATPVLVEDSSTVFALLDERRANLAAHRTRLVNQLHALLRELIPGGADTDLTADRAARALATVRPVGPAETARKQIGRDLIAEIRELDARLAKLSAQMTQAIAEHGSRLTDVDGIGPVVATRLLGRTGRAGRFPSSSAFASYAGVAPVEVASADRTRHRLPRGGDRQLNLALHIAALTQVRMRRSTGRAYYDRKISEGKTHNEAMRCLKRRLADHVWRIMIGDERQRRLAGPGGHPGATLTSSAAGSTPTASSSDKSLPGPASPKSTTSDPAA

SEQ ID NO: 343865 - protein, 355 aa, unidentified
MRESISETMGIDLGDRWSHVYARCGATGEILAERRVRTRQEDFEALFAGASGMRVVLETGTHANWVARLAKRHGHEVIVGQARRLRMIYENPTKSDAVDARMLADLGSTHPQLLHPVTVRDERTQADLAVLRARENLVQARTQLVNAARGLAKSQGHRLPDGSTECLPRRAWDVCPGELRPALRPLLLAIASLTRQIRAADRAGHKLCRCRYAKDVAHLLQIPGIGELAALGFVLVVGSPQRFRRNRDVGAFLGLVPRRDQSGASDPQLPITKCGDPMLRQLLGQSAHWILGPFGGDCDLRRWAARRAERGGKCAKRRAVVAVTRRLAVLLLALWKSGADYEPLRNARLAELAGA

SEQ ID NO: 343866 - protein, 349 aa, unidentified
MTIVGCDLHTRKQQVAVLHTDTGEVVEQELLHAGDAVEQFYRTLPRPVIVGIESTGYALWFHELMQHLGHTLLVGEAAKIRAMVVRKTKTDRRDAQHLLDLLKHDRFPAVWIPDPATRDLRALVTHRMRLVRMRTMVKNGLHAIAMNRRLTLGPSLWSQRGLAQLQGLALAPHTTQRRDESLQLLTWLTARIEALDDRVAAAAQADPGARLLLSHPGVGPLTALTTVVVLGPVARFPDSKHVVSYTGLAPAVHASADTCRLGQITKQGSPLLRFVLGQAGLIAAHAEVDLNRHYRTLLRRRGRPKAIVAIARKLLVRLYIMLRDQIDYEEFRRRGRTPRGQEVPPPALA

SEQ ID NO: 343867 - protein, 319 aa, unidentified
MAQDDRVVVGIDVAKDKVDACIRRFALRRTFPNTAQGHRQLVAWLRKHNVDKAVMEASGGYERDWAKVLRKAGSEVRIVDPKRVRSFALSAGRLAKNDAIDAEMIAWFAETFKQAPSQAHDAAHEELVALVKARKGLVELKTRLESQNQHAGPEPAQKAHARVLKSLSAEIARLQVAISATIKAIPDLAERAEIIESVPGFAQTTSANLIAGMPELGRVSDDIAAALIGVAPYDDDSGHRRGERHIRGGRRWVRNAIFMPCLGAATQNNPVLKAFYQRLIAKGKEPKVALVACMRKLIIILNTLIARRQKWDPGRYLLS

SEQ ID NO: 343868 - protein, 445 aa, unidentified
MKQKKPNKRKSVKLPKHLQNLNPYAAGIDIGSKSHFVAVPEGTDDQPVREFSSFTDDLERLAQWLTACGVTTVAMESTGIYWIPVFEILESYGLEVRLVNARHVKNVPGRKSDVLDCQWLQQLHTYGLLRGAFRPADQVCALRAYVRQRSTLVRSAASHTQRMQKALAQMNLQLHNVVSDITGVTGMRIIKAILAGERNPKVLSAMRDPRCKNTEETIARSLQGNYRQEHLFSLRQAVELYEFYQEKISDCDQQILAQLKDFDAPDDPDQKPPRTVGEALQRMSGVDLATINGIDTNTALKIIAEVGVDMSRWKTAKHFASWLGLCPGAKISGGKVLSSATKPVANKAAAALRMAAFALINSKSALGAYIRRQRARLGAAKAITATAHKLARLVYSMLKHGTAFVDVGQEYYEERYRTRVVQNLKRKAQDLGFELVAIQGAAPAT

SEQ ID NO: 343869 - protein, 320 aa, unidentified
MAQNASLVGIDVSKAKLDWCVRGVACGTAANSVRDCTALAKELVGRGIRLAVLEASGGYERTMVAALRKLNVGVMVISPKRVRDFAKAAGRRAKNDPIDADTIAWFGEIFVREGGGLPDPAREQLAALVAERQDFIGLRTECLNRNEHKAPALCQRLRKATLNILERAIAELDAAIAALIAKTPHLAACGRLLASVPCLGRQAVAALLAWLPELGKISDARIAALVGVAPFDDDSGTHKGVRRIAGGRRQLRNILFMAVLGGATRYNATLKTFYQRLLAKGKLKKVALIACLRKLLTIINVMVARGQPWDPPSRVSKAAA

SEQ ID NO: 343870 - protein, 374 aa, unidentified
MATQPTVLPKLYIGMDIHKKSWSVHLRTDISDHKTITIPSSNDVLYHYVQTNFPEHEVSLVYEAGCCGFTASRYFLNLGWNVLVVNPADVPRTDKQSHQKTDVLDCRNLAKQLQSGHLRGIYIPDQKQDYLKSLVRQRAETTRQLRKIKCSIKALLLYHGIEIPKEFDNPNWSKAFIEWIENIPWQEPVGKLCMESKIRLLKVIYQEYLELANQLRSYCRKNHKKDYYLLKSIPGVGGYLSSVVLAEVGDLRRFNKETQFASFVGLVPNIRNSGMTENVFGVTPRCRDLLRSYIIESAWVALRLDPEMQTYYRKHQGKNPKSIIIKIARKLLNRMLSVIKKETPYQKNYSKEIKADYKTPQVIPKVQEVTKASL

SEQ ID NO: 343871 - protein, 412 aa, unidentified
MTAIDQFAAHVGLDWADKKHDVCVQLKNGERTFHVINHTPEALDTWLNELHQKVKGRIAIALELKKGPIVYALQKYPFITVFPVHALSLARYRQTFWPSGAKDDPQDAELALDLMLRYPQKIKAIEPDNADIRLLLQLVEQRRLLVEDKRRFVNRLINTLKQYYPQPLEWFSHRDSSLFCELIIRWPSLQQLKRARSDTVRSFMNARGGPAVAYTEQRVTRIANAIPLTTDKSVIEANALMATALASQIKLVVELIRTYDERIESLFDTLPDAELFKSLPGMGPCLGPRMLAALGDNRDRFNSAEEIQNYAGIAPVTERSGQKSWVHWRWQCAKFVRQTFVEWAAKTVNSSYWAKLYYQGLREKGKSHQSAIRALAFKWIRIIYRCWKTRTRYDEAKYLLALEARKSPLLMP

SEQ ID NO: 343872 - protein, 416 aa, unidentified
MEIVHTHCAGLDVHKKTVVAAIIVQEGSDELHKEVQTFGTMTADLLKLSDWLLSLGVTHVAMESTGEYWKPIYNILEENFEVLLANAQHIKQVPGRKTDVKDAEWIADLLRHGLLRGSFIPPVGQRELRELTRHRTNFVRERSTLVNRIQKTLESANIKLASVASNVMGASGRAMLEALVAGSANATEMAGLAKGRLREKREQLDKALEGRVKPHHRFVLSELLCQVDNLDETITRFDAEIEKYCRPFEQAVELLDTIPGIARRNAEVIVSEIGSDMSRFPTANHLAAWAGVAPGNNESAGKRYSGTIRHGDRALTVALVQAAHAAAHGHNTYLSAQYHRLAGRRGKKRAIIAVAHSILIISYHLIQRNEPYRDLGGNYFDQQRPEATAQRLISRLHQLGYDVSRLEQPVALPAAT

SEQ ID NO: 343873 - protein, 368 aa, unidentified
MSTLRFVGLDVHKDTIVIAVANEGQSEAVTLATIPHDVTKLVKQVSKLADDKKQLRVCYEAGPTGFGLSRRLKAAGINCVVIAPSLVPQQVGIRVKTDRRDARRLAHFLRSGDLVEVWVPDEKTEALRDLERSRDDAKNAERVARHQLDKFLLRNERIYRDGRSWTQKHSDWLKQQKMGDPCKQCVMDDYVKAVDDATERVKRLSKEIELFVRGAALEPLIRAFMAFRGIKTLSAVVIAAEIGDLRRFTTARQFMAFLGLVPSEHSSGKSIKRGALTRTGNAHVRRILIEAVQHYRHRPTLSAALRERQEGISPEVIAISWEAQKRLCKRLNYLIEQKKPRNKVIVALARELAGFIWAVGQVSKPLAA

SEQ ID NO: 343874 - protein, 352 aa, unidentified
MMIIGCDFHPRFQQISFLWEETGECGQRRLMHTAEAVEYYRSLRGTRVRIGMEATGSYGWFRRLLSELGHELVVGDATQIRASNPRRQKTDKRDAEHVLRLLVEDRFPAVWQPPAENEQLRQLLLHRSRLVRLRARVTNQLDGMAKNEGLILAGGWSGKRRKAIEALSLPGWYGERRKDLLALLDRVEERIAPLNKAVSQAAANNAEARLLMTHPGVGPVVSLAYVLTIGNWQRFARGKQVGSYLGLIPSEDSSSDKRRLGHISKQGNTLLRWLLVEAAVSAQRHDADWHRQYVRLSMTKHHGVAKVAIAHKLAVRLYWMLRSGQDYEQIKERGLHARQSECPVGRSKRPIE

SEQ ID NO: 343875 - protein, 428 aa, unidentified
MHGKDYNKQIAKRQRIKRTTLVIGIDIGNEFNAMCLMNKEGEVLGKYPRIYNSRKGFEFFLKAIEVMKKKKGFRDVLIGMEPTGHYWRKIAYFAKERGCEVRFVRTTALRHQRELDESSSAKSDVRDAVTIANITREGKYIDTVIEDGVLRQLRTLAHVRERIQRYNTGSKHALKAVLDDYFPELKDIFWSMKSKGLWAVLEDVPFPENVIELGLKRLTELIAKSTRRKEAAAKKAADIYKAARETVGLKQIGVADRYRVEMYLEEVKRSEAQLKDIEKEMGKLLEEVPYAKNILSIPGIGVLSCAVFLGELGDPSNFKHPKQIIKYAGYDPQEHDSGQSIGRKRISKKGRWMLRKYLYFMSMRAIYRSEFFREYYEGKLKSSNRFGQPLKKKEAICAVAIKLIKVIFALLRDDRMFTAEAPELALAA

SEQ ID NO: 343876 - protein, 495 aa, unidentified
MQIKSLRKPVDWAIELLTTLSKAMKAKRSKASTQGQRIRPSRSMPVINPHAAGVDISPNGHAVCVPEDSVAAGESPVREFGAFTRQLDKMVEWLSSCGVKTVAMESTGKYWIAPFERLEAAGFEVVLVNAHDLKHVPGRKSDILDCQWIQRLHSYGLLSGSFRPPEDIRRMRTLLRHRSNLVVQSGQELQHMQGALDEMNIHLHRVVSDLDGETGFRIVDAILAGERNPDKLVELRDERIRRSTVEQMKEALHGFWQEEQVFVLRQSRETHRWLQQQIEECDVELQKVVQRVKSNPASIPPEQAPPNPEGKVTTKKKKRAGGNAPKPDFTAELTRICGIDLTQVIGLNVLSVLMLVSELGVDMNRWRSAKAFASWLGLCPGSKISGGKRLSSRTRPVANRVSILLRSLAPTIGRTDTWLGHFHRRMKARLGPAGANTATGHKLAAIIYHLLKYKEPYIDVDCLLYEAKFRCSRLTRLRKQAQELGFQLVETPQLA

SEQ ID NO: 343877 - protein, 475 aa, unidentified
MNIKGSKKKNQVLSVNIFEQQEIIAKADAIKAELKASTWHELETKGKFDKNDKLSFVSDDMLILGCDIGSETHYVRTIDTRGRELSKSAFGFSNTAEGFERMLDWSTKLAAANDKKQIVLGLEPTGHYWFCLTTWLVAKGISVVQVNPYAVKQTKELEDNSQLKDDKKDPKLIANLVKDGNFGMPYLPEKLYADIRRLSMFRDQLNEDRIRNLNRLHREMKIYFPEYKDAFGKIDGAFSLELLKEAPFPDELAALGTEGMKQIWHEAKLRGRGYANASSILEYARKSVGIKDGSDAGRQAVKWFVSRIIELDEQLSDIENQLNQRCNEIPYAKNILAISGIGENILSGILAENGDISRFDNVKKIQKLSGLGLVACSSGKHTGETKISHRGRKRLRYWLFQAAKSAVAHSEEFKELHVYYTTRKQNPLKKMQSLIVIACKILRVIFTILTKGTAYDPKKLLGDIVRPDQSIPQAA

SEQ ID NO: 343878 - protein, 402 aa, unidentified
MNAVGIDVSKGKSMVAIMRSFGEIVSTPFEIKHTTSDIHSLVELINSVEGESRIVMEHTGRYYEILAHQLSEANLFVSTINPKLIKDFDNDSLRKVKSDKADAVKIARYALDKWQNLKQYSVMDELRNQLKTMNRQFGFYMKHKTAMKNNLISILDQTYPGVNTYFDSPLRSDGSQKWVDFASTYWHVDCVRKMSLNAFIDHYQNWCKRKKYNFSQSKAEEIYGKAKELVPVLPKDAITKLIIKQAVDQLISVSTTVESLRTLMNETASKLPEYPVVMAMKGVGTSLGPQLMAEIGDVSRFTHKGAITAFAGVDPGVNESGTYEQKSVPTSKRGSADLRKTLFQVMDVLIKTMPQDDPVYQFLDKKRAQGKPYYVYMTAGANKFLRIYYGRVKEYLASLPES

SEQ ID NO: 343879 - protein, 343 aa, unidentified
MQIRSVGIDLGKTTFHVVALGEGGKVLFKKKFTQKQLIAFTANLQTSLIGMEACSGAHFLGRALREQGHDVKLIPAQFVKPFVKSNKNDFLDAEAIAEAVDRKNMRFVPIKTDDQLDLQALHRVRDRLMTRRTSVINQIRAFLLERGVVFAKSPIRLRERIPDVLENADENLTPRMRNLLSWLWDEWKDLEQQLNLLNLEVNQIASSDAACRRLRQIPGIGPLIATAIVAAIGNGAAFHKGREFAAWMGLVPKQHSTGGKSKLLGISKRGNQYLRKILIHGARSVVLNSKRDHVQMGAWMTALEARAPHNVLVVAVANKLARIAWAVLSSDNDYHAIPAQMAA

SEQ ID NO: 343880 - protein, 429 aa, unidentified
MSEEKSKELRVSVDVGYRRHSVAIGLPSGELLEEFEIEHRLEGFQEFFSRIEKHNPKQSYSVAVAMEGYNGWARPLDGMVRERGYRLYNINNLKLARFKEIFPGAAKSDQIDARKGLELFQLQDHLPLAKEVLQEVKGTPAENEVLKRLTRRRRRLVNERVRVVNNLQADLQAVCPGLLEITNNAGNQWFLNFLVSAESLSQIARLRRSTLLKIPAVGVKTAAIIAGWQKRCHFSEEIDWVGEMIQEDARRCLELDDKVKRLETKIATLAANSKIAKIFRSVPGFGAVCSSELAGEIGTIERFDKEGSLALYLGMATLDNSSGKYQGTKAPKQVNTRAKAAMMIGVDRHRKKVAQSQRYYEKKRAEGKKHNQAIRALGRHLTRIIYKLLKEERQYEIRPEQGNTKTRVSPAACVKRQIRRPKISGAKKK

SEQ ID NO: 343881 - protein, 348 aa, unidentified
MPQNLDRAIAVIGIDIGKNSFHIVGLDGRGAIVLRQKWSRGQVEARLVNMPPCLIGMEACVGAHHLSRKLKAFGHDARLMPAKYVRPYSKGQKNDFRDAEAIAEAVQRPTMKFVATKTADQLDLQALHRVRERLVSQRTGIINQIRAFLLERGVAVRQGLRFLRAELPRILATPPDVLSPRMVRVIEGLAEDWRRLDERVDHLSGEITALARQDVGCERLMSVPGIGPIISSAMVAAIGTGDAFSKGRDFAAWLGLVPKQISTGDRTILGKISKRGNRYLRVLFVQAAWVVLIKPKSWERHGLKHWIEAAKKRLHRNVLAIALANKLARIAWSVLANGRIFEARLQAA

SEQ ID NO: 343882 - protein, 345 aa, unidentified
MKKVIAGMDLHSNNVVVGILDTDGKRMADRKLPCDLKEIVKFLAPFKKRLETVAVESTYNWYWLVDGLQALKYPVVLANPAGMEQCRGIKHADDTNDAFFLAELTRLKILPTGHIYDAELRPVRDLLRRRLMLVHHRTALMLSFKSLYTRTTGHEMALSQLKELEIKAAQELYDHPANQLIAGMQIQQIEQLTQSIEKIEKVVLACARELPYYPKLATLPGVGKILAMTITMEVGDIKRFAQPGKLASYCRTVEAKRMSNSKKKGENNSKCGNKYLAWAFVEAASFARRYDEQCRKWFDRKVARTSNVIATKALACKLAKASWYLMAEGTDYDPKRMFGQPPTMK

SEQ ID NO: 343883 - protein, 350 aa, unidentified
MRTKPDPETIAFGIDIGKKVFHVVALNAAGAVIQRGKFSRDTLMAFFDAAPKALVGMEACPGSQWLARRLAAMGHDARIIPARFVKPYVKSNKTDTVDAAAIAEAVTRPTMRFVEVRTPEQVDLQALHRIRDRLVGQRTALMNQARAFCLEYGLAMRVGGGAFHADIRRHLANAENDLTPAMRVLLEELLDDLAYIEGRIKAVNGKVEAYASQHDAVSRLVTIPGIGALGATAIVAAAGDGRQFRKARDLAAWLGLVPAEHSTGGKQTLLGISKRGNRYVRRLIIHGARSCFLHLNRANHALGGWLSALEARTHRNKAVVALANKLTRIVWAILTKPGTVYLQSKGAALS

SEQ ID NO: 343884 - protein, 337 aa, unidentified
MKYSGIDLHSNNSVVTVTDEEDRVIAEKRLPNDLTKIVGFLLPWRDELKAVVVESTYNWYWLVDGLQEAGFVVKLANTAAIRKYDGLKHSGDEADARQLAHLLRLGILPTGTILPPEQRALRDLARKRMQLVRSRTSHILAVENIVARQQGAKIGGRQIKQLTADAVDQMGLPADVALAIKSNLAVILTLNVQIDVLEKHLQKKVGERKEFMLLSSVPGIGRILATIILLEIGTIERFAEVGNFASYARCVDSQHMSNGKKKSEGNTKNGNKYLAWAFIEAANFAQRFNAEAKRFYERKKAKTNTTVATKALAHKLARACYHILKEQKPFDVTRCFA

SEQ ID NO: 343885 - protein, 339 aa, unidentified
MLKSNIIGIDLAKNVFQVCVISKDGELISNKVVSRQKLKEILAKSHPAVVGIEGCGSSHYWGRFAEQFNHDVRIISAKKVKGFLQGQKTDANDALAIANAAMQVGLKYSKHKNEEQQILQSLETSRVYLSRNITSLGNHIRAMLYEYGIVSAKGAAGLRKVVMETLDEQHPLPANLLSTLHHLWAHYQSLKEEFTIQEKAKNALVRQLEPCKSLMALEGVAEVCAGMLYSALGNGKQFKNGREASAFVGLTPKQHSSGGKVFMMGIDKKGGIKELRAALFQGALSIVTKLPEEPKTAKQKWLIQLLQRVGIKRTCIALANKTVRTAWAMLRYDSQYEQQ

SEQ ID NO: 343886 - protein, 400 aa, unidentified
MLSIGIDVSKGKSTVCGMKPGGEIVYTPFEVQHTREGMSELVLLLHNSGEEVRAVLESTGSYHCPVVAALLENGIFVSVVNSLRMKRFCSQSIRKVKTDRIDAMQIALYGLAYWQELQPTKLPEDTYRELQLLARQYYQMTSLLIKAKVDFNAICDQVLPGMQELMNDHAGRHKLSDFVRRYRHTTHILEMGETRFRKDYCKWAEKKGYRNCERMAALIFATAQNGIPVLPNAPSTQIVITEAIRVLHTVEASRDAILTQMQALAKTLPEYSLVREMSCIGDTLAPRLIAEIGDVRRFHSKRALIAYAGIDAPPYQSGKFCANNRHISKRGNRYLRKTGYEVMQSYVMHKPANDPIFTFIEKKRGEGKSGKLAMVAGLNKFLRVYYGKVTELYRSLPAIE

SEQ ID NO: 343887 - protein, 397 aa, unidentified
MYIVGIDIAKRKHKAAVIDGEGAVIIKPFSFTNNCSGYNRLLTMLAKAKLPLDEVSFAMEATGHYWLALFTRLQKEGFHVQVINPVQTNSIRSFYIRQAKTDPRDALLIAEVIRFGHFSESTLHPENIYELRELCRGRHAIVSMQADVKRKVVALLDQVFPEYETAFTNMFSDTSMAILQTCPTPKELSEMPLEELCHLIEVSSRKRFRMAKARELQELARNSFGFAMAGDVFSTMIRLYAKHLDFLKQQVREMDRKIAEIMDTLDTPIATITGIGPTLGAYILSEIGDISRFSSAAKLAAYAGIDPTMRQSGEYNGVRNRMSKRGSPYLRHAIWLTASSAVLHDPALKLYFQKKRDEGKPYMASVGHACRKMVSIIYAVMRDNKAYTPYIPNEISA

SEQ ID NO: 343888 - protein, 345 aa, unidentified
MKNLFIGIDFSKEKVDATIIIAQGLEELSARMSETFPTTTSGYNKLVRWVEKNSLGIERDAWLFCGENTGDYSKPLCNYLYGKGLDIWVENAKCIKDAAGLRRLKSDRADSVMIAEYAMRNYDRAEIYEPLNESLSQLRELFLYRQQLVQHKHGFQVRRGEKKLTMEKSSIKTTISQSGRHMVNVLDKEIEKIEKKIQELIKGDEVLKGTYELITTVPGIGMQNALCLLIFTNNFKRFNLNPRKIACYYGIAPFGRDSGTSVHSSPHVHYMANKMLKAILTQAALASIQFCLPIANYYNRLVNKGKKKQVALNNVKNKLIHIITAMVKNNQPFDPEYIKNNKSIA

SEQ ID NO: 343889 - protein, 322 aa, unidentified
MTDFVLGVDIAKRKFDVALLLNQKLKHKVFTNNDEGFSELMNWLKKYSVDQAHVCMEASSTYGEELATYLHDAGYRVSIVNPARIKGFAQSELLRIKNDKVDAGVIARFCDKMRPESWAPLPPEVRRLQALVRRVDALLGMRTQELNRIGTTHETVLHSIKEHISFLEEEIAALKKEIADLIKKDPNLKTKADLLRSIPGIGEATIAAILSELSLFEKCDSVRKVVAFIGLAPREFTSGSSIKGRPRLSKTGSARMRKALYMPSLVSMQYNPVIISFCRRLTKKAKNGKVIVCAVMRKLVHIIFGVLKSGRPFDPNFGLKMA

SEQ ID NO: 343890 - protein, 421 aa, unidentified
MRGIGLDVHRDFCEVAIAENGRVRSAGRIPTRVPSLELFAASLVSSDVVAVEATTGTDKIVSVLQRHGIRVVVANTRKLRSITEAKAKTDRLDARTLARLLVSGLLDEVWTPDERTRALRRLTNRRERIVRARTRAKNEAHGVLSRNLCERAPVTDAFGKAGRQWLAGLALPVDERLTLDGCLRQVDFLDAEVAALDREIAKQALAWPEVLRLMTVPGVNVQTAATLMASVGDIRRFSSARKLVSYLGLDPRVRQSGNAPARHGRISKAGASEARHMLGEAAWKVTLTPGPLRAFFERVRARRGNQVAATATARKLVVLFWCLLTREQDYAFGRPAMTRNKIRKLELLAGAPPQKGRHGIAGGKSKAVFDAERELSRQAEAAYRRLVNDWHATGPSKVGASATPGRAPQGPSKDQAARQTK

SEQ ID NO: 343891 - protein, 348 aa, unidentified
MDTIGVDLHKRETQLCIGQADGSITEQRIVTSRERFTAVLGHRPPARILVEASTESEWVACHLESLGHEVIVADPNYAPMYATRARRVKTDRRDARTLMEACRAGTYRPAHRLSAARRHVRAQLAVRDAVVRTRTRYVALAKALVRGDGLRVPSSAAERVGAHLEALAGSPTLAAELAPLLTLLPPLNATIAAADQRLAELEHTDPSVALLMTAPGIGAVTASALVATIDDVQRFASAHQFEAYLGVVPGERSSGELRRIGPITKAGNRRARWLLVEAAWRILRSKDPASAPLRAWARLIAARRGPRIAAVALARRLAGILYAMWRDSVPYDARKVRRPRRAPGGPAS

SEQ ID NO: 343892 - protein, 403 aa, unidentified
MKKARDPRVVGVDVSKKTLMVSSYGVGKKARAQRSVVADEAGVAALAAELARDKVRVVAMEATGGYERRLLKALDAAKVPAVLLQPERVKNFARSQGTRAKTDSLDCECIANYASVTDVPLWVAPSAALEAAMALGRHRDALIRDRTREKNRLQTATVVAVREPITTHIAFLTKQARAVEKQLLAHIMSEPQSVARFELLKSVPGVGALTAARLVAELPEIGEIGISKLSSLAGLAPMNKDSGEHEGKRKCAPGRRQVRTALFQAAHSGVLFNPVIRAHYVRLISKGKERKVVLIACAHKLLRILDAMVRHDERWDASRHPAGLAAMAVAESEAIEEALAELEVGPTELESEQASNPATKPTITRRTSTKTASKPAAKRTAQAPVTSARSRRPTRPVVEPKHG

SEQ ID NO: 343893 - protein, 340 aa, unidentified
MSALIVGIDVSKDTVDVARITGPDTTSDLGNFPNDETGFRAVAKLLKREAKQAGAEQICIIIEPTGGYERLLVTFAIKQDWRVSIPNPFKVRQWAKGMGIRAKTDRLDARMLARYGASKPLPTYKPLPEHIANLDALLRRKEDLEVTLRGERNRLHACHAQGITSGPVFASIERAIEWLEQELDKLHQDIDTFLDQHQDVQQQATNLRTVPGIGERNCLYILVLLYRWDTITESRGSNKQLTAYVGLDPVACDSGTSVHGRQMISREGNRNIRCRLYMSALGATNGKNALSEFYHRLVAANKKKKVALVAGARKILIWAWAVFRHQTTFDAKRFAPATAQ

SEQ ID NO: 343894 - protein, 372 aa, unidentified
MIVIGIDPHKSSHTATAVDPATNTDLGSIRIDATLTGYKTLIAWAKTWPQRTWAVENAYGLGHHLAQWLLALGEVVLDVPTTATARVWELSRGGRRKNDRIDAAAAACVAAMQGDARPVDSEGSAEILGLLDEQRNNMSSSRTRIMNQLHALLRQLLAGGAPTSLTAAAAAALLRGFRAKSAVDRMRVGLCRELIADVRRLDDQLAANEKQMAHTLDEHGTRLREVDGIGAVTAARLIGRTGRPDRFPTAAAFSNYNGSAPVQIASADTDRHRLSPLRGPAAQQRALHRRGGSDSDARQRRAQLLRQEDRRGQEAGSGQARPQTSPVRSRLAHHAGRRKSVSSTTYKSIRQSCLTNREAPRQVAYGVANRDR

SEQ ID NO: 343895 - protein, 375 aa, unidentified
MIYVGIDIAKLNHFASAISSDGEELIKPFKFTNDNDGFQLLLSKLDPLDKDSLIIGLESTAHYGDNLVRYLVAKNYKMCVLNPIKTSTMRKNNIRKTKTDKVDTYIICKTLMMQESLRFVTFYDLDLMDLKALGRFRQKTIKQRTRLKIQLTSYVDEIFPELQYFFKSGLHQKSVYALLKEAPTPEAIASMHMTHLAHLLKVNSHGRFDKEMAQQLRVLAQKSVGASDSSLSIQVTHTIQQIELLDSQLERVEAEMTEIMKFNDSVIMTIPGIGYINGGMILGEIGDIHRFSSPNKLLAYAGLDPSVYQSGNFQAKKTRMSKRGSKVLRYALVNAAHNVVKNNATFKAYYDAKMAEGRTHYNALGHCAGKLVRII

SEQ ID NO: 343896 - protein, 467 aa, unidentified
MALPYRQDGRVPPASEPLRVANARAAGIDVHAAVHFVAVPPESAPAEGDNPDRNLPRHVRRFGACTADLELLADWLQKCGITSVAMESTGVYWIPLFELLERRGFAVFLVDPRQTRHAPGRPKTDVLDCQWIQRLHSYGLLTPSFRPADQVVVLRSYLRQRQMLIAYAGQHVQHIQKALEEMNVKLTEVVSDVLGVTGRAILQAILAGERNGRRLAKLRQKQCRRTEAEIARALQGNWRDEHLFALGQALQLYDFYHAQLRECEGRIEACLRTFPARSEGEPSPPRPRRRGRKANDPSFDVRGLLFRMAGVDLTVIEGIDEATALVVLSEIGVDLSRFPTVKRFVSWLGLCPQHQGSADKVYRRRVRRGANRAARALRMAAQGCHRAENALGAFYRRLRARAGGGKALVATARKLAERVYRLLRYGEAYVRQEQSAYEAAHRDRTLRGLARKAASLGFRLEPTPASP

SEQ ID NO: 343897 - protein, 316 aa, unidentified
MEQQRPHGPSFVGIDVAKRQLDVCIRPAGLTFTVTRDAAGLEELVARLREVAAELIVLEATGGFEQVVTATLAGAALPVVVVNPRQVRDFARASGKLAKTDTLDAAVIALFAERMRPELRPLPSEAAQQLGELAARRRQVIEMMTAEGHRLRQAAHRRVHKRVAAHVAWLQAELADIDRDLDQTIRDSELWRQQEALLTSVPGVGPTVARTLLAELPELGQLDRRALAALVGVAPMNRDSGQHRGQRSIQGGRSVVRAKLYMAAWVARRFNPVIKTFYDRLVAAGKPRKTALVACIHKLLTILNAILRSKIPWQNA

SEQ ID NO: 343898 - protein, 424 aa, unidentified
MKIVYTTCCGIDVHKKFIVATIIKSEGIMPHYQKKRFSTFNNQILELKQWLLENGCKDVCMESTGKYWVPVFNLLEDSINVTVANPKWVRAVKGNKDDVKDSKWIGDLFRLGLVPGSFIPDKPIRILREFTRYRFKLVSCKSSEKNRYQNVFTVCNVALDAVVTDMFGKSASSITDYLISSDAFDPEHCVSLLKGKLKKKAEDVVASVDGYQMSPEQKLRARMVRDHYDYLVDAIRKLDEVRDTLAAPYESAISLLCTIPGIDRLSAITIISEIGTDMSQFSSSKRLCCWAGLTPSNNESAGKKKSVRITRAGVYLKPALVEVAHAAVKDKEHPYYGIKYNRIAKRRGKKRAIIALARMILTAIYHMLSTGEVWNPCDLQQVDIPPELQAKQLQQSLKRAAKLLVANGVISPDALAALAAQSSA

SEQ ID NO: 343899 - protein, 410 aa, unidentified
MERIVECSAGLDVHRDTVVASIRDLRGKRERVTTRTFETYPDALRSLGAWLKESGAQVVAMESTGVYFLPVYRELRREGLVVWVVNAAHAKNVPGRKTDVNDSAWLSKLAMHGLVRPSFIPDEELETLRMLTRLRVQTVSEASRTKNRVIRVLEALGIKLAGLFSDVLGKSGRNVLRAMLEGNKSPTEIAALVDPRMAKKRPSIERALSVLVHADAKWMLLELLQTLEGIEQRIARLDGRIADKLSRYASDVELLRQIPGLSDVSIAAVLAETGSDMSLFPSAKHISSWAGLAPGKNESAGKNKRTRVMRGNPWLRTMLVQIAWVVSRAKRSPWAQSFARWARTTGSVKKAALAVAHKLLVAVYHVLKDRIYRPQQPLPLTDNQRQRRIQRALANLKELGVDVTVAPLPG

SEQ ID NO: 343900 - protein, 414 aa, unidentified
MSNPLIVGVDVHRKTNTFCLMDASGQEVRSRFTLDNNRPGTQAFVQQVTELMEADGFSELQVATEATGWYWFHFFQSLQQEALLSAWPVDLHALNPRLTANFKKSYVDMDKTDPIDAFVIADRLRWGRDIGTPFEYDETYLALRFLTRYRYHVVHNLAREKAYCTAILYLKASEYSRQDKKPFSDLFGAASRAVLQEFASIEEIAAMPFEELVEFIDVQGKRRFPDPSENARLLMQVAQDSYSLPQALQQPINLVLNLSLKQISALENQAERLDTAIAEHMATIPNTLQTIPGFGPVFVAGILAEIGNPQRFNYDQGKVAKFAGFKWRKTASADFTADETRMTRTGNPYLRYYFCEAAFSVQRCDREYGLYFQRKLQEVRKHAHKRATVLTARKLVRLVMRLLATNQPYRPRRL

SEQ ID NO: 343901 - protein, 374 aa, unidentified
MLSARPAGACRPPPDQQKELAITTIAHPERPRVTVGVDTHLDVHVAHAKDQLGRRMETVSIPTTPAGYQDLLAWARGLGEVEAWGVEGTGCYGAALTRFLGDQGQVVLEVNRPDRQARRRRGKSDPVDAEAAARAVQAGEVTTLPKAGTATVEMIRSLRVARQTAVKARTQAINALKALLVTAPAQLREQLRGRSAAMLVRQAAALEPGPLVTPTAAAKLALRCLACRYQALHAEVATLDTELARLVAKAAPGLVARFGVGPDSAGALLVAAGDNPGRLRSDACFSMLCGSSPIEASSGKTRRHRLNRGGDRQANAALYRIVVVRLRWHQPTKDYMARRLTEGKTTKEIIRCLKRYVAREMFTVLNQTVPTPAT

SEQ ID NO: 343902 - protein, 333 aa, unidentified
MKKLIHFIGIDVSKETFDLALIKDNDDSRIIQKVFSNNQIGFKELSRWLRQQKVVYPDTIFCVEHTGYYSKPVAKFIIANKGNLWMEMSLKIIRSLGIQRGKNDKIDAKRIARFAHRNQQDYKPYNPQRTIIEKLKTLLMLRQKLINNKTSITVPVTELKSIDKQAGKEALDIACTSLKAIEKNLLFIDQKIDAIITSDKDLSEKYRLVTSVPGIGKITFCYLAYFTNEFKNYSEAKQLACYCGVVPFEYTSGKSVRGKPKVHNMANKIMKRLLHTAALCAVTYYPEFKAYYERKVNENKNRMLVLNNVRNKLILRVAAVINNNQPYKINMTP

SEQ ID NO: 343903 - protein, 413 aa, unidentified
MVAFFCGVDWSESGHDVAVVDTAGTVVARARIEESPAGVKELLRLLAGLKTSHRHSRKQVPVSIETSRGLLVAALRAAGQPVVAINPTVVARYRGRLNPTRKKADVTDAVLLANILRTDAHLHRRLWTPSPQGAAITVLARAHTDAGRRRHQLRFKLRSALREYYPAALEAWKGLPDDLMRGEARTVLALAPTPRRAARLTVRQLADALAEGGRTRLIYDHAERLHGLFRQPQLRQIDVVEEAMGAAMLARLALLNQACHTLDDLTLQVTEAFDAHPQARIYRSFPGCGPIVGARLLAEIGDDPNRFASARGLLAYAGVAPLTWASGASSVVTHRRIANRALKGTGHVWAFAALTRSVGARAHYDRRREAGDRYAAALRHLSGRLLRCLHHCLSTGELYREERAFPRGLSVDE

SEQ ID NO: 343904 - protein, 359 aa, unidentified
MYFSGLDAHLRYVTVAVLDRLGGVALETTVPTREPDRLLAVLAPFRPLEVVVETCPFWPWLYDLLVPAGIGFHLAHAKALRAIATAPQKSDAVDARLLARMLLSGLIPEAYPRSADQRELLRLLRHRTALVRFRTRLAGRIHSQLHQQRLSLPREKLLRRATRAWLEATAWPQLTVEQRAIVTTHVELIDHLTPLIRALERRIAAAAAGDATAPLLATIPGIGPYRSLLLAAELVPISRFPRAEHLVSYAGLAPVTRSSGGHTHHGSIPPAANRWVRGALVSAIPSHVRYAPTSPVTVAYEQLKARLGWRVARVAAARKLARVVYVMLTRRTPWHGVPAAGDVRDEVQNSHVAPTTAFC

SEQ ID NO: 343905 - protein, 388 aa, unidentified
MFAGIDVASERHMLARLDATGVPLGKPVPITEDREGYDTLLRLLGPPPVLVAMEATGHYWKNLYAALVAAGHSVVLLNPLKTRRFQDSALERTKTDAIDATGVARFAFEKRPKATQLHDAAAEALRELVRHRDRIRQDFDDRVRQLHRLVDLGFPEFTRYVRGLDSMLATALLAECPTAHDFARATPKRLAKLRYDGRHLVGAERAAQLIEAAKRSIGQHHGPAYRLQARHICQDLDLWRRRLVEIERDIDGLLERNEVGQLLLSIDGIGPQTTARIIAAVGDPARFKSAAAFAAYVGVVPGLKQSGKNGSRRAACAPMGNARLRRALWMPVVGAVRRNAWLKSFYDGLIARGKPPKLALVAAMRKLLHAAYSVTKNRKPFTIKLAET

SEQ ID NO: 343906 - protein, 430 aa, unidentified
MKSNTQNAKIEAITEKTLVLGIDVGSEMHYARAFDYRGIEYSKKPFKFSNTEAGFVTFKEWILDLKERHEKDKVIPGMEPTGHYWFNLGKFLQDNEMKPVLVNPHHVKKSKELDDNNPTKNDRKDPKVIAGLVREGRYMIPYLPDGVYADLRTASNIRFQLQAELTRIQNRISRWFNIYFPEYKTVYGKPDAKSGMLILKAAPLPEDILTLGIDGVNQIWRDAKLRAVGKARAKTLIEAAEHSVGSKEGAVSGKMEIRMLLEDYESRNTRLQEVMVLIEELVRKIPMAEKLLEIKGVGIRTVSGFLAEVGDISRFNNPKELQKLAGLALVENSSGKHKGETTISRRGRKRLRYLLFEVAMSLVSKNQEFRELHNYYTTRRLNPLKKMQSLMAIAAKLIRVFYAILTKGVDYDPKKMISDIKRPTVYLQAA

SEQ ID NO: 343907 - protein, 341 aa, unidentified
MTRITTIGLDLAKRVFQVHGIDATGAVVLRKRLRREDVLVFFTQLPPCRIGMEACSTAHHWARELRTLGHEVLLMPPQYVKPYVKRNKNDAADAEAICEAVGRPNMRFVPVKTVEQQSVLALHRSRDLLVRQRTALANAIRAHLAEFGIIEAQGLHKLERLTQIVQDETDNRVPAEARDALTALVALVDELNTRIDAIEKQIRTWHTASKASRRLATIPGIGPIIASALTATVTDASAFANGRAFAAWLGLVPRQNSSGGKDRLGRVSKQGNGQLRRLLIIGAQAALQCSKSLRAHPWVAALLTRKPRLVAAVALANKIARIAWAVMSKQEDFRGLAATPA

SEQ ID NO: 343908 - protein, 346 aa, unidentified
MNITQIWIDLAKLVFQVHGVDARGKVALRKQLKRSQMTAFFNQLAPCLIGMEACGSAHFWARKLTEFGHMVKLIAPQFIKPYVKSNKNDAADAEAICEAVGRPNMRFVPIKNTEQQALLGLHRARQGFVSERTAQANQIRGLLSEFGLVMPVGIRSIKGKVPGILEDAENGLSGVSRALIARLFEHLGLLDRQVRELEREINAWHREDTASQRLQAIPGIGPLTASALVASVGDAKVFHNGRQFAAWLGLVPRQSSTGGKTNLLGISKRGDTYLRTLLIHGARSVLFSLKRHPDRAEGWLAQVAARRNPNIAAVALANKHARTVWALLAHGRDYRAGFRSVNSIAA

SEQ ID NO: 343909 - protein, 342 aa, unidentified
MDIAVLGIDLGKTVCSLAGVDGTGAVVLRKRVQRFRLLEFLARLAPCVVAMEACGGAHHVGRFCLQFGHEPRLMSPLYVRPYVKVHKNDDRDAEGIAEAATRPTMSFVPIKSEEQLDLQALHRARERLVQDRTRLINQARGFLMERGIRPAQGRHVFQKFLTTLAEDHIGDLTPRMMAMLADMAAELGTINEKVAALDSEIKSIAGADQDMRRLMEIPGVGPTIATALVAAVGNGKTFGKGRDLAAWLGLVPRQVTTGGKAKLIGISKHGNTYLRKLLIHGARTVLHLVKDRSTPLASWVDGLKARMHVNVAAVAMANKLARIAWAVLTTGERYRPAAMAST

SEQ ID NO: 343910 - protein, 315 aa, unidentified
MSPEVMVGIDVSKAHLEIGVLPSEEVWREANEPTAVSQLAKRLVRLAPKLVVMEATGGLEILVAAALCRAGLAVVIVNPRQVREFARSTGQLAKTDRIDALILALFGDRVRPEVRPLPDDVAQAFDALLARRRQLVAILAEEKTRLKQARSREVATGIQRHIRWLEMEIKDVEGGLTKSVRESPVWKAKDNLLRSAPGVGRIVSFTLLADLPELGRLNRKQIAALAGVAPHPADSGTLRGKRIIWGGRASVRQSLFMAALAACRCDPAFRSFHHRLTTAGKPPKVALVACMRKLLTVLNAMVRDASPWNPAIARI

SEQ ID NO: 343911 - protein, 446 aa, unidentified
MSKEKLKMDIINPNAAGIDIGSRSHFVAINQEHADVKEFGVYAQDMKALVDWLLENNVKTVAMESTGSYWQNLYAELQNSSIEVMLTNGKFTKNIKGKKTDVLDCMWIQRLHTLGLLSGSFLPDLQTEYLRTLVRHRGNLIQTTSKASKRMSQNMRLMNLRLDVVVKDIVGLTGLNIINEICNGETSGEELAKLRHGNCKKSEEEIAKALQSNNRQDYLFVLKQELKKYQDAQQLILECDAEIKKLLDEFIDQDHVKKSLYIDKKAHKRINKNTPKNIDLNLMAYQYFDGIDLYAIEGFSHGTVLTLMSELGEKGILKFQNAQHFTSWLRLAPNNKISGGRVLSSRTPKGSNRLKIALRQAANAIGNLKDTHLSNFFNRVAYRKGRSVAVSATARKLATILWNMLFKNEQYSPPTIYEYLDQKRKVLELQKQIANLDARMSKVRIA

SEQ ID NO: 343912 - protein, 356 aa, unidentified
MATYYIGADVHSNSIEMAIRHGKKVVKRYAIPASISAAVQVLDSLPGKKQMAIEEGPMSGWLYRNLRQKVDRFVVADPRRNKLISSDGDHDDKIDSAKLALLLAGGYLREVYHSDDERRVELKHWVSLYHDRIRNAVRSINKIRARCRMHGVTIPRRVLRQPEHRSIWLTKLKQPALAKQLLMLWVGYDAAAKQARMAKQQLINMSKKYPIIRIWKQLAGIGIIRAVTIFAYLDTPWRFRRKNKLWKYCGVGLQRTASGTDKKGKPKPARLQLPWAANRTLKNAILGAAMTAINQKQNTFKDDYERMVKNGIIPSNARHTVARKLLTVMWGIWKRSCQFDQTKATLLEPVEECVGT

SEQ ID NO: 343913 - protein, 384 aa, unidentified
MNKHNILFIGLDTHKVFSEVAYIEDQRGAKPIHHGRITSTKTSIKKLVRQFESKYPKATLHFVYEAGPCGYWMYRLITSLGHCCYVVAPSLIPKKPGDKIKTDKRDALRLAKLLKTEDLTPIYVPEPEDESIRDLSRARETAMKDLNDARFQLKAMLLRNNINYKGTANWSKKHLRWLSELVLPHPAQQIVLQETLQTVNERIARLERLVNELQHQVHQWRYYPVVKALQAMRGVRLLVAAGVIAELGDLTRFDHPRKLMSYLGLVPSEHSSGGKRHLGAITKCGNSRARRLLIEGAQSYRYTANISEELQKRQEGLPKDIVDIAWKAQLRLCRRYQRLMQRGKHRNLVVAAIAREMIAYIWAIAKEVVLTPVDPKLRLSRVPA

SEQ ID NO: 343914 - protein, 413 aa, unidentified
MVEVLYDRCCGLDVHQKTVVACLITPGRGGQPHKELRTFGTLTADLLELADWLRAAQCTQVAMEATGVYWQPIWNLLEDAFTLLLVNARHIKAVPGRKTDVKDCEWLADLLRHGLVRASFVPARPQRELRELTRYRTALVRERTAEVNRLHKTLERANLKLGAVASKVLGLSGRQIVTALLAGTTDPAVLADLAQGKLRAKRPQLERALVGTPGEHQRFLLARQLAHIDFLDETLAEVSAEIAERLRPFDGAIERLDAIPGVGRYTAEVLLAEIGPDMSRFPSAAHLASWAGMCPGNYESAGKRQKGKTRKGNKWLRAALLEAGHAAARTQGTYLAAQYHRLVPRLGKKKAAVAVGHSILVAVYYLLQRGTTYAELGGNYFDARNREHVERRLVRRLEKLGFAVTLTPKDPAA

SEQ ID NO: 343915 - protein, 338 aa, unidentified
MKSYVGIDLHSTNSVIGIIDEDNNQLFLKKLPNKLEQILLVLEEFRETNIGIVVESTYNWYWLVDGLLENNYKVHLANPSGNIQYSGLKHSDDKKDSLWLANLLRLNILKEGYIYPKKDRPVRDLLRRRILFVKQRTAQILSFQSMITRNLGIKKSSNEIKKLKPEEVIKLFNDKNLLLMASCYMENINHLTTQIRIIEKEIKEVAKLKKEFECLLTINGIGNILALTIMFEVGDIGRFPKVGNYSSYCRCVSSVRKSNNKKKGEGNRKNGNKYLSWAYVEAANFSRRYCQEAQSFYQRKKSKTNEIVATKALANKLARASYYIMRDKVPFDPQKLFK

SEQ ID NO: 343916 - protein, 385 aa, unidentified
MQASNVSTPIGGHSGTIFVSIELSQRCWLVTMHSPDKNRFSRHKLDGGDEVGLLGLIERIRVRAAPALGSLPRVVSCYEAGYDGFWLHRRLEAAGFRNFVFDPASIAVEQRARRAKTDRIDGELLLRTLMAHCRGEPWVVRIVRVPTAEQEDARRATRERERLIKEQTAHTNRIKALLRLCGVAAGNPRRRDWMAWLERQCDHNGEPLRPQLMAELGREHARLMLVGEQLKELSRASEAEPVSAAAAEMAQRSATLQRLKALGPVFTGTLASEVFYKDFHNRREVAAYVGLAPSPWRSGQTNREQGISKAGNPRARAKAIELAWLWLKHQPESALSRWFHERTGQGRGRIRRIAIVALARKLIVALWRFLTTGLVPEGAVLKPAA

SEQ ID NO: 343917 - protein, 353 aa, unidentified
MHTHQDSSDGVATIGVDIGKNTFHLVGLDKRGAIVLRIKVSRSQLERRLVNVPCCLVGLEAGCGSHHIARQIRALGHDVRLIPAQYVKAFLKGHKNDYRDAEAIAEAVQRPTMNFVAIKTPEQSDLLSLHRVRSRLVGQRTAVINQIRGFLIERGITVRQGPAPLRKALPAILSSPTGMLSPRMVRLIADLSEDWRRLDARIQAVSSEIETLAENDGSCQRLMTVPGVGPIISSAVVAAIGNGSGFRQGRDFGAWLGLVPKQESTGDRTKLGKISKRGNKYLRTLFVQAAHVVLVRRPAAAMRGLWQWIERAAKRLAHRNLLAIALANKLARIAWAVLARGRDYEPRITINAT

SEQ ID NO: 343918 - protein, 319 aa, unidentified
MSTTPVFVGLDVAKATLDVALRPSGETWTVANDEVGVTSLVERLRTCEPTLIVCEATGGFERAAVAGLAAAGLPVVVANPRQVRDFARATGQLAKTDRLDAGILALFAERVRPSPRPLPDATAQLLDALLTRRRQLLEMLTAEKNRLGFAPQPLHRGIQQHIRWLERQLDDVTGELAAMIEASPVWRAKDDLLQSVPGIGPIVSAVLLGELPELGTLSHKQIAALAGLAPLARDSGTLRGKRMVWGGRAGVRTALYLAALCGRRWNPRLKVFYERLIAAGKPKKVALIACARKLLTILNAMVRNTTRWIAPATELQHSC

SEQ ID NO: 343919 - protein, 430 aa, unidentified
MDTVNGSRLQQFCQFKNEIRSSTEYLVVGLDIAKEKHNAFFGTATGNVLFRGMFFDNSLEGFQKLLAQVEKLKGENGLSKVVFGLEPTANYHKPLAEHLIKCGFMVVLVSPFSTVKNRELLDGRWDKHDTKDAGNVADLVAQGKCLYYDYPEAAIRDIRGLLSFKKRLKKEEQAMQVRIRNQLLAQYFPEMDRHFRTEVSLAVVRTCLDPSIIARMEYDEFCRTVAPGRLTLRQQRLLQRIWQLSHHSIGCRVGETVLFEAQAMVSSIHHLREMIKAVNDKIEALCLPFPEYSCLLSIPGFGPEVSSTVLGAIGDPYRFSSGRQVLKMAGFDLSADRSGKNTPNAVPVISKRGKVDLRFALYQAAMVASNMNHHFIKYYTRRLLRRQREQGIGTKLRVKLAAKLLIIAWTLMKKKEMFDPACLNLGDTKV

SEQ ID NO: 343920 - protein, 383 aa, unidentified
MKKSIKTSVMETASAVDVAAAQRPAAVGGAVSVMPQYQAVVGLDVGDRQSHHCVLDLYGGVVAEGVVKTTEASFRVLFEGKGRMRIALEAGTHSPWISRLLIALGHEVLVANPRKLRLIAESDAKHDRADAQLLARLAHVGPALLAPIQTRSAQTQIDLTLIRAREVAVQTRTKIVNAVRGMVKSTGHRLPASPRVTFARKATEACPKALQPALVPLLRLVQTLTDEIAAYDRLVVEKARAYPETEAIQTIPGVGALSAVAFVLVLNNDRARFKRSRDVGCYLGLKPKQRDSGMQSPQLGITKAGDPLIRRLATQSAQYILGPFGRDSALRRWGLILASRGGKNAKKRAVVAVARKLVVLMHRIWITQEVYDPMRGIRVRPAA

SEQ ID NO: 343921 - protein, 388 aa, unidentified
MDASQQKLSQRSKKASAEKPATDRLCSGANDTAAKQDRRRSYGRSPNSRQSRIGNCRSTSSHLQERDMFMDPTSHTLVGIDVAKHSLEVYLASQERSFTINNNAAGFKQLLAELPAAGQCLVAVEATGGYQSRVVAALVMAGHQVAVVNPRQVRDFARGLGILAKTDRIDARVIARFAEQAHPRPVEIGSEKQTHLAELATRRRQLVEMRTAEHNRLETVTTKAVRKNIRHLIEQLDKQIRQLEEAIGQLIENQPELASKAAIMETVPGVGPVTVTSLLVDLPELGRLNRQQVAALVGVAPFNRDSGKFHGRRRIWGGRAAIRSVLYMAALTARRFNPLIRAFAQRLEAAGKPFKVVLTACMRKLLVILNAMIKNNLPWNPKLHPPCS

SEQ ID NO: 343922 - protein, 343 aa, unidentified
MQTVTTIGLDIAKSVFQVHGQDDAGQVVIRRQLKRRSVLAFFQKLPPCLVGIEACASAHHWSRELQALGHKVRLIPPAYVKPYVKRQKNDAADAEAICEAVTRANMRFVPTKTAEQQSGLVLHRTRHLFIRQQTAVINAIRAHLAEFGIVAPVGRHGVEELLNVLADPNDKRVPELARACLSAFGAQLRRIKEQVLEFDRLIRAWHRSDEMSMRLDEAPGVGPVLATAVVATVADPKSFRSGRNFSAWIGIVPKQHSSGGKNRLGSISKQGDRYLRGLFVAGALAIIRYAKIHGTKHRPWLTALLARRPTKVAAIALANKLARMVWAMMVKGERYKEPVALAA

SEQ ID NO: 343923 - protein, 460 aa, unidentified
MPPRAVGATAAHVDALPCVHPNAAGLDIGADEIYACVPSDRDACPIRAFATFTADLHTLADWLIACRIDTVAMESTGIYWLAIYEILEARGIRVFLVNAQQIKIPRGRKSDWKDCQWIQRLHMLGLLHTSFRPDAEMALLRAYLRHRAELIAHRAPHILHLQKALHQMNIQLDRVLADITGTTGMAILRAIVAGEREPLALAQLRNPGCKSSEEKLAKAMQGTWQAPYLFALRQALELYDFYTQQLAACDAEIKRYYGAMKPRLEADGEMASLPAAKPGSKSKNKPSFNARAELARVVGIDLVAVTGLSASSVQTIIAEIGTDMSKFPTVKHFGSWLGLAPHNDISGGKVLRSRTRKVVNRAAQAFRQAAQCVGRSDTALGAYYRRMRARLGPQQATVATAYKIARIVYTMLKEHTPFEAASAEAYDQQYRERELKYLQRKAAKLGFDLAPKVLTEPVPS

SEQ ID NO: 343924 - protein, 336 aa, unidentified
MSIIENICVDAYGKCVLRKTVKRNKLLDTFAKLPPCLISMEACSDAHYWAREPMKLGHNPKIMASKFVIPYRQNEKNDANDAEAICEAVSRPKTRFVSIKSEEQQAVLCLHCIRQGLIKTRTATINQLRGLLSEFGIVMPQGRYSAQNTIGSVLEDAENGLPILARELLQDLSNKIQRLNLEVLHYDRRVSALVREMASAKALMDIPGVGEHSASAIVATVNDAKQFASSRQFASSRQFAAWIGLVPRQYSTGGHVLLGRISKRGEKHIRTLLIHGARAVIARCKEKTDRNSLWLNQLVERRGYKRAAVALAAKNARIIWALLTTGKEYKINYVNG

SEQ ID NO: 343925 - protein, 367 aa, unidentified
MRAYVGLDIHSKKSNYVVQDEQGRELGRGEVPTSPEGLAEMRGRLGLKAGTEVGLESGTMAFYVARQVRALALKPVVVDAHEVRLKAHRPRQKSDERDAREVCIGVRTGLYRSIVHVPSEAILLLRETLSRRRHFVRIQTGEINAAKRVLRSGGYRTLGGKTLTTAGAWKRVLKEATEEDGTRTFVDLHFQAWRAAGERVRDLEEKLETQVTGLEPAYSRLKSVPGVGNIVAATALAFLSEPERFGDAKHAASYAGLVPQMDQSGDVHRGGHITKGGPAELRAMLCEASHQAARRSNPLNPLFLKLSARLGYKKAITALAHRLCRVLYAILRDGTEFDPVRLGLEKGPFQETRTRLYRLRKAPAPKR

SEQ ID NO: 343926 - protein, 342 aa, unidentified
MSITTLGIDIAKSVFQLHGIDEAGKVVIRKKLRRSAVLDTLRKLEPCLIGLEACATAHYWAREISALGHEVKLMPPAYVKPYVKRQKSDMADAEAICEAVTRPTMRFVPIKSAERQGVLVLHRTRDLLMRQRTMLLNAARGHLAEFGLIAPQGPRRMLELIAQMREGAHTDLPEIARTALLGIGGQLDALAQQIQALERQLLAWHRRDTTSQRLETIPGVGIITATALAASVPDPSVFRSGRQFAAFLGLTPRQNSSGGKDRLGHISKMGDGYLRRLLVVGATSVIRRAETNPSATGAWVRSLMTRKPRRLTTVAMANKTARIAWAVLARGETYRAPALAEG

SEQ ID NO: 343927 - protein, 412 aa, unidentified
MDVLVERCAGLDVHRDSVMATVRVPAERRRQREQHTRGFRTTIAELEALGDWLAGFGVTRLGMEATGVYWRPVFQVLEGRFDCWLLNAQHLHNVPGRKTDVIDSAWICRLVEHGLVRPSFVPPPEIRRLRDLTRLRTAQVEERTRAIARLEKVLQDAGIKLTSVASKSYSVSARRMLEALLAGTTDAEALAELARGRLRAKIPQLREALRNRFRLEHHGVLVTSLLAHLDALDRAISDLDERIAQETEPMAELIELLSTIPGVRRRTAEVLIAECGIDMSVFPSVRHFVSWAGICPGNNQSGGKRRPSKTRHGSRWLRKALTESAKAAARSKGTYLASHHAQIRGRRGEAKAIGATRHDILVAYYHIVRDRVPFRELGPDWLARRHSLEHRARRLTRQLEALGLKVTVEAPA

SEQ ID NO: 343928 - protein, 340 aa, unidentified
MSVIIGIDPHKGSHAAAAVNGADQAVAELEVEASKRQIGELLAWAERFPERRWAVESANGHGYLLAQQLVAAGEHVVDVPSTLASRARVLDSRRSEKNDANDARSVAIVALHQSGLRRVAAEDHVAVLRMLAKRHKQLASLKTQAASRLHAVLAVLLPGGMSGELSSAKASRMLRRIRPQTMVETERKRIAHQHLAEVRRLEKEKKASVERLAVAVEASGTGLTDIYGVGPVVAGLLIGYTGDVTRFRTRHHYAAYNGTAPIEASSGGRRRHRLNPRGNRMLNHAIHLIAITQLRHPLTKGRVFYERKLEEGKTKKEAIRSLKRRLSDVVYRQLNTDHNR

SEQ ID NO: 343929 - protein, 320 aa, unidentified
MPSSCGVGIDVAKDTLEVAWSTDRDARWRSSNDERGWVAVVERLRSLQPSVIVLEATGGYETGVASALSVAGLPVAVVNPRHVRDFAKALGRLEKTDAIDAGVLCEFATRIEPVPRPLADDLQADLQALVTRRRQLVEMLIAERNRVPLARGAVRKNLMAHIAWLQKQIGHTDRDLRTRIESSPIWRVRDRLLQSVPGIGPTTAACLLAGLPELGTLSHREISKLVGVAPLPDDSGTRVGYRRIRGGRADVRRALYMATVTAIRHNPTIATAYRRWRAGGKLPKVALIAAMHKLLIHLNAMLKHETAWQLTPVPPSTTPS

SEQ ID NO: 343930 - protein, 338 aa, unidentified
MSKYSGIDLHSNNCVVAVIDDDDKVCCQKRVPNDLERIVALLEPYRDDLVGVVVESTFNWYWLVDGLIERGFAVKLANTAAIAQYSGMKYSGDEHDARHLAHLLRLKLLRFGHIFPPEWRAARDLARKRLQMVQTRTEHILALETLYARQTGKSIKSNAVKQLTMEQVAQWDWLADAAVAAQANLAIVQAAEIVIDNLEQQLRQRVKLEPDYAILRSVPGIGDILSTVIMLETGPVERFTSAGNYASYARCVGSTRTSNGKKKGEGNRKNGNAYLAWAFVEAAHFALRFNAPAKRFYERKKARTNGAVATKALAHKIARACYHMLKEQTVFDEKRCFT

SEQ ID NO: 343931 - protein, 373 aa, unidentified
MNSEGEVLAKPFTIFNNKEGFDFLYEKIQSVSSSDNIKVGLEATGHYSYNIIGFLLNKGLATFILNPLHTNLYRKSLSLRKTKTDKIDSKTIAMMLLSDVSLKSYSDISYHNEDLKSLTRYRFSKVEERAKLKTSLSRLAQILFPELEKLVPTLHMTSIYQLLEEFPSASAIASVHLTRLTNLLSKASKGHYDRETAIKIRDAAKNSIGSNMPAKSLELKHTIKLIRALTIDIGEIEAEISKMMDMIASPITTIPGIGRNIGAMIISEIGDFSRFSSPDKILAYAGFSPSIYQSGKLDNCYAHMEKRGSRYLRYALFHAAKLVCHWDKTFADYLAKKRAEGKHYYVAISHAVKKLVRVIFHIEKTKQAFLKAS

SEQ ID NO: 343932 - protein, 353 aa, unidentified
MEQFIGCDAHKRFSLFIAMNEEGEYGRPIRVGHERERMRAFLEALPVGSQIALETSGSYYWLVEEMERAGHRPQLAHALTAKRRMEGRHKTDERDARGLAMGWRNGTLPQVWVPPAALREQREMLRLRMILVESRSQVKNRIHGVLLRYNVELKGKDIYTQGGREELDGHLTELPEWTRESVHKQLGMVDHLDQQIEACEQSLEIMLEPNAERDLLKTLPGVGKILSAVIALEIGDIARFGNAERLVSYAGLVPAARESAGRKRPGKCPSACNTYLKWAFVEAGNVIATHHHKWPERHVAQLYVRVKHNTKMHGKATVAVGRHLAEAAYWILSKQELYREPKSNRQALSSTHG

SEQ ID NO: 343933 - protein, 343 aa, unidentified
MSTLYYIGLDIHKWIIAYCIKAIDGRLVAEGKITAERKALAAWVKGLPGSWIGAMEATIFTGWVYDFLKPYAVSLKVAHPEMLKAITAAKKKNDRADAEKIADLLRVNLLPECHMLSEEIRDLRRILRYRNHLVRTAVKMQNKMSGLLMEVGVPYSKRRLHGKKYFQELLDRVEDIPPSVKGLLQLSRSGYEMFRSFQKRLVETIREDVLIRDRVERLLTIPGVGELTALTWVLEIGDCGRFSSIRDAVSYCGLCSAQRESAGKEQRGPISKKRNKHLQTMLIEAAKLAPHWNKQLARLHEKELKKGNRNRATLAVARKLVAYMMAVDRKQTLFKQPAETQVA

SEQ ID NO: 343934 - protein, 343 aa, unidentified
MEYFAGIDVSLEQSSVCVVDGAGKIVREAKVASEPEALVGFFRGLETGVTRIGLEAGPLSQWLYAGLVAAGFEVVLLETRHVKAALSAMVIKTDRKDARGIAQLLRMGWFRPVHAKSPAAQEVRALLVARKLLQTKLLDVEFSIRGILRGFGLKMGEVSKGRFVARVRELAAGHAMLEQITEPMLRAREALRTEYARLHGDMLAIARPDPVCRRLMTVPGVGALVAITFKSAVDDPGRFARSRVLGAHFGLTPRKYQSGETDVTGAISRVGDAMVRMALYEAANVMLSRVTRFSSLKRWALDVAKRRGLKRAKVALARKLATVLHRMWVDGANFHWGKQAAAV

SEQ ID NO: 343935 - protein, 378 aa, unidentified
MRFYNQPHRFYCGVDLHARTMYLCILDQAGAIVLHQEVPAEPGAFLEAVAPFRDGLVVACECLFCWYWLADLCATEKIAFVLGHALYMKAIHGGKSADDRIDSQKIAQLVRGGNLPIAYVYPKGLRETRDLLRRRMYLVHKRAEVVAHVVNTNSQYNLPPFGKKLIYARNRQALKIADRFADASVRKSIELNLRLLDTLDDLIGDVELYLVRTVKVDDADTFYRLRSIPGVGKILALVLLYEIHDIHRFASEGMFLSYARLIRPLKTSAGKVKGGGGAKIGNAHLKWAFSEAACLLARESDQAKRFLARQQKKHGKPKALGILAARLGRAVYQMLRQKKAFDPKRFWNGEPGVSGAQLKKAAVKRPRRAKGSRCVLEA

SEQ ID NO: 343936 - protein, 344 aa, unidentified
MDNHTQYLGFAGVDLAKKVMQIHFVTADGEITDKSAKRAEFLDFFRNRGKCLIGMEACGSSQDWARKLEAMGHEVHLLPPKAVKPFVSGQKNDHNDAIGIYKAMFNGVRRVPVKSTEIRDLQTLRRIRSQVTKDKVKEINHVRGLLAEYGIVMGKSLNAFNKDISSALGILTERGDVSPLVAEELRTTVEAIKAKIERQKKLDQEIEQLARGCKNYENFLKTPGVGPFTAAMLCVLLCDPSIFANGRQFAAYIGLAPRSRGSGGKNYVTGIPSKFNCVSESRAVLVECAQAIARCKNKSLWVEEILRRKPKKVALIAIANKLARQVWAMANKGESFKQMAVLTA

SEQ ID NO: 343937 - protein, 369 aa, unidentified
MQKMIKNIGLDVHKNSISIGIADDGRDGEVRFYGKIDNDMNQLDKVIRKLISKGAVLRFVYEAGPCGYGIYRYLTHNNMDCVVVAPSKIPQQSGNRLKNDRRDCLSLARLHRAGELTAVYVPTREDEALRDLVRARIDATRALRVAKQQLGAFLLRHDMVFSGKTKWTKTYFVWLSSVTMAHSAQLIVLQEYIDTVTDCIDRVHRLTEQIRLQSRQSSRHELIQALQAMRGISLIVAATIASELGDLTRFENPGKLMAFLGLIPSEHSSGDQVKKGSITKTGNRHVRNALVEAAHAYRFSARKSRAIRKRQEELPKGVIDISWKAQCRLCARYQYLMAKGKKVNVTKTAIAREIAGFSWAIARELSKAA

SEQ ID NO: 343938 - protein, 450 aa, unidentified
MKHEPEEIADEEHEQVAERVAAIDVAKASGMVCTRVPHHKTPGRRVTKVWQVPATTNSIVTLADELAGLGIERVVVESTSDYWRPFVYLLEARGLNVWLVNAQSVKQVPGRPKTDKLDAVWLAKLNERGMLRPSFIPPIEIRQLRDYTRLRIDLTHDRTRHKERVEKLLEDALIKLSSVAADIFGVSGRAMMAALIAGERDPRVLAALAKGRMRVKRAALLEALTGRFDDHHAELLRILLGEADGLTAKIEMLTDRIDELIQAIPAGQPPVVPPDPDAPSQDQDQAPLPVVERLDEIAGVGRSAAQTIIAEVGLNMAQFATPAHLVSWAKLSPRTIQSGAKSRSASPGQGNPYLKGVLGEAAAAAGRTQTFLGERYRRLAKRVGKLKALVAVARSILVIVWHLLANPSARFRDLGADFFVARGNSDRKVRSLVRQLEVLLGHKVTLAQAA

SEQ ID NO: 343939 - protein, 347 aa, unidentified
MSELALVGIDLGKHTFHFPLSTFHLHGQDVSGREMFRKKLSGVQMMRFFGNCPTCTVVMEACAGSHFVARELATMGHVTKLISPQFVRPFVKSNKNDFVDAEAICEAASRPSMRFVSPKTEAQQTLSVLHRMRESLVRDRTKTINQLHGFLLEFGISLPLGRTVIKRLPSVLAEHELPIRLRTLLQRLHAHFGYLDEQITQIDIQMAGQLADDDLGSRLLSMPVGPITASLLAVEMGDGKQFGCSRDFAASIGLVPRQYSTGGRSNLKGISTRGDKSLRCLLVQCARVYMQRLDSQKGALADWVRSWLQRRHSNVVACALANKLARIAWALSAHHTVFEAGSDAMAA

SEQ ID NO: 343940 - protein, 313 aa, unidentified
MAKLTSKITLGIDVAKDALVIYDWSTAELITLVNDKVSIKRWLKSLHGPIQIAIEPTSHYHLVMVEQALALGHQVYLINPRQLAHYREAINVRNKTDPQDAWLLARYLVHEVDELRPYRPQCRQAQQLWTLLKRRAVVVNARQKLQQSFAEVQLSIRALQTQMHRLLQRIDLQIHKLIQALGWSGHYQLCQSIPGIGPLNAAALVAAYHRGAFANSDTFVAFMGLDVRIRESGKYRGKRKLTKRGEAELRRLLYCAAQPARSYHCFETYYQRQLDKGLSRIAAKVTLARKLARIAFTLMQNQTMFIKQPEITG

SEQ ID NO: 343941 - protein, 319 aa, unidentified
MLHLSTAPTRFIGCDVGKTSIVIFDSCTGETRSVPNRKPDLARMARALDGSCLVVCEATGGYETKLLAAMLAAGVPSHRADARKVKAFIRSFGTLGKSDAIDAQALARYGTERHATLTRWVAPDPVREELQALVLARVDMVRLRQAHRNRLAAPGSKVVAATLKAILREVEKQIRALEARIATCLRQHPALARDQAALLTMHGIGAVTSAALLALMPELGTISGAQAAALAGVAPHPHESGQRVGYRKTRGGRPDVKRTLFMAALVASQGKGALAETYKSLVARGKKPIVAITAIMRKLIVIANAKLRDARIAQTIQVS

SEQ ID NO: 343942 - protein, 378 aa, unidentified
MKKVSRSSRATELKAKPSITVGLDLGGRRSHYCLLNEDGEVVEEGRIATTEAGIRQQFEGEPTQRVAMECGTHSPWISRLLKHLGHQVIVANARKLRAISQNESKNDRADAEMLARLAHSDPRLLAPLQHRSVERQRDLNLIRTRDTLVRARTMLVNAVRGLAKSAGGRLPACSTGYFIEHARPALPAELKKATAPLLNQITSLTRQIRCLDAEIEKLAGQYPEIALLRTTPGVGPLVAAAYVLTLDRAEAVSTSRAVGAFLGLRPRQSQSGDSDPEHRISKTGNIYLRKLLVQSAHYILPPHRRRPVDGDPGLGRFGPDSALRRWGLRLAGAGGKRAKKRAVVAVARKLAVILNCMWRRGQPYRPFPEQKPAAPAAA

SEQ ID NO: 343943 - protein, 344 aa, unidentified
MKALKSHVAGIDVHKEMLAITVLIGELDGEPKEYQFESSTFTDDLMALGLKLKEMGFTDVAMESSGIYWKPVFNVFNPLGLKVVVANAAHIKNVPGRKTDMNDSRWIAELHRFGLIRASFIPDGEFQRMRLLSRHRTNLTEDLARVKNRIQKVLEDGNIKLSIVVSDIFGVSGLKVLKQIAGGYTHPNILITEVTTKIKRMEEMKKALTNCLTTEHCFVINVLMKQYEELKNRIEEVENELCKKVEPYAHLVEELDKIPGIDAILAMGIIAEASANMSSFKDERAFAAWSAVASGNNESAGKKKRAKCRKGNPALRKMLIQAAQKATTARNPFIALNTTNSAFA

SEQ ID NO: 343944 - protein, 316 aa, unidentified
MTTNSVVVGVDVAKDRLDVAVRPSGEVWSEANDETGITTLVGRLRPLRPALIVCEATGGFERAAIAALAAAGFPVVVANPRQVRDFARATGQLAKTDQLDAAILALFAERVRPTPRPLPDAAAQLLDAVLTRRRQLLEMLVAEKNRLGFAPKPLHRGIQAHIRWLERQLDDVAKELAGLIEASPVWRAKDDLLQSVPGVGPIVSSTLLGELPELGTLSHKQIAALVGVAPLARDSGTLRGKRQVWGGRASVRTALFMAAMCGRRWNPTLKVFYERLKAAGKPTKVALIACARKLLTILNAMVRDQSRWMSNVQYSC

SEQ ID NO: 343945 - protein, 353 aa, unidentified
MTSTDVDVFGGVDTHGRTHHAAAVDGAGRLLGDAEFAATAVGYAALLAWLTGFGRLIKVGVEGTGTYGAGLARYLAHQGAEVVEVDRPDRKTRRRQGKSDPIDAIAAARAVLAGTATGAPKTRTGPVEAIRALRVARRGAVKARTAALNQLHGLLVSAPEALRAELSGLTTTELVGRCAGFRIDLTRLLEPGMATKAALHAIGRRIQTLEAEIAVADARLRPATAAVAPRTAALFGAGPDVAGQLLVTAGDNPERLRSEAALAHLAGISPLPASSGRTDRHRLNRGGDRAANAAIHRIVLCRMRYHERTRTYVARRTAQGLSKKEIMRCLKRYVVREVHTALLADFERLPTTT

SEQ ID NO: 343946 - protein, 384 aa, unidentified
MSAVVIGVDPAKRSHAIEVIDEHERTLVSGVFANDNAGYRQMRAATRGFLNRVWAVEGAGGVGRQLAQRLIADGETVVDVPPKLSTRVRAMSTGHGRKTDPTDARAVAIVGLRNDELTSVVVDDETVALRLLSERRRDLVRSRTQTVNRLHQVLMELVPGGAAQKLTAAKAKALLATVRPRDVAGKARRQLAADYIDDVTTLDRKLKAIEKRISDAVEATNTSLTQIVGVGPITAALILGEVGNVARFPSNDHFASYTGTAPLDASSGEVVRHRLSRAGNRRLNHALHIAAMVHKRYDPRGRDYYARKLAAGKGSKGALRCLKRRLSDAVFRRLIDDQTAKVREGQMGATLTSSAADLIPMASTSDKPLSGLTADPTPALAAMS

SEQ ID NO: 343947 - protein, 389 aa, unidentified
MFLVGIDISKYKHDCCIIDSDGVVICEPFSFKNDADGFALFLDTLHSLPDSEDIRIGFEATAHYALNLKLFLEKAHYAFMEFNPLLLAKFNKSQSLRKTKTDAIDCYSIARWLAAVEFKPHATGFYHIYSLKSLTRLRDSLVRQRSFYLVKITNVLDVTFPEFKPFFNNRFGATALYLLENYGTAEKMSHMNSTSYENLRKLSRGKFSIQKFMKLKELATNTVGESNKVFIIQLNSLLSLYRKCVSEIKSIEAQITKLITDINPRCMTIPGIGPLSAAVIYAEFGDLSKFNSPAQMLSFAGLEPGYYQSGILEHRGHMVKRGSSHLRYTLMNLCIPLIQYNYVFATYYDKKRSEGKPHRVACSHLVKKLIRVIFHLEKNGIDFDSSKLY

SEQ ID NO: 343948 - protein, 338 aa, unidentified
MTTGLAAGTYELFVGIDIAATTAEVSTQRPGAKAGRSFKIDQTPEGFHRLVHTLQATDNEPSHVLVVMEATGSYWISLATRLVHEGFRVSVIHPSQAHHFAKALLKRAKTDAIDAQTLAQLAMVLQPEPWMPPPQIYYELQQRLAQRDDLLNLRQQVRNQLHALDQHPEVMASVRTRMERLLVLFQSQIDEVEGKIAAALNQDSAWAAAAERLQSIKGVGWVTAAWTLVTTLNFTTCDTVDALTAYAGLAPMPRQSGSSVWHRPSIGHSGNGRLRTAFYMATLTAARFHPAIKAFYNRLLEAGKPEKVARCAAARKLLHMAWAVVKKDQPFDPNYAQG

SEQ ID NO: 343949 - protein, 343 aa, unidentified
MQSISTIGLDIAKSVFQVHGVDAAGQVAMRRQLRRRHVLAFFQRLPPCLVGIEACASSHHWSRELQALGHTVRLMPPAYVKPYVKRQKNDSTDAEAICEAVTRPNMRFVPTKTVAQQSCLMLHRARHLFIRQQTAVINSIRAYLAEFGIVAPVGRRGVEQLLEVVGDTADRRLPEVARACLAALGGQLRALKAQILEFDRRIIAWHRSSPTSKRLDAIPGVGPALATALVASVADAKAFQSGRDFSAWVGLVPKQNSSGGKDKLGSISKQGDRYLRSLFTAGALAVIRYAKIHGAPHRPWLTALLARRPTKVAAIALANKLARMAWAMMARNDSYKEPAALTA

SEQ ID NO: 343950 - protein, 334 aa, unidentified
MENIALIGIDLGKNSFHIHCQDRRGKAVYRKKFTRPKLIEFLATCPATTIAMEACGSSHFMARKLEELGHSPKLISPQFVRPFVKSNKNDFVDAEAICEAASRPSMRFVQPRTESQQAMRALHRVRESLVQDKVKTTNQMHAFLLEFGISVPRGAAVISRLSTILEDNSLPLYLSQLLLKLQQHYHYLVEQIKDLESQLKRKLDEDEVGQRLLSIPCVGTLTASTISTEIGDGKQYASSRDFAAATGLVPRQYSTGGRTTLLGISKRGNKKIRTLLVQCARVFIQKLEHQSGKLADWVRDLLCRKSNFVVTCALANKLARIAWALTARQQTYVA

SEQ ID NO: 343951 - protein, 422 aa, unidentified
MKKIQAKKVRFVNAKTLIVTIDMGKTTPVGYCLCPDGTEVKPFEFTNNRGGFTKLWDCVIRTKMANGLEEVVVGYESTGAYAEPLIHFLKGKPVRLVQVNPMHTKKLKELQGNSPNKTDKKDPKIIADIIKLGHALTVVIPEGSAAELRRLFQARERAITRRTALYNQLQDLVFISFPEFLQVVKNVKTKSARHLLQNYPTPQDILDQGVDALALILKRISKGKLGMARAKALYEAAEQSVGVKEGRISVTLEIKAMLEGITNCDHLIKQFEKEMARYLEEIPYSRLILSMKGIGMITVAGLIGEVGDFSKFHTQAELLKLAGLNLFEVSSGKHKGELRITKRGRSLMRKLLFFAAINTVRKGGIMYECYQRHLQKGMKKIKALIAIARKLLCIIFALVRKQNEYLVNYQEVMAAQQVRQAA

SEQ ID NO: 343952 - protein, 391 aa, unidentified
MNPVIGLDVSKGESEVQAFLDKRKPYKKSFSVLHNNKGLETLLHFMSEIEEETGVRPTVIFESTGHYHTSIVQFLEENNYLYIMVNPLLSYQAKKSSLRKVKTDAVDAFNLCELFYKEELEPYKQRGIQLLDLRNLTRQHETVTGIYVQTKLQFHSILDQVFPEYRGVFGDLYSKVSLKTLLEFSTSEAILKVGIDQLTDKIACECITRSEHWARDRAQKLIEAAQRNPFKSTLYQSHLFSLQMYIQMLLQYQEHLSELDDQIDALAEELEEYKIIQSIPGIGGKIAATIVSEIGEIERFSHPKKLVAFSGIDPSVHSSGKFTATINRISKRGSSQLRHALYMAALCGIRSSRNKKLKEFYDRKREEGKPFKVAMIACTNKLIHWIYIMDP

SEQ ID NO: 343953 - protein, 355 aa, unidentified
MRFYTKQHQFYCGIDLHAKQMYLCVLNSLGETVLHRNMPATVEMLEGAIAPFRESDLVIAVECIFSWYWVADFCCQRNIPFVLGHALYMKAIHGAKTKNDKIDSRKIAMLLRSGMLPLAYVYPAHMRATRDLLRRREYFMRKQSELLEHIQNTNTQYNLCPFPTRIRYPSNRTEIATRFADPVVSATIEVDVRLLDVYHQILVDLEAKILRQARHHDPISLGLLRSVPGIGKILALTMLYEVQDIKRFARVGDFVSYARLVKCAHESAGKRTGSRNNKIGNAHLKWAFSEAAVLFLRGHEPAKQYHQKLVSKYGKAKALSIIAQKLGRVVYYMLKRKMPFDPNKFFQGGVHESAA

SEQ ID NO: 343954 - protein, 492 aa, unidentified
MRRHQRSPAQAKSSVNPARSKPASQTPRTQPVTLHVINSNAAGIDVHADMHMVCVPPDRVTPAQHDTASLPANVRRFGANSCDLKAIADWLAECGVTTVALESTGVYWIPLLELLESRGFEVWRVEAGQLSRCGARPKTDVLDAQWIQRLHSYGLLLPSFRPAESVMALRGYHRQRQMQIRYAARHAQHMQKALEQMNVKRTEVVSSITGLTGRRIIAAILAGQRDPIQWAALRDPNCKNDVATIAKALEGTWRPEHLFALQQAYDLYQFHHRQIAQCHEAIQAELAKLPNRAGDKPGTAKPRRCGRKPNDLNFDACALLFQALGVDLTEMEGIDIGTALVILAEIGIDVRRFPTAKHFASWLGVCPQQHESNHTKKKRSPRKGKNRVAMALRMAAQALGRTQSPRGLFYRRIKSRIGGKGAITATAHKLAILVYRMLTYGTEYVKRSRAEYEQKMHEQLERSLQRKAAALGYALVAKHASPLEPMAAPILA

SEQ ID NO: 343955 - protein, 367 aa, unidentified
MKDSITVVGLDVHKNSIEIVTADADGAMEVRRFGRIGGTMDALDRAVRKLVSGGAALRFVYEAGPCGYEIYRHLTGKGFSCKVVAPSKTPKKSGDRIKNDRRDAETLARLERAGELTGIYVPREEDEAMRDLTRAREDAVKSLKTARHQLNAFLLRYGKRYPGKASWTPVHMRWLSDIALPHPSQQIVLQEYITTVLVCTERTTRLTDQIAKLLPEWRLYPVVKALQALRGVAPIVAATTVAEIGDLSRFENPRQLMAYLGLVPSEDSSGESTHRGSITKTGNGHVRRALVEAAHAYGFPARVSRHLLKRQEGLPESVLAIAWKAQVRLCGKFRRLMARGKLKNKIVTAIARELSGFMWAIAREVEG

SEQ ID NO: 343956 - protein, 317 aa, unidentified
MNSHHHHTFVGIDVAKLSFDVASNRTRDVRQFIYDQHGLEQLVEHLRTLSPHLIVMEATGGLERRLLHQLIIAGFSVSIVNPRQIRDFAKAFNQLAKTDAIDARIIASFAEVVQPRRCELPEEYEHTLQAMVTRRRQVIQARVREVNRLDRTHDDQMIMMIQQAIDLYTRQLKQLNEQIEQLIDQTPALQQRAAILRSAPGIGPATTGSLIAELPELGRLNRQQIAKLVGVAPINRDSGQMRGRRTTIAGRTSVRNALYMATLVATRRNPQIAAFYQRLLSNGKSKMVALVASMRKFLTILNLMIARQTPWITAKHA

SEQ ID NO: 343957 - protein, 327 aa, unidentified
MEKHEQNYAGIDIGLDWIDAAWYEQKKLYHTKLPNTVEGFKQLVKQCGSDTHYVMESTGPYYVALALYLDQQDVKVSVVNALVIKRFIQMQLEKNKSDKKDATWICKYGISQQPEVWEAPQEHIIYAKQMQTTIMQLTKQRTAIINSQKSLAQMPIVSKESKRSYQRMINQLNKEIEALEEALETLLKEHEGKKMKALQSIPSIGKRTAAMMIIVTDGFRKVDNYRQLASWAGLSPKEYSSGKTIRGKVHISKMGGKELRNMLYMCSMTAIRNNKSCKELYDRLKGKGKNGKLALAAVSNKLIKQCVAIAKSELPYDEKYFSKKTCF

SEQ ID NO: 343958 - protein, 355 aa, unidentified
MKRTTKYVGLDVHQATIVAVVRDETGRVIARTILPTEAAARTAFVGPWRGRVEVAYEEGTQAQWLHDLLRPLVARVVVCDRRAVRRQGNKSDWRDAEELAAMLQRGAIRSVYHGGGPQQAELKELTRTYVTLVQDATRVMTRVKALYRARAIPTRGRGVYHAGERATWLAKLPAGGVGFRATTLYRQLEVLLALRTGAKAALLGAARRDPAWALLQTIPFLGPVRVALLLGIVQTPWRFRTKRHLWAYAGLAVVTRTTAEYTLEGRTPVHRRRAPLTRGLNRNHHRLVKALFKGAATAARARPGALQDWYQQRLARGMRDELARLTLARKLAALTLHVWKTGEAYDPAKLTRPAG

SEQ ID NO: 343959 - protein, 434 aa, unidentified
MLTSASRTALRGAVTAQARREHNRTYAEGFEALIGVDCGGTFHQIVARGRDGRRKKAIRVDVDHAGFDAAHAYLQQAFPGLRPSEMLVGMEFAGHHGFTFAQFLRQQGYAIVTVLSSVTKKLREVEDNSPRKDDAKDAAQICQLVSDGLFVGYAVLSDVVSQLRVLSTERLRLGIEETRLRNRLRAVLDLAFPEVLAAFSTLRHRTPLAILERWPLAADLAAAAPQSVHRQLRLSSQNHIGRDRARWLVDAARSSIALTDAAPARHAEIQRLLARRAFLMEQLTACEAELAVLVAAHPGAKALLTVPGIGVVAAAALVSEIGTPETFESPRQVLKLAGMNLAGKSSGTSVRSRIRQTKRGRPLLRRQLFLLAGRWCRHHGFYRDYYLAYVARNGGSKIKGLSAVARKLVPMLLHIIQTGEPFDAAHWGRNRHVA

SEQ ID NO: 343960 - protein, 506 aa, unidentified
MKVQASKPTFTIGYYPIGQYGSNICRQDIGRKRPYRSLLRQRYWAWSFTSKLITMAKVAKRKQTSKGLRLEVVNPNAAGIDISPKEMQVCVPSDRDGECNRTFGVYTEDLHYIAEWLKACCIDTVAMESTGIYWLPVFRILKESGFDVILVNASDVKNFSGRKTDASDAEWLMMLHSYGLLKPCFQPENIARTMRNLVRHRDNLIRSASREVLHLQKAMEQMNLKLDNVFSDILGKSGQSVIKAILNGERDPKVLADLADPRCRTSKEEIEKSLQATWDEEHLFEMRQSDSLYQFYQQLIAECDAKINEIAMQYSATVDAPKTELLRSGKYNAKKNRIGFDVEKVAFELWGVNVMRIPGMSRGALLRLVGELGADFTTKFVDIKHFVSWANLVPNNKISGGALLSSKVPKKKNPVGIIFRQAANTLKAAKNPLGNYFRHMRAKGGHLQAMVATGKKLASIFYCMVQRKVEYNEKVYCNHRKQELQNKVAYLHKRLQRIESELANCG

SEQ ID NO: 343961 - protein, 414 aa, unidentified
MLKIVYPICCGMDVHKSFVVVCIASTNEQGVTTYKSKRFSTFTGDLRRCAAWLSENNCKDVCMESTGKYWIPIYNILERTCNIVLAHPKYVKAIRGKKTDKRDAKWIADIFKHDLVAGSFIPPADIRQLRDLFRYRWKLTNFATGEKNRAQNCLTVSNFKLDDVFSDVFGKAASAITARILKNPSEKITDVSGFRTKRMKATDEEILAAVDGEMCAEQAEKLRIIRSHMDSLELCKLNLESLILSTAEKYLPQLNLVMTAPGIQSFAAIGIISEIGVDMSVFPTSKHLCSWAGLTPQNNESAGKKKTTRISRAGAYIKPLLVQCALCAIRAKQFPEVRNRYLALKKRRGHKKAIIAITRILLTAIYNMLKKNEPYNPELYRKGDRPPTHREVSVGEAIFILQRQGYLVTAPPTP

SEQ ID NO: 343962 - protein, 340 aa, unidentified
MKNTKYFIGLDVHKEKTSYCVRDKRGNILLENQAATLYSELEPRLKPYLNTAKIGLEASTSYYTLYHTFLTKGYDISVANTIQLRQLISKNDSLDAKRLSEMLRLGTFPCSYIPDENIQHLRSLVQVRHSLMEEKVRCNNRIQAFLDKNGAIMPPYEAFSKHWRHTLQEHLSGGTVSGELQYEYDHFLFLEKKQRQVEQEMKHYTQIHWRKEYTLIQSVTGFGPVLACYVIAHVCPIERFPSNRKLRRYAGVIPVTKQSGETTSKGHIPKGSSRKQLRWALVQAANTAGKTDTPLGRYYRKKKKQKKITAIAKIAVASSMIDILYKVLTTKQPYQAVSAE

SEQ ID NO: 343963 - protein, 442 aa, unidentified
MWPISAVRRGGMVPPIDRGLRHKASEPHTTQEPGMKDSTTHVALDTHKKEHKVALLLPEHEEPEVWTIRNTKRDVRRMVRRIIRGAPGPVKFCYEAGVCGFALQRQIEADGAECEVIAPSLVPVKPGQRIKTDRRDACKLVKMFQAGMLTEVCPPTEEEESVRDLCRCREGAQQDLMRIRHQLWKFLFRRGWIYQAGRQWTQKHLQWVAGIRFDRPRDRQLLSAYLWELEHRQERAASLTRAVEEAAADCPWRKQVGWLRCFRGIDTITALTILSELHGVGRFDSPRQLMSYLGLTPAEDSSGEKDRKGAITKAGNRRVRRVLMEASWHQAKTPRVSGGLAKRREGQPAWVIEMADRAMKRLHDRYWRLVHRGKLPTKAATAVCREFSGFLWAVLYLEDRAVERRAIPRRGDRANGSAKEPSPDRMTAREFFRSEKLQAVEA

SEQ ID NO: 343964 - protein, 392 aa, unidentified
MLYVGIDVAKNKHDYCIIDSDGVVHLNGITITNTKEGFDSLYSSILSMLPDKDLNNVRIGLEATGHYSTNISSYLYSKGLQITTLNPLATNLFRKARTLRKTKTDKGDASIIAHMLFVDDSESYSPISYQIQELKSLTRHRYRLVGYRSKLRISINRLIDVAFPELPSLVWSIHQKTSYALLLEYPSPQALANCHLTRLTNLLLKASKGKYSKEKAIALKELAANSIGTSNRSTDFELKQTIRLVQSLQIEIREVDKLIKLIIDELDSPIMSIPGISYTLAAFILAEIGDIHRFASPAKLLAFAGLEPSTYQSGNFTASHSSMVKRGSTYLRWAIMQSARLVCMRDATFGDYLAKKRSEGKHYYVALSHVSRKLIRVIFHLLLSNSTFIPQS

SEQ ID NO: 343965 - protein, 427 aa, unidentified
MTDQLKHKAYHSWVAIDIAKDFNVVMVELTDGKTRRFRMANSGKDHDRLIEVIRGLPQPCHIGFEATGNYHRPLAYRLLTEGFDVSLISSLASARYREAIFNSWDKNDPKDAGILLELLKRGIMQTYIDPIRSGYHDIQELSKTYSNITLSRTRLQHSILTHYLPLYFPEMAKFWCSTRNAWWINYLLHFPTPASVVQYSEQAFCQIASPIIGRKMNKQAKLLELYEAAQHSIGLPIASDSLACQTFQLQLQRYQELTNQRQQLEQQAETTLSMNPDYCLLKTVPGIGPIVAMTILAEGGDLRRFNHHRQFLKYCGLDLAKNQSGNFRGQDKLSKRSNARLRLALYMASLHAIRQTENSFRNKFHRYTQATPKDADCKRKAMTAVMAKMARVIHALIKSGTPYQGYFEVSPSGSIPLCRAVGATRTP

SEQ ID NO: 343966 - protein, 295 aa, unidentified
MSQKLNTAIAVIGIDIGKNSFHVVGLDDRGAIALRQKWSRGQVETWLANIPPCLIGMEACVGAHHLSRSLRMLGHDARLMPAKYVRPYSKGQKNDFRDAEAIAEAVQRPTMKFVATKTPEQLDLQALHRVRERLVSQRTGIINQIRAFLLERGVAVRQGQRFLRAELPGILAAPPDVLSPRMVHIIEDLASDWRRLDERIEGLSGEIEAIAHRDAGCERLMSVPGIGPIISSATVAAIGAGDAFAKRPRLRRLAGTRPQADLDWRSAAIATCGSCSCRRHGLCSSSQRADGHIEA

SEQ ID NO: 343967 - protein, 472 aa, unidentified
MTVQWYRIKRTYEKPQGGFLAIGPRYPGVLSDDGLVVLFTHWATHSGPRSYVRDSGMRRRAAGSRLQLNSHFRRKPMPTTTRHARTPALPQSMPVPPRVLYLALDLGQRHWTLAFTVGRGQRPRVRTIPAGDLARLTTELAAARRRFGLPPESPVVSCYEAGRDGFWVHRALLAHGVTNVVVDAASIEVPRRARRAKTDRLDARKLVTMLVRHAEGEREVWHVVHVPSEADEDRRHLERERQTLVAEHTGLVNRIQGLLATQGVVLTLRGDVPAQLAAVRRWDGTPLPPELRARLEREWARVTAVRAALRTLTARRHQRVTAATPAAADVPAVHLTRRLAALGAIGETTAWLLATEMFSWRAFRNRRQVGGFVGLTATPDQSGERVRELGLTRNGSVELRARVIELAWSWLRFQPGSALSQWYRRRYGSGTARLRRIGIVALARRLLIALWRYAIGGPLPAGAHQKGDAVAA

SEQ ID NO: 343968 - protein, 386 aa, unidentified
MIYVGIDISKYKHDCFICKDTSEVIVENLSFTNNKKGFQQFLDLLKPYDNSNVRIGLEATGHYGLNLKLFLEKNNYSFMEFNPLLVKEFYKSLSLRKTKTDKVDAVVITQKLMSVPYKPNSKLFYHKYSIKSLTRLRETLVKQRSKYKVQLTNILDIIFPEFKPFFNNSFGSTSIYILNKYKIPERIAKMRDFETLNKLSRGNFTYAKFVKLKDLAKNTIGESNDIFEIELSSILNLYKNIDDHIIELDKQISTIIKELNPPTFSIPGIGVISCASIISEFGDISRFSNAAKMLSFAGLEPGIIESGTMSSKGKMVKRGSGYLRYSLMNVALTVIRYNNTFYDYYYKKISEGKCHRVALSHVCKKLIRVIYILETKNIQFDPSLLK

SEQ ID NO: 343969 - protein, 666 aa, unidentified
MIALLCLVLAVLTAPFKSRSRLEAGNAVLRHQLIVLQRKVRGRVRLTNNDRRFLIQLYRWFPSILQVLTIVQPETLVRWHRAGFRCYWRWKSRSRGGRPQIETDLRALIRRMSIENPLWGAPRIHGELLKLGFEVAQSSVAKYMVKRRGSPSQGWRTFLRNHAPDIAAMDLFVVPTIGFDLLYAFIIVRLDRRDLVWINVTSHPTAEWIARQITEAFPWDDAPQYLIRDRDQLWLSKPETSNRTPSLADFITITFDFRSHGEVDSNRYSGRVRLLPPTLEATMQTVAERPEAPTAIRTDLGAIFVSLELSRSTWLITSLSPGGGEKMSKHVVRGGDVTGLLERFAQLREKTRARTGKVFSFVVIQEAGLDGFWIDRVLQNEGIESHVVDPASIATSRRRRRAKTDRIDGEALVRALLAYKRGEPRVCVMVKAPTPEEEDRRRLCRERKVLIAERIRHVNRVKGLLFSQGISGYEPLRRDRRERLVTLQTGDGRLLPDHLKAQVCRELDRLELLLEQIKAVEAERDVLLAAQQAPAAMLLDIKGIGPEFAAILWSEGLFRHFDNRRQVASYAGLAPTPWQSGSVDREQGVSKAGNPRLRTTLIQLAWLWLRHQPQSALALWFEERVRRNGDRLKKTTIVALARKLLVALWKYVTAGVVIEGAVMKAA

SEQ ID NO: 343970 - protein, 367 aa, unidentified
MSEITTFVGLDVHKDSTAIAKAETTGRDNPVYLGTVGPDIRELLKALKNLGKPEHVLVTYEAGPCGYELARQLHQHGYPCEVIAPNKIPRSDTQRLKTDRRDAMTLARLARSGDLIKVLIPDESDESIRDLTRAREDAVRARLKARQQLNALLLRHGHRYTDGSHWTAAHERYLANLQFPHPAQYITFAEYLQAAHECDARVTRITEALRAQTENWRLKPVVHALMTLRGIDFVAAVTVIAELGDLRRFAHPRDLMGFLGLIPSEYTTGDHRRQGEITRSGNGHARRILVEAAWNYRFPARISGLLYTRQEGQPQAVCDIAWKAQQRLCHRFRRLRSRQLHQNKICVAIARELAGFIWDIARQVTVA

SEQ ID NO: 343971 - protein, 342 aa, unidentified
MEHFAGLDVSVKDTSVCIVDDTGKIVREVKVASEPDALLPVLTNPTYHFKRIGLEAGPLSQWLFSALAEVGLPVICVETRHMRAVLKAQINKTDRNDARGIAQMMRAGLYRPVHVKTLRSQKLRMLLTHRKLLQSKAIAIDNDLRGTLRNFGLKVGMVGTAKFEARIRELVENLPDLAVLVEPLLTVRRVLREQFCILHRRLLAIVRDDEVCRRLMTTPGVGPVVALTYRATVDVPARFRKSKSVGAVFGLTCAKYQSGESERSGRISRCGDEMMRVMLYEAAQAMLHSKRWSWLKAWAMKIARHRGMKKAIVALARRLAVIMHRIWIDGTEFQWTREAAVA

SEQ ID NO: 343972 - protein, 322 aa, unidentified
MQIPTQVLNTGADVAKDEIVVACSEGSFPVRKLANQRTTLRAFLKSLRPGSRIGMESTGVYHELFARLAHQLGFIVFVLNPKDVRHYAKGVGMRGKTDRVDAELIARMVAHEHADLHPWVPPTPEQREINRLLKRRAKLSPLRQALGMSLKGMVGFSTDLKALRQRFDQVIARIDQRVKELIEANPDRKEHVTHLRTITGFGPVVSAAMVNSLERMPLKSADSFVAFTGLDPRPDDSGRHQGKRRLSKRGPSELRRLLYVAALSAIKTKTWRPIYEHYRGKGLSSTAAIVIVARRLARTAWSMYTYKTEFDPERLAKGWQKA

SEQ ID NO: 343973 - protein, 414 aa, unidentified
MAGIINKACGLDVHKKFLIATILSIFGEKKQLRFERTEKGILDLKNWVISEKCDVVACESTSDFWVPIYESLINHLTVIVGNARDMKAFTHKKTDKIDSEFIAQLALNNMIKPSRVFSKNQREFRSYIRLRHKLVQKRTDIKNVAHAILASEMFHLNDVLTDIFGKNGIIILSGISSGKNVDQIIESLSPNVRKKSDQIREVLDREMSLSAAIRIQTCLSLINNIDEQINILEAEIFRYAYTNHNREMKLLMSSPGVGEISAATIIAEVGDFNDFSSGAKLASWLGLVPNVYQSADKYHNGRITKRGSKVARWILIQVAQAAARKNGSMLKEFFERKKKTIGHSKAIVALARKIVTILWHLITNDEMYEDEMGYKKGEVQKRKIVESEEFSVDERISIISEIFAIVKKEETDSM

SEQ ID NO: 343974 - protein, 330 aa, unidentified
MNFCGIDVSADELVVALRQGDRDLPQQRFANTAAGHRRLLAWLRGQGGATRITLEATGVYSLDIALALAAAPGREVAVVNPKLIRRFAESLDERSKDDPLDARILLEYTVRMPFRRWQPPSPTQLALRAITRHMLATTELRTATRNRWQIARRSASTPACVRRELERSLRQIDASLLRLQRQARTLVAHDPTLESQFQLLLTVPGIAELSALQLLAEIALLRDRKVRQWVKHAGLDVRHYSSGSSVCRRPHLSKCGNRYLRRALFMPALVASRFDPSLRAFYQSLLARGKHKRQALAALMRKLVHAIYGLFRHRQPYLGTRLCPRFAEAL

SEQ ID NO: 343975 - protein, 347 aa, unidentified
MKILALDLGKYKTVFCEYDSMNGEHEFGKIKTTPQQIHDLIVEMEPDRVVLEICTSAGWVVDIARGLDKEVEVANPLQEAWRWKNVKRKNDKEDALKLGKLSAMNQLPTVHIPEYSIRQQRALIQYRHKLTVRRTQIKNTIRAIFVREGIAIPSGKELWTKAGVSWLAEQACPIEEVSDVCQLWQGQLHTELQMLGSVTKAIESVEKKLNKLAASNQDIQRLQTIAGVGPRLAEALVVFLDDPHRFKGSKQVGSYVGLTPRQYQSGLSDRQGRISGQGNKLLRTLLVEISWTSLRYNTWARQTYDRLLRGSPSRKNIAIVAVARKLLVRCWAMLRDKQDWKYEKEAA

SEQ ID NO: 343976 - protein, 344 aa, unidentified
MKIVGCDFHPGFQQIAVLDTESGEISQRRLEHGDGQAEGYYRELEPGALIGLEAVGNSEWFEQLVVGLGHELWIGDAAQIRASYVRKQKTDRRDAGHILRLLVEKRFPRIWVPSAEQRDQRQLLLHRHKLVKMRTRIKTELQHLALNQGMQKKRRLWSAEGRADLEKLPLSGWTSRRREDLLAFLEMVEARVEKLDQAVGEIAAGDQQARLLMTQPGVGPVTALAFVVTIGDAGRFRRGKQVASYLGLIPAERSSGGKRRLGSISKQGNVFLRTLLIEAAQSAVRYDEQFRREYRHRCHQKPKGVAKVAAARKLAVRLYWMLRTQTPYPPAVHNEGSPSHPVAG

SEQ ID NO: 343977 - protein, 352 aa, unidentified
MESTTVGIDLAKNVFSVCVMNDKGHVIQHRELKRDALSEWLMQLPIGTVVAMEACSSAHYWGRLCLRRNLVPRLMAAQFVKPFRKSAAIKNDRQDAEAIATAARQGNMRFVAVKTVDQQVRLSWHRVREGYKRDALAVTNRIRGLLAEFGVAISPSRIALRRVLVRLDDLNLPTELVQLIRQQQAYWQQIEEQMAICEARIQEHAGQDERCVRVRALSGVGAITADAVVAAMGNAAEFKNGRQCAAWLGLTPRQFGTGGKVLLGQISCRGDAYLRTLLIQGARSSLRRAHATPAEKMTPEQQWIVQLAARLPFGKVLVAIANKHIRQIWAMLARGEAYDPHAWLKHPMVQRG

SEQ ID NO: 343978 - protein, 376 aa, unidentified
MLSARPARVPSPTRNGEETAITSMAHPAAPELTIGVDTHLDVHVAHAADQLGRRVDTVQIPTTPAGYRDLLAWARGLGEPVAWGVEGTGSYGAALARFLAAQGQAVLEVNRPDRAARRRHGKSDPVDAQAASKAVQAGAITVTPKAGTGQVEMIRSLRVARQTAMRARTQAVNALKALLVTAPAELREQLRGLSATWLVRASATLEPGPITSPTAAAMLALRTLARRHQALTGEITALTTELDRLTSTAAPKLVALFGVGSDSAGALLVAAGDNPGRLRSDACFSMLCGASPIEASSGKTTRHRLNRGGDRQANAALYRIVLVRLCYDQQTKDYMARRLKEGKSKKEIIRCLKRYVAREVFAALREMRETDSTNAA

SEQ ID NO: 343979 - protein, 413 aa, unidentified
MAIDTVVQRSAGLDIAKASLVACVRIPGPDGGWRVIKRKFTTMTAELLALQDWLAGHNIARVGMESTSDYWRPVFYLLEQRFDCWLLNARHMRAVPGRKTDMTDAEWICDLVALGLVRPSFVPPPPIRRLRDLTRRRAILLAERTREKQRMEKLLEDAGVKLSVVATDIFGKSGRAMLDALIAGERDPKVLAELALGRLRKKIPALAEALVGRFDDHHAFLARMICDHIDTISRMVAELNTRIDTEIEPYRTEVELLGSLPGVDTRTAEVILAEIGTDMSRFPTAAHLASWAGACPGNNKTGGKSKPSHTRPGDRWLKAALGTAAMGAIRTRQSYANALFRRVAARRGGKRAQTAVAHCLLVAAWHVLATRTPYHDLGGDYFLNRDNPDHRRRRAIAQLERLGYQVTLEPRAA

SEQ ID NO: 343980 - protein, 456 aa, unidentified
MTQKRSKPKIDRTMPMVHPNAAAIDVGATMHTAAVRADWTPEPVRSFGTFTTDLHRLVNWFKECGVETVVMESTSVYWIPIFELLDARGFSVFLVNARDAKHVPGRKTDVSDAQWLQRLHSYGLLRASFRPKGQIAELRAYVRQRERLLEYAASHIQHMQKALTEMNLQLHHVVADITGTTGMSIIRAILAGERDPKVLARLRHYSCRSSIETIEKALTGNYRAEHLFALEQALTLYDAYHEKVSACDVRIEAVLKELSVRRGRKSGSLPSSHRRTDQANGLAFDARAALFTLLGKDITQIDGLGPYLSLKLIAECGDDLSAWPSAKHFTSWLCLAPSNKISGGKILSSRTRRGSRAPALLRLAAVTVGRTDTALGAFYRRLSARIGKAKAVTATARKIAVLFYNAVRYGMEYVDPGASFYETRYRKRVVDNLRRRAKSFGFVLQPFEPTPSVPVS

SEQ ID NO: 343981 - protein, 420 aa, unidentified
MKVVYSTCCGVDVHKTFLVATIIKTTKGVQPSYQKKRFSTFNSDIRHFKQWLLDNSCFDVCMESTGKYWIPVFNLLEDKINVTIANPKWVKAVKGNKDDTKDSKWIGDLFRLGLVPGSFIPCKDIRILREYTRYRFKLTCCKRSEKNRFQNAFTVCNVALDAVVTDMFGKSASSITDYLITSDEFDPETCKSFLQKSLKKKADSIIESIEGYQMTSSQKERMLMVRSHLDFVQQSIDSLDSKLDELIAPYENAVSLLCTIPGVDRTSAITIISEIGTDMSQFNSSKCLCCWVCLTPGNNESAGKKKPTKITRAGVYLKPALVQCAHAAVKSSTSPYYKNKYERISKRRGKKRAIIAIARMILTAIYQMLSNGETWNPCDLYKIDMPQEMQDKQKTKAIKQTLKLLVSEGVISPESASVAI

SEQ ID NO: 343982 - protein, 262 aa, unidentified
MHVVTLGIDVAKQLFQLHGVDDRGQAVLSRRMRRSQLREVVRSLPFCVIGMEAYASGPHWGRVFEQRGHTVKLMSPKYVKPSVKTNKNDGRDAEAICEAVGRPTMRVVAMKTVDQADLQAVHRSRSLLIKTRTALLNQIRGLLGEYGVVMARSPERVRPALVGLLNDEQTGLTPIARDTFSELYDQLVELEQRIVRVNQRLDRVFRAHPVCRKLAAVPGIGPLTATALLAAVSRPDVFQNGRHLAAWLGLVPRQCSSGGHAR

SEQ ID NO: 343983 - protein, 347 aa, unidentified
MVIVDSARSIVGGVDTHRDTNVAAVVDMNGGVLGIESFPTTGEGHKQLASWMAGFGTIERVGIEGTGVYGAGLARHFARASVMVIEVDRPNRQKRRQRGKSDQIDAVEAARGALSGRCEAIAKSGDGHAEALRALLVAKRSARSTRIRTIVQLRYLMFTAPDELRARLGGLSATQLVNEAAKLRPRPGGDVVLRGVKTTAVILARRVQALDAELAVIDAEIEPLVKAAAPDLLNVFGVGIDTAAVLLVTAGDNPQRITTEAKWAMLCGVAPVPATSGLMDGRCRLNHAGDRQANNAIWRIVITRLGQREPRTVAYMERRLEHGQSKRAIVRCLKRYVAREVFHALPR

SEQ ID NO: 343984 - protein, 352 aa, unidentified
MTFVGCDLHTRQQQVAVLDTTTGEIHEQQLPHAGTAVEDFYAALPRPVTVGLESTGYAIWFHTLLQRLGHTVLVGDAAKIRAMVVRKTKTDRRDALHILDLLRHDRFPTIWLPDPATRELRALLMHRMRLVRIQTKLLRTAGLAQLQALSLPPYTAQRRDQSLDLLGTLRTHLDHLDDAIAAAALVHPDAPRLLTHPGVGPLTALATVVVLGAVSRFPDSKHVVSYIGLAPTLNASADKYRLGKITKQGSTLLRFVLGQAAAHAARLDPDLTRTYRTLAQRRGRSKAKVAVARASSSCGSSSCCATTSTMTSSGDAGGRPPRPRAQEGADGRRRPTGTRSSAGVLEVIHGLP

SEQ ID NO: 343985 - protein, 341 aa, unidentified
MQISTIGLDIAKNVFQVHGVDDAGQAVLRRQLRRGAVLGFFAGLEPCLVGIEACCTAHHWARELTALGHQVRLLPPSYVKAYVKRGKNDALDAEAICEAVTRPSMRFVPVKSVGQQAGLVPHRVREVLIRQRTMLINVLRSQMAEFGVIAAKGRHKIADLTAVLHDAGETRVPEPARTMLLELADAIAALEPRLACTQKAMAAAVRRDPVARLLTTIPGVGPITASAMTAAVGDPGRFRNGRHFAAWLGLVAKQNSSGGKPRLGRISKMGDRYLRKLLVLGATSSLRRARSEQTPLAAWTRRLLERRPPRLVTVALANKTARIVWALMAHGEAYRPEAAAA

SEQ ID NO: 343986 - protein, 345 aa, unidentified
MDHFAGLDVSVKETSVCIVNDTGRIVREVKVASEPEALLAVLKNPAYHFERIGLEAGPLSQWLFSALAEAELPVVCVETRHMQAVLKAQINKTDRNDARGIAQMIRVGLYRPVHVKTLRSQKLRMLLTHRKLLQSKAIAIENDLRGTLRNFGLKVGMVGKVRFEARIQELVENLPDLAELVEPLLIVRRALREQIVILHRRLLAIVRDDEVCRRLMTTPGVGPVVALTYRATVDVPARFRKSKSVGAVFGLTCSKYQSGEIDRSGSISRCGDEMMRVMLYEAAQSMLRSKKWSWLKAWAMQIARRRGMKKAIVALARRLAVIMHRIWVDGTEFRWTREQAAVAAA

SEQ ID NO: 343987 - protein, 469 aa, unidentified
MNNAKKKKRKNSGKLHNSLSQLDQINLNAAGIDIGAEEHYVAVPQCRDPEGEDVRHFNTFTVDLLSLANWLKKCKIDTVAMESTSVYWIPLFEILDSQGFDVKLVNPRFIKNAPGRKTDVLDCQWIQQLHTYGLLQGSFRPDDQICELRSYLRQRSMLISYASHHIQHMQKALEQMNIKLNHVITDITGVTGMAIIRAIIAGERNPEKLAQMRNSRCKSSKSTIAKSLHGNWRSEHIFSLQQAVELYDFYKSQITACESRIQQHLETFDDRSDGKPLPKPPFKSGGCRNKFHFDARTYLYQMTGVDLTRIDGIDTPTALTIIGETGIDMSMWPTDKHFSSWLALSPGSKISGGKVLSSKSKPCANRAAHAFRLAAYSLHKSNSALGAFLRRKKSHLGSPKAITATAHKIARIFYNMLKTGTEYVDLGQDYYERCYRDRVITNLKRKAKQFGYDLVNVNPSLIPSRTQLQ

SEQ ID NO: 343988 - protein, 371 aa, unidentified
MKKNLRTKFVGMDVHQKSISIAIADDGPDGEVRLYGTIKNTIEAIDKAIRKLVSTGAELHFVYEAGPCGFALYRHLTGNGFSCIVAAPSMIPKKSGVRIKNDNRDALALARLLRAGELSPIYVPDTEDEAIRDLTRARNDARIAERKAKQRLHSFLLRNEFIYHGKTKWIKSHFNWLAQLKMKHPAQQVAFQEYIEALNECSERITRLDEQIAKAADEWRWASTVKALQALRGVSLLTAVNMVAEIGDFNRFQNPKELMAYLGLVPSEHSSGDRIRRGGITKTGNSHARRICVESAWSYRYQARVTQLLRKRHEGLPKDILQIAWKAQLRLCTRFRRLRARGKPVQVVVVAIARELVAFMWDIARRIPAAA

SEQ ID NO: 343989 - protein, 366 aa, unidentified
MSVYVGIDVHRKRSQVAVIDQCGEVVTNRNVPNGVEPILKVIGGLPLGTPAAFEAAFGTSWLVELLEDYGFTPHLVHPSRCKAIASARLKNDKVDAAILAQLLRADLLPEAWIAPPPVRALRALLRHRVALVRLRTLLRNRIHAIVADHGHDRPGGGYWTGPGRAWLAALDLPVVSRELVEDDLALIDALQERVDRLDWEIHQRARSDPRVKVLTQLPGVGPFTALVILAEVGDISRFGSARKLASWAGLTPTVRGSDRVAHYGHISKEGSVWLRWVLCEAAQTAKRNPQFAATFQAIAKRRGKKIATTAVARKLLTRAWHLLTDAGTATRRAPDGGAVTGPEEVAKPPGELEDRPEPGHGPRSTN

SEQ ID NO: 343990 - protein, 393 aa, unidentified
MLHPSGVSLDTTDAVALASERSEEAKATAADGRSLTLECCNADTVRELDRRRPLVNSPNSRLSRDKLSSSHLQGRDTSKMSFQHFIGIDVSKAKLDLAFDEQATTTVVPNDPKGIDELVDLLPEAKSCLIVIEATGNYERPLAVRLVEAGHVVSVVNPRQVRDFAKAIGKLAKTDKIDARIIALFGKLTRPRAVAKTKQLQGELDQLVTRRRQLIGTRTAEKNRQGQAVSGAVRKSIQRVLDAINKDIKMIDREIQKLVQSDDDWKHRAELLGTMPGIGDVTSATIIAELPELGDLNRQEIASLVGLAPFNRDSGQMRGKRSIFGGRGSVRSALYMAALSARRYNPAIAAFSKRLAEQGKPPKVVITACMRKILITLNTMVKTNTAWENPQNA

SEQ ID NO: 343991 - protein, 382 aa, unidentified
MQASTVGTLTTGHNGTIFVALELSQKTWLVTFHAPDRDRMSRHKLDGGDHAGLLELIEKVRRRAADKLGSVPRVVSCYEAGYDGFWLHRLLEAAGIVNFVFDPASIAVEQRSRRTKTDRIDGELLLRTLMAYLRGEPRVVRIVRVPSVAQEDARRSSRERDRLVKEQTAHTNRIKALLRLAGMAVGSPRRGNWLAWLAKQRDWQGQPLSPHLLAEVTREHARLMLVRQQLVALEQAQATQACAVPEQTIERRVQLERLKALGPAFSTTMSYEVFYKDFQNRRQVASYVGLAPSPWQSGGIDREQGISKAGNPRARVKAIELAWLWLQHQADSELSRWYRTRTANAGKRARRIAIVALARKLMVALWRYLTTGLVPVGATMKA

SEQ ID NO: 343992 - protein, 388 aa, unidentified
MDIRTIASSPAASDCASARILVAIELSKKSWLAAVLTPLSDKISVHTLAAGDGTALVNLLARMRHKAEAALGRPVEVVSCYEAGYDGFWLHRLLQAHGVDSRVFDPASLQVSRRARRAKTDRIDVHGLLRALMAHLRGEPKVVSVVRVPSVADEDARRPHRERDRLVRERVQHVNRIKGLCATQGIYDYEPFRRDRRERLAALRTGDGRALPPRLAAEIGRELSRLELVMSMICEIEAERDAVVRGKAPAAHPHGDKIAQLAKLKAIGPEFATVLTGEVFYRSFANRRQVASYVGLDGSPFESGDRRREQGISKAGNPKARTAMIELAWMWLRHQPDSALSRWFRERVGALKGRPRRIAIVAMARKLLVALWRYLETGLVPDGAVLKA

SEQ ID NO: 343993 - protein, 351 aa, unidentified
MEHTTIAVDLAKSVFQVAVSHKAGRVDAERRLSRDRFLAYFAQQPPATVLLEACGSSHYWARQLAQFGHVVRLLPAHDVHRYVRRNKTDRTDAKALLEAARNEEIHPVPVKTVEHQAMTSLHRLRSTWLATRTARLNTLRGLLREFGIVIPVGAQHVVPRVRELLGEPTATVPVAMHSTLANACAEIEVLETNVRDVERQLAAIARQLPDVPLLQTVPGVGLITATALIALVGDIGRFGSGRHFASFLGLTPKEDTSALRRRLGAISKQGDVYLRMLLIHGARSVLWHAKSCAHPSSFQAWARCTEQRRGHNVAAVAVANKLARIVWAVWSQQRPFAANHRHAETMSVSNN

SEQ ID NO: 343994 - protein, 357 aa, unidentified
MGLFTGVDLHSNNGYYGIINEDEERIFKKKLPNHLPTVLSNLEPFREDIVGIVVESTYNWYWLVDGLMEEGYKVHLANPSAIKQYEGLKYSDDVREAFFLAQLLKLGILPEGYIYPKEERPVRDLLRRRLILIRQRTSHILSFQSLITRNTGVKISCNDIKKLEVEDVKRFLDEECLILSGETNIAVIRFLSKKIGEIEKAVLKRVKLKEEYKKLLTAPGIGKILALTIMLETGDIRRFAKVGNYSSYCRCVKSEYITNNKKKGEGNRKNGNKYLGWAYVEAANFAKRYCPEAKKFYQRKMAKTNRIVATKALANKIARACYYVIRDREVFKVEKVFGRREGCGSEPRKGLVKSQEN

SEQ ID NO: 343995 - protein, 412 aa, unidentified
MEVIYPTCAGGDVHKREVKVCLITRDASGQGTKEVRTYRTMTQDLLALRDWLQDQGCPIVAIESTGVYWKPVFNLLEGDLEVLLVNPSHIKHVPGRKTDVKDCEWLAELLEHGLLKGSFILPQAIRDLRDLTRYRRKLVEMRASEVNRLQKVLEDANIKLASVVSDVMGVSGRAMLAALLAGERDPKQLAELAKGRLRQKKEELVAALEGRFRPHHARLLAQMLAHIDFLEESIAECEAQIDEMCRPFAEDIERLDTEPGVDRRAAQDLVAEIGVDMSAFPSHKHLCSWAKICPGNNESGGKRKSGRIGKGNKWVRAILTECVHAAGRTKETYLSAQYARFARRKGKKHAAVVVAHSLLEGAYFILRDKVPYRELGPHHFDEINQAHAIRYHIRRLESLGLQVQIQQLPLAA

SEQ ID NO: 343996 - protein, 348 aa, unidentified
MRFYSKLHKHYCGVDIHAKIIYVCIIDKEARIIKQKNIKSNPAAFMKAIDKYRDDIVVSAECMFTWYWLADLCAKESITFILGHALYMKAIHGGKAKNDRIDAYKIACLLRGGNIPMAYVYPPEMRATRDLMRRRTHLVRKRAELLGHIQNTNHQYNLPPLPENIRYKGNREGLIEHFREECVQKSMEINLSLIDHYNSLLLKLEHYICKKAKVHDHEALLRLLSVPGIGQTLALVILYEIHDIRRFPRVQDFVSYSRLVKPSKESAGKIYGHSGKKIGNAHLKWAFSEAAVSMLRGIPDVKKYKEKLQRKHGKAKALSILAHKIGRAIYYILKRKEVFTIEKFLTKK

SEQ ID NO: 343997 - protein, 349 aa, unidentified
MYIGVDTHKAAHVLVALDEQGRTLGTRDITNSPDGWGEALRCAQGWPGERMWGLENSGSWGKGLAQALLAQGEAVVCEVSPQRTAQYRRRGRTQDKTDHADALAIARLLVAEGEQLPRVQADDARTELRLLSDHRDNLLGERTRLINQLHDQMVQLDPAYKVNSGPLKQRRGILYCRDWTLDHPSRVAGTRLLIVHQLATQILRLDDELTAITAELSARVQATQTPLLALRGVGEVTAARLLGELDSPPRIRSATALAALSGIAPVAVSSGGRTGYRLNRGGNRWLNRAIHIIALSQQRCEPRAQAYYAKKRAEGKTAREAMRCLKRRLVDVLYRTLCQDRGVPVASAA

SEQ ID NO: 343998 - protein, 349 aa, unidentified
MIIIGVDFHPEFQQIAMVDTDTGELQEQRLTHREEAERFYRSLSSAGQQVRVGMEASGHGRWFERFLAELQIELWMGDAAAIQRKRVRKQKTDRQDAQLILKLMLKDDFPRIWVPSWENRDLRQLLWHRHRMVQARSRVMNQLQAVALNEGLRCKKRLWRTKRPQLESFPLAPWASRRRHDLLELLDRWNPVIAELSQAVEQQVEKCPEAQRLATHPGVGPLTAMAFVLIIGQAERFRCGKQVASYLGLVPLEDSSGNQRRLGHITKQGSSMLRFLLVEAAQVTVRSIPEWRSQYFHLVMRRGRKIAKVAMARRLAVRLYWMMRQGTEYQKSNKFGSYVGQPGHRHGVR

SEQ ID NO: 343999 - protein, 446 aa, unidentified
MKKSSRMSIVHPHAAGVDIGAEFHVVAVPPDADTEPVRTFQSFTGDLQRMSDWLKTCHITTVAMESTGVYWLPAFEILEAAGFKVILVNARDAKNVPGRKTDVNDAQWLQKLHSFGLLRASFRPEHDISVLRSYLRQRERLTEYRAAHIQHMQKALMQMNVQLHHAVSDITGVTGLSIVRAIISGERDPSVLIQYRDVRCKKTPEVLQQALTGNWQPEHLFALEQSVAFFDFYQEKIRECDDQIETSLLQLSTGIEEPEGVLPSARHRTKQPNQLSFDVRPLLWKITGADLTQIHGFGPYLALKFIAECGTDMNRWPDASHFTSWLCLSPGNKISGGKVLSSKTRRSSSRIAAALRLAATTIGRSDTALGAFYRRLSSRIGKAKAVTATARKLAILFYNALKYGQKYVDPGADYYEERYRSRVLDGLKRRAKSLGYSLQQDPELCV

SEQ ID NO: 344000 - protein, 402 aa, unidentified
MNCVGIDVSKGKSMIAVMRPFGEVVVSPFEVRHTANELSELAGLLKSLDGETRVVMESTGNYHAPVAWLLHDAGLYVSVFNAMLVHDYGNNSLRRAKTDKKDAVKLANYGLDHWLTLPRYIPEEDTRLMLKICYRQYQQYSKVQTMLKNNLISLLDTTFPDANRLFTSPPRADGSEKWVDFVATFWHCECVCGRSEKAFTTQYQKWCRKHGYNFSEDKALDIYASACRHFGVIPKTDTAKLLVEQAISQLQTTSSALAALKQEMQSLAASLPEYPVVMGMFGVGPTLGPQLLAEIGDVRRFHSKKALVAFAGIDAPPYQSGQIDVRSRSISKRGSASLRRTLFLVMSVILQCAPIDEPVYQFMDKKRSEGKPYRVYMMASANKFLRIYYASVKAYLESLEHD

SEQ ID NO: 344001 - protein, 313 aa, unidentified
MSQNNNPILYTGLDVAKLSLELHLAGKTHSLANHAKGHAQLLKLLSRYPTAHVVCEATGGYEQNVVRALQAAAISVSIVEAGRVRHFARAQGQRAKTDPIDAAVLSAYGCACQPLPTPPVSSQQQQLAQLVQRRSQLVQLLIQERNHAEHYTDTFRRKQFRQLARLLEKQISQCDQAITALIDQDAQLTRKASRLQAIPGVGAIVSATVLAEMPELGHLNNQTAAALAGVAPYNRDSGSQKGLRCISGGRRSVRTALYMATLSAVRHDRILKAFYQRLLAAGKKPLVALTACMRKLIILMNRLLKNDLFQLAH

SEQ ID NO: 344002 - protein, 355 aa, unidentified
MLNTNYIGMDIHKETTSIAVMNAAGKVVMECVIETKANTVLQFIHGLRGDLHVTFEEGTWAAWLYDLLKPHVTEVLVCDPRKNALLKQGSKSDKIDARKLAELLRLNHLKPVYHGEHGVRTLKELARSYLTITQDLTRVRNRLKALYRSWAIPCSGTQVYSLRHRSEWLGKITEAGVRRRAEHFYQQFDALRPLRQEVRRDLLTEGQKHKAWKLLRQIPGIGAIRATLLIALIQTPHRFRTKRQLWNYSGLGLETHDSAQYCVVEGQLQRSKKPVMLRGLNQNHNHDLKAIFKGAALEASSGAGPFHDFYEALLTKGRKPSMARLTLARKIAAIALIVWKKEVSFDAKHLKQQAA

SEQ ID NO: 344003 - protein, 407 aa, unidentified
MKDSGKRYIGLDVHKHYLIALGVDEDLNVVLPARRVELSHLESWMKQTLTKRDEVVLEMTTNTWQLYDELCAYAGSVLVVHPPHVALITRSQVMNDKIAASILARLLAKGLLVGIWVPPQDIRELRGLVAQRKKMTGLATQAKNRLHAVLQRHHRLPPEGNPFHVSQHSWWLALPLGWLEKVNVESDLDTLQFAEQQLAYLTSLMNILASEDEHITRLLQLPGFGVVTAITAWAAIGNIQRFEDAQHLVGYAGFGTRVHNSGMTTRSGRITKAGRRDLRVVLIEAAQVAANTHPHWKAELARLQPRLGRNKAIVAIARKLLVAVWYILAQHKTDRFAQLEAIAQKFLKFAYQLGKENRPGQSAAQFVRQRLDTLHLGNELTHIAWGSKKPIPLPPSTNKVSDVPNTK

SEQ ID NO: 344004 - protein, 328 aa, unidentified
MNNNNEVNDVLGIDISKAKFDVALIQGNAKIKSKVFANNPEGFAELQEWLNTQGVTNLHSCMEATSTYGNALARFLVEAGYKVSIVNPSRPKAFGKSELSRTKTDRADAKVIARFCAALKPAPWTPPPLEIEQLQALVHRLDSLTAMQQQEQNRLATADPILVEAITAHIDFLKEQIEMTKKLIRQHFDQHPHLKSQRDLLTSIPGIAELTATVLLAEIRDISAFDTADQLSAFAGLTPREFSSGSSIHGKPRLSKMGNSRLRKALFMPAIVARRYNSPIASFCDRLTAKGKSKMSVIGAVMHKLLRQVFGVLKSQRSFDPNFVQIPS

SEQ ID NO: 344005 - protein, 323 aa, unidentified
MSPVVGIDVAKRSFDLAIDLANGKYRTKAKLPNDPKGFQALHAWLQTHAQADSWIVMEATGTYHEALAEFVHGLGYRVCVLNPAQMALYARSQLTRVKTDHSDAKLIASYGQRHASQLRPWQPDPPALKQLKALVRRRDDLLQMLQMERNRLDVAARVVRDSILESIDHLQARIAQIERAIEDHIDQDPTLRGQRDLLVSIDGIADTSAALMLAELGNVERFAHASAVTAFAGLNPRLQESGKRQGQVCISRTGSPRLRAGLYMPALVAMTHNPVVRALKQRLRERGKAGKQIVCAAMRKLLHLAYGVLKSNTPFDPQKAIAC

SEQ ID NO: 344006 - protein, 409 aa, unidentified
MEVVHARCAGLDVHKKSVYACVICCGAAGEKQLEKRSFGTMTADLLSLADWLREHAVTHVVMESTGVYWRPVWAILEGQFALMLVNPHHVKAIPGRKTDAKDCEWIAELLQHGLLRGSFVPPTEIQDLRDLTRYRVELTQAQNRVANRIQKLLQQANVKLSSVASDAMGVSGQQMIEAIIAGEQDPARLADLARRRLRAKMPELRLALEGRVRDHHRFLLREFLEEWRALGARIRRVEEEIDRRMAPFEEAVTLWHSIPGVDRVTACNLVAELGVNMAQFPSAQHLASWAGLCPGNNESAGKRMSGTMRDGNKWLRRTLCQAAWAVTRKKDCYLSAQFRRLAARRGMKRAVMAVAHTILIIAYTMLKTGRSYHELGGNYLEQINRDQLQRYFMKRLQKLGLTVTVAPVA

SEQ ID NO: 344007 - protein, 386 aa, unidentified
MVKGSIVEASCGEASVASRTARRGRREIGSVQAFEAVTKRDPRRHYGTNPNSRRNRRRPVALASSHLQDWEKTMQEPLFIGIDVAKDTFHVASCPASINISLPNSPTGTHQLIKSLQSHNIALVVLEATGGYERPIVAELLQEKFKVVVASPRQVRDFARGLGEWAKTDPIDAYVLARFAQVVQPKPKAPSGPHIDELADLVRRRRQLTDLRTQELNRSQTVRHPKVRKSIRKMIKTLDYQIAELDELIEQQIRSDDDLRQKNKILRSAKGIGPATSASLISLLPELGRLNRQQIAALVGVAPYDFRSGKFAGQSHIFGGRKEIRNALYMAVLSAKRFNPVIHRFAKRLIAKGKLHKVVITACIRKLLIILNTMIRNQTLWRPEKI

SEQ ID NO: 344008 - protein, 491 aa, unidentified
MTSIFQRANPAIQELFKKAGSPAKVMCIPIDYAKRQHTALVCNGAGTQLRGPFNIHNNPEGVAFLEKTVSGLCRKHTIRKTHVFFGGEDCSAIAFNFSHALIQRGYLGIGVNAQDAALERQNQIASTDKLDLLGIASVLINKKWGRTLSAEYGDARILRDLTRHRKALVKAHTASAYRIHHIVDQLLPGFLDDKRSGLTPFSKPSLWVMRSGLAPRAILARKSPAMADKFRLFLIRKPEEKVRQLKELARSALPPPARLCEILQTNLSHEVSIYEHLEGCLKDLEQDIARRLAPTPGAMLTTVPGIALTLASSLYAEIGDPLRDRSLVQLSSYAGIVTRLKQTGGPDKEAQSLGRSRRACVPLKRCVMDIALKTGQYGHPELKADYERRVNQGQDPRLTMGRRMLRICTHIMRNTDFFRPPSLWHNDDMDARREYYSRAWDKVLIKWRDAAAIKQAFAEGTPLEQWRNMLNELYGLNLSNKSPQFDRLRDR

SEQ ID NO: 344009 - protein, 364 aa, unidentified
MKKFCIGIDIAKKTFDATAIFVESIDSLNEVGYRQFDNSTSGFRTLVSWAKKLCKQCNGKLSEDGLFCMETTGGYDRQICMYLHDKGQNVWRESALQIHRSSGFRRGKNDKADSRNISEYAAKHQDKLVLFSPDPTVIMELKEIVNYRATMVERRKEAKTRLSEKKFTTVIGESQTARAINKMSESEIKTLDEIIEKCNQEIERIINSDEDLKRNYLHMTSINGVGLVNAACIIAYSSNFKKITTPNKMSCYAGAHTFYDESGTSVHKKDPSKNVCCKMIKNNLRMAAKSAIIYNREIKAYADRLEKKGKPYSIVLNNVMNKLLHITYSLVRNDCDYEYNHELLRKLKTEELVLKTEPSLEAAL

SEQ ID NO: 344010 - protein, 338 aa, unidentified
MGVYIGIDLHSNNCFVTVIEESGKVVYEKRLSNDLPLIVSELEPYRDHCEGVVVESTFNWYWLVDGLMEAGYGLHLANTAAIQQYYGMKYTDDKSDARWLAQMLRLKVLPEGYIYPKGERAVRDLLRKRSQLVQQKVSQMLSIQNLVSRNAGVHLNGNAVKTLTGWDVDRMLPDPLVAQAAKSNLRVYRCLAKEIKGIEETVLARVKGNAGFENLLGISGIGKALGLTVLLESGDMARFPGAGHFASYCRCVGSQRLSNGKKKGKGNTKNGNKWLAWAFIEAANFAVRYNATVKRFYERKKARTNGVVAIKAVAHKLARAAYHVLKDGVPFQVERAFA

SEQ ID NO: 344011 - protein, 408 aa, unidentified
MRAIGIDVHRDFCEVAISEGGRLRSAGRVPSTPEQLELLAASLTLHDQVALETTGNALAIARIIGPHVGRVVVAGAKELHAITGAKAKTDRRDARTLAKLLAAGLLEGTWLPDEDTRALRRRMQRRSQLVCQRTRLKNEIHATLYRNLSGAGPASDLFGAAGRRWLAELELPADERETIEGCLRVLDFLGEEVDHLEQAVARQALDSPEIRRLVTIPGVNLITAATLMAVIGDVGRFGSARKLVGYLGLDPRVRQSGSSPARMGRISKEGAASARRVLCEAAHAAMRTPGPLHAFGQRVGARRGQKVAIVAVARKLAVLAWRLLTSGEDYAYAKPSRVALKLRRIELLAGAPRQRGRRSGTTLNAGRERERERELALAAERAYQRLVSDWQASARKGKGAGAAVGRAS

SEQ ID NO: 344012 - protein, 422 aa, unidentified
MSYCPVAGIDVSKRFSDMCILSPDNKIFAQEKIYHDETSINRANALLQKAERLFFSKPVIVMESTSHYHLILFQFFSEHGYDVIVVNPLQSNSMKDFSIRKRKTDRVDAFKLAMMYRTKTLRPSQIPQTATRALRQLCRHRAELLNDVSSYKNRLTALLDQTFPGYDKVFSDVGGVTSCAVLVRFPTPTILLVEGESELVEVIAAASKSGYSFAKKKAGLLISAAQKAQTLGIHSCADETLVVCAIQMLRTLSESVLQIEAAIDNLLAQIKEMRNNISLLQSIPGIGSHSAALLLGEIGDISLFKKPKQLAAYFGLDPTERQSGSFRGTKNKLSKRGSPYARAALHMGVVNSICKRGKDSAANPVLLSYYEKKCKNKPAKVAQAASMHKLVFIVFAVLRDQKPFELKTPEQHAVEQGFVKAA

SEQ ID NO: 344013 - protein, 347 aa, unidentified
MLADELDYVIGVDPHRDTHALAVVDVRSGGVVFEATAVADGEGYESVLRLANQHAPGRRAFAVEGTGSFGAGLARFLVGHEERVLEVGRLRRERQSGKNDALDAIRAARGVLGQTRPARPRAGGEREALRALSAAREGAVTARRAGLCQLRGLLVSAPEPLRAELRSLTRAQLLRRLAAVRPEGRQDPELRGTLLALRALARRVKALTVEERELARALETLTRKLAPQLLAQPGVAPPAAAQVLISWSHRGRITSEAAFARLAGCAPIPASSGQSVRYRLDRGGDRRLNRALHMILVTRRRTHAPTIAYIERRIHERKSRREAIRCLKRYLARNLYRLLENGSPLPT

SEQ ID NO: 344014 - protein, 388 aa, unidentified
MIGPGEEPLGELRVESSPGQAEDLLKWAAQWPERTWAVEGAAGLGRLLAQQLVAAGELVLDVQPKLAARVRLLQAGDTGKNDPHDAQSVAVAALRSRACRPVAAEGHTVVLKIWARRHRDLARARNQVACRLHAVLCELVPGGVRKQITAGQAASVLERVTLSGPIGAARRELAAQFLEDLRRLDGQLREANKKLAAAVRASGTTVTEVFGVGPVNAGTIIGDVTDVNRFPTRDHFAACNGTAPTEVSSGGRKACRLSLRGNRRINHAIHMAAVTQIRHSHSGGRAYYDKKIAEGKTHKKALRCLKRKISDASYARLHADATRAARPAGEGPGGQTGNGSDSSAAGSHPEHRLFGQATPGPATTLRPPARPARQQPRPPQLKDLEKTR

SEQ ID NO: 344015 - protein, 358 aa, unidentified
MTQVKKLDFSGTTIYCGVDVHKKSWRVNIQDSEFELEDFTQNPDAVLLHKHLTKRYPGASYKIGYEAGFSGFSMQRTLSQSGCQCWVVNAADIPASDKDKKQKQDKADARRLCAYLQSKKLKGIHIPDAAWEHARTLVRTRERIVNNQTRCKNRIWQLLHFSGLPVPAQQQEGKYWSKRFIDGLQKMDCGGSVHLQQSLQLHIKDYLQTRLLLLEATRAIRGLCREQHYAGDIKLLRSIPGIGEINAAVMLFELQDVTRFKRFDYLCSYVGLVPDTSDSGETKRTKGITHRHNYYLRTALVESSWSVVRKDPALLMKYKEYCRRMEKNKAIIRVAKHLLSRINFVLKNKKEYVTGVVA

SEQ ID NO: 344016 - protein, 310 aa, unidentified
MIAHVGIDVSKKHLDVALHPQKDGFRIPNTLEALTALAERLKPYAVERVLLEATGGYEKLALQVLTRLGLKVVRINPVRVRNFAKAMGKNAKTDKIDAKMLALFSSKLENEQAAVVDEVRDTLNELVTQRQFFVQQRDDIRRRVKQITSEVVRTAYLQQVKTLDDQVKKIDVLIETKSSEIDSKSVQRLRAIKGMGPVTISSLLCFLPELGSVSGKHIAALIGVAPFNNDSGDKTGERHIYGGRGRLRRALYMCVLSMTRFNPAFKARYAALRARGKCAKVAMVACMRVLAVRLNAMIKNDQDWMDEPAR

SEQ ID NO: 344017 - protein, 354 aa, unidentified
MNDEQHLSSQSTHWVGVDVSKRTFDAALVRHGQKWPATPLAAVPVESFARTSVGVNDFLQWLDALLAENDPPLGVRVVMEATGRYSSELAVWMLTQRQALAPAIAPPHQTAAFIASMGLRNKTDKLEARALGFYGMERQPPAYQPMTPQEAELRELARYRDFLVRERVAAANRADETPACKTVRDMEHKRRRLLDGDIKRIEEQMRRHANETPELKRDVELLATIYGVGFITAVTIRVELGDLRRFHKARQLSAYAGLNPSLRQSGSSVNGRPHMNKQGNPRVRQCLYLAAMVAIRGHNDLQRTYLQLREQGKSAMSALGAIMRKLLVLMRAILISGKPFEPMWKTRPQAAQTP

SEQ ID NO: 344018 - protein, 421 aa, unidentified
MTQTSHDTFAAFVGLDWADAKHDGCLQPAGSAKRECFQLEHTPEAIDAWVTTLRTRFNGQPVAICLELTKGPLVSALRTYDFLVLFPINPLTLARYREAFTPSRAKDDPTDAALQLELLLTHRDKLQPLNPQSPTMRTLAQLVEHRRRVVGDKVRITNRLTSTLKNYFPHVLHWFQEKDTAIFCDFLSRWPTLKAVQLARRATLETFFRAHHVRYADVITQRIQAIKAATPLTTDAGVITPNALLVQVFVAQLRVTLQAITDFDTAIAQCAQSHPDFPLFQALPGAGPVFAPRLLVAFGEQRERYASAADLQKYAGIAPVTERSGKKAWVHWRFQCPKFLRQTFVEWAAESMRYSFWAQVYYQQQRDKGKAHQAAVRALAFKWIRILYRCWQERTPYNESVYLQALHRRGSSLIHNLAKAS

SEQ ID NO: 344019 - protein, 315 aa, unidentified
MLGIDVSKDTLACTLFNPQTQKALWSRIVPNTSAGVTRLLKQTPDDSPWALEPTGRYSLLAATRAHDAGRSVLLAQPKKARDFLRSIQSRAKTDGLDSHGIGLFALCRPLPAYPLKSRAVEHLDQLLSVRKSLSASLASFRLQARELEHAAHILEPVIAALQTRKADVDQQIAHLTVTHQEFSIAAELEKVPGIGTVIAATLASRLTGHTFGHSDAFVAYCGLDIGVRQSGKKNGQTGLTKQGDGELRRLLYLAAQSNLRSKNSPFKAQYDRERAKGLSSTAALCAVARKLARLAWSLHKHGTSYDPSRVHQQNQ

SEQ ID NO: 344020 - protein, 412 aa, unidentified
MQDILTCAMGLDVHRDIIVACLVKGAVDAEPEAETRTFSTLIPEMQKLRDWVIESECRNITMESTGIYWQPIYEMLESCFDGEISILVVNARHMKNVPGRKTDMKDAQWIATLLRAGLLKGSFIPDKAFRELRHLTRYRKSVVHDITAQKNRIDKFLQSSGFRFTAFLSDTFGASGRNIIRHLIEHGSIDREALDKCLKTKTRNRIDEILVALNGSLSEHQRRFLNMVFRHLEDLEVHKHTVEDEITEEALKHTDALNLLCSIPGIDVTAAAAIIAEIGTDMSSFPDSQHICSWAGLSPGNNESAGKRKSVHINKGNPYLKSMLCEVAWIMASHRKLYLSGWYWKVKQRKGAKRATIALARKILSTIYTMLKTGTPYNEECFEQRRLRCERKRANRLVNELQKLGYVVVAPD

SEQ ID NO: 344021 - protein, 470 aa, unidentified
MTPRYHNQGCRPSARARLRVTHPHAAGIDVHATVHWVAVPAQDAPAPPPDHPPNLPPHVRSFGACTADLIALADWLTICRIRTVVMESTGIYWIPLFELLESRGFAVLLVEPRQSRHAPGRPKSDVLDCQWLQRLHSYGLLSGSFRPAEQIVVLRSYLRQRQMLIRHAGQHVQHMQKAMEQMNVKLTEVVSDVSGVTGMAIIRAILKGERNPLELAKLRNDNCKRTQAEIARALYGNWRAEHLFALQQAVTLYDCYREQLRVCDEQMQKYLATFADRSQGRPGPRRHGRARRERRRNDPAFDVAGVLFRMSGVDLTVLEGIDPNTALVLMSEIGPDVSRFPTVKHFCSWLGLSPQHQLSAGKIRKRRVQRGASRAGRALRMAAQASHHAQNVLGAFYRRIQARAGAPKAIVATAHKLAERVYRLLKHGTEYVCQDLEAYEAAYRQRVVKVLARKAATLGYRLEPTTAPGT

SEQ ID NO: 344022 - protein, 335 aa, unidentified
MQIYGIDLAKEKFDVSFLRLSSKSNVVTPVHHVVRNTQNGIKAFLKGLPSDSVLVAEHTGVYGERLLKMCTEMNVKIAYVGGHVIHTYKSGPDRGKTDEQDCNVLRDFGERFTDKLVYTTFPEEDIYELRQLSRQRTMLVEERKRIMTADKTEDCRPYRSEAVKRSMQHIIDLLDEEIKDMERDMLTVIRKHDKISNSYDIITSVNGVGLVTAVELIVKTRNFTTITTAKQYSAYAGTAPYEKSSGKMNQGAHVSKWGNRRSKTLLYICAECARMHNKEMKLYYERRTIIDKKAHHYVLNAIANKLLRLIFSLINKNEKYNPCYIQRDPRSININ

SEQ ID NO: 344023 - protein, 339 aa, unidentified
MTVKTVGLDLAKDVFQVHGISENGRVIFNKAIKRAKLLAFFETLPPCTVGMEACGSSHHWGRQLRKLGHDVKLMPAGYVKPYVKRGKNDAVDAEAICEAVRRPTMRFVEIKTEEQQAILSLHRTRDLAVRQRTQLANMLRSLLREFGHILPIGIEAVTAFAKRHLAGDHPDMPEIANGMLGIQCYQFIGLNERIEGYSKMIEQHALLSADARRLMRMPGIGPITASAIVATIGDAKQFRTGRDLAAWLGLTPLNKSSGGKERLGKITKQGDRYIRKLLVVGMTSRAVMAKRAPEKVDLWTAKIIADKPFRLATTAMANKAARGIWAMLTKKQEYRQPAF

SEQ ID NO: 344024 - protein, 313 aa, unidentified
MKKTICGVDVSKAKLDACIEPGHRFASFDNDTAGIAKLAAFCREHTVALVVMEASGGYERQVFVGLWEERISCTLTNPRSVRRYAEAMGILEKTDRIDSCVIARFALAKNLVPTPLPSQAQQRLKALVTRLRQVTDDLTVQKQRRASTFDNVEMRASIDEVIALLKRQSRSLEGEIASMIDDDPLWAKLAETWRETKGVAGRTVARLHAELPEVGTVSNKAIAKLVGLAPIANDSGKRKGKRPTRGGRAGVRSILFLVAAIAARYDKSLGEFRDRLLKAGKEKMVIRIALARKLLVRLNAKARDARAAYANAT

SEQ ID NO: 344025 - protein, 448 aa, unidentified
MRTRKPPRPRKMKLPQHLRHINPHAAGIDVGSRSHFVAVPEGSCEQPVREFTSFTDDLHRMADWLIACGVTTVAMESTGIYWIPVFEVLESRGLEVRLVNARHVKNVPGRKSDVLDCQWLQRLHSYGLLEGAFRPAEQVCTLRAYVRQRMNLVRYASAHIQHMQKALAQMNLQLTNVVADISGVTGMRIIKAVLAGERDALVLARLRDPRCKNDESTIARSLQGNFRPEHLFSLKQAVDLYEFYQAQIAECDRQILDQLAGFDAADGSGSGPPASLEEALLRMSGVDLTRIDGIDTNSALKIIAEIGVDMSRWKSPKHFASWLGLCPGTKISGGKRLSAASKPVANRAAAALRMAAFTLLRSKSALGAYYRRQRSRLGAPKAITATAHKLARLVYSMLKHGTAYVDEGQKHYEERYRTHVVQNLKRKAKELGYALVETVEKQPQPETA

SEQ ID NO: 344026 - protein, 358 aa, unidentified
MVQRKEINFEGQNVYVGIDVHLKTWHVTIITESGYKQKHIQPSSAPALFEHLKKRYSKGNYQAVYESGFSGFATYYALAELGIKCMVIHAADVPTTQYENVMKTDSVDSEKLAKGLKAGVLRGIYIPRKEILDDRSLVRLRKTIQSQLGGYKSRVKHLLHTNGVSYPDCFTNRGTHWSRRFMDWLGNDAVLLSSSRNSLDMLLAQVANLRENLLKTTRMIRMLSKTERYATAYDHLIAMPGIGPITAMCMLTEIDDVNRFQNERQFASYFGLIPVCHNSGEKVSNGEKTFRGNKQIGPMIVESAWISVRRDKAMAAVFSEYCRRMESQKAIIRIARKLSNRIFMVLKTGKQYEYDKCY

SEQ ID NO: 344027 - protein, 342 aa, unidentified
MQITTIGLDIAKNVFQVHGIDAAEKVVVRKQLRRGQILGFFEALPRCLVGMEACATSHYWARELTKLGHQVRLMPAKDVKAYVKRNKNDAADAEAICEAVRRPTMRFVQIKSVEQQGQLMLHRARDLLMRQRTQLINALRAHMAELGIVAAQGREGVKELVKIIASEQDARLPVDAHTSLVVLAAGLQALQTMIGSIERRIIAQHRSDEASKRLRSIPGIGIVGATAIAATVPDPKVFRSGRDFAAWIGIVPREDSTGGKHKLGPISKRGDQYLRRILVVGAHAVLKRARHQPEKYPWVTRLLERKPFRVVAVAVANKMARVAWALLARGGSYRAPAFAAAA

SEQ ID NO: 344028 - protein, 333 aa, unidentified
MDPILGIDISKDEFHVALIPAEWPDGGKPKKPKQGRFDNTQAGFERLQAWLHRHGAPRVWACLEATSTYGDALAECLYDAGHPVSMVNPRLVRHYAKCELQRSKNDQLDAGVIARFCRSQRPYLWTPPAPELRQLRALSRRRQDLDGDCTREKNRLSVPGLDPTVRASIQEHLAHLQQQMADVQSQVEALLEQHEALRQRCELVQTIPGFAEKSSVIVVAELADVTRFETSRQVAAYAGVIPAERKSGKYKGQTRMSKCGNAALRKALYFPAVSAATVSHEPLFRTFYQRLLAKGKTKLAAIGAVMHKLLRIAAAILRSGKPFDPHHRPAAMP

SEQ ID NO: 344029 - protein, 310 aa, unidentified
MEQIYVGIDVAKDRLDVHVRPGGEAFAVARDGEGVANLVDRLRVLAPALIVSEATGGFEQVVAGSLASAGLPVVVVNPRQIRDFARALGRLAKTDRLDAEVIALFAERVRPELRPLADERARLLGELVARRRQVVEMITAEGNRARQLESRRLKKRIERHRLILQEELTEIEQELDTTIRGTPIWRESEDLLKSVPGVGNTLARSLIADLPELGTLDRKKIAALVGVAPFNRDSGTLRGRRAVWGGRSAIRATLYMAALVATRCNPVIRTFYRRLLAAGKPKKLALTACMRKLLTILNAILRDHTPWQSA

SEQ ID NO: 344030 - protein, 387 aa, unidentified
MAQVNDLSRSLTAFDPISTLVVVVEMSKASWLVSGAVPGVERQPLKKLEPDATALLRLIERWRNEAVRAGRPISRVALAYEAGRDGFWLARWLIARGIEAHVIHSASVAVSRERKRAKTDRLDAAMLMRVFLGWLRGERGHCGMVAIPTMEEEDARRPSRERECLVNERSRITNRMKSALARLGVRGFKPHLRKAPERLAGLRTAEGTGLPTNIIEEFRRDMARLALVRDQIRSIEKTRAERLERAPDTGPHAMVRLLARVIGIGIETADMLVREILSRKLRDRRAVARYAGLTGSPDESGLKRREKGLAKAGNARVRRGLIQLAWRFLIFQKDSALARWYRMRTEGPSGARKTTMIVALARKLLIALWRLVTTGEIPDGVVLRPAP

SEQ ID NO: 344031 - protein, 394 aa, unidentified
MKLVGIDVGKNSHHFCVMDKETGEFNVAPSSFSNNKEGFDFLINSLKPYSKKSILIGMEDTGHYHVALLKFLLSNGYTVALINPKTTDLTRKMEGGITKNDKLDTITICDVLDTPERKKQYRITKVDRFDLYEQRQLTRHHHNLKEELNVYCNRLQKSIDLVFPEFNTLFSSKYSIVYMNLLKTFGSAEAIASTDIRTIRKCFEVKGRGGRISLTPEKLKECAKNSIGISSEVETIQIKHLVNQITLIKEQIAEIDKKIEEFSIKNNSPILSIPGISHFSGTSILAELGDIGNYSKPSQIIKFAGVAPYHYESSQYNAQHTGITKKGSKYLRKTLYQIILTVINNNPVFKKYYRLKISQGKGHRCAQGHCIRKLLRIIYHLLETGQSFDPALLR

SEQ ID NO: 344032 - protein, 338 aa, unidentified
MKLYCGIDLHATNSVISIQDEQDNVRYEKRLPNDLGVIVTALQPFQEDLQGCVVESTYNWYWLVDGLAEAGFQVHLANTAAIPQYAGIKYTNDESDARHLAHLLRLGILPEGYIYPKQDRGLRDQLRRRLLLVRQRTMQNLSLQGMITRYTGRRLSGNQIRQLTDDKLIELLPDKSAALAGRVSLALIQTLDQAVDLLEREVQKKAGKRPGYQILITIPGIGQVLGLTILLETGTIERFPDAGHYASYARCVKSEKLSNGKYKGQGNRKNGNRYLAWAFMEAAHFATIWDPGIKRFYQRKLAKSHLMVAKKAVANKLARACYHMLKEHTKFDVTRAFG

SEQ ID NO: 344033 - protein, 369 aa, unidentified
MEKTTTYIGLDVHKDTIVVALAEMGVRGEVREYGKIANTPAAVKTLATKLASRHSALRFCYEAGPCGYGIQRQLASLGHECVVVAPSLIPRKPGERVKTDRRDAGKLAALHRAGELTPVWVPDQAHEAIRDLVRARQAAVRSVRRARQQLSGFLLRHGHHYQRAAWTKTHRRWLSGLKFDQPVYYIVLEDAIAAVEAATARRDRLEAQIEAALSEWSLAPVVQALQALRGMRLVAAATVVAELGDMTRFSNPRQLMAYLGLVPAEHSSGSTRRQGGITKAGNSAARRMLIEVAWSYRFPARLSRELLLRQEQLAKPIRDIAWKAQERLCRRYRKMARASKLSTVITTAIARELVGFVWAIARQVNLGAR

SEQ ID NO: 344034 - protein, 300 aa, unidentified
MSEGNPYSMIVIGIDPHKTTHTGTALDPATNSDVGSLRIEASLAEYQRLILWAKPWPERTWAIENADGLGHHLALWLLARGEVVLDIPTTATARVRELSRGGRRKNDRIDAAAAASVAALQGDARQVYPETTTDALALLDERRVNLSHSRTRAINQLHALLRELMAGGAPTSLTPAKATAALGGFRPRTGPDRTREDLAKELIADVRRFDKQIKANEAKIAVLLDEHGTTRREVDGVGSVLAARLLGRTGQATRFASAAAYANYTGTAPVQIASADSSRHRLSRYGDRQLNSAISRHRCA

SEQ ID NO: 344035 - protein, 382 aa, unidentified
MQASTVDTPTAGHCGTIFVAIELSQKTWLVTLHSPDRDRISHRTLEGGDSAGLLALLESVRTRAAGKPGMPPKVVTCYEAGYDGFWLHRLLTAAGITNLVFDPASIAVEQRSRRAKTDRIDGELLLRTLMAHLRGEPRVVRIVRVPSLEQEDVRRASRERDRLVKEQTGHTNRIKALLRLMGVAVSNPRRSDWLNWLAQQRNRQSRPVPPHLMSEVVREHARLMLVREQLAVLEQAPAAAVAPAPGPMAERRNLLLRLKGLGPVFAATLTNEVFYKDFRNRREVASYCGLTPSPWRSGGIDREQGISKAGNPRARLKAVELAWLWRRHQPDSALSRWFAARTANAGTRARRIAIIALARKLIVALWRYLTTGLVPEQAVMKV

SEQ ID NO: 344036 - protein, 400 aa, unidentified
MELSQCHTQKGDLMIYVGIDIAKLNHFASAISSEGEILLQPFKFTNDYDGFHLLIQKLDSLDSNNIIIGLESTAHYGNNLVEFLVKHNYKVCVINPIQTSTMRKNNIRKTKTDKVDTYIIAKTLMMNSHHFFSQHDLSIMHLKDLGRFRMKLIKKRTQGKIQLTSYVDQAFPELQYFFKSGIHQKSVYAVLKEAPSTTDIASMHLTHLSHLLKVSSHGHFKKDTATELRILAQKSVGCNDSSISTQITRIIQLIELLDSQVHDVESEMELIVNSLDSVIMTIPGIGFINGGMILGEIGDITRFSNPSKVLAFSGLDPTVYQSGNFNACHTKMSKRGSRPLLYALINAAHNVVRNNKTFKDYYDQKISEGKSHYNALGHCAGKLVRIIYKMLTDNVPFNLD

SEQ ID NO: 344037 - protein, 327 aa, unidentified
MTQYILGIDIAKESFDTALLGGAQSHQGHFSNDRSGFQKLARWLEKRDVSQAHVCLEATSRYWEEVAEFLYQAGHQVSVVNPKLIKHHAEATMQRNKTDKQDALTIADYCAKQKPALWTPPPESYRHLQTLVRHVEALKDDRQRARNRRSTGVHAPEVLAAITHQIAFLDEQIATLEQQIQDHIDQDPDLKEKQTLLLSIPGVGEGISTTFLAEVHAVSQFAQATQLVAFAGLTPGERQSGSSLHAPGRLVKWGNAHLRAILYMPALSAHRYNPIIAAFRQRLQERGKSKMTIVIAVMRKLLTLCYGVLKTGKPFDPHHYSQTTACA

SEQ ID NO: 344038 - protein, 336 aa, unidentified
MKKMNAVKQTEVVVNAAPGAEKNQTSLVLGIDVSKEWIDACLLPSEQTWHVATDDASLKNWAKELPDDITLVVMEATGGLETPVAAAVAERGFPVAVVNPRPVRDFAKALNLLAKTDKLDARVIALFAQAIRPEARPLPDEKQQEFNELLARRRQLVEMLASEKNREKQARCKKVKASVQASIAWLQSQIKDVDRELTELIHANPVWHEREKLLRTMPGVGEGTARTLLAELSELGQLTRREVAALVGLAPFVHQSGKWRGKSFCTGGRRAIRRILFMAATTARQHNPVIQAFYERLRAQQKPYKVAMAACMRKMLVTLNTMVKNNEPWQLVQKNA

SEQ ID NO: 344039 - protein, 523 aa, unidentified
MVTKTRKRKFAGSKKRFVGKPTGQIQERVQAVGPEHFGIVAVDCAKRRSKWMLCNFYGKVIIEPTSALHTTGGLRGMTQHVAAVCQAEELTDTIVAVEMTGIYHKPVQRTFRKAGFDTRIVHPFASNHYRRPLHPDAKTDDHDLEAIFHAAVKGYGLAILPVGEIYQSLQAVSRHRHNLVKQRARLMVQIRRLLHQTMPGFADLFEDDKLFHKSIALPIALKFSSAARVRRAGAGGIASHLSQTKVRFQVRTIERIVAWASSAAEPSELAVLHTRQWQQLDEVRRLLEEQIAGTEREMAGFLVKTPYVLLLSVTGINVVSAARLAGEAGPIEHYASARAINGRAGLYPSRYQSDEVDHADGALVRQCNRQLRGAAMMVAENLIKCHPYYRGLSALWMHEKVDTRDRRCRIANRAMRMVYQLVGGRQLWRGKGVDREYLLAKLQEFHRVHGTPLDQAIRDLHEAFAWLPKSAYAEEAKPLAELARKKRRGLQRIGDLMIPLLIRLGVPLEKKVESPTSEARSSD

SEQ ID NO: 344040 - protein, 408 aa, unidentified
MTTYRFYVGIDWATEEHRVVVLDAERRVLHERRVRHEAVALETFAQWLADQAGGGGSEVAVGLELTRGAIIDVLLARGFHVFALNPKQLDRFRDRFTVAGAKDDRRDAHVAADALATDPWAFRRLAPEHPLLLELRELSRLEDDLQQERERLTNRLREQLHRYYPQLLELVPAADEPWLWALLERAPTPAAAQALPRATVQRLLQRHHIRRLTADAVLVALRRPALPVAPGTVQAAQRHVAVLLPRLRLVHEQHRDCGVHVEGVLKRLAENPEHRDVPILRSVVGVGRHVAATMLAEASRLLAERDYHALRAQMGVAPVTRQSGRRALVAMRYACNPRLRNAAHYWGQSAVVHDAPSRAHYARLRARGHSHARAIRGVIDRLLRVLIAMLTTQTVYDPSRRRPLEIPA

SEQ ID NO: 344041 - protein, 352 aa, unidentified
MTKYEELREKVKRLFVGIDLHRQQWHVTIVAESEIVFSGSIPGTWEALRQLLDRYRGIAMTAVYEAGYFGYWLHDRLVEYGVDCIVTPPSLIPQEYGNRVKTDRRDSRKLAWFLSKGLLKSVWVPSLDQRYHRQVLRRRQQLVQERIRVQNRIKAELRFHGIEIPGNETTWSRLYLNNLRNYQWSDRWMQESFQRLLDQYRDLQEQIAQQTKLLRELAESEPYQDSVMLLTKIPSIGVIGAMSLLLELFDVSRFRHAEHIAAYVGLTPSQYSSADHIRMGRITGVGKNALRALLVEASWTLIRKDPAMAKIYDRIKVRAGAKRAIVAVARHLVIRIRRILLDRTPYQVDFSM

SEQ ID NO: 344042 - protein, 409 aa, unidentified
MEVVHEVCCGLDVHKKSVTACVLWASGRRKQIREFGTFTRDLLELADWLRSCGVTHAAMESTGVYWKPVWNLLEGQFEVLLVNAQHIKAVPGRKTDQKDSEWIADLLQHGLLRASFVPPTPTRELRDLTRYRASLAQEINRIANRIQKVLEDANIKLASVATDTLGASGRAMLEAIIKGEQDRQRLAEMSQGKLRNKIPELQQALEGRVTAHHRFLLRELLDHLYFVESKMRRIEQEIAERLGPFQSEVARLCTIPGVDRVTAWGLVAEIGLNMAQFPDAQHLASWAGLCPGNHESAGKRKSGKIRKGSLWLRRCLCQGAWAVSMQKNNYLSALYRRLAARRGSKRATIAVAHNLLVIAYYILRDKVCYRDLGPDYFDRLNPEGLRRRLTKRLEGLGFKVTLEPLAQVA

SEQ ID NO: 344043 - protein, 345 aa, unidentified
MEPMYYIGLDVHKQKISYCVKDSSGKIYAEGWIPATRFDLDRWMKRLPQPWSAAMEATMFSGWIYDHLKPHAAALKVAHPLMLRAIAAAKKKNDRIDANKICDCLRCDFLPECYMAPTEIRERRRTLRYRNLLVRQMVQMKIKISTLLMEAGVSYNKQKLHKAGYFRELLATNPDINEGLRPLLRLCRETVIRLSKTESALVRSLACDPLLLRRVERLMSIPAIGPITALTWTLEIGEVQRFSSIKKAISYCGLCGDEQRSANSAQRTPLSKQRNKHLQTTLIEAAKMAPRYSPTLALLYDREKQKGNANRATLAVARKLVAYLMAVDRGQGHFLVIDQETRTAA

SEQ ID NO: 344044 - protein, 338 aa, unidentified
MTSFVGVDLHRNNFTYCIRVNGEERKIGKCEIAELKGFAAMLGKNTAMAVEATGNTFMFCRSLKAHVGRLVVVNPSQFKIISMSTKKTDKHDAKVLAEFLEKDMLPEVRVKDDLQAKISSLTQTREKLVQLRTVLKNKVNNLLAANFIILKREELSTEKGLLKALSYHLDPITDTEMLVVVEQIRSLNKSIEKLDKAIEDHGSKMDGFDNLKSIKGIGSKGAAILLATIGNIHDFRSSKHLAAYIGIVPRVSNSNDTVCHGRITKNGSKIARTALVQCGLIAKRYNPYLNAFHESVKSRRGGAKANIALARKFLDIVYRTLKNNWMFEDFTQFKLVKN

SEQ ID NO: 344045 - protein, 423 aa, unidentified
MKPQSNPSFTACVGIDWADKKHDFCLQAAGSDQRVFGTIDHSPESIMQWVCSLHDRFGGPIAICLELAKGPLVYVLQRYDFIVIFPVHPSTLAKYRDAFVPSHAKDDPTDAEMALDIMLRHPDKLQPLKLQSVAMRTLTALVEERRDLIDSIVGLTNRLTSTLKQYYPQALDWFEHRDTLIFCDFLSHWPTLKHVKRARRSTLESFFREHKANRTYLVEERIQGIRDATALTEDESVIRPNQMAVQAMVEQLRVLLQAIGRFDAEIDAVGKTMPDYGLFAALPGAGHILAPRLLVAFGEDRDRYTNAAQIQSYSGVAPVVERSGNKCWVHWRIACPTFLRQTFVEWAGSTIPRSYWAEAYYRQQRAKGCSHRVAVRALAFKWIRIVYRCWKTRTPYDESVYLKSLKRRGSPLLASVAEAAIMT

SEQ ID NO: 344046 - protein, 431 aa, unidentified
MPFAALDLHKKVVEAIVVDDLGHTLLRERFPATRAALLQFAHAHLGPDTILALEATTNTWAVVSLLQPLVAQIVPSNPLRTRAIAEARIKTDKVDAEVLVHLLRTDFLPRVWIPDPLTQALRHRTTERANLVADRTRLKNRIHAVLHQRLIEAPTGDLFSRANLRWLAALDLDPDGQATLQRHFRQLAHIEAELDLLTTQMAVESHSNPHIKLLMSIPGVDFTVAETLLATLGDFTRFPSGEKAAAYLGLVPSTHQSGEHSYHGPITKQGRGHARWMMVQAAQHIGQNPGPLGVFFRRLARKKNRNVAVVATARKLVVIAWHLLKNNEPYRYAQPRATQAKYSRLRVRATATRKKGGNAKGQPRPQSYGSGQPTRAIPSLDQIYASEQIPPLGPQAPGELKMLEAYGLVVYAGKLRKAHRIPKKSTKPNPE

SEQ ID NO: 344047 - protein, 459 aa, unidentified
MPEKKVTRKSRKRQAHLLKAVQPDAAGIDLGSREHWVAGPPRPDGSPNVERFGTTTAELLRLCQWLKQQQVTTVAMESTGVYWIPLFEILDSRGFEVHLVNARQISHVPGRKTDMLDCQWLQLLHSCGLLRGSFRPGDEICRLRALIRERHSVVEQRSDWVRRMQKSLDQMNVCVHHAVSDITGVTGMAIVHAIVDGERDPRVLAHLRDRRCLKSEEQIVAELTGNWRPEHLFNLGQALKIYDHLNGVISDYDTEILRCIDSLQPAVCEDSSAPPPASKAKASKISQRGQEPLRQGLYRMSGFDLTTIDGIGVDTAAVILSELGPDLSAFADEGRFVSYLRLAPNLSISAGKKVPGKFKAVTSTRVSNALRMAATTLRTSKTALGAYYRRISWRKGASVAVFSTARKLAQLVYRLIRFGQTYVDEGAKAYETRFTQRRLSSYARALNELGYKIEPLTAQ

SEQ ID NO: 344048 - protein, 347 aa, unidentified
MRFYTKQHKHYCGIDLHARTMYVCIMNQAGEVLLHKDFRANPDAFLKAVAKYREDLVVSVECIFTWYWLADLCRRENIHFVLGHALYMKAIHGGKAKNDRIDPHKIAVLLRGGNVPQAYVYPPEMRATRDLLRRRLHFTRKRAELLAHIENTNSQYNLPAFQKKLTYPSNRGEASGRFTDLVVQRNIDVDLGLIAYYDQMLRDLENFILRTAKNHDANTLYRLRTVPGIGKILSLVILYEIHDLSRFKRPQELASYSRLVRCSRESAGKVSGAGGKKIGNVHLKWAFSEAAVGFLRKNEEGKKFYSRLVQKHGKGKALTVLAHKLARAVYHIWKHDTVFDQERFLTH

SEQ ID NO: 344049 - protein, 362 aa, unidentified
MRIIGCDLHARQQTLAMLDTTTGEVVEATVEHEGDNVREFYCSLPGPVRVGIEATGSMQWFLNLMEELGIECLVGHPAEIRAAEPRKQKHDRRDADLILKLLVENRFPAIWLPSKELQDLRSLLRHRHQWVRMRTRIQNALQSIALANGLRRGTALWSQDGQSKIASLPLAFHTAYRRSELQAMYEKFEAEIEKLNQRVEEQASGRAGARLLMTHPGVGPVTALATEVFLGDPARFADSKALASYVGMIPREYSSGGRQRLGGLSKQGNPLLRFLWGEAGAHAVRKDPELQRFYRRKLVQKGLGKASVAVARKLGIRLWIMLRDQIEYNEFCRRGQKQQKSSEACAGMPETRNGAKSHRPVD

SEQ ID NO: 344050 - protein, 356 aa, unidentified
MLNKSSKKTDFTGHNVYVGLDVHGDSWAVNILVDEIEHRRFTQSPDPIVLYNYLCRNFPGANYYSAYECGFCGYHHHRKLHELGIHNIVINPADLPVTDKEKTNKRDPMDSRRISRALQSNQLKGIHVFDPDHEQFRTLNRMRWRAAKENRRVKNRIRSFLYYYGIIPPEELNPEYWTIAFLNWLKQLKLPNESGTLALEYLLNAYQNTKVQVLQVTKHLRHQVKLHYSDIYKRLITVPGIGPINAMSLIAEIGDMSRFKSCKHLASFVGLVPRSHQSGSKDPNCSLTYRSNKFLRSALVESAWMALRYDPALLKYYKERIVRHKTQVVITKIAHKLLNRIRNVWLNENTYQVGLS

SEQ ID NO: 344051 - protein, 385 aa, unidentified
MQKLNDLSRSLAPFKPDGTLIAVIEMSQSSWLVAGIVPGVERQPLKKLAVDEIALLKLLHRWREEAEKAGRKIERTAVAFEAGRDGFWLARWLRTHGIEAHVIHASSVAVSREHRRAKTDRLDTELLKRAFIGWLRGERDHCKMVAIPTSKDEDAKRPNRERESLVGEQTRIINRMKAALSRLGIRGFNPKLKKAAGRLEDLRTPEGEPIPPNMLAELRRDMERRRLVSDQIRQIEEARVKRMAQAPDDGPHAMVRLIARVIGVGIETADMLVHEVLSRRLRDRRAVARYAGLTGAPDESGSKRREKGLAKAGNARVRGGMIQLAWRFLLFQKNSALAQWYRTRTAGAGKNRKTMIVALARKLLIALWRLVTIGEVPAGVVLRAA

SEQ ID NO: 344052 - protein, 353 aa, unidentified
MRFYKPAPPDAHRFYCGIDLHARTLYLCVLDQTGKKVLHKEVPSEPAALLEALAPFRQGLVIAAECMFAWYWLADLCAREGIVFVLGHALYMKAIHGAKAKNDRIDSEKIANLLRGGNLPQAYVYPHGLRETRDLLRRRMFLVHQRAELITHIQTTNAQYNLPPFGQKLIYAKNRQALKIAERFADPSVRKSIEVNLALVDRYEELIGDLELHLQRTVKVDDVNTYYRLQSIPGVGPILALVLLYEIHDVRRFATVGDFISYARLVRPDHESAGKKCGFGKKKIGNAHLRWALGEAATLMLRESDQAKRFVARLEKQRGKGKALGILAAKLGRAVYWMLRRQEAFDVKRFWRM

SEQ ID NO: 344053 - protein, 453 aa, unidentified
MATRPKTIALKEADPTMGLPLLHQHAAGIDVGSAEHWVAVPPGCDPEPVRSFGSFTADLHRLADWLAACGVKTVAMESTGIYWIALFQVLEARGFAVHLVDARRAKSLPGRKSDLLDCQWLQKLHTFGLLNRCFRPTEEVCVLRSYLRQRENLVAAATISIQHMQKALAEMNVQLTNVISDLSGTTGLAIIRAILQGERDPNRLAELRDCRIQASQEEIAQSLVGSWREELLFVLRQALELYEVYQQKIAACDAQVEAHLKGLPSKTAEEAPLPPPKRHQKPRKSAPQFDLRGQLYRVSGVDLTGIDGINVLTAQTLLSEIGLDMSAWPTEKHFASWLGLCPDHRISGGKILKRGTRQVINRAATAFRLAASTLRNSKSALGANFRRLRSRLGAPKAITAMAHKLARLVYRMLKYGKEYVDKGMEHYEARYREQQIKWLTKQAQELKLQLIPA

SEQ ID NO: 344054 - protein, 370 aa, unidentified
MNEDSVVYVGVDAAKAKHAVAIAESGRGGEVRYVGEIETTPAAVERFVRKLARKYPRLHFCYEAGPTGYGLHRQLVALGHACEVVAPSLIPKRPGEHVKTNRRDATSLARLLRAGELKGIWVPDAVHEAVRDLVRAREAAGEDLRKKRQQLQSFLLRHGRTFTGRKAWSPAHSRWLAAQRFEHPAQQIVFQDQVDVIADASKRLERLDAQLAELVPTWSMAPVVAAYQALRGVSFVVAVTFVSEVGDVRRFDNPRQLMAFLGLVPSERSTGESVRRGGLTLAGNRRARRVLVEGAWSYRHPARVTETILVRLEGLPKEVREIAWKAQTRLCARYRRMMAAGKKAPIVIAAIAREMAAFLWAIGRQVEPVR

SEQ ID NO: 344055 - protein, 411 aa, unidentified
MHNRQNYMYVGVALHKEHHTAVIINCWQEKLGEIQFDNKPSAFSEFLLEVETYVSNDLSVVFGLEDVGGYGRALAKYLVDHEQVVKEVNPALSFLERKSQVMIQKNDSWDAECVARILVNKFNQLPDAKPNDLFWSIQQLVSRRNALVKAQSALKNQLHIQLNHHYPSYKKFFSELDGKTALAFWQQYPSPSCLEGTNIKRLTAFLLDVSNNTCSVKKASDILKLVKEDGQTMKEYQEMRNFLVRSIVREIEFKKKEMKYIERELKQLVKLLDYQLETMPGIELVTASALIAEIGDVRRFPNANKLARFAGIAPVYFGSGGKGKTHKSKQGNRALHALFYNLAVQQVQVAKGSKLPRNPVFHAYYQKKLKEGKTKGQALVCIMRRLVNIVYGMMKYKTAYELPIVEEKEVV

SEQ ID NO: 344056 - protein, 349 aa, unidentified
MKIIGCDFHPGYQQIAMLDKSTGEVTEKRLSHSEQGAEAKKFYLGLAGPVRVGLEASGQSQWFERLLAERGHELWIGDAAKIRASTERKQKTDRRDANLLLELLDQERFPRIWVPTPAERDTRQLLLHRAKLVRVRTQVKNQLQALALNQGVQRKWKLWTAVGRKQLENLPLLPWASRRRAELLKLLDELEGSITALDGAVLEEANARPAVRRLMTHPGVGPVTALAFTLTLGPAERFRRGKQVASYFGLIPSEHSSGGKQRLGHISKQGSSFVRGLLVEAAQSAVRHEPQLRREYQRLAQRRCRALAKVAIARKLAVRLYWMLREEVDYAQLLQGSYAGPPESSRGRG

SEQ ID NO: 344057 - protein, 346 aa, unidentified
MMLIGCDFHPSWQQVSWLDVETGGTGEQKLVHARGEAKQFYEQLAAPVLIGMEATGNSQWFIELVEDLGHEIWIGDAAQIRASYVRKQKTDKRDAAHILKLLVEGRFPRLWTPDREQRDLRQLVLHRHKLVMIRSRVKNELQHLSLNKGMQRKRRLWSQAGQQLLRELPLKKWAACRREDLLGLLTMLDEQIGKLDGAVQHAAEENPQSKLLMTQPGVGPNTALAFVLTIGDVGRFPRGKQVASYLGLIPREESSGGRQKLGAITKQGNRMLRSLLVEAAQVAVQHDPGLRKQYRHRCHQKPKAVAKVAVARKLAVRLYWMLRTNVAYPEIVRIESSSGLALVGAS

SEQ ID NO: 344058 - protein, 340 aa, unidentified
MIRFYVGVDLHRNNFTYCMRLKNGEEKMGKLAIRELKGFARMLGKHAAVAVEATGNTWMFCQEMKEKVGRLVVVNPTQFKVISRSTKKTDKHDARILAEYLEKDMLPEVRMKDGLQSKISSLTQTREKLVQLRTVLKNKINNLFASRFIELRREELSSEKGLLKVLACRFDPITDTELRVMVNEIRSLNKSIDELDRTIEENGSKMDGFDNLKSIKGIGSKGAATLLSVIGKIEDFRSAKQLAAYIGIVPRVSDSNDTSHHGRITKLGSKIARTILVQCSLVAKRYSPYLHRFHESVKSRRGGAKANIALARKFLEIIYKTLKNNWIFEDFTKFKLAENK

SEQ ID NO: 344059 - protein, 356 aa, unidentified
MDNVTTGVRCIRPLDFDVFVGMDVDKRSNAVTVQDGLGLGRSVKMQHSAEMLLSFMQNHYAGQRAAFVYEAGPTGFGLHDAISAAGYPCLVVAPSLVPSVRGKRVKTNRLDSVKLATLLRGGQLTGIRVPSTKYRELRELTALRNAQVDEVLLRNSLEFPEAPASSQWSRRVISSLRSMQCSTALRFKLDSLLDDLEWHQYSALRAQAALRGMLDGDTELSESMGYLMSIPGVGWIIASYTLARVGDWRLLGRSEEMGAFLGLVPSEDSTGEDTDRGSITKCGDPRLRSMLIQGAWTAIRKDPELRAFYDGIYRRHSRNTAARVAIVAVARKMAVRMHCVLRQRRAYQIRIHRTEE

SEQ ID NO: 344060 - protein, 364 aa, unidentified
MHSINNIELSSLEETRCQFNGGRCAIKLGIDVHQDFYVVVEQVEGSNPKPPQRFAKEAFLHWAARLKQKNSAEVYAVYEACGFGFSLQRKLSALSINCYVVCPQKLDEQNRRVKTDGLDAKALCLKLDRFVQGNRHALAIVRVPTEEHEQLRAIHRQREQLVKARKQLEAQGRSLMVNHGVEPVQNWWKPRTFAALPAPQWMKELLANSQPILGALQQKISALTVQLQNAASPDQPRGLGKMTSVVIDREIGDWNRFNNRRQIASYTGLCPGEYSSGNTRLQSSVTKHGNPRLRAALVELAWRLVRFQRDYKAVRKWRQVLAKGALATGAARKKAIVAVARQLAVDLWRIKTGRLSAEELGLIN

SEQ ID NO: 344061 - protein, 343 aa, unidentified
MKHYAGLDVSVKETSVCIVDETGKICREIKVVSHPEDLLQLLQDSAWRLERVGLEAGPLSQWLFEGLASAGLPVVCIETRHAKAFLKAQINKSDRNDARGIAQMMRVNLFRPVHVKTLSSQKRRALLTARKLLQEKALAVENDIRGLLRNFGLKVGAVGTVRFEVRIHELLESMPDLIEVIQPLLQARRELREHFATLHRKLLALVRHDEVCRRLMTVPGVGPVVSLAFVATIDTPARFRRSKAVGPALGLTPVLDQSGESRRVGRISLCGDAMLRTLLFEAAQIILTRASRWSWLKAWAMKVAQRRGRGKAVIALARRLATILHRIWCDGTEFRWTREAQAM

SEQ ID NO: 344062 - protein, 413 aa, unidentified
MSYRIAGIDVHKKMLAVVVADVSKEGEWQFERRKFGTMPAELDRLHEWLTALEVKEVVMESTAQYWKPVWARLEREFHLELAQAQSNRGPRGRKSDFADAERLVRRYAADELTLSFVPGPEQRLWRRLSRGKQELAGEKVRLQNRLEALLEEMHIKLSSLVSDLLGVSGRKMLKAVAEGETDAMKLAALADVNLRATPDELRDAFRAAATLDGRYRLVLQQYLDRLALIERHMEELEKELARSLKEHEGAVTRLAQVPGLGVDSAQQIIAEVGPKAERFPSAGQLSSWVGTCPGKEESAEQSKSNRSPKGNRPMRRILNQAANAAAKSQGTVFEALYKRIKGRDPKQHNKAVWAVANHQSRVIWKILHDGVNYEERGNRTNIRAMKHRARRLARELRQLGYIVQPPPLQKAPA

SEQ ID NO: 344063 - protein, 349 aa, unidentified
MRHFQPPANTRFYGGVDLHARSLFLAILDHDGQERFARNLPAAPEPFLRAVQPFREGLVVGCECMHCWYWLADTCREHAIAFVLGHAWAMKAVHGSKTKCDRHDAQAIARLLRGGNFPLAYAYPKERRGLRDLLRARLRLVRQRAELYGHVHTARRQANLPPVSSDVKYKSKRAGLTTDITDPFVRRRVETHLALLEPLDVTIRRLEAEIEDAAREIFPTELAVLQSTPGVGPVLSLTILLEIDTIDRFETRQQFCSYARLCGAVQESAGQRTGAGNRKAGNAWLKWAFSEAAVLSAQKDERIGRLLERLASKLGKAKALSALAHKLGRAFYHVLHTKEVFDVNRFVRR

SEQ ID NO: 344064 - protein, 373 aa, unidentified
MKEDSVIFIGLDTSKLKISVAIADGSRNGEVRFFGDISSEPAPVASMVSKLSKRGAKLHFCYEAGPTGYGLYRKIVELGHDCVVVAPLLVPKRAGDRVKTNRRDAMSLARLHRAGELTAVWVPDEGGHEAIRDLVRAREAASDALKQARQQLQSFLLRHGRIYAGREPWTRAHRRWLTCQAFDHPAHQILLAEYCQAVADASVRLDRLTKLVVETAASWSMAPVVAAYQAMRGVAFMTAVTFVVEIGDVRRFDNPRQLMAYLGLVPSESSTGERVKRGGITKAGNTRARRVLIEGAWTYRFPARVSPKIQARLDDLPRTVREIAWKAQVRLCARYRKLIAAGKPKVVAVTAIAREMAAFLWAIGQEVAPTAKG

SEQ ID NO: 344065 - protein, 376 aa, unidentified
MSHSSTLFIGMDVHKDSIAVAYVAQDHGAEVTYLGTFGTRQCDIDHLIRKMPSKAKHLIFVYEAGPCGSWLSRYLSKKGYDCWVVAPSLIPKKPGDRVKTDRRDAAQWARLARSGDLTAVYVPKVEDEAIRDLTRAREDAISDLKDAKLRLKAFLLRHDIRDTGRANWGAAHLRWLSEVVCPTPAQPIVFQAYVRAVNEHRERLQRLEQELQDHVNAWRLYPVVEALQALRGVPCTVAVTLVAEMGDLTRFESPRELMKFMGLIPSEYSSGEPRRQGAITKAGNTHARRVLVEGAWAYRYPAKISRHLHLRLAHQPKVIQDIRWKAHVRLCQRYRRLVARGTHAHVVTVAIARELTGFMWAIAKEVPVIASDQDGS

SEQ ID NO: 344066 - protein, 342 aa, unidentified
MFHIGVDVHLKSSAVCILDENGRRFKRFSHHGDPRSLVTRLGEEIDQPFQICFEASCGGGTLHDLLRPIARRVVVAHPGHLRLIFRSKKKNDRVDAEKLAKLLFLDEVPCVHVPDLNVRAWREMVGTRSQAVAKRTRAKNGLRALLRSCLIRSPRGLWTQEGRRWLADIELPTAPTRLRRDLLLAEIEHFDGQIERLEEELDRIARRHPGVTLLKTIPGVGPRTAEAFCAFVDDPKRFGAKQIGRYFGLTPSQDQSGATNRLGHITREGPAVVRRLLAEAAWRSTRLSPRVKAFFDRVRREDSDRRKIAVVATAHYLARVMLAMLQSGEVWREEVAPGTKAA

SEQ ID NO: 344067 - protein, 358 aa, unidentified
MPMLAELVDGVIGVDTHRDTLAAAALSSVGGVLAQTAVRADAAGYQTLLGFADTYLPGRRCWAVEGAGSYGAGLAARLRSAGEQLVEAGRPKRPPRRTGAKTDAIDAVRAARDALGQPPQQLAAVRQRGDHQALRVLLTTRHTALAARVAAVNQLKALLVSAPEELRAQLRGLPTRRQVAVCAALRDRPAKSLEHRMTVRALRCTARRVQALQAEADELLTELERLVAAIAPWLLELFGVGPISAAQLLVSWSHAGRFRSEAAFAALAGTSPIPACSGQVVRHRLNRGGDRQLNQALHTIALVRLRDDPETRAYAARRTAEGKSSREIKRCLKRIIARQLFRLLERYNQPGVEVLRAA

SEQ ID NO: 344068 - protein, 374 aa, unidentified
MSDCTTYIAMDTHKKEHKVALHYPGDEQIVRFVVKNTARDIKKMVTRVTRQAPADVVFCYEAGVCGFTLKRRIEVLGCKCAVIAPSLTPIKPGDRVKTDRRDATKLLAMLMAGLLTEVHAPDQKQEAARELTRCRQAAQENLKRLRHQLLKFLTRHGYVYTDGEHWTQKHLRWLRSLEFEQPLLRDVFDSYFTEMQHCIQRLDSLDKQVEQLAQSEPYKETVGLLRCFHGIDTLTAIGIITEIFDFGRFSSPGELMSYLGLTPSESSSGEKQHKGPITKTGNKRVRRLLIEAAWHYRHPYIARSKVLRQRRKDQPQWVIDIADRAGQRLRKRYWHLINSGKIPCKATVAIARELAGFIWSVFREYQIRNQEKAA

SEQ ID NO: 344069 - protein, 447 aa, unidentified
MEQRQAIGIDPDSNGFKCIYMKEGDKKLIKKYFHVDKVELQMFIEWIEKLSDIIIAIEGSNGQSRPIEKVLRENKIVFYSFKPSAVTKYRRVVLGENKNNDRDAEATASLALSLAAQDRLDNYKRIWFPETGLQLLTRNHAKKTRNKTATINSLWKLIRIASPDLYLLLKGKEKGSEEGKKSKLDNDNLLKLFSLRPDFSEWKNLSEEEIFEAMGGKRLRGVMEKVEKIKKMSQNISPIDSSISVLIKSEASQILFLKQELKTISTELKKKAANNKAIQNLTDIKGFGVNTSSKIIAELVDIRRFLSDDNLASYSGFGRKTNDTGDTKNEKKNYLFNRRLKDAFVTAAKNFVRFNPDHHLSGYCRYLVNKKKMEKTESYKRVARSLVRVVFKRLYGLLKISDPIEVLKKKEGGMANGKTRNTNVLSNIPPSRKINVNDNVGRCQIKK

SEQ ID NO: 344070 - protein, 405 aa, unidentified
MAVIIGIDPHKGSHTAVAIDEAETALGELRIRSGATQLERLLEWAGRFPERTFAVEGAGGLGYLLAQQLVSVGERVLDVQPKLAARVRLLATGDTNKNDPNDARSVAIAALRSPAVRVVHPEDHAQVMKVWAKRQRNLGSARTQVVCRLHAVLCELTPGGVSGQLHAPRTARLLEELEPEGAVASARHELALDLLEDLRRIDEQMSETKKRIAAAVTASKTTLTEIFGVGPIVAATVIGDVVEVSRFANRDHFASYNGTAPIEVSSGPRKVYRLSRRGNRRINHAIHMAAVTQVRHPTSEGRAYYDRKLAEGKTGKEALRSLKRRISDAIFARLQVDAHQLERFVDVGSGGQEGNDSVASATGSHPEHRLFGTATPEPDVTLKRPAAPRRRNTTSTSPKKERRAS

SEQ ID NO: 344071 - protein, 352 aa, unidentified
MRIIGCDLHARQQTLAVLDTATGEVMEKTLTHSGSNVQEFYAALPGPVRVGIEATGTMQWFLSLMEDLGIECQVGHPAKIRAAEPRKQKHDRRDADLILQLLVENRFPSIWRPSKELVDLRALLLHRHQWVRMRTRIQNALQTIALANGLRRGPSLWSHEGQSTIASLPLAPHTAHRRSELQAMYAKFETDIEELNQQVEEQACERLGATLLMTHPGVGPITALATDVFLGDPKRFADGKALASYVGIIPSEYSSGGRQRLGGLSKQGNPLLRFLWCEAAAHAVRRDPELQRFYRRKLVQKGLGKAKVAAARKLGIRLWIMLRDQIDYHEFCRRGQMQQRCGDACAGMPGTR

SEQ ID NO: 344072 - protein, 368 aa, unidentified
MNQSSTETIWVGLDVHESSITAAVLGDREASPLVRRLPADINAVRRFFRTLSQRGVPRACYEASGAGFVLQRRLTDDGFSCEVIAPSLIPRKPGERRKTDRLDAIALVRHYRSGELTPVAIPDAHQEAVRQLLRTRYSAQSQIADLKRRLVGVMACQGHHFTAGGSHWTQKHRAWLDQLRKQLSGPLQTVLAIGLEQLEYLETQQRALDAEIERLAACPPWRAGAEALRCFRGIQTLTAMTLLTEIGDIHRFRSPRGLMAYTGLVPTEHSSGNRQQRGSISKSGNAHLRRVLVESAWHYHHRSGAHLILERRRLGQNPEVVAIAVKAQHRLQKRFWRLRQVKHNNQAVTAVARELCGFVWAALMAVDR

SEQ ID NO: 344073 - protein, 343 aa, unidentified
MKITRVGVDLAKNVYQLHGVDRHGKAVWKRRLRRGQWLQALIDKVEPGCEIGMEACTGAHHWARELQSRGYTARLIAPQFVKPYVKSNKNDANDAEAICEAMSRPHMRFVTVKSVEQQDIQATHRVRTELKDHRNAKANQIRGLVAEYGLVAPQTLLALRRAIPEWLEDAENGLTDYFRSLLHGLWDDLLTLEDRLKELDKQIETLARSNEVTKRLQQLRGVGPIVATALVATVGDGTQYSKGRQMAAALGLTPRQYSSGDKHRLFGISKRGDVYLRTQMIHGARAVVSQAKHRDDPLSRWVTDIAKRRHPNVAAVALANKTARMAWAMLRNDTNYDPGLGAC

SEQ ID NO: 344074 - protein, 321 aa, unidentified
MNPAKVYIGIDVAKDWLDVAQRPGGEAWRVSSDETGIATLVKRLKGLGPALVLLEATGGLEIPAVAALAAAGLPAVVVNPRQVREFARATGRLAKTDAIDAQVLAQFGEALQPEVRPLPDTATQELASLVARRRQLIEMLTAEKNRLRMATKKVRRNIEAHIRWLERELLDLDDGLGEVIRSSPVWREQDNLLRSVPGVGPVLSSVLLADLPELGKLSRKEIAALVGVAPLNRDSGQFRGRRQVWGGRSQVRATLYMAALVASRYNPVIRAFYQRLQAAGKPKKVALTACMRKLLIVLNAMARHQTPWQTMDLTLDLKDSC

SEQ ID NO: 344075 - protein, 339 aa, unidentified
MNRTAVGVDIAKSVFQVHYVDPETGEIVNKPIKRAKFMEFFANRARCLIGMEACGGAQHWARQLMKMGHEIRLMPAEFVKAFNIRNKNDAADARAIWLAVQQPGKPVAVKTEMQQAMLALHRMRRQLVAFRTMQINGLRGLLTEYGEVMGRGRAALDKAIPEVLRRVAERLPAVVIDTLREQWNGLTKLDEQVACIERRMREWKKEDKAVKAISEIPGVGLLTATAAVAMMGDAKAFSSGREFAAWAGLVPKQTGSGGKVNLHGISRRGDTYLRTLLIHGARSVLTHAKDPGPWVEQMKKRRPLNVVIVALANKIARTIWAVLAHDRPYKTGYVSVKPA

SEQ ID NO: 344076 - protein, 378 aa, unidentified
MKKDTRFVGLDVHAETIAAAVVEPDGEVRFLGTIPNRPEAVRRLVKRLGAAKQLRACYEAGPTGYVLYWQLTGMGVHCDVIAPTLVPQKPGDRVKTDRRDAEKLAALYRGGHLTPVWVPDAAHEALRDLVRAREAAKSDQLRARHRLQKFLLRHGRRPPKGIKAWTQKHLDWVRREVHFEAPAQEAVLDDHLAEVEHARERIRRLEGMIDMAVEAAPAPMRAVIEALQGLRGIAKVSAATIVSEVGSLSRFRKPRQLMGYSGGVPREDSSGERVRRGSITKTGNAHLRRIVGEAAWSYRHRPTVRGELRKRQAGLSEEVKAISWKAQHRLYGRYRRLIGRGKTKQQAITAVARELLGFIWAIGVHVEQQHGTAARRAA

SEQ ID NO: 344077 - protein, 380 aa, unidentified
MDNSTGTVRKNDQETNFIGMDLHLDNVVVVVAQNEIKDNTVRSKTVLSKKFKTVGQPNIDELFKVLETYCQDKPHMAVVESTYNWYWLADEFEKRNWNLRLADPSTVSKAGFKYSDDYTDASYLAECVRNGSIRSTAIMPKDDRAVRDLARYRMTLVEDRGRLKTILVNMTANHLSIKLNADKLLKEIDEAVEKAASASDEGAADEVLSHYYDNRQVRTKMRSLLRRIRFLTNEVEALDEELTELIKPNVYATSLQSIKGCGYVTSMLIGLEIGDIGRFRTHKDFVSYCRLAPTSKLSNGKSKGLGNAKNGNAYLSWALTELATFVVRYNPEAKRVYDRYFNRSRLRVKAIRSVAAKIARGIFMMLKNGEVFDMKRCFGG

SEQ ID NO: 344078 - protein, 409 aa, unidentified
MERVIERCGGLDVHRDTVAACVRVPGAHGQREQHVRTFGTTTPELLVLRDWLEAHGVTHVAMESTGVYWKPVFYVLEEAFTCLLVNAAHIKQVPGRKTDVLDCIWIAQLLEHGLLRGSFVPPVPIRELRDLTRHRKGLIQERQRAANRLHKLLQDAGLKLASVATDILGVSGRAMLGALVEGTTDPAVLADLARGKLRKTLPALRQALAGRFRPHHAFLVGQVLTHVDYLDEAITTVSEEIEARLAPFEAHLTRLDTAHGIARRTAEVILAEIGVDMSVFPSEHHLASWAGMCPGNNESAGKHKSGKTRKGGRWLRTALVEAAAAAIRTKDSALGARYRRVMRHRGHKKAVVAVAHAMLRAVYHILADGTPYRDPGPNYYDRRHAQRVTRRAIELLERQGYRVVLEPAA

SEQ ID NO: 344079 - protein, 355 aa, unidentified
MQSNKISFKGQNIYVGIDVHLKTWHVTTLTESGCKYSFAQHADAKELFDRLNKKFPEAHFKSAYETGFCGFSVHYALTAQGFENIVVNPADIPTTGKEKAMKTDAVDSEKIAWSLKRGELTGIYIKDKRYMDDTNLMRLRQRFIRDLSRQKNRTKHLLYTQGVVYPERFSKKGTHWSRNFIKWLREDVELLSEEKRTLMLLCNQVEHIRKDILAITREIRRLSTTDRYKENFSLLSSVPGFGLITSMSMLTELDNNPIRFPNERKFVAILGLIPTCHDSGEKKSNGAKTFRGNKQIGPLIVEASWVAIHRDYQLGCYYTNCCQSMNPQKAIVKVARKLACKAYAVMKTKKAYVLS

SEQ ID NO: 344080 - protein, 344 aa, unidentified
MEHFAGLDVSVKETSVCIVDDTGKIVREVKVASEPEALLAVLKNPAYHFKRVGLEAGPLSQWLFSALAEAGLPVICVETRHMRAVLKAQINKTDRNDARGMAQMMRVGLYRPVHVKTLRSQKLRMLLTHRKLLQSKAIAIDNDLRGTLRNFGLKVGMVGTVKFEARIRKLVENLPDLAALVEPLLVVRRTLREQFCILHRRLLAIVRDDEVCRRLMTAPGVGPVVSLTYRATVDVPARFRKSKSVGAVFGLTCAKYQSGEVDWDGRISRCGDEMMRVMLYEAAQSMMRSKKWSWLKAWAMQIARRCGMKKAIVALARRLAVIMHRMWVDGTEFRWTREQSAVAA

SEQ ID NO: 344081 - protein, 421 aa, unidentified
MKTIMMLNDRTRAGQPETRWDIAVDVGQKALDWYGEVAGKAHQGHIANRSEAILACLEQLKAEALRLGFSGVRIICEPTGGYERRMLRAARQLGCATALVNGEAVNKMQVVESNDTGKSDTKDPRTILLLAKWNKTLTDRPLADEWLLLRELNARYDRLERDSTRCKNRIHKLLISVFPDLSFKKDWLFDSRAAEAVVELYGLNAAALIADGRERCTSKLRRRHVGPKTIGRLWADAQRTLLIPADPAWLELLGEDVRALYAELAVLRTRRQATREHMIALVERLHARGATRLHAHADLISPFMLARVLAETGPLQDFPNFRQLWRYGGLNLRPHQSGAMKGQPRQAKRGRARLRHVLAQAILKRVVHGQLYGEYYHRKRDAGMCGGKAMTAVARKFLKLLYGLEHSATAFNPQRVFQSAA

SEQ ID NO: 344082 - protein, 310 aa, unidentified
MDAIVIGIDVSKDKLDVHVLPAAQAFAVARNGAGIEELAARLAALAPAVVAIEATGGFETIVAAGLAGAGLPVVVVNPAQIRAYAKAIKQRAKTDPIDAAVIAKFARATRPEVRPLPDEATRQLADLVARRRQIVEMMAAEGQRGRRVDHKRVARSIARVKKTLEAELAELDQEIGDQVRGSPLWREKEDLLVSVPGVGPVVARTLLAELPELGRLERREIAALAGLAPFTRQSGRWRGRSFIGGGRATVRTVLFLAAMTAARHNPTLKAFRDRLVAAGKPKMVALIATARKLLTTLNAIIRDNRPWQNA

SEQ ID NO: 344083 - protein, 461 aa, unidentified
MKEKKNASVKNEKTQGIGLPVLQPHAAGIDIGSQEHWVCCPPKPDGSVNVRRFGSRSCDLEEMAAWLKSEGIETVAMESTSVYWIPLYELLEVKGFDVLLANAKQLANVPGRKTDMQDCQWIQLLHACGLLRGSFRPGQEICALRSLMLECSNLADERRRCVQRMQKALDQMNVQVHRAVSDITGFTGMGIIRAIVDGERDPLVLAGLRDRRCKKDVKAFAEHLRGTWREEHLFNLKMSLELFDKLNEMIDVYKRKVEQLMRELTPEERRHAPKPEHPSKTKARSIRKTGQEETRESLWRFSGVDLTRIDGINTGAANTVLTEIGLDLSDFPTEKHFVSWLRLSPRYSISGGKVLKKKRNAVGATRVATMLRTCATCLERSQTALGAQFRRTSRRKGRAVAVFALARKLAILIYRMLRYGQDYVDQGVEAYEEQFKQKRIQNMISAAKQMGYELTPISIAA

SEQ ID NO: 344084 - protein, 310 aa, unidentified
METKTYAGIDVAKDHLDVAIMPSREKMQYSNDEGGIDKLVKRLKNLSIKLIVMEPTGGFEAPAAAALTAEGMSVAVVNARQIREYAKATGRLAKTDGIDALVMAEFAASIKPPARPLRDEETEEIKAMVSRRRQLLEMLTAEKNRMAMARKHLKPHILAHIKWLKKEVEGLDSDLRKRIEDSPVWRVKDNLLQSIPGVGKVLSATLLAELPELGNLNRRQIAALVGVAPFNRDSGHMKGKRSVWGGRAPIRAVLYMATLAGTRYNPVIKEFYQRLVQRGKAKKVALVACMRRLLTIMNAILKHQRAWQYA

SEQ ID NO: 344085 - protein, 341 aa, unidentified
MEKATIIGIDLAKRVFQVHAAAKDGRPVLRKKVSRAQLLGFLAKQPRAIVAMEACATAHEWGRAISGLGHDVRLIPPIYVKPFVRRQKNDAADAEAIAEAASRPTMRFVALKTEEQQARSMTFRTRDLLVRQRTQLVNALRGHLAEHGIVAAQGLAKVKVLATAMQDTGSLHPLVRELGQRYLDHIARLDVEIAELDKRLRQLSKEDETAKRLQTMPGMGPITAAAIEAFAPPMATFKRGRDFAAWLGLVPRQHTTGGKPRLGRTSKMGQRDIRRLLIIGAMSVARWAVRKGAAEGSWLGRMLAKKPRLVVAVALANKMARSVWAMLSKGEEYRGSALASA

SEQ ID NO: 344086 - protein, 402 aa, unidentified
MSSVFVGIDIGKKKHQSALMGEKGETLARTLSFTNSLAGFQSLLKQLDPWSKEDILIGLEATGHYWLDLYTRLVDTGYSVVVINPLQTDGIRNMYVRKTKNDRCDAVIIADVLRFGRFRKSSVPEEDIAQMKALSRLRTGMVQSMSNVKRQIVAILDRLFPEFEACFNDIFSKSSMAVLDEFADPEELARCPLEELADLLFEKSNGRLGAAKAEHLKETASRSFGTGYAKRSMKFELKLLLEQVRFTQEQILEIEVKLKELMKDHQLITTIPGISDILGSAILGEIGDISRFDNPKQLVAFAGLDPSVHQSGNFNATSMHLSKRGSPHLRRALYIAAHVARIHDPVLKEHYEKLINRGKHHRQAQNAVAAKLARIVFSVLYSKEPYDIEKLRSKPKLEEMSA

SEQ ID NO: 344087 - protein, 401 aa, unidentified
MESPIVSIDVSNGNSHYMCFIKNNKRFGKVNKIDHDIEGFKRLLEDIQKLEAETNEKVCAVFEATGVYTKPLERFLSKNSIKTYMINPLESARKRKEEIHNKKTDKLDPISISKVYYDKEKMMELKKKDETYNWLRKKNRLYEDQLNHLRKYKVTFQNQLSICFPGYLDLFKDGYSDIPMTILKKYPHPDLLKNKKAETVARYLEKNTCHNHKVSLEYALKIIEFAKKTYPGCEKDDVEVEIFKILLDKVIETQRECEKTLNEMITVASTLEEYRYVLSIDGIGTNLAARIIAEIGDIEEFKSREALVAYAGLDPHIYQSGDQDGKHLKISKKGNKYLRCLLFLAVGCSIRGAKDNPVNRFYQKKKQQSNPLNSKAAKTACTAKLLKIIYGICKNKTTYER

SEQ ID NO: 344088 - protein, 374 aa, unidentified
MCIRDSVCILNEKGEKFEAKYGVLTPELEELHQLLLTHEVKEVTMESTSIYWYPIWRILSDIECLKLVNPYFIKQLPGRKSDVRDAAWIAECTMKDLIRGSFVPDEIVQRMRQYNRRIFDLNKEKVYKLTKLDALLQRCNIRISNYVSSTDSKSYKDVVKLLSEGIVNAEKLTEAIHGRTVNRVGKEVITAALTGVVNEVDIDLIRQYREEILMDDKHLKECQEKLTEICRKEFPREFDNLQTIPGVKERSATSILSELGADMKMFITAAALVSWCGLKPRNEESAGKIKSRRITHGNKYIRKTMIECAWGASRTQNCFYSNFSYTQTVVRRKNAMKVKVAIARKMLVVIWHVLSDGVPYNDYKKPEAIAEGNS

SEQ ID NO: 344089 - protein, 339 aa, unidentified
MQVTTVGLDLAKNIFQVHGISENGDVVFNQALRRAQLLAFFEELPPCVVGMEACGSSHHWARQLSKLGHDVRLIPVMYVKPYVKRGKSDAVDAAAICEAVTRPTMRFVRIKSEEQQGVLFLHRARDLIVRQRTQLSNMLRGLLAEFGIVIAQGVGSAIKFAKGVLDGDKPGIPDVAIDVLANLSNQLVALHLRVRWYEMLMRLQAKQDPRVMLLRTIPGVGPVTASAIVATAGDVSQFRNGREFVAWLGLTPLNRSSGGKEKLGRITKMGDRYIRRLLVTGMTSRLRQVKTHPERVDLWTRALLERKPVRLATVAMANKTARIVWAVLTKNEYYKPHDA

SEQ ID NO: 344090 - protein, 354 aa, unidentified
MKRTTKYVALDVHQATTVASVREDSGRVIARSVLPTDGGAIMEFVRGMRGAVHVTFEEGTQAPWLHDLLAPLADRVVVCDRRGALRHGNKGDHVDADQLAELLRRGGLRAVYHGSAHRAGLKELTRTYQNLVEDSTRVMLRLKALFRARGIPTAGTAVYHRQQRARWLAQLPDGGARFRADALYAELDVLRQLRPKAKAAMVTEARQDPAWPVLRTIPFLGPVRVALLLATMQTPWRFRTKRNLWAYAGLAVVTRSSADYALVAGQPVRRRRAPMTRGLNRNHNRVLKDVFKGAATAATVRPGPLQDVYHNVIARGTREELARLTLTRKLAALTLRLWKKGERYDPTKLTTPAR

SEQ ID NO: 344091 - protein, 409 aa, unidentified
MLFAGIDWASEEHAVAVHDDAGKSFAAFMVEHSAEGLDKLVARLRGMAEPAELTVAIERPDGRLVDRLLEAGHPVVAVSPTAIKVWREGEVASGAKSDPGDAAVIAEYLRLRFRKLQALRPFSDETRALRAAVRARGELVDQRTVVHNQLAAILDAFWPGAREVFADIASPIALAFLRRYPTPASAGTLGEKQMAAFCKKQGYSGRRSPAELIERLRKPPAGIVAGAEMGARKAAVLAYVNVIASLNAAIKDLDKEVFTRLGEHPDGEIFTSLPRSGLINAAQMLAEWGDCRQAYDGPDAVGALAGMSPVTKKSGKHKSVHFRWACNKRFRNALHTFADQSRHGSDWAAGIYDRARKRGADHPHAIRILARAWIRVIFACWRDGVAYDPAKHNAAAAIAASSDSAPQAA

SEQ ID NO: 344092 - protein, 375 aa, unidentified
MPKPNDLSRSLTAFEQDSTLIVVIEMSQASWLVAGIVPGVDREPLKKLEPNGDALLRLLQRWRDEATKAGRTLKRVVVAYEAGRDGFWLARWLRERGVEAYVIHPTSVAVSREHRRAKTDRLDTALLKRVFLGWLRGEPKHCSMVAIPTLAEEDAKRPNREHESLVGERTRLVNRIKSGLVRLGIRTFKPMLRRAPEHLDALRTPEGAPVPVNTLAELRRDLARLHLIRAQIKAIEAARLEGLQQAPDQGPHAMVRLLARVIGIGVETADMLVHEVLSRNLRDRRAVARYAGLTGAPDESGAKRREKGLAKAGNARVRRGMVQLAWRFLMFQSESALAQWFRSRTAQAPKTRKTMIVALARKLLITWWTMLQEAA

SEQ ID NO: 344093 - protein, 410 aa, unidentified
MKMAGIDVHKKVLMVVVVDSSAPEEKLARRRFVTLPSELQRFRIWLQEQGVEEAVMESTAQYWRSVWLELEPHMQLHLAQAFSNRAPRGRKHDFKDAERLVKRLIADELILSFVPKEEQRIWRSLTRMKVQLTRDRVRLQNQMECLLEEMRIKLSIVVSNLLGASGLRILHALAKGETDPKALAQLGDERLHCTEEQLVDALTGRVQPMHREMLALQRQRLQLIDEQMPQLNRMIAQAMKSHQDAVIRLAEVPGLGVDSAQQIIAEVGSQASTFASAAELTAWVGTCPGKEESAEQNQSSRCAKGNKYLRRVLNQAAHAAVAKKGCHFQVVFRRLMPRLGYKSAIWAIAHRICRVVWKILHEGVRFIEQGQEVGPREKKQRAQMLARALRKLGYDVTITPINQLAPKPAI

SEQ ID NO: 344094 - protein, 408 aa, unidentified
MQVTFGIDVSKSTSTVCELIGESKNELTITNNRPGFIQLLHELTAFSKHPQIIFEATGVYSRRLQAFLEDYGYDYVILNPLKAKKEMDMGLRHNKTDKTDAYHLALIQRLYHHPINQLQSQTYKQLNSLSRFYDQLTADLVMAKNRLHQALQSTFPEIENLFSSARGKNYWQIVARYPHCDLVRKDDKKQIINWLMKLKGIAFNHAQRTTDKLIELAHLAYPVVSCSDIEVQQAQYYARRLLNLSNQRQRIITKMVKLAKTLPNHDLENLESIPGFAQTTAVRVLAELGDLRRFSNPNKINAFIGIDPGRYQSGEMDSNLSITKHGNAVARKLLYRAIGQIDNAAKTNPCHIADYYESKKLSSQTKGFKKIAIASIHKLIRTIYALIINDQPYDYNVATHNQKDFSRN

SEQ ID NO: 344095 - protein, 415 aa, unidentified
MEIVYARVAGIDVGKREVAVAVRVPGQSPGQRGQQVRKFKTFYPVLQQMVRWLVEQGVTHVAMESTGVYWKPVFHALCESDSLEIVLVNARHVKNVPGRKSDVIDCAWLGQLLECGLLRGSFIPPPQIAAIRELTRYRKKLIESRTRELQRLSKVLEDGGIKIDSVASSITTLSARDMIEALIGGERDPRVLADLARGVMRKKIPDLTMACSGRFGDHHGLLARMHLEHIDHLTSMIDELDTRIERVLAPFAQQMTLLRTIPGIGERAAQVIISEIGVDMSRFPTAAHLASWAGLCPGNNESAGKHKSGRTRKGNQEVRTILTECAWSAGKTGSYPGAQFRRLHRRFGKKGGGKAAVAVAHTLIVIIWYVLNDLTEYRDLGGDYFTRHDNPEATRRRLIHNLEALGYDVRLTPVA

SEQ ID NO: 344096 - protein, 413 aa, unidentified
MTKVIIGVDPHKLSATIEVVDRHEKLLGSGRFSTDQAGYAAMRTYVKSWPERVWAVEGSNGAGRPLAQRLLEAGEHVVDVPAKLAARVRLFDTGHNRKTDARDAHSIAVVAVRTTTLRVLRADGELEALRMLSDRREELTRLRVQIINRLHRLLAELVPGTAKKDLTALQAKAILASVRPRDIAGKTRRRLAADELADLVAVEAKMKKATAELKVLAKARGSRLMDLRGVGPVVAARTLADVGDIARFADRNRFASWTGTAPLDASSGEQNRHRLSRAGNRRMNHMIHIAAISQIRLDTEGRAYYRRKLAAGKTKLEALRCLKRRISDALYRQLVADAERARLARTTEPSDPVGAAGTGPGGHCGATQESSAVDLPPHIDTSDQPLPGPAKPTLQPPYSARKTSGSRTESATR

SEQ ID NO: 344097 - protein, 349 aa, unidentified
MNDSIVTISKTNNNRPLQYDYYIAVDWSQINMAIATSTRKSEQIHTCDLRSNLGELKDYLHNLKGRKIITIEECPAAQWLYVELADYVDHVLVCDPYRNRLLTDGAKNDVLDAEKLCLLLKNGLLKEVFHTHNNLFELRKYVSAYEDIIKAGVRIKNQRSSIFRSEGKNFRKDAIETDANNFIVDILDKNIEAYEENKKKYQSLFSKITKRNTLLRNLCKIPGIDIVSAVKILANVVDAQRFSKKGNYLAYCGLVKHKRISGQKTYGLRKPRFNRTLKSVYKCAAMVSITVKNNPLRNYYEDLISKGVEAYNARNAVARHIATITYGMLKSGEKYRPYNQKEKIVKTID

SEQ ID NO: 344098 - protein, 370 aa, unidentified
MTKDNVFYVGVDVSKAKHAIAIAEGGREGEVRFFGEIDATPAAVERFVRKLEQKHSRLHFCYEAGPTGYGLHRQIVALGHRCDVVAPSLIPKRQGERVKTNRRDAVSLARLLRAGELKGIWVPDAVHEAVRDLVRVRSTASEDLRKKRQQLLSFLLRHGRVFSGHRNWSLAHARWLAAQKFDHPAQQIVFQDQIDVITDAQARLERLDAQLAELVPSWSMAPVVAAYQALRGVSFIVAVTFVSEVGDVRRFDNPRQLMAFLGLVPSERSTGDTVKRGGLTLAGNRRARRVLVEGAWSYRYPARVTEPIRARLEGLPKAVREIAWKAQTRLCGRYRRLTAAGKKTPIVVAAIAREMAAFLWAIGHQVEPVR

SEQ ID NO: 344099 - protein, 412 aa, unidentified
MLFVGDDWAEDHHDVEVMDAAGRRLSAAKLPEGIAGMARFHAMIAAQLDPDADLDAQAGQVLIGIETDRGPWVQALIAAGYQVYAVNPLQAARYRERLGVSGAKSDPADAHLLADMVRTDSHQLRVVAGDSDLAEAVKVVTRAHKTLIWERTRHTLRLRSTLREYFPAALAAFEDLTDADTLELLAKAPDPASAARLTTTQIMAALKRARRHHRDRRAGEIQAALRTEQLGQPAVVAGAYAVAVRAQVAILGVLNEQINLLQEQVEAHFGRHPDAEIYTSQPGLGQILGARVLAEFGDDPTRYGDTRARKNYAGTSPITRQSGKKKVVLARYVHNDRLLDALGGQAFAALTRSPGARAYYDKQRDRGLGHRAALRQLANRLVGILHGCLKTGTRYDEATAWSHAQQDQQVAA

SEQ ID NO: 344100 - protein, 346 aa, unidentified
MEYIALDVHKKYTWARVENTKGDRLYESRLQHAHGTIKNFVNRWSAGSPVAVETVGNWYWVVDEIEAGGGQPQLVNARLAKLMMGSVNKSDKLDAKGMNRLQRTGTLPVVWIPPSSVRDARELPRTRMVLSRQRTQLKNRVHATLGKYGYTVEGASDAFGKKGRQIVAELMAKLPPHTEQALGRVLDQLDHVCENLQWIEAKMREVYAPCPQTTWLKTLPGVGDILAVVIWTEIGTIERFGRAEQLASYSGLVARENSSGGKIRFGAVRRDVNVYLKWAFVEAANSALLNGERCGYGHISRLYQRLKPRRGHGKAKVAVARHLSEAAFWMLKKGEPYREPMSSTQR

SEQ ID NO: 344101 - protein, 400 aa, unidentified
MTQPLWAGVDAGKSDHYCVVIDADGKRLLSRRVANDEAALLELINAITALAGGGELTWAIDLNAGGAALLIALLIGAEQRLLYISGRTVHHASGGYRGEGKTDAKDAAVIADQARMRRDLQPLRAGDDIAVELRILTSRRTDLVADRTRAINRLRAQLLEYFPALERAFDYSASKAALILLTGYQTPDGLRRAGAARLAAWLRKRKARNADAVAAAAIEAAKSQHTVVPGQQLAAAMVARLAEEVMTLDTEIGDTDAMIEERFRRHRHAEIILSMPGFGVILGAEFLAATGGDIAAFGNTDRFAAVAGLAPVPRDSGRISGNLKRPRRYNRRLLRACYLASHIAIRTDTASRIYYDRKRAQGKRHTQAVLALARRRLNVMWAMLRDHKPYQPTAPNAATA

SEQ ID NO: 344102 - protein, 391 aa, unidentified
MIYVGIDVAKDKHDCFIMESSGEILRDVFAIPNNMIGFCSLLSEIQAASNDLGSIKVGLEATGHYSYNLLGFLLDKGLATFVLNPLHTNLYRKSLSLRKTKTDKVDARTIAIMLASDVNLKSYTDTAYHNEELKSLTRYRFDKVKERAKLKQAVSRLVTILFPELEKLVPTLHLRSVYALLSEFPGAQQIADAHLTRLKTLLHDASKGRYNRDTAIQLRNAAQISIGSNMSAKSLELKHTIRLIGEMNAEIEEIEAEIKSIMDEAASPILTIPGISYRMGAMILAEIGDFSRFNSPDKILAYAGLSPSTYQSGQLSSSYARMEKRGSRYLRYAIFNATKFVCHWDKSFAAYLAKKRAEGKHYNVAISHAAKKLVRLIYALEKSKHPYAPSA

SEQ ID NO: 344103 - protein, 312 aa, unidentified
MKGEEPSVGIDVSKAFLDVSLYPSGKTWQIEYSPQCITVLAEELADLGPAVVVVEATGGLEMSLTAALSVGGLPVAVVNPKRVRDFARATGRLAKTDKLDAQVLAQFGAMVQPPIRPLPDADRQELKALVTRRQQLLEMITAERNRLRRTTPGIQHRIDVNIQFLREQLKELDRDLADFLKSSPLWQEEARVLRSVPGVGPVVTATLIARLPELGSLNCKQVAALVGVAPFNRDSGAFRGKRKVWGGRGALRTALYMATLVATRCNSVLQAFYQRLCAAGKPKKVALIACMRKMLVILNSMIKHHRTWNPAS

SEQ ID NO: 344104 - protein, 326 aa, unidentified
MFYLGIDVSKAKFDCCLFLDDSSGKIKTKCFSNSNKGFHQLLSWLNRFGLVAEETRALMEATSVYHEMLAQFLFDLKFQVCVANPARTRYFAQSISKLNKTDKIDSEVLARFAMTVDLHLWQPTPDNIRLLNALLDRRSSLANDLKREQNRLEKANSTLIVVPILKSIKTNIKSLTRQIQNLDTQIQNHIDQDHELKRDQKLLESIPAIAERTSLLMLVFLRAHSFEKASQAAAFVGLVPIHRQSGSSVLGKSRLSKAGPPKIRSGLYMAAVVATRYNPHIRELSERLLAKGKTKMVAIAAAMRKLIHLCYGVLKNQQPYQANYKA

SEQ ID NO: 344105 - protein, 398 aa, unidentified
MTESSDYESVQVFIGVDVGKDTHHAVAINRSGKRLFDKALPNDENKLRSLISDLKQHGQILLVVDQPATIGALPVAVARSEGVLVGYLPGLAMRRIADLHAGEAKTDARDAAIIAEAARTLPHALRTLKLADEQIAELSMLCGFDDDLAAQTTQASNRIRGLLTQIHPALERVLGPRLDHPAVLDLLQRYPSPEKLASLGEKKLAAQLCKLAPRLGKRLAADIAQALAEQTVVVPGTNAAAVVLPRLALQLITLRKQRDEVALAVEQRVLAHPLYPVLTSMPGVGVRTAARLLTEVACRAFASVAHLAAYAGLTPVTRRSGSSIRGEHPSRRGNKALKRALFLSAFAALRDPLSRAYYTRKMSQGKRHNQALIALARRRCDVLFAMMRDGTFYTPQAS

SEQ ID NO: 344106 - protein, 317 aa, unidentified
MTVVGIDVAKASLAIALITPAGQARRKRYANTAVGHMELLRWLGRHADGSVHVGVEATGGYQDAVALALHDAGHTVSVLNPAALEAYSRSQLRRAKTDPTDAALIADYVRTQAPPRWTPAPPEMRQLQALVRRLDALLDMRTQERNRLEPSATIVRPSIEATLAHLEAAITAIKAQITAHIDQNPTLREPRDLIVSIPGIGTTTAAIILGELLQITRFASARQLAAFAGLVPHLHHSGTSVRGRGALSKLGASRLRKALFFPALVAMRYNAVLRPFAARLRAAGKPPMVVVAAVMRKLVHQIYGILRSGRAYDPAHA

SEQ ID NO: 344107 - protein, 397 aa, unidentified
MYIVGIDIAKRKHEAAVIDGEGAVIIKPFSFTNNCSGYNRLLAMLAKAKLPLDEVSFAMEATGHYWLALFTRLQKEGFRVQVINPVQTNSIRSFYIRQAKTDPRDALLIAEVIRFGHFSESTLHPENIYELRELCRGRHAIVSMQADVKRKVVALLDQVFPEYETAFTNMFSDTSMAILQTCPTPKELSEMPLEELCHLIEVSSRKRFRMAKAQELQELARNSFGFAMAGDVFSTMIRLYAKHLVFLKQQVQEMDRKIAEIMDTLDTPITTITGIGPTLGAYILSEIGDISRFSSAAKLAAYAGIDPTMRQSGEYNGVRNRMSKRGSPYLRHAIWLAASSAVLHDPALKLYFQKKRDEGKPYMASVGHACRKMVSIIYAVMRDNKAYTPCIPNEISA

SEQ ID NO: 344108 - protein, 409 aa, unidentified
MKTLHRRCAGLDVHKDEVVACVRVVDRSKATHEVRRLATTTRGLLELADWVQANGCTHVAMEATGVYWKPVWHVLEGHVELVLANAAHIKNVPGRKSDVNDAVWIADLLAHGLLRSSMVPPTQIQELRDLTRTRKQLTREVVQHTQRIQKVLEDANVKLSSVVSDVLGVSGRRILEAIVEGESDPGKLAALGNERLACTRAELVEALRGRVSEHHRFMLKQHLRMVDELERSIRAFDQRIEVALEPFRDDIERLTAIPGVSTTGAQVILAEIGADMSRFPTVGHLLSWAGLCPRLDESAGKRRSTRVRKGAPWLKTVLVQCGWAAARSKETYLRAQFLRLKARRGPKKAAVAVAASILVAAYHILRDKADYHDLGPDYFVRRDSARVAQRLARRIRELGYDVQIQQKAA

SEQ ID NO: 344109 - protein, 409 aa, unidentified
MDRTKYLYVGMDIHKDTHTAVLMNYLEEKLGEITITNTLQGFRKLENYVVKQQGELIPIFGLEDVTHYGRNLSIFLLDKNYPVKEVNPSLSFMERMSYASTKKNDSWDAQCISAVLMRRSHLLPDADPQDYYWTMRHIVNRRNALIKGLSGLTRQFHEQLQVAYPSYKAFFHELTCATSLAFYERYPSSKHLEHVSDEELGAFLRVPSHNTCSTNRARKILDLVAQEQLKKLDYQKERDYLVQSIAQQIRFILREIESIEQLEKKMYTELGYQLETIPGINTVTACALVAYVGDIHRFTSPHKLANYAGVAPLHFGSAGKGKDVQNKSQGNRHLYSTLYFLAIQQIYLTNKGEARNPVYRAYFEKKISEGKTKIQALICIMRKLIRVIYAMMKKKAVYELPILKTVAAS

SEQ ID NO: 344110 - protein, 344 aa, unidentified
MVMLGIDVHKATHTAVAVDEVGRQIGQRMVTANDAGHRQLLEWALRQWPGEGLRFALEDCRQVSTRVERTLLLAGQTVVRVPPKLTAGSRSSARTRGKSDPIDALAIARAALREPDLPTATLHGQFREIRLLVDHREDLVAARTQMQNRLRWHLHALEPGQEPGPRCLDRYCELDRLTAWLADREQTVLVRLAGELVADIRTHTVRINQLKQELAQLVTPLAPRLLALPGCGVLITAKILGEVGQVSRFRSESCFAMHAGVAPIPASSGKTTRYRLARGGNRQLNAALHRIAISQIRLGSPYYQRRRAGGDTTMEAIRALKRRLARVVYRLLHTVESTDSLFCV

SEQ ID NO: 344111 - protein, 344 aa, unidentified
MAIVGGLDIHRRQITYDWIDTTTGETRRGQLSPATRLELRGWFARFTGQQADFALEATTGWRFVAEELECAGFRAHLAEPADTRALRGPKRRAKTDRTDAHHLRELLRAGTLPESWMPPAHIADARTQVRLRRALVGERTGWYQRIHAILFHHGLPERSQLLTADGRAWLARAELPAVARQAVELALRMIDHLEVELDTLDAQLAGIARVQPGCQALQRRYGIGWLTAVAIWAEFGDVRRFANSRQAVRFTGLDITISESDGKRARGHLARQGSPVLRWALHEAAMCAARPTSPDHPYYLQVKQRLGGKRAALSVARKLAREAYHTLRELGDQALVPADLPTAA

SEQ ID NO: 344112 - protein, 402 aa, unidentified
MGVAVGVDVAKEFHWVAIVLADGGKVLLSQRVDNDPGSIDGLIAHLRAVAAEHGELTVGIDLMGGVASLLTTMLLDAGIRLVHVPGLVVNRARRATKGGEAKSDPRDAQTIADQLRLRDDWRVVDQPDDVSIDLRLLVSRRRELVVEQTRRLNRLRETLTSLFPGLERALDVTNLGDLHLLARYATPAEIRRAGRRRIIEHLLRRGVHRSYAESLATKAIDAAQTQHTVVPGQARMAEFVREFATEAVAARRRITDLDGQISADLDAHPDAALIRSLPGMGATLTAEFLAEAGDLTRFTTGDQLASAAGLAPVLQQSGKMRYLRRATAGSKTLKFVFYQSAFCAIQRDPASKAFYARKRAEGKRHHQALIALARRRINVLHALLRTRQPYQPNYRPTTASAA

SEQ ID NO: 344113 - protein, 378 aa, unidentified
MNRIIKIGMDVHTTNYTLCIFEPSFEHNGTVHCITQVKPEIKKIIHVIETFKKKHENEELNIVCGYEAGCLGYSLYHELKEKGVECVILAPTTMKTEKGGRKLKNDYRDAKMIAECLAYGGYSAVHVPTELDNSVKEFIRMRDDIKENLKSIKQQIIAFLTRNGKQFEGKSYWTRKHIDWINTVSFSEPLLQDTLKEYMIEYNHLCDRVETLDRQIEEISLKEEYVEKVQQLQCLIGIKTHTALSLIVETSDFNRFKKGNMYSAYLGLIPGDDSSGGHEKKLGITKAGNNHLRRLLVEAAQGYTRGRVGFKSKDLKSRQEKCSSEVVAYADKANERLRRKYYRMILRGKKYNVAKTAIARELACFIWGIMTDHIDLCS

SEQ ID NO: 344114 - protein, 343 aa, unidentified
MESYVGLDVSLEKTAICIVDGSGLITKEGEVRSDPDEIDAFVRGHGASVQRVGLESGPTSTWLWRELDQRGLPVICIDARHAKAALSMQINKSDRNDAVGIARIMQTGWYRRIQVKSERNHAIRGLLNSRALLVRMLRDIENQIRGLLKNLGGVIGRAKQGVFTRRVRELLDKRPDMALIIEPLLNARDDITRHLGEVDRATKKLAHRDHQTRAFMTVPGVGPITALAFMAAIDDPARFRRSRTVGAYLGLTPRRHASGEIDWSGRISKCGDKIARSYLFAAAGVLLTRIGKWCKLKAWGMRIAKRSGGKKARVAVARKLAVLMHRMWRDGTPFQWSEEKPVI

SEQ ID NO: 344115 - protein, 451 aa, unidentified
MVTKRKKRVQDLAVLHPDAAGIDVGASEIFVAVPADRDAESVRSSATFTRDLHLLADWLQACGIRSVAMESTSVYWIPLHQILEARGIEVYLVNAQYVKNVPGRKTDVSDCQWIQYLHSVGLLRASFRPPAVICAIRSLWRHRDSLIHMATEHVMHMQKALDQMNLQIHRVLSDITGLSGLRIMDAILAGERDPVTLAQLCHSRVKSSRDIVAKSLEGDYRAEHVFTLRQSLAGYRYYRTLITEVDQEIERQLADLKTMADVDSKPPKRTKKTPYQRNRHEPRFDLRGELYRIFGIDLTDVPGISALTAHTILCELGTDVLQFRNASAFASWLGLCPERQISGGKVLYTKTRRVRNRVALALRLGAYSLHHANNYLGEFFRRITRKLGKAQATTATAHKLARIVFHLLSTKQPYDESVFQRCEQDALQRAELRLRRHAARLGFQLVPATNN

SEQ ID NO: 344116 - protein, 345 aa, unidentified
MVICGADLHKRWHTVVAIDETGRKLAEKTVRATPDGHLELRRWVARWPERRWALEDCRHLSRRLEVDLLRSGESVVRVPPSLMAGVRRSVREPGKSDPIDALAVAQAALREPGLPVATLEGPERELRLLVDHREDLVAERTRAQNRLRWHLLDLGVDEPGPRSLDRAAVLADLEARLAGRPEPAARLARDLVARVRDLTAAIRPLEREIGDLAASLAPTLLALPGCGRLTAAKIVGETAGMSRFHSKEAFARHNGSAPVPVWSGNVTRHRLSRGGNRQLNLALHRIAITQMRIDDRGRAYLEHRRAVGDTKTEAIRALCRRISDEVFRRLRADEAARVMPLAAAA

SEQ ID NO: 344117 - protein, 297 aa, unidentified
MPHVTSIGLDVHARSVAAAAFNPFTGEVVHRDFGTDAAEIAEWALGFEEPRACYESGPTGFHMARELRALGLDCAVAAVSKMQRPAADARRKNDRRDAEFIARMLATHNIVEVPLPDAAVEAARDLDRALDDATVEYRRARQRLNMFLIRLGHVWDERNAGGTRRGSWTRAHWRWISGIRLEGPQRDVLEYYVTAARCAESDRRQLEKKVLALARTDRWRPAVEALSCIKGIDTLTAFRLAAEAGSFTRFRTAPAFASWCGLVPSERSSGETERRGGITKTGNRLARTALVELLASI

SEQ ID NO: 344118 - protein, 370 aa, unidentified
MSIIAHVGLDVHAASIRIAVLADGCSEVTEELTIVNDKATVAKHFKKLSSRYDLRCCYEASGCGYVLHRWLAEMGISSDVIAPSMIPRRPGDRVKTDRRDARNLAHLYRSGHLTRVHIPTKDEESVRKLVRLRETLVREIVESKNHLLKFLAEMGVSFDGRSNWTLKHWAWLRALSFEGTDKMVFSEYLSMLEFKQSRLREVEKGIDEIAMSDKYKERVAKLCCLRGIAQVSAMVLITEVIDFQRFGNPRALMSFFGLVPSEYSSGASRHQSTITKAGNSHCRRVVVEAAWKYQNAPRLGVDLKRRQEGQPADVVSHSWTAQHRLHKKFCGIACRKERCKAAVATARELVGFVWAIMTGNTSSSMVAAQA

SEQ ID NO: 344119 - protein, 403 aa, unidentified
MLPRRNCLILFYLFEFEQNVRNTAGQYIQNIQPGDKTKGDFSLFLFKKQNIGMKKILKQVAGIDVAQKELVVSLGRMYDDLAIEMHANKTFPNTDKGFMALIVWIKKLTVQEVACRFVMEATGVYHESLAYFLDDKGYELSIVLPNKISNYIRTLEVKTVTDKTSAEAIARFGLERKLDKWKRPKKTFKSLRQLTRERNQLVEMRTITKNQLHAEQAEAEPNKSSVERTKKQIILFNRQLKEIKEEIDALIKQDQQIKQAIDMMSSVPGVGTLTAAGILAETNGFELIRNKKQLTSYAGLDVKEKQSGTSVKEKPRISKKGNKHLRKAMHLPALTAIRHDERFKAIFARLVSRHGIKMKAVVAIQRKLLEIVYIIYKTNIAYDKNYLNGNEDEIKIKGHSLKN

SEQ ID NO: 344120 - protein, 339 aa, unidentified
MESFVGVDLDRKVSQLAALREPKPASQLRFPNNTVTVEKVLKKLPQGSKIALEATGSWWWFVELAQKTGHEVVMSHPKQTKAIASARLKSDKVDALMLAKLLKADLLPTVWIPPATQRYVRELLTHRARLVRQRTAVINEVHALYAKRNIDPGMIFHRVRPPAFMAKELSGYGPRIVEEDAELLAFFNRQLRGLDNELQKIAEEDVESKRLMTIPGVGPLSAVAVNCWIGTIERFSKAKKLSSYFGLAPRVRQSGDRERHGHITKEGNRMVRSLLIQAALWHIRLGKGAARKHYLGVLKRRGKQIARVAAANKLLGIMFHMMKERIDYQEFLRRGSSAQ

SEQ ID NO: 344121 - protein, 353 aa, unidentified
MTNTKYIGMDVHKESISIAVRNAAGKIVMECVIETKASIILQFIDGLRGDLHVTFEEGTWATWLFDLLKPHVSKLVVCDPRKNSRQGNKNDRIDARELSDRLYMNKLSSVYHGGAGVRTLRELARSYLTISKDLARVMSRVKAIYRSWGIPCAGKQVYAPRHRAEWLAKISEVGVLRRAEFYYQQLDALRPLRHQVRRELLAESKKHPATKLLCQIPAIGPIRAALLIALIQTPQRFRSKRPLWKYSGFGIEMHSSADYRKVQGQLQRSRKQVSVRGLNRDCNHDLKNLFKSAATIASVKPGPFQEFYAALVAKGMRPEMARLTLARKIATIVLIVWKRGVSFDAQYLKPQTA

SEQ ID NO: 344122 - protein, 449 aa, unidentified
MDVIYPRCAGLDVHKKTVRVCLLLRQENGRDHKEYRTYATTTQDLLELLEWLLVQECSHVALEGTGVYWKPVFNLFEGHIQVLVVNAQHMKAVPGRKTDTKDAEWIAELLQHGLLKASFIPSAPQRELRDLTRYRVRLTEEKTREVNRVQKTLEGCNLKLGDVVSDVMGKSSRMILSAIADGESNPVRLAALAVGRVQASQEELEAALTGTISAHYQFLLREHLIHIEQLEQAIERLTAEIARRLIPPDPPQESKMSQPGGQEEQEAPKEGNQGGTSPTEQERNWEEAVRIAMSLPGIAERAATGILAEIGINMQQFPTDAHLASWIGVCPGNHESAGKRLSGKTRKGNPWALRLLLQAAQVVSRQKKGYLPAFYRRIAARRGKKRAIMALAHRILVILYHLLRDGVLYEEKGEVFLEERDREMMEKRLVRQLERLGNQVIVQPLAQAG

SEQ ID NO: 344123 - protein, 418 aa, unidentified
MGAMEHLVGAFDVHKRDVVCHVLGIFLDEEKKIVAKTLAVRRFSRSLDGLGELAEFLREMDVKIVVMETTGHYCLKVYSFMEAEGFDAWLVPARDNKPSGGKKTDETDAERLARRFVAGAVRAYKLPSDRKIRALRRYVRTRKAMVEDLATWKNRVIRIFDEACIDIKGVFSSLGKGALVFLEGYVVGKDLDSIIERWPRLAKKKDKLLAIMRTRLDEASIASLRSALRVIRVLMREIEALDRRIENILVEFGREVELLLTVPGVGLKSCAVILAEIANIRRFSSAKKVASYAGLVPTVYKSGDKIVYGRLRSECNKRLRWILYEVALNAIKVSPWLRSFYERLVRRGKAKKQALIAVARKIVVGIWHILTKRVPWKEAIRRNVRMPRKRRVAGLTVREAMRVLREAGYIVMRSQGRS

SEQ ID NO: 344124 - protein, 358 aa, unidentified
MNRNTGMNAGQIIGTMNGLQVVGLDIAKQVFQLHTVHMGTGEIGNVQIKRAKVLEHFANLAPCLVAIEACGGAHHWARELRKLGHTVRLLHAKIVRPFVSGNKTDATDARAIWLAVQQPGVKFVGIKSAPQQATLTLHRQRELLMKMRIMQTNALRSLLYEFGATFAKGNRTLFKEIEATLEGLTETLPQMVRDSLREQVARINAIEVDMQAIEQRLQLQLKLDPQMQRIAQIPGVGLLTATAAIATMGEASAFKSGREFCAWLGLVPKQTGTGGKVKLLGISKRGDGYLRTLLIHGARSVIAHAKEPGPWLQQIKGRRPSNVVFVAQAAKTARTIWAVTAKEQDYQSGFKSVRPQPV

SEQ ID NO: 344125 - protein, 471 aa, unidentified
MLADFYGKVLIPPTVVAHNRVELDATIAQIRQALTTNGLYDMLVAIERTGRYHHVIRDAFVRAEFEARLVHPFATKRFRQPADPSTKTDDTDLAAIHRAAVNGFALLEPKLSEDWQSLQVLVRHRRNLVQKNAALRCQIREHLEAAWPGYAACFDELWDSHIAQALIRRYATPLDLLTESAPAIDHWLRQQGVRFQRPTLDTILVWAQRATPGDPLTELHRRLALAYDDDRLQKTQEIQALERDLARRLAQTPYVLLLSFPGINVVSAAEFAGEMGPIEHYANPRNITGRAGLFPSRYQSDQVDRPHGPLVRRGNRKLRAAILGVADNLLACNQHFKVLATRWKALGKHTRHTHVKIALRFCRIAFHMVAGRQVFHHPGLRERHYILDKLLAFHTEHQTPWEQTLRDLHYAIDQVPTKERGREAQPLADRLQRWRQRRRGPQALAEILAIVLARLGVGIVQSQESGEQDPT

SEQ ID NO: 344126 - protein, 355 aa, unidentified
MKYYTSETEFNCGIDLHARQMYVCVMDRTGKKVVHTNIRDNDFGFFLKRIEPYRHDLTVCCECTFNWFWLADACAMAGIPFVLAHALYLKAIHGGKNKNDRLDSEKITHLLRTNFIPPSYVYPRANRPLRALLRQRILYVWRRAELLSRIQSHQLAEGQQPVARGSKGNREAWEEQIVESYEEPLHKFAIQADCAMVGHYDKMIALLETRLAAKTKELHSRDYALLKTVPGVAQALGLTMLYEIDTIDRFASVREFSSYCRLVKGSVASAGKIKGLRGGKMGNPYLRWAFGEAAILSKRHHPLMRAYAQRLESEKNKFKANAILANKLGRAVYFMLKNKTGFDVERVVGSPKGGK

SEQ ID NO: 344127 - protein, 354 aa, unidentified
MYVAGIDAHSTYLVVGVVSNTGKLVQPPVRIANTRTDELLELLERFEPVEAVVETSPAWPWLYELLRTRGVGFVLAHAKKLRVIAESNYKTDEIDAEVLARMRVAGLIPEVHPKSADQREQALLVRHRTRLVRMRTAAAGRIHAELHAVGLRLERGRLLTKRGRQDVRQSAWPRLGTEQQRLLETHFALIDHLHPVIGGLDARIEEVGKEIPAVQLLRTVPGIGPYRGLLIATEVSPIRRFSTAAHLVGYAGLAPRSRRSGLAPVRHGSIPAGANRWLRGALVRAVVSHVQTDPESWLAHYYEVHKKRLGWQTARVAAARKLARALHAMLRTGAVWQPRCTTDERGELHAQHVA

SEQ ID NO: 344128 - protein, 350 aa, unidentified
MNNSLIGFDPCGIEVSHLILVAALRCGDHDQTLREFPNTPEGHQAILRFLTRSGRPVRVAMESTGLYGLDLALCLHGAGVALMVANPRAVRHFGQALLQRSKNDQLDAVVLREFADRMPFQPWHPPSAAALKLVGVARRLEALTDMLTAEKNRLHAASLSEALPAIIRRDLQRSIQTQQRAIARLTRAVQEFIAEDRQLTRRMELLLSIPGFGTTSAVHILAELTLLPAGMDVRQWVAYAGLDPREYSSGTSVQKKVRISKAGNKHLRRALYMPALVAVRHDPQVRAYYEHLQARGKTKLQALVATMRKLLHAIYGMFKHDQLFDNLKVYAAPTAAAPAPVPDPKEVLCP

SEQ ID NO: 344129 - protein, 323 aa, unidentified
MSVFVGVDVAKKTFDIATPLPNGKTRTKAKLSNDPGGFKQFCDWLERHAEPGAWILMEATGTYHEALAEHCHNQGYRVCILNPAVIAKFADVELRRVKTDKADAKVIAAYGQQKAASLRQWEPEPPAQRRLRALVRRLDDLKEMRQMEQNRLDVAQDAVQQSIQDVIGHITEELEKTRKAIEQTIDDDPDLRKRRDLITSIDGLGDTTATLLLAELGDPLKYQSPSAIVAFSGLNPVVQQSGEFIGQSPISRTGASRLRAGLWMSGTVSIRHNPVVKAMAERLNSRHKAYKQIVCAAMRKLLHLVYGVVKSGIPFDPKIALAG

SEQ ID NO: 344130 - protein, 340 aa, unidentified
MPLYVGLDLHSNNNLLAVINKQGKRVDHKKLPNDPEVILEVLRSHRAKIVGVVVESTYNWYWLVDALMEAGYPVHLANPSAIQQYSGLKHADDQHDAFWLAEMLRLGILPEGYIYPKEERPVRDLLRKRRHLVRLRTSLIISLQNIISRNCGVQFKVNEVKCLKEDRVSPLLEGHEDLALAGRASKETIDYLTRQIRRIEATIVKRVELRDAYRYLLTLWGVGKILALTIMLETGPISRFARVGNYVSYCRKVPSQWISNEKAKGKGNKKNGNKYLAWAFSEAAEFARRQHAEARGYYQRKMQKTNFMVAHSALAHKLARAAYYIMKDQVPFMPEKLLGR

SEQ ID NO: 344131 - protein, 352 aa, unidentified
MKCDKYMGMDVHQATTVVCVLDGEGKVVLETIVDTQAASIIRLVQSLSGPLHVTFEETTQAEWLYEVVRYFVAEVIVCDPRRNKLLGEGSKADRVDARKLANLLRTGMVRAVHHGEGTRQLKELVRGYETICRDNQRTMARIKAIFRARGIRTPGRNVYQAKQREQWLQQLDEPGVRQRVGWLYEQLDHLKPLRRQAKQAMLEESRKYRGVELLRTIPQLGPIRAALIVATVDTPHRFRTRHQLWSYSGLAVITHMSSEYELQQGRVVRSRKPIATRGLNRNCNRRMKDVFIGAATGGSQTEPYRSYLQGLQDKGIRKEMARLTLARKIAAVALRIWKKGEMFDPKKLNWTT

SEQ ID NO: 344132 - protein, 356 aa, unidentified
MMIIGCDFHPSWQQVSWLDTETGETGEQKLVQASGDAERFYRQVAAPALIGMEATGNCHWLVDLLAELGHELWVGDAAQIRASYVRQQKTDKRDAAHILKLLVEGRFPRIWMPSSEVRDLRQLLLHRYKLVIIRARVKNELQHLCLNKGVQRKRKLWSQAGQQILRELPLQLWAGRRRDDLLKLMAMLDQQIEPLDQAVKAEAQRDKMALLLQTQPGVGPITALAYVLTMGDVGRFPRGKQVASYLGLIPREHSSGGRQKLGAITKQGNRMLRMLLVEAAQIAVRYDPGFRICIAATRSRKRWPRWQRRASWRYDCTGCCARRGRIQPLFASRAARGCPWSARARPKELIGRSRIP

SEQ ID NO: 344133 - protein, 344 aa, unidentified
MYPFYLGIDLHLKRTYAVLMDNMGQIIDERRMPNDEMQDYLKETVPRNTYAVLEATRNWPFMYDLLSEHVDRVELAHPKELHLIAKAVIKDDPIDSKALANLARLNYLPIAYAAPRDIRDLRTCIRHREWLIAQRTRAKNRVHAMLAYYNLVSPVTDLFGSKGLEYLDKVMPTLRPAARRVVVDSLDLIDHLNQNIKKLENEPELTPEQKKLIKLLTTIPGVGKIIATVILAEIGDIRRFNNPKALCNWAGLTPRIRKSDQTVRHGRISKQGSSYLRAAMTRAASVACRTSKRWYPVHEKLVSRCGKTGAKVAIARRLLTVIYFMLKREEPYQENYSQSHTADR

SEQ ID NO: 344134 - protein, 356 aa, unidentified
MVMIGTDSHKRTHTVVALDEVGRRLGTKTVRTNAEGHLALVEWATQFADHDEHGVRFALEDCRHLTRRLESDLLAAGQRVLRVPTRLMAGARRSSREPGKSDPIDAEAVALAALRHPDLPVAELDGPAREVKLLSDHRHDLVVQRSRIAQQVRWHLHELDPDLMIPSRGLRRQKVVRELLAELERFDGVVARLARRHLLRCQELTTQINDLERELRDLVRRLAPSLLEIPGCGVLSAAVIVGETAGVHRFRDKDAYARFTGTAPVPVWSGSSAGKVRLNRGGNRSVYCALHMIAVTQARGVGPGRPYLDKQFARGKDHVAALRLLRRRLSDVVFAALRADLRAAQQPASSPLQLAA

SEQ ID NO: 344135 - protein, 354 aa, unidentified
MIGPKHHRGTAMDYYAGIDVSLEQCSVCVLDATGGIVREAKVVSEPEALIGWLADLGLPLARIGLEAGPLSQWLHAALVRAGHQVVLLETRHVKAALSAMVVKTDRKDARGIAHLLRMGWFRPVHCKAPPAQEVRALLVARKQLQAKMRDVELSLRGLLRGFGLKVGEISKGQFAARVRTLVAGHMMLERIAEAMLQARDALRTEFGKLHRAMLAIVRGDEVCRRLMTVPGVGALIAVTFTSAVDDPQRFARSRAVGAHFGLTPRKYQSGETDITGAVSRVGDAMVRTALYEGAHILLTRAVRFSALKRWALEVTKRRGMKRAKVALARKLAVILHRMWIDGTTFRWSRQTAAA

SEQ ID NO: 344136 - protein, 331 aa, unidentified
MDQHNYVGIDVSARSLEAALVGPSHRSTTASFANSPTGHRQLIKWATKRGRLAQVCLEATGVYSLEIALALHHHPKTKVMVINPKAIHNYAGATMQRAKTDQVDARLILDYGQRMPFACWQPPSKEVLQLQAITRRVSQLKVELNREANRLHAEGHRTSTTDLIARDIQVNLRHLERRMAHLEEKAVALVLSVQHLRALFQRLLSIPGIGETSALRLLAELAVLPEGMKPPQWVAHAGLDPRPHESGQSVHRPRAITKAGNKYLRAALYMPALVAIRHQPNVKAFYDQLIAAGKKPLQAITAVMRKLLHAIWGVWKHDQDFDGQKFYKMAA

SEQ ID NO: 344137 - protein, 460 aa, unidentified
MKEHRNTAASPGQVRQASEPLRIVHPDAAGIDIGSRKHYVAVPPERDPEPVRCFGCLTPDLQALARWLVACGIQTVALEATGVYWIPPMQVLEEFGLEVYLVDARQAKHLPGRKTDVKDCQWLQQLHTHGLLTRAFRPADAICVLRSFWRHRKDLVEMASMQIQWMHKSLEQMNLQLHKVLSDVTGVTGTKIIKAILAGERDPVVLAQMKHPLVQSSTDTIAQALTGDWRVEHLFTLRQAVELYEVYQQKIEACDQEIQKYMQSLETRAEAKDLEPRKGGTRRKNQVHFDLRGRLYELTGVDLTRIDAIDAMTAQAVVSECGIDMSRFATEKHYSSWLGLSPNHEITGGKVRRRRTRKVRNRAAQALRLAAQSLHKSKSALGAYFRRMCSRLGPAKAITATAHKLAILIYRMLKYGMAYVDQGQQAYEKQYQERTLQMLKKRVKQMGYALVDLRSGELVS

SEQ ID NO: 344138 - protein, 347 aa, unidentified
MLADQVDYVVGVDTHRDEHVLAVVVASTGAVVAQRSVATTARGYGQAYRFAAEHAGGRRVWAVEGAGHYGAGLARHLSGRGERVLEAGRAPRNERRLHGKDDGLDAIRAARATLNGDELASPKAGQRQEALRLLLLARRSAVDVRRLALVQLRSVIVTCPDELRQELRGLSQPRLVERCRLLRRSSSRTPDELAATLVLRTLARRIQAATEEAELQTEILAHLRALAPTLLDEPGVGPIVAAQLIVSWSHKGRVRSEAAFARLAGVAPIPASSGQTTRFRLSRGGDRQLNRALHTVILHRRLHDPTTKAYIERRIAEGKTSRDAVRLLKRYLARHLHRVLNQEPLMT

SEQ ID NO: 344139 - protein, 430 aa, unidentified
MISAEIERCAGIDVGKEWLAVTIMVGPLAGEPRVEYREFGTVTAELERLRQRLQDEGITHVVMESTGSYWKPVFNVLEDSVRVYLANPQEVKNRKGHKTDKKDSWWLAHLLRHAMIRPSFVPPRGLRELRDLTRRRRKMIEVGTSERNRVDKVLQDANVKLSSALSDIFGVSGQLMLEALLEGKAQPAEIAQFAQRRAQRKIPQIVAALEGHRMSDHHRQMIRYSLEHLRFLEEHISELDQQIVAKIEALGYKPQWQLLQTVPGMKENSAASILAEIGPDMSQFESEKKLSSWAGVCPGNNRSAGKNKGSKTTKGNRWLRGALTECAWGVSAKKNCFLKEKFWRLATKKQRKPPATMAIAHTLLVLCYQVLKTGQPYQERGLPVMDETQRNRLICHHVRRLGKLGIRVRSLPVPKESSKRKPKKTTAKRN

SEQ ID NO: 344140 - protein, 377 aa, unidentified
MSSVAVFAGLDYHQDSIQVCVLDQEGIQLVNRSVVSEAAAVQQAVMRHGRPRRVAVEACCGASNLAHELRDDYGLPVELAHPGYVARMKRSPDKSDFSDAQLLADLVRVNYLPQVWLAPDYIRQLRRLSRHRQQLVNRRRDVKLRIRAILRDNRLKCQHANAWTKAWIAWLLGDADLAQSDRWIMQDHVAELRSLGERISAVEKRIVEFTADDPIMAHLLSLECVGLVTALTLRAEIGCFARFQKAKQLSRFCSVSPRNASSGPRQADAGLIKAGNPLLRAVLIELAHRLIRTKGHWSQLAAALLRRGKQKNIVVAAIANRWTRWLHHEMRRFEAAQATSAPAQQKGPPLPPTPSHRPLVRDGRHDGDDGRGFRNQF

SEQ ID NO: 344141 - protein, 374 aa, unidentified
MADYSEVFVGIDTSKLRNAVAIAEGGRNGEVRYLGEIENTEAATSKLVKKLAAQHRRLTFCYEAGPTGYGLHRLIKTLGHECVVVAPSLIPKKPGDRVKTNRRDALNLAKLLRAGELTAVWVPDARHEAMRDLVRTREAALDDLKSKRQQVLSLLLRLGRHFTGKRTWTRAHMNWLLSQKLAHREQRIAFEEMLLAVRQANERVIRLERAIAAAVPDWSLAKVVTALMAVRGLDLISAAIFLAEIGDLSRFASPRQLMAYLGLVPGEESTGDRVWRGGITKAGNHRARRILVECSWSYRHPPRVGKKKLGKVEAAPPAVQEIAWKAQARLTARYRALARRGKRPTLVVTAIARELSGFIWAVSRAVGVPVTPAM

SEQ ID NO: 344142 - protein, 391 aa, unidentified
MIYVGIDVAKDKHDCFITNSDGEVLFKSFTIANNREGFETLFQRIQSVSDDLTKVKVGLEATGHYSYNLLGFLLDNGLPTFVINPLHTNLYRKSLSLRKTKTDKVDSHTIASMIMSDVNLKSYSDTSYHNEELKSLTRYRFDKVKERAKLKSSVSRLVCILFPELEKLVPQLHIASVYALLSEFPSAHAVASAHLTRLTHLLSESSKGRYGKDMAIIFREAARNSIGSNMPAKSLELKHTIKLIRELTSEIDEIETEIKSIMDEINSPILTIPGISYRMGAMIIAEIGDFNRFNSADKILAYAGMSPSTYQSGQLDNCYSHMEKRGSRYLRYALYNATKYVCHWDESFGTYLAKKRAEGKHYNVALSHATKKLVRTIYAMEKTGQSYSSAS

SEQ ID NO: 344143 - protein, 368 aa, unidentified
MKDNTKYVGLDVSKEKIAVAIADEGRDAPRYWGVILNTPEAIKKLMKQLGEPDQLKTCYEAGPTGYPLYRLLLGLGIECSVVAPSLIPKKPGERVKTDRRDSIRLAQLFRSGELTSIYVPTEDDEAVRDLVRAREDSKEDHLRARHRLTKFLLRYDLNPPLGTKKWTQRYRDWLDVVKFSRGALSKVFEEYLHHLDEIEARIKRIETEIHIQATESVNAPLIQALQTLRGVAELTATSLVAEIGSFTRFSGARKLMAYTGLVPTEYSSGETRHQGKITKTGNSHVRRLLVEAAWSYRYKPALKGEIRKRQEGQSPEIKAIAWKAQDRLHRKYYRLMSRGKPSGKVITAIARELAGFVWAIACKVEEAS

SEQ ID NO: 344144 - protein, 462 aa, unidentified
MKNKPSPDRAHKRLTKHLEQINLYAAGIDIGSESHYVAVPEGLDDDPVRSFLCFTGDLERLADWLVQIGIQTVAMESTGIYWIPLFEILEERGLEVLLVNARHVKNVSGRKTDVLDCQWLQQLHTYGLLEGAFRPPEQVTALRAYMRQRGTLVRYAGSHIQHMQKALRQMNLLLDNVVSDITGKTGMTIIRAILKGERDPGKLAAYRDGRCKKSKQEIAHSLQGHYRDEHLFALRQSVELYDTYSAQITNCDEAIEQQLKRFDAQGDPEQLRVSKKQKAANAPTFDVRGELYRMSGVDLTAIDGISDITALKVLSETGTDMSRWKSEKHFSSWLGLSPGNRVSGGKILSSKTKPTTNRAAAALRMAAFTLSNSKSALGAYYRRMRSRHGAPKAITSTAHKLARLIYSMLKHGTEYVDQGQDYYEQQYQDRVMKNLKRRAAQLGFALAPITSDNDTAPDISMA

SEQ ID NO: 344145 - protein, 359 aa, unidentified
MIVIGIDPHMKTHTAVAVEAASGRTLAEKTVAADAQGHEQLLLWARGLGPERCFALEDCRHLTGRLERHLLPRGERLVRVPPKLMAGARSSARSYGKSDPIDAAAVARAALREPDLPVAVLAGPEQEVRLLADHRDDLVGERGRIQKRLRWHLHDLELGLELPPRVLGRYVWLERVEAALHGLPPSTRRRIALEQVRRCRELTAEVRALEREIRSLMRSLVPELLALPGCSALLAAQLVGQVAGAGRFSGEAAFAMHAGTAPLPVSSGKSTRHRLSRCGNRRVNAAIHMIAITQARMHPPAIAFMERKQGEGMSSREARRCLKRYIARTVYRAMLRSEQARAGDVVQAEFGAEELAVAV

SEQ ID NO: 344146 - protein, 347 aa, unidentified
MRFYTQQRRFYCGIDLHTRMMYVCILSQDGEVVYHKNLPAAPEPFLEAIAPFRDELVVGVECMFTWYWVADLCAREGVEFVLGHALYMRAIHGAKVKNDRVDSRKIAALLRGGMFPMAYVYPRQMRATRDLLRRRTYIVRRRADLLAHIQNTNAQYNLPEFGKAISRKAHREGISESFADPAVQRSIQVDLELIDHMDLLIEDLNADIERAARGHDPQAVMLLRTIHGTGRILALVILYEIHTIDRFETVQQFCSYARLVKSQHESAGKKSGKGWSKIGNKHLKWAFSEAAVLFLRSNPEGMKYKKRLEKKHGKGKAMSILAHRLGRAVYFMLKRGRAFDMQTFLAN

SEQ ID NO: 344147 - protein, 343 aa, unidentified
MEHYAGIDVSLESASVCVVDASGRIVREAKVASEPEALITWFGKLGVEVSRIGLEAGPLSQWLYAGMREAGLPVELLETRHVRDAFKAMPVKTDRNDARGIAQLMRLGWFRPVHCKSLPAQELRAVLTARKLVQGKRHDIEMSLRGILRGFGLKVGPTTPRSFEGRVRQLVEGHPTLLAIADALLLARATLAEQLGKLQKRLVSLARDDTRTRLLMSTPGVGVLVALTYVAAIDDPARFRSSKAAGAHFGLTPKKYQSGETDITGRISKIGDASVRTALYEAANVILTRPVKGSSLKSWAMRMAKRAGMRKAKVALARKLAVVLHRMLADGTQFAADKAAAAI

SEQ ID NO: 344148 - protein, 375 aa, unidentified
MSTTVTRMDQDSKTMYVAFELGEKEWKLAMSPGLETRPRLRSLRARGTTRLVEVLEKERKRFGAERIVSCYEAGRDGFWLDRFLRAQGIDSRIVDSASIEVRRRARRVKTDRLDAQKLLTMLHREALGEKDVWSVVHVPSVADEDARSLQREYRTLVKERSRSSNRIKGLLASQGLVAPRIDGRFPEWLASARLWDGSPVPSGMRARVEREFARWRFTHDQVLALEKERRAHTKDETNRSLEKVRALYALKGIGLGAAWTWGLEFFTWRDFRNGKQVGALSGLAPTPYQSGDSEHELGISRAGNRWVRGLAIEIAWGWLRHQPDSALTHWYNERFARGGPRARKIGIVALARKLLVALWRYVETGALPEGAVLKA

SEQ ID NO: 344149 - protein, 408 aa, unidentified
MEIIYTTCCGLDVHKRSIAACVRRLEAGGRLHQETRTFGTMTQEILEMADWLAAEGVTHAAMESTGVFWKPIYNLLEDRFSLLLVNARHVKHVPGRKTDVQDCQWLAQLLQCGLLKASFIPERPQRQLRELTRHRSQLVAERARVANRIHKVLEDANIKLGSVATDILGASGRDMLRAMVAGEQDPKKLADLARRQLRAKMPALRLALEGHVTEHHRFVLGGLLDHLEYLESQIERFSRRIEEVSGPLAPALEAVASLPGFDQRSAENVLAEIGADMSPFPSEHHLSSWAGVCPGNYESAGKRQRGTTTQGNKWLRSALVQAAWAATRKKDSYFQAQYRRLAARRGKKRAIMAVAHSLLVVIYHMMKTGSTYQDLGGDYFDKLNNNRLVPYLVRRFKDLGFRVTLEAA

SEQ ID NO: 344150 - protein, 355 aa, unidentified
MHYAGIDYHKRYSVVHVLDESGETVGKGRINHDRPANFRDFFDSIGGSFSVVFEASMNWHWLHDILEEIDSIESIVMAHPYKTRIIAEAQVKSDKIDARLLAQLLRGDLICKAYACGREARHRKELVRQRAFWVRIRTSLRNRVHRLLGGEHDLQLPEVSDLFGRKGIGVLNKLELHEPARMQLKQNLRMLSELNQHIKTVEKSLDDEIGSDENVIRLKSIPGIGPIIAAVIVSEIDHIERFNSSNKFCSYAGLIPSSSSSGGKTHNGKLVARCNRWLRWAFVEAAWVAVGCDGYFGSLYRQHKARGKKPNTAIMIIARRMCQITYRLLTEKREYSAAPLNDKTFPGGSEVRMAV

SEQ ID NO: 344151 - protein, 381 aa, unidentified
MYYIGIDISKFKHDCAVIDDSGEIVTPSWSFTNDAEGFSQLKLLLNSLDTETGIGLESTGHYGMNLKLFLESNNFSFMEFNPLLINRFVKSKSLRKTKSDSIDCMMIAHYLMTVEYKPYPSSFYHTEKLKSLTRFRDSLIRFRSRQLVELTNILDKVFPEFKPFFGSRFSVTALYILSNYSSPEKIANMNSKSYEALRKLSRGRFSTVDFAKLKQLAKNTIGTTEDYLLLQMQIVLDIYRQLDSKVDETEVSIKECVSDMNPPMLSVPGIGIESAAVILAEFGDFSKFKNASQMLSFAGLEPGYFQSGTSETTGKMVKHGSSYLRYALMNCAQTVVNYEPTFAMFYSKKRAEGKPHRVALLKSCYVSSTHCKLKTLHMMPI

SEQ ID NO: 344152 - protein, 308 aa, unidentified
MTSNIQYIAIDIAKQTLQVQSDLKSLSLNYDEVGLKQLRAFIKQHERPMIIAEATGGYERPLMSMLFKYDITVALINPRLARAFAVSEGIKAKTDPIDAEMLLRFSKEKNPRPTEYIGAEREELGALMDRRSQLTEHIAKEKNRLDKSPKSICGSIKKMIRLLDQELALIEARITKLIDSNEQMKAQSKLMQEVCGVGTNTAWSILAYLSEITSLNRNQLVALAGLAPYNRDSGKYKGKRSIQGGRAKVRATLYMAATSASQHNAVIKDYYQGLKARGKPSKMALVAVMRKLLIHLQSILKKQQLVLD

SEQ ID NO: 344153 - protein, 345 aa, unidentified
MKKVIGLDLGDKRHVAVVFDADGTEHVAESVINTQPQVTRYFEGHPGAVVVMEAGTHSGWISRRLEGMGHEVWVGNPRQLRAIWDSTDKSDERDARVLGLMFRLEPRLLHRVHHRGEQAQCDLALIKSRGILVETRTKLINHVRGVVKGMGARVNASSGASFHKKAREQVPEQLWNALGLVVEQIEQLTAAIKEMDQRIETMCEQRYPETARLTQVSGVGCLTALAYVLTIEDPKRFAKSRSVGPFLGLTPRRDQSGQTDKQLPITKAGDVYLRQLLVGCAHYVLGPFGKECDLRAYGKRIAAQGGKNAKRRAVVAVARKLAVLLHRLWIDGSEYVPARAVRKVA

SEQ ID NO: 344154 - protein, 419 aa, unidentified
MSFKILKNNCCGLDVHKTWIYACIGITDSNKRTEYKQARFSSFTKGLNELCDWLAKYNCIDVCMESTGKYWIPVFNILEKNNIWVTLSHPKYTKPQKGNKTDRKDAKWICDLYMCGMVKPSFIPPADIRELRDLVRYRFKLTCMITGEKNRVHNCLTVSNLKLDDVFSDIFGKSSRSITEQILQHPGETFDVDPFVDGRCKTPIPEIQAAVDGAISTEQAVKLRHCLSHIDELEMHKAEIEREIFRLSEKYESVLTLIRTVPGFDKNPLTAIQVLSEIGADMSVFPTAKNLVSWAGCCPRNDQSNRKIKSTRISRAGSYFKPVLVQIANALIKSKKHPEFTTRYRRIKARRGHKKAIIAICRMLLTAIWHILTDLKPYTPEGYLEARPVNKEKILTTSQALNLLKQRGYIIKDDAVPIT

SEQ ID NO: 344155 - protein, 431 aa, unidentified
MLKINPLSTLYVGIDVSSKSNFVCALDFYKNKYINSSFANNQPGAEELAKKILECLKEHPDLNTIIAALESTSVYSIHIANFLSSCEELMHFKPYVFVLNPKCTANYKKSYIGLGKSDPIDAFVIADYARAGNIETEPWRGSQFLALKRLTRHRLYLVECMTREKTYLVSNLYLKFSELQMLEGDDRPFCDIYGATSSSVLTEYLSPEEIIDSSEEDLISFLAEKSRNRIKDISKTAELLRKAARDSYRLDKALYEPLNVSIASSFNCIETFKKEIKLIDTAIEREIKGLNPNAFIILQSIDGIGPVFAGGIVAEIGDISAFHSSDALAKYAGLTWKSNQSGDFDGEDTPMSKAGNRYLRYYLGEAANSMRKHNATYGAYYRKKYSEVPKHQHKRALALTSRKFVRLVYGLLARNQLYSGVSLDTSMKESE

SEQ ID NO: 344156 - protein, 484 aa, unidentified
MNRRIHNSALFILLKIKSEDKAKSHMLFWTLDVVYKTDCFIGHFKVSSKSVGTWCRVQKIRIKWFDKAVYLHLEVIMEQNIVFGIDVSSHSSTVCVVIDRIRQGEPFTISNDSFGYQKLLDHLNCYLITPLVVFESTGVYSLSLQAFLEEYHIKYLKLNPLKAKKLMDNNLRHNKTDKLDAYHLALIEFCAPQKLREPQPKEYHEMQNASRYFEELTKSLVTAKNQLHRNLQSTFPQIESIMANPTGKVYWTIVSLFPHAQYVLDSDETKIYQELLSITRVGKQRARYLTTRLYSLAKQAYPYDSKDSITVRAIQRNIANLLSLSQERDSVINYLEKQAKTINSRSLTIYQSIPGIAKTTAVRLIAELGDLRRFDTSDQIDAFIGIDPGRYQSGEMDNHLGITKHGNHIARKILYRVIGQMESTKASQPCHIIDYYDNKKQSSHSRGYKKIAIASVHKLIRTMFALIKQNQLYDYNVAIKNQRP

SEQ ID NO: 344157 - protein, 335 aa, unidentified
MQSELSVVGIDLAKSIFHLVGTDERGTIILRKRLARGEVLSLMAQLPRVLVGMEACGGAHDWARHLREQGHEVKLMAPQYVKPYVQTNTNDLRDAAAIAEAVTRPSMRFVPIKNVAQPDLQALHRVRERLMGARTALVNDMRGLLAEYGIVLPTGVNAFRHAWAAKLEAEHAQLTPLSQELFGKLWAECKQVEAEGAYDDEKLQALATTHPESPRLWSMPGIGPLTATALIAAVGEVGGFTNGRQFAAWLGLVPKQYSTGGQTRLLGIRKRGDRYLRKLLIHGARATRRWARTKTESRSRWIRGVLERRGWNRTAVAVAHKHARIVWALLSRGGV

SEQ ID NO: 344158 - protein, 400 aa, unidentified
MLSIGIDVSKGKSTVCGMKPGGEIVYTPFEIQHTREGMSELVSLLHNSCEEVRAVLESTGSYHCPVVAALLENGIFVSVVNSLRMKRFCSQSIRKVKTDQIDAMQIALYGLAYWQELQPTRLPEDTYRELQLLARQYYQMTSMLIKAKVDFNALCDQVLPGMQELMNDHAGRHKLSDFVLRYRHTTHILEMGETRFRKDYCKWAEKKGYRNHERMAALIFATAQNGIPVLPDAPSTQIVITEAIRVLHTVEASRDAILTQMQALAKTLPEYSLVREMPCIGDTLAPRLIAEIGDVRRFHSKRALIAYAGIDAPPYQSGKFCANNRHISKRGNRYLRKTGYEVMQSYVMHKPANDPIFTFIEKKRGEGKSGKLAMVAGLNKFLRVYYGKVTELYRSLPAIE

SEQ ID NO: 344159 - protein, 311 aa, unidentified
MKSAVYVGIDVSQEYVDVVVSGNRSAMRVATASGALETLGQQLMEMEPKLILMEASGGFERLPLTVLQTAGLPVAVVNPRQVRDFARSLGYLAKTDAIDARVLARFAEVLNPEPARRSEEAQEQLRALEVRRRQLIEMIIAERNRLRTAPRTVGRIEEHLRWLEDEVKAIEQGLQDLVESDPDMQARAVILRSVPGIGPVLSFILLSGLPELGRLNRKEIAALVGVAPFNWDSGKLRGKRAVWGGRAHIRSALYMAALVASRRNPVIRAMYERLCAAGKPKKVALVAAMRKLLIILNSMLRTQTKWLEITP

SEQ ID NO: 344160 - protein, 326 aa, unidentified
MGKTTSLASPAGAVDYDATLIMAVETSNKSWVVAAHVPGLGHIKAKRTIGPTAEALATSIEGYRRRAAASGRVIDRVIVVYEAGYGGFWLARWLTARGIDVHVIQPSSVPVERRKRRAKSDKIDADLLLRTLLAWLRGEPRVCSMVAIPEESEEDARRPSREREELIRERIMLTNRIGAILATLGIDDYNPLRRDRRVRLEALRTALDHPLPEHARAKIVRIIERLELVLSQIAALESQRDAVLEDEAPEEAKRMIKALVLLRSIGAQSATVLVYEAFIRRFANGKALGCYAGLTGTPFNSGGSEREQGISKAGNRRLRAAMGELA

SEQ ID NO: 344161 - protein, 347 aa, unidentified
MSHKTAATVAHTIGIDTGKNTLHLIGLDDQGAIVLREKIARGRIAARLANVPQCLIGIEAGMATHYVARELSALGHNVKQVPPAYAKPFRQGHKNDFRDAHAIAEAVQRPSTRCVPVKTDDQLDLQALHRVRSRLVGQRTAVINQIRGFLLEHGIAVRQGLRFLRQQLPDILAKRSDVLSPRMIRIIEDLGGDWRRLDERIEHVTKEIEVLAHGSEGCRQLMTVPGIGPLIASAIVAAIGNGAAFAKGRDFAAWLGLVPKQMSTGDRTILGRISKRGNRYLRTLLMQGARVILLRPANWAKHSFGPWLTAAANRLHHNVLATALANKLARIAWTVLMQARSYEARVN

SEQ ID NO: 344162 - protein, 375 aa, unidentified
METIYIGVDFHARQQTICYLTTETGEFVTHELKHQDKDEVRTFYAQFGGRVIVGLEASGYSPWFEQLLEDLGHEVWLGDATEIRRRARWRQKNDRRDAELILDLLVHDEFPRLHRPSLESREILRMLRYRHKLVKMRTIIKNSLQALALQSGLSRRTKLFTKAGQQELRAAPMSPVMKQQQEQWLELLLVLNQRIVETTLWLKQQSLNDARLRLLRTHPGIGLLTSLGLVHTLAPVSRFRNQRKVTAYAGLEPMERSSAERKRFLGISKAGSRLLRFLVIEAAHTAVKKDDDLKRFYRRLQERRGRPKAKVAVARKLLVRSFIMLRDEIDYAEFQRRAVAARLARQSSRPSVPDRLIGQPASSESQECVRSESKK

SEQ ID NO: 344163 - protein, 419 aa, unidentified
MEIVYRICCGIDVHAKFLVACLIGDGKKETRRFSTMTDDLLQLRDWLVAAGCTHVAIESTGVYWKPVFNILESALTVVLINPEHARALRGRKTDRKDAEWLADLLQHGLLSASFIPPLEIRELRELTRYRESLVREHTAVTNRIEKLIESGNIKLSQVASDVLGVSGRAMLRALAAGETDAGKLANLAQGKLKEKRGELVRALQGQLTSSQRFVLGELLDQIERLEAAAERVNREINRYLTDPQRPKLLRAWELLQTIPGVGTRVAEVIIAELGVEMAVIFPTDALVASWVGLCPGQKESGGKRQSGKTRHGNTYLGAALVQAAWAATKKKQPTYLKAQFYRLVGRLRRKKALVAVAHSLIVIVYHVLEREQSYTDLGGDYFDRQQAEKQRAYYLRRLAELGLKVTVEEPPAEEIPAAA

SEQ ID NO: 344164 - protein, 390 aa, unidentified
MYIVGIDIGKRNHEASIMNAAGKQYGKPIRFANSHTGFNKLMDWVKNISGADDVVFGMEATGHYWLALYTHLCHEGYAVHVINAVQSDALRGMYIRQAKNDSRDSFIIAEVIRFGRFCETAVSAPELHALRELCRHRFWIVDSVSDLKRKVIALLDQVFPEYENLFTNTFGKTSLQLLSEYTTREELLAVDTAKLAETIYTASRGHHGIEKAQEIQNTARNSFGILLASDSIALLIRQYIEQIRFVEKQVDRIDTEIARLLSAFDNQLTTITGIGPTLAATILSEIGDIRKFASPGKLAAFAGIDPTMKQSGNFVGSHVHMSKRGSPYLRRAIWLAATIAAFKDPSISVYYQRKRSEGKSHLTALGHVSRKMVNIIFAVLRDNTPYSPAI

SEQ ID NO: 344165 - protein, 402 aa, unidentified
MTDAPNRHIGLDIHKEYFVAVGVNEKLETVFGPQRVSNYQLEDWIIRCLTPGDAVVLEMSTNTYQFYDALLPHVHSVMAVHSPNVAMVTNVRVKTDKKAALALAQLHAAGLLTGVWIPPYPVRDLRSLIARRDKMVRLSTMAKNRLHSMLHRHHLVAQEKPFAFEQRTWWESLPLSANEQLLVRSDLDTLDFAQKQVVQIEECLKQESAEDVRIPLLIQLPGVAMLTAITILAAIGDITRFPSAKKLVGYAGLGTRVHDSGMTHSSGRITKAGRKDLRCAMVNAANHAVEHHVHWKKELERLAPHLGRSKAIVAIARKLLVAAWHVLSKEVADRFADPRDVASSFIRYAYRIGVRNLPDQQPALAFTRDQLDRLGVGKELKEIPWGSKRFKLPPSKLLLEKE

SEQ ID NO: 344166 - protein, 337 aa, unidentified
MRYIGVDLHSNSITVCYLAKKGQETHSTFSLSDLAEFEKGLRRTDRVAVEATGNTRWFVKRIIGRVKQVVVVNPNQFEVIRKSVKKTDRHDARALAQFLSKDLLPEARLKGELASQINSLAETRDKLVKLRTTFVNKLHALHRARGIISRKSQFLSEKGLKAVVELEWEATTQVEVEVIIAQIRSINEGIARLDTQLVASGKQLKGHGNLVSIKGIGPRAAAILLSVIGEVSDFESDDKLFSYFGIVPRVSNSNETVQHGRITKRGSKLGRTTLVQCTLVAKKYSSYLNKFYERIKAKKGGGKAIIATARKFLGIIYRTLKNNWVFADFPNFVLAED

SEQ ID NO: 344167 - protein, 442 aa, unidentified
MAMRKREGSPEVFPNAAGIDIGGSSHWVAVPRAASDEPVREFGTMTDDLNAMADWLLACGVDTVALESTGVYWIPVYEVLKQRGLTVWLVDARQLKYVPGRKSDVMDCQWLQKLMSLGLLRAAWRPDGEVCVVRAVVRQREVLLTEQSSWVLRMQKALVQMNLQLTEVLTDVMGATGQAIIRAIMAGERDPKVLAQHRHGRVKASAAQIERALIGNWRDEHRFVLGQALTMFDSLAQRILECDAKIEALLAPLGRHEIELGGPGKQRSKNAPQFDARAALARWAGVDLTRINGLSVATVMTILSEIGPDPSRFANVKHFCSWLGLCPATKISGGKVLSARTRRSANRVRQALKLAAMSLSRNDSALGAFYRRLCMRMDRPRANTAVAHKLARMVYFMLTRGEAFVDQGRQRYEAQQQQRSVAALKRRAKALGFRLEPETPAP

SEQ ID NO: 344168 - protein, 408 aa, unidentified
MDLTPMHRRVIALDVHQAKITACAVIEHDDGRLEITQRDFGAFKRDRRALAQWSLEIAPEVVVMESTGVYWKSPFAALEAVGITAWVVNARHVKAVPGRKTDMADAQWLATLARAGLLRASFIPPLLMRQLRLVARQRQKLVGMCSAEKNRLHKVLVDAGVRINVVVADIHGASARAMVKALIADKPMHEVLDRKGRLRASRDELFESLSTEQLSPVHRFVAEEILQHIEQIEQRIARLDEYLLQGLKAYEPQLRLLQTIPGIDLQGAAMLLVEIGSDMASFGSAERLASWVGICPGNNESAGKRKSGRIRRGNAWVRRLLCEFAQAAARTRCALKAKFESLAIRKGHKKSIVALAHKMLRTIFAMLSTGDHYKDKTVDYEALSVARNAPRWMKMLRKHGFIATPAAA

SEQ ID NO: 344169 - protein, 398 aa, unidentified
MDLPVYYELETNNGNRDYRIQIGGHYMNYNTVYVGMDVHKESFTLCSCKYEDEKASHYQRTPASYKNVLRYLAFLRTIYGEDTRFVCGYEAGCLGYSLYHQLENFNVECVILAPTTMLEQRSKRRIKTDKRDAEIIAKSLAQHNYRPVHIPTKMDNQTKEFIRMRDDHKAELKKIKQQILAFCLRQGYQYDGSGNWTAKHVKWLRSLKTEGLYKEILDEYLLTYTILTDKLNRLDQRIEELASKEEYKESVSKLTCFLGIKIHTALSVIVEVGDFQRFVSARKFAGYLGLVPGQHSSGDDRNGLGITKAGNTHVRRLLVESAQSYTRGKIGYKSRVLRSRQAGNSPQVINYADRANERLRRRYYKMVLKDGKKYNIAKTAIARELACFIWGMMTDNIY

SEQ ID NO: 344170 - protein, 372 aa, unidentified
MQQDSDVYVGLDTSKLKISVAVAEAGRDGAVRFVGNIDSSPRAVERLAAKLAKRHRRLVFCYEAGPTGYGLHRQITGLGHDCTVVAPALIPKRPGERVKTNRRDALTLAKLHRAGELTSVWVPDPGHEAVRELVRAREAAMEDLRRTRQHLQSFLLRHGRIFTGRAAWTKAHTRWLCEQAFDHPAQHLVLAEYRQAIEAAETRLERLTRQVTETVGSWSMAPVIAAYQALRGVAFLTAVTFVAEIGDVRRFDNPRQLMAYLGLVPSESSTGERVRRSGITKTGNSRARRVLIEGAWTYRFPVRMSRLLQERQDGLSQTVRDIAWKAQVRLCRRYRRLMANGKRQTVVTVAIAREMSAFLWAIGQEVMPHLAG

SEQ ID NO: 344171 - protein, 428 aa, unidentified
MAKSKAQSVIITDDDGLYYERCAGIDVHKKLLVVCLRIGRRTESREFGATTAEIREIVAWLTSNGCQMVAMESTGSFWKPLYNIFEQESLPAMVCNAYHIKNVPGRKTDWNNAFWIAKCLAQGLLKPSFVPDRRQRELRDMTRFRKSQIEERSRNINRLQKFLEGANIKLGSWLSDVEGKSATQLLELIIGKPDFTIDDVKSCMHRNLKSSPEELFAALDGYIAPTQREFFSHVMDVIRTQTSQIEKTDALIKSALNEDEIKAVTALDTIVGIGTVSAEQIIAETGTDMRHFRDQHAFSNWIGVAPGNNESAGKRKSGKTIHGNKALKTTLTQCAKSAVKVKNSFFHAQYNRLVSHRGKNRATMAVAHSMAIAIFFVLQGMEFKDLGADYYTQFNREKKINSHLKQLSKLGVNFPDKILADAIERPPD

SEQ ID NO: 344172 - protein, 349 aa, unidentified
MRTFTPPAGIRFYAGVDLHARALFLVILDRDGKIVFARNMPAAPEPFLRAVAPFRDGLLVACECMHCWYWLADTCRDEKIAFVLGHAWAMRAVHGCKTKCDRKDAEAIARLLKGGNFPPAYAYPKERRGLRDLLRSRLRLVRQRAELYGHVHTARRQANLPPVSSDVKYKSKRAGCTADIADPFVRRRVETHLSLIEPLDTAIRRLEAEIEDAARGIFPVELAVLQSTPGVGQVLSLTILLEMDTVDRFDTRQQFCSYARLCGAVQESDNKRVGHGNARAGNAWLKWAFSEAAVLSAQKDERIGALLQRLASKLGKAKAYSALAHKLGRAFYHILHTKEVFDVNRFVRH

SEQ ID NO: 344173 - protein, 343 aa, unidentified
MAIVNRIALDLAKDFIQVLALDENEQEVFNKKLRSNKVLAKLATLKRTDNCEVAVESCGMSHHWRRECEKLGYKTVALPPRYVKAYLQGEKNDANDARAIAEAASRPNRQTVRLKSIEQQDLALMVNQREGFVQTRTQFSNRLRGQLAEYGIILPRQVKTILQRVPEILEDDSNALTLQSRDLINRLYQMLRAVDEEVKALDKRLAAQAERNEDSQRLMTLPGIGPITATSLLALIGDVSEFKRGRNLSEYLGLVPRQNSSGGKDRLGGITKKGNTKLRTLLVHGARSALRVAQKRHDRLSLWAQDVAKRRGNNVAAVALANKHARIIWAMLKNKEDYRMTAA

SEQ ID NO: 344174 - protein, 325 aa, unidentified
MNNPIITTQNDAVYFGVDVAKLELVLDLRGKILRFENKPAGIAKLLSTITRQIGADSLACARIVCEPTGGYEKAFMHAAIKAGVAICMANPLCVRRFAQALNKHAKSDPIDAALLSRFGADLKPSALLTTPNEERSKLAALIDRRGDLMDILQCQNNRAEHHLDAFCSRQHKAFVKLILKQIEALQAAIDKLIEQSAALATARERLCEVKGVGSQTSAMLLAHLPELGRIGRTQISALAGLAPFNRDSGKTTKKRYIQGGRSKVRRALYLAALSAARSNPNLKPVYQRLRAAGKPVKLALIAIARKLLIHLNSIMSDLYKIPLAA

SEQ ID NO: 344175 - protein, 354 aa, unidentified
MKVLKQVVGIDVAKDELVVSLGKLLEDLNSEIKEYQIFNNNEKGFQALLQWVFDKKSEQTEVVFVMESTGVYHERFAYFLHGKEEKVVIVLPNKISNFMRTLEIKTVTDKTCSIAITQFGLSRKLQEWQPSNIVYKELQQLSREKNQVISERVVCMNQLHAENTQALPNLKTIKRLNERILLLQNQEKEINADMLAEVEKNKEASENVRLLSSIPGVGKATAISVLAETNGFELIRNKKQLTSYAGLDIREKQSGTSIKGKPRISKKGNKNLRKALHFPAITATRVNNQYRELFHRIVSKTGIKMKGLVAVQRKILELMFTLFKNKTSYRPDYYENRVANPKDSHPILADSRSL

SEQ ID NO: 344176 - protein, 383 aa, unidentified
MSMNPSASSQEEAPLKYICGIDVGSQSCAGCVYRLDKSLVVKPLAFANAKEGWNVLLDKLTQLDALPKQILIGMEATARYSENLYHALEQRGYRLCLLHPGQTHQFHERQGLRAKTDRLDAITIARVLLSGEARASYIPDEQVATYHELVRLHSQLSEQVARYQNQIHALVVVLFPEFTQVFADPCLPSALSVLKVYPSAQAMAQAEEAALYALLRMHKHAHYGHPTAKKLLSLASTSVSSQRAEAGRSLSLRILCGQLEQTQKYLEELQAELEQLIANDPAAKSLQQIPEFGTQTVAVLRAELGDVDRFARTDQAIAYAGLDVQIKESGLWKGKAKLSKRGSGPARGRCSIWRLCVAFICRGLPLGLTIRDWWHAVSRKAPP

SEQ ID NO: 344177 - protein, 428 aa, unidentified
MTVKDCTSVKEFWQLKKEIRGSKDHLIVGIDVAKDEHRAFFGTANGKTLLKRLTFKNDIEGFGKLLARVKEMKVKHRLDELVLGLEPTANYHKPLGDFLIKCSHMVVLVSGVSVKRNRELLDGRWDKHDTKDSANVADLISQGKCLYYEYAPPLLKDLRGLLSLKRRLKKQEHGLRIRIRNTLLAQYFPELDKYYSKWEPQVLSVVRWCLDPSVIAGLEYDQFVSLVSPGSKNIRQQGRLEWIWKKAVDSIGCDAGEAAEFEGKVMVEELRHIREVIKETDAKIKDVCVRFPEYDYLLTIPGFGPDISSKVLAAIGNPFRFNSGKQVLKMSGYDLSANRSGKTSKSAVPVISKKGKASLRYALYQAAFIASVRNKHFIRYYTNTLRGREREKGIKTKMRVKLATKMLVIAWTLMKKKEPFDPGYLKID

SEQ ID NO: 344178 - protein, 343 aa, unidentified
MEDISTIGLDIAKSVFQVHGTNAAGEVVIRRQVKRAQVLKFFASLPPCLVGIEACASAHHWSRELQALGHRVKLMPPSYVKPYVKRQKNDTADAEAICEAVTRPTMRFVATKTTEQQSVLMLHRVRLLLVRHRTKLTNAIRAHMAEFGVVAPIGRQGVEKLLAVIDDGSDERIPILARRCLMALGEQLLLVKNQILDMDRRILVCHRSSEVSRRLAEMPGVGPLLATALVATIPDPRAFSSGRNLAAWIGLVPKQNSSGGKERLGGVTKQGNRYLRSLLTVGALAVIRYAERHGTKRPWILKLLARRSTKVAAVALANKMARMAWAIMAKDEPYREPVLAQAA

SEQ ID NO: 344179 - protein, 395 aa, unidentified
MGKVIIGTDPHKRSATIEVRDEREILLATGRFGMDRCGYRQLLGYVRQWPERVWAVEGANGAGRPLAARLLAAGESVVDVPAKLAARVRVFDVGHGRKTDATDAHSIAMAALRTKGLRQLAHNEDLAVLRLLADRRDELSRTRAQTLNRLHRLLAELVPGGAPRHLSALQAKALLASTRPPDAAGRTRRALAAELIEEIDVLDGKLKQLVRRLREQVTTAGSGLLGVFGIGPAGAARILADVGDIARFTDRNRFASWTGTAPIDASSGDQIRHRLSRAGNRRINHVLYIAAIVQIRHDTEGRTYYRRKIAEGKTPLEALRCLRRRLSDVIYRQMVADAASSQAQTGPGGHTGATTDSSAANPTPTAGSSDKPLPGPAPTTLPPLSQPATTRPPGS

SEQ ID NO: 344180 - protein, 370 aa, unidentified
MDERIKFFVGLDAHKDSIAVSACEAGREPARFVGTMGPDVNGLLKLLAKAGDPAQVSVVYEAGPTGYGLHRELCRRGYRSQIVAPSLIPRRAGERIKNDRRDCLRLAELSRAGELKAIWVPDEAHEAMRNLWRAREDAVGMRLKTRQQLQAFLLRHGRRYPGKTNWTKSHERWIAEQRFEHDGDRIALAEYQLAAQAAEQRVARLTTALTEAAKGWRFEAVVAALRALRGIDTVCAIGLVTEIGDISRLGTARQLMAYLGLVPSEHSSGNTVRRGSITKTGNAHARRLLTEAAWSYRFPARMSQQLRQRSSDLPEPVRNHAWKAQQRLCGRFARLSSRGVQVNKVCVAVARELAGFVWSIAHQASRTQAH

SEQ ID NO: 344181 - protein, 344 aa, unidentified
MVERFVGLDVSQRSTSVCILDGQGRRVWRGKCATDPATIEEVVRARAGGPARVGVETGALTPWLVHELRGRGLEVVCLDARQARAALALRPNKTDANDAEGLAQILRLGWHRSVHVKSYAAHRLRATLGARMQLVNMVTELSNHVRGVLKVFGLVVEGARGGVFADRVEALLVDRPEVAAVVRPVLEAWRGLRRQVAAYDVALRAEAKERQEIRLLMSVPGVGAITALAFASAVEDPARFGSSRNVGAHFGLTPRQHQSGEVDRMGEISRWGDGLVRTYLFEAATVLLRRVQRWSPLKAWAVRLAQRAGATKARVALARKLAVVMHAIWRSGEPFRWTAEPRVA

SEQ ID NO: 344182 - protein, 385 aa, unidentified
MKPTSRMSTGEGFRQCVGIDISKEKFTASLYMYDRLSDEGCCTGSIDFTNTKQGFNQMVKWSRKEALKGHPLTYLMEPTGVYYEPLAYHLNKIGQTLYVVLPNKARKFCEAEGIKTKTDVMDARCLALMGCTSRKLRPWSPPKAIYHELRQLTRFRADLCKLRTSVTNRQESLQHMEGASKNVQKGCEKLVAEIDKLMEKNEKDILEKIAEDKELEARINRIATVKGIRVPTVTCIVAETQGFHLIENRKQLTSYAGLDVMAKQSGKEDPKHTISKKGNANIRAVLYMPALSAAHCNRQAKAAYGRICQKHPKEKMIGITAVMRRLLLLVYTLWKSGEEYDENKDVNSKPKKKEHALDHAQEDYILNTNEPVDWNATDENGQLPF

SEQ ID NO: 344183 - protein, 358 aa, unidentified
MKIIGCDLHARQQTIAMLDSDTGELEEKTLEHQGETVRKFYFALSGSILVGIEATGSMQWFLELMEELGIECRVGHPAKIRKAETRKQKHDRRDARLLLTLLAENRFPTIWMPSTEQRDLRTLLRHRHQWVRMRSRVQHTLQSMALNHGLRRGRALWSQAGQDELRALPLAPHASERRKALMTLYPRLQESIDELDRQVSEQTQQRTDARRLMTHPGVGPVTALATEVFLGDPMRFSDGKALASYIGMIPSEHSSGRRQRLGAMSKQGNALLRYLWCEAAMHAVERDPELKRFYRRKLVQKGLGKARVAAARKLGIRLWIMMRDEIDYQEFCRRGKARQESGSVRAGMPDRNSGPAEQ

SEQ ID NO: 344184 - protein, 350 aa, unidentified
MLIIGCDYHPSFQQIAFVDTDTGELGERRLAHPEEADQFYGELKPRNAAVRVGMEASGHARWFERLLRQLEFEVWIGDAAEIRTKRVRKQKTDRQDAQLLLQLMMEDRFPRIWVADAENRDLRQLLWHRHRLVQMRTRVMNQLHVVALNEGLQRKKALWRPAGRNELESLVLAPWASRRRQDLLALLDQLAPKIAELTQALEREVEKRPVTRRLMTHPGVGPLTALAFELVIGTPERFRCGKQIASYVGLIPEEKSSGNRRRLGHITKQGNALLRFLLVEAAQVTVRSQPQWRSRFFHLAMRRGRKIAKVAMARKLAVHLYWMWRQGLDYGQWQKLGSHAGEPGNPYGGQ

SEQ ID NO: 344185 - protein, 454 aa, unidentified
MNNNGFLGLDISKGYADLYVINSDKIPVEAAFRLYDVQDGHQRIEELIDKWFEKQSFETLYCGVESTGGYENNWINLLQELAIKRPLKIARLNAKGVKSLSDAALKRTITDSVSAENIAMYLFDFRHKIKWIDDPQSFKKYTDGRRHNTFIRMLKKQRIQLSNQLEKLLYQELSPILTYCRHGAPGWLLNLLLKHSSVAAINKAGVKGLLKIKGITTEKAEAILNKTRESKHCTSAHISSVIKGTIKQMLHLDETIKEEKNKLIAEYSDSEEVKLLTSISGLGNQSAVEILIEIENIHRFEDAKKLSAYFGLHPVFKQSGDGKWGNHMSKKGRSEIRAVLFMSSLTAIRYSDLFKNIYSNARAKGKNHFNAMGVVMHKLLRVIYGVLKNKIAFSQAIDAKNVENAELKQQAEKEKSKEQKREQVQKLERYNRAELDHSPISKRHAKKRKVLQVT

SEQ ID NO: 344186 - protein, 340 aa, unidentified
MRVAGIDTHKATLAACCVDDIGQALAEQTFPNDPAGFEALLAWLAGLEVDRVGLEGSAGYGAAAARFLLDQRVAAVEVPPQLSHRERSRTRRAGKSDPGDALAIARVTLREPELPPVRTADATRELGLLVEAREDLVAEATRIRNRLHADLVVLVPGYSASAANLVAEVHRKTAGRLLRRLPGIQAELARDRLVRLARVTVQIDALGDRIAGLVADHPLRSLHGAGPLVTARLVAEVGDVHRFRSADAFAMLAGVAPIPASSGQVNRMRLNRGGNRQLNRALHTIAVSQARTYPPAQAFIARKRAEGKSWREALRALKRHLARTVFRILSASAQPSFSGS

SEQ ID NO: 344187 - protein, 351 aa, unidentified
MSRSSSSAAIATLGIDLGKNTFHLVGQDERGAIVLRIKLSRPQLTQRLANLPPCLIGMEACAGAHHIGRQLQALGHDVRLIPAQYVKPFLKGHKNDYRDAEAIAEAVQRPTMSFVAIKTPDQMDLLALHRVRSRLVSQRTGVTNQIRGFLLERGITVRQGLAPLRQALPSILDSSSDALSPRMGRLISDLMEDWRRLDERIEAVSTEIEALAAQDEHCQRLMSVPGVGPIISSAVVAAIGTGAGFKQGRDFGAWLGLVPKQESTGDRTILGKISKRGNKYLRTLFVQAAHIVLVRRPHGARLGLWPWIEAAGRRLHRNMLVIALANKLARIAWAVLARGHGYQPRSAAHAA

SEQ ID NO: 344188 - protein, 364 aa, unidentified
MNCVVVNTELSSLEETRRQFNGGKAYIKLGIDVHQDFYVVVMQEGSSNPKPPQRFHKEALPRWAAKLVCSGAQVYAVYEACGFGFSLQRRLSALGIECYVVCPQKLDEQNKRVKTDSLDARALCLKLDRFLQGNRHALALVRVPTEEEEQTRALHRQREQLVKVRKVLEAQGRSLMVNHGIEPVQQWWKRRAFAALSMPEWIRVLLQNTQPIVLSLQSQIDQLTLQLQNAATAEPPRGLGKMTSVIIDREIGNWHRFNNRWQIASYTGLCPGEYSSGQKRLQSCVTKHGNPRLRAALVELAWRMVRFQPNYRAVRKWNERLRKGALTTGSARKKAIVALARQLAIDLWRIRTGRLSHAQVGLEM

SEQ ID NO: 344189 - protein, 427 aa, unidentified
MPYRIAAIDVHKRMLAVVVSDVEGEGEYQFERRKFGATPGELHVLAQWLVQQEVEEVVMESTAQYWRPVWGTLERYWKPARQQREGAPQMAGTLHLCQAKSNRGPRGRKNDFLDAERLIRRLVAQELVLSFVPDEAQRLLRTVTRRKYQLTRARIGFRNQLESLLEQAHIKLSSLVSDLLGVSARRMLKALAEGERDPGVLAAMADRKLRATPEQLRDALGASAQLNGVVRRLLKLSLEELQVIESHIEQLDREAMGLLKGHEEVVQRLAEVPGFGPDSAVQMIAEVGLGAAHFRTEKKLSSWVGVCPGNQESAGESQSTRSPKGNRQMRRLLNQAAQSAVRVKGSIFELTFRRLLPRLGYQAAIWAIAHRLCRLLWLILHKGVRYEERGPAVSAKSKRTRAARMIRELNKLGYRVEGGPLPAVTRA

SEQ ID NO: 344190 - protein, 383 aa, unidentified
MQPTQAQYFTPDAAVLAVSLELAKGSWKVALHDGRRAKPAVHSVAHEQAAGRLVEVVQLVEATKHKWRLGAATRVVVIYEAGQDGFWIERALAALGYEVKVVDPASLPVTRRARRAKTDRLDAIGLVLSLLAWLRGERDRMQVVRVPAVAAEAQRHGVRERGALQKEIGQHRDRIRKLLRTVGCWEEVKSDFAQRLARGAVVCHDDSELPAQLRTRLERECERLALAVGQLKTLEAALMEALPEAVRERIGRLMQIKGVGQVGATRLVLELFWRDFANRRQVGACVGLVPQPYDSGESRVDQGISKQGNRRVRALLIEMAWLWLRYQPDSTLTQWFAYRTQGSGPSKRGKRIAIVAVARKLVIALWRYLEQGVIPEGAALKAA

SEQ ID NO: 344191 - protein, 351 aa, unidentified
MGHGAIDLHKKESQVRLVMDDGIIVDRRIATRRESFTQVFGTVAPMRVLIEASTESEWVACHLEHLGHAVVVADPNYAPMYGGRSRRVKTDLRDAAALALACGQGTYRAVHRRSVARRAVQVQLRVRDELVQTRSRAISLIRAVTRAEGLRIRSGSAETFVRRLEALALPAPLGALVRPLCQMLTTVTAELRTIEERIAALVAGDADMRRLTTYPGIGPITAAAFVAAIDDVTRFAGPGAVTNYLGLVPQEHSSGEKQRRGHIVRSAQPRVQALLVQAAWRVWLSTRVDTAALRLWAQQVGRRRGARIAIVALARRIARVLFAMWRDGCDYHGARRQEPAVTPGLALGVSA

SEQ ID NO: 344192 - protein, 410 aa, unidentified
MRVIGMDIHRVFAEVVALSDGKVTRLGRVDMRRDRLEAFARSTLTRDDHVVVEATGNAAAVVEVLGPHVGRVVVANPKQVRLIADAKVKTDRIDATVLAQLYASGFLPEVWIPDERTAAMRRQVTRRTQLVRQRTRLKNTVQSILHAHLIPPCPHQDLFGRAGREWLAGQWLPEDERGAVERHIRELDRLGEELRGVERDIAQRALDDAVVRRLMTVPGIDMVVATGLAAAIGDVDRFAAPEQLVAYLGLNPSVRQSGEGPAHHGRISKQGRGQARGMLVEAAWSAARSPGPLRAFFLRIAARRGQHIAAVATARKIAVVVWHMLKRGEDYTWARPALHARKLRSLELKAGRPPRRGQSGSAQAYNLPATREAERRRAAEGEAAYRRLTDGWRPKGPKRVRMGAATEERP

SEQ ID NO: 344193 - protein, 404 aa, unidentified
MKGPIVSIDVSKGKSDYQAFKDLNVKYTGSRSIKHNKEGFDEIVNLVREMEKKLETEVCVVYEATGVYHRVLKKVLEDNNIKQFIINPLLSAKTRKNDSLRSPKTDKLDPKSIAKTYYSHSLHNSHKQETIYHELRELSRYYEDILVHIRKDKVAFRAQLDIVFPGYDTLYDDLYGPVALAIIEKYPHPEMLQKKKINTVSKVIQNKTCHRQAVSDTMADKAIEYSKTIYSGCDKDDIEVLILQRFIKKLNEDMAEAERTIGEMVKLAQELPDFNIIKSIPGIGDNLAARIIAELGDMTRFKKKNELVAFAGLDPRISESGQNDGDHMHITKKGNKRLRCLLYLAVTCSIRLKRDDNSIKDFYIKKKQQSTPMCSKAAKTACASKLVRIIYSMCKTGELYQYNK

SEQ ID NO: 344194 - protein, 366 aa, unidentified
MKKISTVAIERIQIFKENQLTIGLDLGDRTSHYCILNEAGEVISESELPTPPKGIEGVFSRIPRSRVALETGTHSPWASRQLTQLGHDVIVAHARNVRLIGESNRKDDQLDARTLARLARIDPGLLGPVRHRSAKAQIHLTVIRARAALVSSRTALVNAARGLTKSYGQRLRKCGSEQMNRERAKGLSQELRDVLDPLLREIESLNERIAEYDERIEKIAKEVYPQVAVLKQVKGVGPLIALTFVLTLDDPHRFRRSRDVGCFVGLRPGRRNSGNSEPQLHISKEGDRYLRTLLVQGAHYILGPFGQDSDLRRWGLKLAERGGKNAKKRAVVAVARKLAVLLHRLWVSGEVYEPLRSNHKVVSAVA

SEQ ID NO: 344195 - protein, 405 aa, unidentified
MWYAGIDWADQHHDTVVIDEAGKRVGTTRVAHSAEGLDTLVAFLKGLGDIADHPDHLACIVETNRGLLIAALLDAGLPVYPVNPKTVDRHRKPAGAKTDAIDAYLLARTGRSDVADLRRLTPDSPLIAELKALTRDQDTLIQSQTRLVNQLTACLKAYYPVALELFGKLQQPTTLAFLQAFPTPQQAQDASVEQIAAVLKAAGHPTAATKAPQVRQRLHQPQLRADPVVTRTKTRLMLTLVAQLRVLLPEIAAYDDEITRLFRLHSDSRAFASLPRAGQRLAPRLLAEWGDERGRYTGAASVQALAGTSPVPFQSGNFAKAHRRYACNKPLRNALQQFAWQSTQKEAWALAYYQRKRREGKSHSMAVRALANQWVRLIYAVWSKRETYDPATFLTAQQAHAPRAA

SEQ ID NO: 344196 - protein, 407 aa, unidentified
MDIVIENACGLDVHKDTITACAITPEGKEIETFSTKTIYLIELVDWVKKHKCTHVAMESTSVYWKPIVNLLEAEEIEFFVVNAQHIKAVPGRKTDVKDAEWIAKLLRHGLLNSSYIPDRNQRELRELVRYRRSIIEERARQQNRIHKVLEGANIKLGSVVSDVLGVSGRDMLRSLAEGNDDVEELSNLARGVMKKKKDELKLALQGYIQDHQRFMIKTILDHIDFLTDQVDKLDIEIEKRMEESQEDIERLDSIPGIGKKVAEQMIAELGTNIKEQFPTAPQMCSWAGLVPGNNQSAGKRKSSKIMNGNKYLKSSLIEAAHSVRGSKNYLGALYRRTASRKGKKRAGIVVAHAMLRISYYLLTRKEMYIDLGEDYFDKQKQQSIVRHSLRRLEGLGYTVTLEEPSAS

SEQ ID NO: 344197 - protein, 337 aa, unidentified
MNNRNVIALDLAKNIIQVAKVSKHGEVVFNKAQSPSKVRQILANSPPSIVAMEGCGSFHYWGRVAQSYGHEVRGMSPKHVKPFISKQKTDANDAIGIAIAAIQPNMPFSPVKNIEQQILQTLTVSRKFLDKQLTQLSNHIRALFYEYGITIPRSKKALKEVLTERNDLPEVLLPLLSVLKAQYQQIEQSLNKVTKNLELLVSQNEQCQRVIALEGVGVLGAAGLIASLSQTEHFKNGRCASVYLGVTPKQFSSGGKTVMLGIDKGAGDKQLKSCLFLGALSYISSLPEKPKTLKQQWLLRLVARSGVKRACIASVNKNIRTAWAMLKQGTNYQPIMI

SEQ ID NO: 344198 - protein, 430 aa, unidentified
MSYRISGIDVHKKVLAVVVSDVEVDGEFRFERRMFGSNPEQLRSLAAWLLEQEVEEAVMESTAQYWKPVWEALERYWKPLRQKREGARRRSGTLHLAQAQSNRGRRGRKRDFPDAERLVKRLVARELTLSFVPDAEQRLWRTVTRRKYQLTRDHVRLQNQVESLLEEGHIKLSSFVSDLLGASARRMLKAIADGETDPVTLAALADRNLRATPEQLCDALGACADLKPVYRRLLKMALEQLQFLEQQIGQLDQEMASLLNQHQDAVQRLAEVPGLGVDSATQIIAEVGPTAATFPSAKQLSSWVGACPGDDESAGVNYSHRSPKGNRNMRRVLNQSANAAVKAKGSIFEIAYRRTVPRLGHKQTIGAIAHRHCRLIWLILHQGVRYEERGPAVSQKSKQARTTRMIRQLRTLGYRIEPPNPHHLNPPQGQ

SEQ ID NO: 344199 - protein, 405 aa, unidentified
MKQPAMLHYAGVDWATRTHAVCVVDPNGAIRARFEVPNTSKSYARPCKRLIKLGVAGVAIERPDGPLVEAMLEAGLRVVVVTPRQVKALRSRYGASGAKSDPADAEVLADVLRTDGHRLAPLTQDSDPTKVLRALTRTRKDLQEARVALVNQLTSQLERCFPGAIGLFAELRTPVAVAFLRRYPTSHAAAGLTQAKLAAFLRRLHYPGRTPVHVLFSRIQTAPVAGISPVEAAGRAVCVLALLEAIQACARQERELEAEIIERLELHADQHIFTSLPRAGHGVRAAALLAELGDVRARFPDNDCLAALGGAAPVTITSGKRRVVKFRWACDKKLRNALIDFADDSRHASPWAAHVYAQALARTGRHPHAVRILARAWIRVIWRIWQDGFAYDPTKHRGAVMLQAA

SEQ ID NO: 344200 - protein, 458 aa, unidentified
MKEIGFLGIDVSKGYADFLLIDADQNPLEKGFQLQDTKEGRQQLKHLIEQWYQSGLKTLCCGVESTGGYENNWYYYLINLGKTYDVKVTRLNPKAVKSSGDAQLIRTVTDGVSASLIAGYLVRYPDRVLYANTAYDASEDLKHGRQQQRFIHLLLKQKVQLSNQLEKVLYQQFGEVLVFCRHGIPVWLLRMLSRYPSADRVLRAGVDRLAKIQGISRSKANALIHKAQRGKTNTSAIVKHLIQSLAKEIMHKHLFIQQEKNLLIQTFQHHPDVPILQSIVGVGLESAVEIMLEIEHIDRFSECKKLCAYFGAHPTYKQSGDGIWKPQLSKKGRSAMRARLYMIGLTAIRYAPNIKKLYHRMRAKGMNHYQAMGVVMHKMLRIIYGVLKSRKKYDPEVDELKTKNAETKRLEYSKKLKDQNGVLETAKYRYQQPILDAPVSRRTARKRKGQIASQFTNQ

SEQ ID NO: 344201 - protein, 375 aa, unidentified
MTKHSEVFVALDTSKLRNAVAIAEAGRAGEVRFLGEIENTAAATTKLVRKLEAKYERITFCYEAGPTGYELQRHIRGLGHECIVVAPSLIPKKPGDRVKTNRRDAVSLVKLSRAGELTAVWVPERRHEAMRDLTRAREAAVIDLRAKRQRISALLLRQGRPYPADKKTWTKVHMNWLASQRFEQPELGVVFAEMMFATRQAQERVERLEQAIRTAVPDWSLAEMVTAFMAFRGIDLVSATCLLAELGDLTRFPTAPEVMGYVGLGCSEGSTGDRIKRGGITKSGNRRARRTLVECAWSYQHPPRVGIAKQAKVAAAPTKVREIAWKAQCRLNRRYRVLLRRGKLKTVAITAVARELAGFLWAAARELSSPQRVAK

SEQ ID NO: 344202 - protein, 348 aa, unidentified
MKNLFIGIDFSKEKIDATVISAIGLVEQSARVSSEFKTTTSGYRQFLKWVEEHSNGIDVSAWLFCGENTGDYSKPLCNYLYGKGYDMWLENAKCIKDASGLRRLKTDRADSAMIAEYAMRNHDRAQYYRPLSDSLSQLRELFLYRHMIVRHKCSFLVRKEGKRLTMEKSPSRTLISNTGKHFITEFDKAIAKLDKKIKEIIESDEELKHTYTIATSVPGIGTQNAVCLMVYTDNFQKFDFDARKIACYYGVAPFGKDSGSSVHAAPRTHYMANKLIKSMLTQSALIAIRCCPQIKQYYTRLMSKGKKMQVALNNVKNKLLHMVTAMVKNNMLYSPDYINVCQRIANTL

SEQ ID NO: 344203 - protein, 357 aa, unidentified
MGYFVGLDVSLKSTAICVLDGDGAVVWRGSADTDPAMILDALERWLGKIVRLGLETGSITPWLARELRARGLPVVVMDAGRAADALKARPVKTDRADARALAEMLQTGWYTEVFVKSEDSHRIKALLSARDQLVRNKRSFFGQIRGMLRPFGIRLGGRMGTSKFDAAARAAVRHDDLLYLSVNALLEALAAIAAQIAALDKAVKRLSERSSACWRLMSVPGVGPITALAFEAAIEDPARFRRSRDVGAYLGLTPRRYQSGARDVTGAISKRGDAMARHRLYEAANRLLTTWSGRSALKSWGLKSWGLKSWGLKSWGLKLIKRVGPKRARVAVARKLACLLLRLWKDASHYQEEMRMA

SEQ ID NO: 344204 - protein, 337 aa, unidentified
MKYSGIDLHSNNSLVTVTDEEDRVVAERRLPNDLGKIVGFLSPWREELAGVVVESTFNWYWLVDGLQAAGFKVHLANTTAIKKYDGLKHSGDEADARYLAHLLRLGILPTGTILPPEQRAVRDLARKRMQLVRSRTTHVLAVENITARQYGARISSNQVKNLTPESIEQMPLPEDVALAVKANVAVITTLSAQIDLLEKRLQKMMGERPEYRLLTSVPGIGRVLATTILLEAGPIDRFAAAGNFASYARCVDSQRTSNGKKKGEGNTKNGNKYLAWAFVEAANFALRYCAEAKRFYERKKAKASRALAIKALAHKLARACFHILKERKPFDVTRCFA

SEQ ID NO: 344205 - protein, 313 aa, unidentified
MERSLFVGIDVAKDHLDVHAVPTDAAFRVAHDAAGLATLCERLVAWAPTLIVLEATGGHEVPVVAALASAGLPVVIVNPRQVRDYARATGQLAKTDALDARILAKFAAAIRPEVRPLPDTQTRALDEAVTRRRQLVEMLGAEENRRRLVRDRKVQGQIEAHITWLKRAIKELDRELQATIRASPLWRDAEAVLRSTPGVGPVMTTTLLAELPELGRLSRHKIAALVGVAPLNRDSGQFRGRRMISGGRASVRRVLYMATLSAIRRNPVIKVFYDRLCASGHPKKVACIAAMRKLLTILNAMLRDGRSWHAQIA

SEQ ID NO: 344206 - protein, 596 aa, unidentified
MLPHPAPAPQSPHRFGVGIDTSRYGHYAVFLKDDLQPAAPELPFAESAAGYALLRQRLDRLAQQHGPVHFLTRVDAAGQYAENLLHFLHRLATPSASAAGTPTPFRLSVSCGDPQRNKNYRAALFGSKKSDPIEARAAARFALTERPSSDIQLSLEQRTLRQIASRLQAVVRQRTRLLNQFHHLLALTFPELALLTKDLAAGWVLELVHRYPTAALLATAGPTDLAAVPYLPDQHVPTLLEYARTSIASLTGPSAAELVQEQIRQLRDGKARKKRLENLLVATYHALPRPNHVNTIIGIGDVTAAVLTAIMVDIDRFATPGKLVAYFGVLPIEVSSGVERDGQARPPRRQVMSRRGNDLVRRYLWMAALSAVRSNPAVRARYARVVAQHPQEKGIAIGHAMHKLVHLVFAVWKSGRPFDPNHYPWQTPAHRKDSDQVMSLESESSDNVMSQQEQAAGHKPDAVPAEPVVTAACADNVATPAAVGESPFIDFAHLKKQLPLARVLDQLGLSSRLRGNGPQKRCTCPLHRGDDRGRTFSVNLESNVFQCFDKKCGQKGDVIDLWAAVHGMTLRQAALDLVQTFGLEPAPHRGTEKRHG

SEQ ID NO: 344207 - protein, 309 aa, unidentified
MNTQNKNIIAIDIAKSTLQVQTENSSFVIGNDKGGFKRLDKQLSKLSKPHVVCEATGGYERPLVRHLFEQEVSVSVVNPSTVRAFAKGEGIKAKTDPIDAKMLLKYGQTRELKPSQRPDPAREELAALMDRRSQLSDSLTREKNRLDKDPAFTRKLIEKSVRFLEKQIKEVDKRIEGILASNDSLTKLVDRMTEVKGVGKTTALTILAYLPDLDSLSRGQMVSLSGLAPFNRESGKTRSRAFIQGGRAKVRKCLYMAAQSAAQHNDVIKTYVTRLMDSGQPYKSALVAAMRKILICLRSLLINPKFRLA

SEQ ID NO: 344208 - protein, 389 aa, unidentified
MKIFVGIDIAKLNHFAAAISSDGEILIEPFKFTNDADGFQLLVSKLESFDKNSIIIGLESTAHYGDNLVRYLVAEFYQVCVLNPIKTCQMRKNNVRKTKTDKVDTFVIAKTLMMQDDLRFITFFDLDMMDLKALGRFRQKTIKQRTRLKIKLTTYVDQVFPETQYFFKSGLHQNAVYALLKEAPSPKEIASMHMTHLANLLKVNSHGHFTKEQAKELRVLAQKSVGANDSAISIQITQTIQQIELLDSQLEKIEAEMTDIMKFNDSVIMTIPGIGYINGGMILGEIGDIHRFSNPNKLLAFAGLDPSVYQSGNFQAKTTRMSKRGSRVLRYALVNAAWNVVRNNATFKAYYDAKRAEGRSHYNALGHCAGKLVRVIWKMLTDEVEFNLE

SEQ ID NO: 344209 - protein, 351 aa, unidentified
MEEKYVGIDIHRDYGVACVQDSKGEILDEFRFGNDTEGISKVKEKLGNHNSHIAIESTGNMWVVLWDKLEESESDLHLVHPLKTKAIASNKLKNDKLDAKMLAKLLRGDMLVCSYVPPRDVRDERETVRLRSSLVRIRTQTINKIRSILHKYCVKYKGSLNTNSGIEFLNTLELRPVDRLAVKSYLETLKTLNAEIESVNRQIAKNDSEGVRLLMSIPGIDYYSAVLICSEIGDISRFSGHNKLASWIGLVPSMHQSGTSFYNGRITKEGSKRLRWILVQCAHTSIRTNSKINEFYTKIAKRRGENKAIVAVARKLVKIIYAVLSSKRPSTYGDPIKTERKIKRMGRMAKK

SEQ ID NO: 344210 - protein, 346 aa, unidentified
MMIIGCDFHPRLQQICFLLEETGECGQRRLMHTAEAEHYYRSLCGAKVRVGIEATGSYGWFRRLLNELGHELLVGDATQIRASNPRRQKTDKRDAEHILGLLVEDRFPAIWQPPAENEQLRQLLLHRSRLVRLRTRVTNQLDGMAKNEGLLVPGGWSSKRRKGIEALPLPGWYGERRRDLLGLLDRIEERIAPLDKAVSQAAANNAEACLLMTHPGVGPVVSLAYVLTIGNWQRFPRGKQVGSYLGLIPAEESSGEKRRLGHISKQGNTLVRWLLVEAAATAQRYDANWHRQYVQLSMTKHHGVAKVAIAHKLAVRLYWMLRSGEDYQHVRERGSNARQSECPGGR

SEQ ID NO: 344211 - protein, 344 aa, unidentified
MDHFAGLDVSVKETSICIVDDRGRIVKEVKVASEPEGLLKVLGNPAYRFRQIGLEAGPLSQWLFSALAEAELPVVCVETRHMQAVLKAQINKTDRNDARGIAQMIRVGLYRPVHVKTLRSQKLRMLLTHRKLLQSKAIAIENDLRGTLRNFGLKVGMVGKVRFEARIQGLVENQPDLAVLVEPLLIVRRTLREQIVILHRRLLAIVRDDEVCRRLMTIPGVGPVVSLTYRATVDVPARFRKSKSVGAVFGLTCSRHQSGEVDWSGEISRCGDEMMRTMLYEAAQSMMHSKKWCWLKAWAMQIAKRRGMKKAIVAVARRLAVIMHRIWVDGTEFRWTREQAAAAA

SEQ ID NO: 344212 - protein, 347 aa, unidentified
MKRIAVDLAKSVYQVAESVRSGHVMQRKRLNREAFRRYIQEQTEPVEWVMEACGTAHYWGRLAQSLGHQVRLLHPRYVRPYRRRNKTDRNDCDAMLEAARCTDIHPVLVKSHDQQQLQQLHGLRETWKKSRTQRINLLRGVLREAGIEAPASTAAFIQAASELVDQPELACLSRLLHIVLAEINLYEQCMAECEQQLKRWHADDDIVRKLDEVSGIGLLTASALTTAVGKPERFASGRQLSAWLGMTPREFSSGNSRKLGHISRQGNVYVRTLLIHGSRAALLAAQRCQARTPEKLTQLQRWAVETAARIGHNKAAVALANKLVRICWAVWCHERRFNGNWQSVKPA

SEQ ID NO: 344213 - protein, 322 aa, unidentified
MNKYKETFGVDISKDVFDVHGSNKGHDQYKNDETGFKKFLKELPKCSLVVMEATGYYHYRLAQFLYKNGVIVSVVNPLSVKRFIQMKLAKVKTDKSDAKAICEYALVNEVPIYNALTDIQSECLQLFRLLDIYLKQRTATKNKIHGEAVLGIPSKFVYRSLIRNKKLLNKEVAAIESKILSLVKEDQQEQLTLLMSIPGIGQKTALFLIVVTDGFNKFENAAQLCSYVGITPTIRESGSSVRGRARISKVGNRKLRNLLFLCSFNACKHNRACREVYERIVNRGKSKKLALIAVANKLLKQSFAIAKSGRPYDETYVSILPR

SEQ ID NO: 344214 - protein, 352 aa, unidentified
MIVLGADMHKSSHTVIGVAAATGEMLDEKTAAVGARGFDAVLRWARGLGPDRVWALEDCRHVSGSFERFLIARGERVVRVPTRLMANTRRSSRERGKSDHIDALAVARAALAEGIGTLPTAELAGPELDIRLLVDHRERLVRARVGLNNTLQWHLHDLWPELVLPGSSLFYGKWGPRIARRLARAEQTMRVRIARDELRRLRELTQAINALEAEIAELVGRVAPQLLSEPGFGPLTAAKLVGEIAGAGRFATDAKLARSAGLAPIPVSSGRTDRHRLDRGGNRQINAAIHRVAVTRARCHQETIEFVARKQAEGKTHREAIRCLKRHLARRIWQLLRAPHPVSETAPYPWIP

SEQ ID NO: 344215 - protein, 388 aa, unidentified
MEVIHRRCSGLDVHKETVVACVRLVSDGKITREVRSFETTTCGLLLLLAWLTEMGCTHVAMEATGVYWKPVWNVLSDGDFELVLANAAHIKNVPGRKTDVSDAAWIADLLAHGLIRSSFVPEQEIQELRELLRTRKQLGRQQSNHIKRLQKTLESANVKLDSVITDIVGKSGRAMIQALIAGQTDPVKLAALADRRIKASPQQLREALHGRVTDHHRFLLHLHLQHIDFADAAIQDIDRNVTALIARMDQEVQAGQTRATFQSLILLLMTIPGIDVLSARIILSEIGRDMSRFPTAGHLLSWAGLCPRNDESAGKRRSTRLRKGDLWPGARKAVISMRNSSAFAGAEVRRRRPVQLRLHCSRPSTTCSRTARNSRISVRTILIAAPRT

SEQ ID NO: 344216 - protein, 387 aa, unidentified
MSPTIAARRPAAVDYERTLILSIEVSNQSWVLAAQVPGLPHTKAKRTVDPEAEALMAAIAGYRSRAAAMGRSIERVIAVYEAGWSGFWLARWLTRHKVEVYVIQPSSVPVDRRMRRAKSDGIDAELLLRTLLAWLRGEPRVCSMVPVPDEADEDARRCIRERTELISERVGLTNRIGAVLATLGVTDYNPLLRNRHHRLAELRTGLGEPLPPNAHAKIARLLARLELVLAQIAELERERDAVVETETPDHASKMIQQLISLRGIGVQSATVLVREAFVRRFANGKALGSYAGLTSSPYSSGGIDREQGIGKGGNRRLRTVMVELAWLWTRYQPAAAQVCWFRERVGSTGRRVRKIMVVALARKLLIALWRFVIDGVVPEGAVLKPTA

SEQ ID NO: 344217 - protein, 400 aa, unidentified
MRFIGLDIGRDYAHVAVVEGSGTSRRLPRVAMGDDFRAFAATLGPDDAVALEASSNTWALADLLGRHAGRVVVSNPLRTRAIASAKRKTDDIDAATLAELLAADYLPPVWQPDAATRRLRRLVSHRAGLVRDRTATRNRAIAVLARHLLRSPATDLFGVRGRAWLASLELPVEERLALDAALALDAVLSEQVRAAERAIAEAVVDDPRARRLLTIPGIGLVIAASILAVVGDIARFDRPAKLVSYLGLDPRVRQSGDRPAMRGHISRAGQAHARGLLCEAAHSAVRSPGPLAGFHARLKARRGAGVAIVATARKLAVLVWHILAKDEDCRFAPPVRTAFKHRELERLAGRERTRPPQRGATGSSHDLGRARLRGGHDPHQPALRQAIDRVRPDDTSMPGA

SEQ ID NO: 344218 - protein, 343 aa, unidentified
MTHYVGLDVSQKMTAICVVDSSGGRVWRGQCPTEPEHIRRTVVRHGGKDARIGLETGPMTPWLVHELRGLGLDITCLDARHARAALRMQINKTDQNDAEGLAQIMRTGWYRSVHVKSLDAHRARALLGARAQLVGMTTRLSNHIRGVLKTFGMLPGAMRGLPFDRRVETLIADRGDIAPIIQPMLAAWRQLREQIATFDKAARTLVKSDPTCRHLMSVPGIGVLSVLAYVSMVDDPTRFSCSRSVGAHLGLTPRQYQSGEMDRAGRISKCGDTLARTLMYEAAVVLMTRVKRASGLKDWAEAIAKRSGVGKARVALARKLSVILHRMWCSGEPFRWTEQPASA

SEQ ID NO: 344219 - protein, 315 aa, unidentified
MDAIRECCAGLDVHQANVVACVLKGPLEEKPQMFIQEFSTVFSGLLELSDWLAELGCTEVAMESTGAYWKPVFNVLEATCDVTLANAAHIKNLPGRKTDKKDAQWIAELHRCGLVSNSFVAPREIRELRDLTRYRRKLKGYETSERNRILKVLEDANIKISTFMSDVFGKSGRLMLDALVNGEAIDPEQVADLAKGRLRAKIPDLVQALNGRVTLHHRKIIQRSLEHLEFLEKSIADLEADMEHYFAPYQQQEELLQTIPGVGPNVAKVILSEIGTDMSVFPSASHLSSWAGLSPGNNESAGKKNGRKRRRATKR

SEQ ID NO: 344220 - protein, 332 aa, unidentified
MKIKQTIGIDVSKKTLDVFIHSVKKHKCFKNEPQGFTSLICWVEEHNPFENQETLYALEHTGLYSLGLSIYLTEHDHPFVMIAGLALKKSLGLARGKDDRIDSCAIALYAYRRREELTPCRVPSVNLLKIRKLLSLRDKLVKQRAGYKTTLKETLRVMPDEHNQTYALIHAEQITSLTKSIKSVEKELQKIIASDEELNHQYQLITTIDGVGVQTAMFMIAFTAGFTLFENSRKFASYSGIAPFPYQSGTSIRGRTRISCLGNMKFKSLLSNCATSAIINNAEMNAYYQRRISEGKDKMSTINVIRNKILGRIFAVVQRGTPYVNTMAYCCQ

SEQ ID NO: 344221 - protein, 489 aa, unidentified
MSTAPKQEREKEGSDAQRSAPKRKARGSHCQKGGGNQRRSKLTITNPDAAGIDIGAQVHYVAVPEDRAEVSVRSFGAYTAQLDELVQWLKDCGIKTVAMESTGVYWIPLFQKLEEAGLEVLLVDARQAKHVPGRKSDVQDCQWLQQLHSYGLLRAAFRPEDSICRLRTLQRHRKNMVESAAMWIQHMQKALNEMNLHLHHVLSDISGLSGLAILDAILAGERDPRKLATLAHYRVQKSQAQIEAALRGDYRPELLFVLSQTLQNYRRMQQQIAQCDLTIEKQLAKMADCTNPNQASEPTQQSPDSAGCKPPKRKPKDALELSLAGHLKRILGVDLTTIPGLNILAVLNLLSEIGTNMGKWRNEKAFVSWLGLSPNNKISGQRVLSSRTRKVVNRAATTLRLAAMLLGKSNTPLGSFYRRKRAQLGAPKAITATARKLGCLIYRLIKNGQGYKEPDLHTYELKYKDQILNSLRKRANSFGFDLVEVSNAA

SEQ ID NO: 344222 - protein, 429 aa, unidentified
MKQNHHNTNENLKQLTPETLIFGVDISKNFHVARAIDFRGMELDKTHSFSNHILGFREFHQQIRHLQNAYNKTHVIVGVEPTGPYGYALIQFLRSHDIQVVLTLGYQVAKAKELDDNTPSKNDYKDALTIAGLVRDGRFRKLREFEPSIYELREAMSLHRQLTKDITRTKCRIDNWLCQYFPEFPLVFKDWTKKTAYATLSAFPMPVDICRHSAEEIVRVWRSSGVIKGVGLKKASQLKLQARHSIGLVRANELAAVHLRALLTQYELYLSQVEELWTLIDQIVKSIPLFHILSQIPAMGKVAACGIVAELGDVSAFSHPKQLSRLAGLSLKESSSGGKRGVSEITKRGRPHLRHSLYLAVIGLLKSRTGAFWVLHQYHTKHKETPLKPMQSVIALCNKLLRVIYGMAISGQPYDPELVLSGIATQEAA

SEQ ID NO: 344223 - protein, 343 aa, unidentified
MDHFAGLDVSVKETSVCIVDDTGRIVREVKVASEPEELLAVLTNRIYQFKRIGLEAGPLSQWLYSILAEAGLPVICVETRHMRAVLKAQINKTDRNDARGIAQMMRVGLYRPVHVKTLRSQKLRMLLTHRKLLQSKAIAIENDLRATLRNFGLKVGIVGTVKFEARIQELVANLPDLIVLVEPLLMVRRVLREQIGILHRRLLAIVRDDEVCRRLMTVPGVGPVVALTFRATIDVPARFRNSKAVGAVLGLTPSKYQSGESDRTGAISRCGDEMMRVMLYEAAQSMLIRSKKWSWLKAWAMKIAKRRGMKKAIVALARRLAVIMHRIWVDGTEFRWTREVAAA

SEQ ID NO: 344224 - protein, 303 aa, unidentified
MSIKVVGIDLAKNYFQVCVLNIDGTISSNRKVHRDRLLHTIRQLPGNTPLAMESCASSHYWGRVFLGLGFKVSLIPAQHVKPFVGRQKNDANDARAICEAYSRPDIHFVPVKSIEQQDLKALRSVRSRLVEQRTGLANQIRGLTAEYGIVFPTSIRALRNHLPLIIEDAENELSHVMRNLLQTLYCDFINISSKIDDVTQDIITLSQQSPRYKAIKNIPGCGPILTAAIVSEVGSGQQFQNGRQFSAWCGLVPKQNSTGGKNSLGALSKSGNRDLRTLLIHGARAVLRVELQAWILWELGYEA

SEQ ID NO: 344225 - protein, 353 aa, unidentified
MQRPEAGSVVVGVDTHKEVHVAAVVDHDGNLLDESSFPTTRQGYRMLERWAESFGPIYRVGIECSGSYGSGLMRHLTKSGIEVLEVTYPDKSVRHKRGKDDFIDAEMAAEAAFTGNRTVTPKTRDGMVEALRMLHKTRQTAVHSRRIALQMINDQIVSAPEELRDQLRGMTRMQLIRHLVATRPDKTAFRTPEGAARISLKHLAKRYVDLDDEVSELDDAIAAILADLAPKLIALPCVGPQTASQLMITVGDNPGRIKSEASFAMLCGVAPIPVSTGMKSRHRLNRGGDRAANSAIHIIAVGRLRTDERTRAFIDRKMSEGHTKTEAIRCLKRYIAREVYYVIKEQNRSINSA

SEQ ID NO: 344226 - protein, 338 aa, unidentified
MYYTGIDLHKFTSYLTTVDSSGAIVKQENLKNVAHNFVQYFSSIPGENQATVESTMTWYWLNDLLSSINIPLVLAHAKYVKAIAYAKVKTDKVDSHTLAQLLRMNFIPVAHKISNDNRTLRDALRARIKIVQRHTSITNSMHLLLAKYNYDSPTQLTGIPEFQYQQLSEAEQLLDEQMLDLEKQLYPYLIPNDDIQRMLWIPGIGKMNAFTILLEVDDIHRFPDVKNFFSYCRLTPSARNSGGKSKQRSSKDGNKYLKVAFCDAAIHAVQYYPVIRKYHSSLLRKKNKQIAKTIIAKEIAEIVFHVLKNKSNFNNKFKGQELQHKKSLQWPRVVSPYA

SEQ ID NO: 344227 - protein, 412 aa, unidentified
MPYRIAGIDVHKRKLAVVVADVEVEDEYQFERRWYGSNPEQLRMLSEWLLEQQIEEVVMESTAQYWKPRCQSREGAGRMSGTLHLAQALSNRGRRGRKKDFRDAERLVKRLVSQELDLSFVPDTEQRMWRTLTRTRYQRTRDKVRLQNQLEALLEEAHIKLSSLVSDLLGASARRMLKALADGETDPAAVAALADQRLRATPAQLHDALGACTELNPVYRRLVKMTLEGLQFVEQQIGQLDQEMASLLRQHQDAVERLAVVPGLGVDSAQQIIAEVGAKAATFPSAEKLSSWVGACPGEEESAGVNRSRHSPKGNRQMRRVLNQAANAAVKHKGSIFEIVYRRLVPRLGHNKTIGVIAHRLCHLIWIILHKGVRYEERGPAVSEKSRQRRTARMVRTLRILGYRVEPLTNPT

SEQ ID NO: 344228 - protein, 458 aa, unidentified
MYRELQPLRQALSVELSAQLSPVPSGIDLEPLLQAYVDRLTLYVGCDVADQTYTLYAQNAGGEELGHLSEIPNQPKGFEQAWNWLEELCQAQHLRIVLMAIETTGIFYWAWWDYLTGRPNLARVLYNPRTTEHMTEVLSKKVRNDLVDAYALAEQVRLGSTPEVVPIENPDLLTARFCSRVVRDLAQQISRKKTQLRALLRAYNPALVQVFPHQQLHHPAVYALMAQYVFPQEFVLAGVEKITLILEEHCRSAFGKEQAEQLVAHCREVLSRPIGQEVIRERIRQLCEDVRTARKRQQEFLRMGYRLIEDRNETRLLRSSIGAGVSNTLALVSEVGSVERFPDGEHLASFLGITTSKHVSGTTVFSAKHITKQGPPNARYASVMLALHLSQRVPKYRKMYKTIKARKPPRKGHYVALVAIARDFVTNILYDMWRYQRPFFVEIEDYRQYRRQHPRPNL

SEQ ID NO: 344229 - protein, 408 aa, unidentified
MQVEHPVCCGIDVHKDTRTACLRRVDINGQVRKERREFATTYTSLLTLSDWLVEQHCPIVAMESTGVYWKPVYHVLVGTVEVYIGNAHELRSRPGKKTDKRDAAWIAELLAHGLIQPSFVPPPEIGALRDVTRTRVAFVQTRSQRKNRVHKLLEDTNLKLGSVVSDLFGVTGRRMLAALVAGERDPQVLASLALGAFKHKRPQLALALTGQFTAHHGTLLGLLLELIEVLDRQIATLDQEIGALVAPLQAQIAQLDSIPGVDIIAARDMLAEIGTDMSRFGDAARLASWAGVCPGNHESAGKRYRGKTRKGNRYLRRILVQCAWGARKTPTFLGRTFRRLEVRIGKKKAALAIAHKILVIVYHLLTLGTSYEEARYGQYNPRQEARERQRALKALERLGYTVTLERAA

SEQ ID NO: 344230 - protein, 353 aa, unidentified
MSQKLNTAIAVIGIDIGKNSFHVVGHDQRGAIVLHQKWSRGQVAARFANMPPCLIGMEACVGAHHLSRKLKGLGHDARLMPAKYVRPYSKGQKNDFRDAEAIAEAVQRPTMKFVATKTADQLDLQALHRVRERFVSQRTGIINQIRAFLLERGIAVRQGQRFLRAELPRILATPQDVLSPRMVHLIENLAGDWRRLDERIEGLSSEIQAIARQDAGCERLMSVPGIGPIISSAMVAAIGSGEVFTKGRDFAAWLGLVPRQMSTGGRTILGRISKRGNRYLRVLFVQAAWVVLIKPKSWERHGLKSWIEAAKKRLHHNVLAIALANKLARIAWKLMVTGETYASKPAPALAGAV

SEQ ID NO: 344231 - protein, 460 aa, unidentified
MSLTGSSPNDIEEDVVSKGSGLSRGDKRRNAKLAELRRLVAGDHAILGIDLADEKQVGVVCDHDSRVLARQTVRVKAWNLGSVLEWAARIAHRHGFAGVTVGCEPTGHRWMVLNQLATQRDMTLVCVNPMLVGRAREAEDYTRDKSDDKDAMLIARLVGELHCYVPERADETWARLRQLGARRERLITEATACVHQLRDLLECAWPGVLAAAAKPFESANWCAALAVVLDRCNGHPERVARGDLARFEAAVRRELPRWGGSRRRRNIIAAVFVVLVDPTGVMAQRPGALERARWVLADWRSATTRLAEVESHMVEVLDELELTELVTSIPGVSAVGAAAMLAETGDPTRFDSPRALVKHAGLCPRDNASGTFSGRARISRRGRPRLRLAAWRAVWGALPHNPVMAARYRYLTTRQRNRLTGGQARAAIAAALLRWMHVVVTRRVAWDAATAGAAVMPAAA

SEQ ID NO: 344232 - protein, 330 aa, unidentified
MKNYQEAVGIDVSKKTIDAYCYQAQVHKAFVNDIIGYKSLLKWVLKTTKTSDVFYCFENTGYYSLKLALYLHSQNIVYIEESPLKIKRSSGIVKEKTDRLDACLIARYAWLYREELTPSTVKSTSHLELGRLLALRDQLVRNNAGLKGTLKELRALLSNTTKDAGCISLTRSIVYIQKQIKGIEVRITDIIAADTSMSKNYQLLSSLKGVGLVVASQLIYHTGNFTRFDNWRAFSSYCGTAPFEHRSGTSIHRRKQCHYLGDRKMKSLLSMASVSAIQHDSELRLYYKRKLAEGKDKMVAVNNVRNKLIARAFAVIKRGTPYVVLQQYAA

SEQ ID NO: 344233 - protein, 391 aa, unidentified
MSMYFVGIDISKYKHDCCIISAADQKVVSKFTFQNDKAGFEELLTVLNSLSNPEDIKIGFESTAHYALNLELFLENAHHSFMEVNPVLIKEYKKSTTLRRTKTDSVDCESIARWLMTVEYKPHSKGFYHSYSLKSLTRLRDRLIRQRSFYLVKITNVLDHTFPEFKPFFNERLSKTALYLLENYGSAEKMARMNSASYDKLRCISRGKFSIQQFLRLKELAANTVGVNNSIFDIELISLLTLYKSLVKEIDTLESEIHKLIEEVHPHYLTIPGIGPISAAVIYAEYGDISNFSNPGQMLAFAGIEPGINDSGTESHGGRMVKHGSSQLRYVLLNACLPLIRFDLTFATYYAKKRAEGKKHRVAVTHVAKKLIRVIYALERQDIDFNTQKLR

SEQ ID NO: 344234 - protein, 415 aa, unidentified
MEVLYPHCAGLDVHKDTVVACVRLAANGTTRTDVRTFDTTTPGLLALSAWLAEHDCTHVGMEATGIYWKPIWHVLSDGDFTLILANAAHVKNVPGRKTDVADAVWLADLLAHGLIRASFVPEAPAQDMRALLRTRKQLVREQASHVQRIQKTLEDANLKLGSVLTQIMGVSGRAILQALIDGEHDPDRLLALVQRGVKAPPEKLRAALRGRVTARHRFLLRLHLRQVDALDAAIAEIDLEVDRGLDPFRQAVCQLRTIPGVSDLTAQVIVSEIGTDMSRFPTAGHLISWAGLCPRSDESAGKRRSTRLRKGAPWLKTTLVQCAWAAARKKASYLQAQFQRLRHRRGPKKAICAVAASILTAVYHMLRDGTFYHDLGASHFHRASPEEQANRLARQIEKLGFSCLLTPATSVSVSV

SEQ ID NO: 344235 - protein, 366 aa, unidentified
MIGKEYYIGMDVHKDTVQMAVFTETGEEPVYEKRLRNDTDLLVKEVVVFCRKGKTEVAYEAGSLGYVIYRAMERAKIPCYVLPANKVAKKRTDRIKTDKRDARLIGRELRSKSIRPIAVPDEVDEAARDLIRCREDVNEDLRRTKQRLLKLMVRHGHIYTEGGNNWTLKHWRWMDQRTFKHEYDGMVYEEYRSQIRSLEERIVRLEEKIVAIAESPRYKAAVSKLRVFKGIDYIIALSVLCEIGDFRRFAGAKDFMSYIGLVPSENSSGGKRNQGGITKAGNGHLRRLLIESAWHYTRNARPGKRLEKRRQGYPANLIDIADRALHRLHKKYLKLVFNGKHKNVAVTAVARELAGFIWAVQVSNVA

SEQ ID NO: 344236 - protein, 281 aa, unidentified
MCVVDDAGEVILEQKVPTEPDDIIALLSSLGVTYGRIGIEAGPLSQWLVSALTAAELPVICVETRHMKALLTAQQINKTDRNDARGIAQMMRVGLFKPVHVKTLVAQEQRMLLTSRKLLQRKLLDVESDLRGTLRNFGLKVGAVSGSRYEARVRELVAGFPRLAAIAEPPLYVRRVMRQQFAVLHKMLLDTVRGDPVCRRLMTAPGVGAVVALTYRATVDQPQRFVHSRAVGAHVGLTPKRYQSARSIMKAGCPNVATPCYARCSTKPHIHCLSRAGNGRG

SEQ ID NO: 344237 - protein, 336 aa, unidentified
MSKRYMGIDVHKKLCVFTELDSRGNIVNQGKFSNDLPEVSDFTSRLAPNTHLVLEPVLNYLWLLDQFEPYVGSVHVATPHKVRVIAESRNKTDKSDSRVLAELLRINFLPESWVPPQELRSLRTVVRQRYHLVGTMVSFKNRIRHLLMEHGVKLRVSDISSLRARQEISRLRLPEVTLFSIRQCHASIAVLKASIKELDDRLDALSDGVEMTSLLNTIPGIGRIWSVTIYSEVGDINRFRSRKAFASYTGLIPSIRASGDSIHHGSITRHGSRPLRHALVEAGIHAARRSPSLRRLYNRVLYRGNVQKARVAVARKLAVIIYAMLKNKQPFRLEHA

SEQ ID NO: 344238 - protein, 321 aa, unidentified
MTEVVTFEQIVNRGCGLDVHKQTVVATINGSGLKQETREFGTTTRSLTELKEWLMIEGITHVVMESTGVYWKPVYHVLEPTGITVWIVNARHVKYVPGHKTDKRDSKWLCKLLLAGLLKPSYIPPREQRELRDLTRYRRKLIEQIASEKNRIIRQLEDCNIKLSSVLSDTQGVVGTKLIDKLCASGKVTMEDIEEVYHGKLQASREEIYEACEGVVTEHHVFMLQAIKEDIHSCEAIIAKVTLRIKEMLSPYENVLELLKEVPGLSTKSVEDLIAEIGLDMSVFPTEKHLASWSGVSPGNNESAGKKKVDVLPTETSKSRL

SEQ ID NO: 344239 - protein, 371 aa, unidentified
MRTKATHEVRRFSTTTRDLLELADWLAAQGITHIAMEATGVYWKPIWHILEGRFELVLANAAHIRNVPGRKSDVNDAVWISDLLAHGLIRASFVPPTQIQEVRDLTRTRTQLGREVAQHIQRIQKTLESANIKLTSVISNIIGTSGRRILKAMIRGKTNPAKLAELGSTRLKCAQADLTAALDGRVTAHYRFLIAHHLRLIEELERHIAAFDARIEELLAPLRNAVAQLITIPGVSRVSAQVILAELSADMTPFPTAGHLLSWAGLAPRLDESAGKRRSTRVRKGAPWLKPVLVQCAWGAARSKGTYYQAQFFRIKARRGPKKAAIAVAASLLTAAYHMLKTGTFHHDLGADFRVQRDKARIATKHRYQAR

SEQ ID NO: 344240 - protein, 499 aa, unidentified
MSSRIVPGVLRSVIEGAFVKQNHRRCCGIDVHKKSVTVCVLPGVGQAHIEVKKRKFRTFTRDLKQLRAWLKHCQVTEIALESTGQYWRSLWNLLEGEFEKLILVNPQHIKGLNGYKTDPKDAQWIADLLEGGKLKGSWVPERPIRELRDLTRQRVHVLEDLNRAKNRIEQLCQAGNIKVSSVATDLFGVSGRKMLKAIIEGKRDAGWMADYARGSLRGKRRELELALEGTFSDQQRWLLEKELRQVEWLEKQVEALEEEIERRVAEYAEPIRRLETIPGIDRKTAWTIVAEVGIDMRVYGDAKHLASWAGLCPGNRESAGKRMSGRTRKANRYIKRAMCQAAWAASHTKQTYLAAFYRRMAIRKGAPKAVMALAHHMLTVVYQVLSEGAEYIEMGGDYYDQRNKPRTVSRLLGRLARLGYYVSISPIGPASPGESTTAVDAPVQVTPTMPLPAADAATTGQRRRGRPCKCEERGIICKHRGTQEVNSLIQQPSSPGRFW

SEQ ID NO: 344241 - protein, 375 aa, unidentified
MTMMHHREIHYIGLDVHKATISAAIAEESGTPTSYGRIPNDPAAIRTLMTRLGGPQVELRVAYEAGPTGYALHRQLTRMDINCIVVAPSLIPKQPGNKVKTDRRDALKLARLLRSGDLTPVWVPDEAHEALRSLVRARADAKADQLRAKHRLSKFLLRQGCWPPSGVRNWSQRYFTWLHQLEFEHLPDRVVFADYLAEVTAAGERINRLEAALHQCAQSSSQVALIRALQAFRGIGFLSAVTLVAEAGDLRRFRTAPQFMAYAGIVPSESSSGGKQQRGSITKTGNSLLRHVLGEAAHHARHAPRVTSKVKQRQTDLPADIVELAWRAQVRLHTRYRHLSGRIGALKALTAIARELAGFVWAAGQVFQEEVPAAA

SEQ ID NO: 344242 - protein, 315 aa, unidentified
MNNKEQVMGIDVSKAALDVAVLPSGEVLQFANDANGIDDLTKTLKSAAVDLVVMEATGGYETAVATALVGAGLRVAVVNPRQIRDFAKASGRLAKNDRIDAQVIAAFGQAIEPEIVRLPDEEARKLEELLVRRRQLVAMRVQEMNRLGLMQGAMRKRIKSHIDWLEKEIAKLDVDITAGLRSSPAWRAKDELLRSFKGVGPVTSSTLVVELPELGQLDRRAIAALVGLAPFNRDSGVMRGRRSIYGGRSHVRTLLYMAATTAIRSNPVIRAFYERLKARGKPHKVAMVACMRKMLTILNAMVRQSTPWTPETNSV

SEQ ID NO: 344243 - protein, 339 aa, unidentified
MRLYVGEDLHANNNFLAMVDRKGKRVEQKKLPNDLSVILEFLKPYQKEIVGIVVESTFNWYWLVDGLMDSGYKVHLANPSAIQQYSGLKHADDKHDAFWLAQMLRLEILPEGYIYPKEERPIRDLLRKRRHLVRLRTSLIISLQNIISRNCGVQFRVNEVKRLKEDRVSPLLEGNEDLALAGQTSKEMIDQLTRQIRKIEAWIVQRIELKESYRFLLTLSGVGKILALTIMLETGPIRRFAQVGDYASYCRKVPSKWTSNEKTKGQGNQKNGNKYLAWAFSEAAEFARRYDPQARAYYTRKMRKTNFMVARSALAHKLARAAYYLMRDQVPFMPEKLFG

SEQ ID NO: 344244 - protein, 351 aa, unidentified
MSQKTNAVAVRTIGIDTGKNTFHLIGLDEQGTIVLREKLARGRIGKRLANASPCLIGIEAGLATHYVARELLALGHDVRQVPPAYAKAFRQGHKNDFRDAYAIAEAVLRPSTRCVPVKTDDQLDLQALHRVRSRLVAQRTAVINQIRSFLLERGIAVRQGPRFLRQQLPEILAKRIDVLSPRMIGMIEDLAGDWRRLDERIECITEEIEQLAHGSESCRQLMTVPGIGPLIASAMVAAIANGAAFAKGRDFAAWLGIVPKQRSTGDRTILGHISKRGNRYLRTLFIQGARVILLRPANWARHSFGPWLTAAAKRLHHNVLATALANKLARIAWTVLAQRRNYETRVVTEAA

SEQ ID NO: 344245 - protein, 438 aa, unidentified
MRDTKTSYDLVIGLDRSDRKADLHFIDTATGQSRSETLDSSPEKLRQWLLDLRQRHPKASVAICLEQPAGHLVPFLETYNWITLYPINPISLQKYRETFITSRAKDDGKDAQYLGELLLNHRDKLKPWKPQDTQTRLLQQLVAHRRAVVDERTALTNRLQALLKAYFPQALQLCGEDLWRPLATAFLLKWPTLAAVQKTKPATLKQFYYLHESRSQKLIDQRLQRVEQAVAVSDEPALNQSFAIRVQLVSRQLQDVVQTIKHYEKQIAAIFAQHPDREIFTSLPGAGPVLAPRLLASIGSERERFDSANNLQRYTGVAPVTKQSGKMHYVHRRYLCPKFERQSFHEYAKESVLWCRWAAAYYLAQRSKGKPHHTAVRALAFKWQRIIWRCWQSRAPYKEEIYEAALRKNGSKLVALFSQIEIGKNPVKNPAKPPEKTS

SEQ ID NO: 344246 - protein, 408 aa, unidentified
MDSTVARGAGVDVHQGTMVVTVRVPGPGGGREVTTQTFGTMTSDLLAIRDWLQSLGITHVAMESTGIYWRPLYYLLEEQFTVLLVNMQHLKHVPGRKSDVRDSEWLAQLLEWGLLRSSLVPPQPIRDLRDLTRYRKRQIEDRAQEVNRLVRLLEDAGIKLASVATDVMGVSGRAMLAALLQGQSDPAALADLARGVLRRKLPALREALQGRFRPHHAFLLTQILSKIEFLEEVIEHLTAAIDEHVRPFEADLARLMTIPGVARRNATTIFAETGGDMTRFPSAAHLCSWAAICPSQHESGGKRRSGKLRDGNRYLRGALIEAGLAATRAKGTALQARYYRVKRHRGHKKAIVATAHQILEISYYLLRDQMTYRELGADYFDRRDRDRTVRRNVKQLEALGFTVTLAAA

SEQ ID NO: 344247 - protein, 357 aa, unidentified
MTTQEKTSCMYVGIDVHKDTHTAVGISPYGEKMFEITVGNYKNDFEILKEKVEEMKGVLSPYIGLEDVRGYGERLAEYLYQIYPVYHVPSILVDRQRQNAAHPEKSDSLDAQGVAKVMIQNINTLLPYTISQEGRKAKQLKEISIDREDLVSERIRLKNQVHTLLYRIYNTEYANKYKDPFSIKALTFWRNAKPKCDPFLLKTMKRKVRRLLDIHKEVTDLEKDMKILLDEGEYTIHTASGCGLVLASTIIGEIGDINRFTSPGALAKYAGTAPRERSSGKKVRHVKSRSGNRRLNCAFHRMALAQISRMGNDRARAYFKKKISEGKSKSQALVCLRRQMVNIIWMMLKHKTVYRNA

SEQ ID NO: 344248 - protein, 396 aa, unidentified
MTTIGIDIGGRSHAVARCRDGMSRADREILRVGQDRAGFAVLDAWLERQAEPVTLVTMESSGHYWMPLASHLRRRDIPVAVVNPLAAKYFARSRLSRTKSDPADARSLAEMAMRDTPDARDPLAGVELRQAARFAMTLVEEQAKVCQRLVRLVELGFPELGELFDDPTCRTAREVLRVAPTARAATRRRMATLANANAGSGHRRLGPTRAERLQAAAADSIAVPELDAEVAFEVGLLLDQYDLLEGQIEEADRRVAGLLDGETARRLQTIPGVGPSIAATLLAEIGDIARFTDFDQLLAYAGIHPAERSSGRKGANAETAWHMSKAGNAHLRAAAYRMALVGIQHNQIIAAHYARKRAAGKSKMNALGHCMRKALSIVWGVWRNGTDFDPGWGVET

SEQ ID NO: 344249 - protein, 406 aa, unidentified
MGLKVLHERCAGCDVHKKTVAVHVVVPGKSETRTFGTTTGELLTLLDWVRDLQVTHVAMESTGVYWKPLYNLLEATGMTVYVVNAAHMKAVPGRKTDIHDAEWICDLMRHGLLKPSFIPSRPQRELRVLVRYRISLTQERADEVNRIQKVLEGGNVKLASVVSNVLGKSGRTMLEAIVAGGYTTTEIAALADYRLRATPEDLRRALEGRITEHQRLILRMQLDHIRYLEQQIAQLDTEVATRLAPFEAQLHQLDTIPGVSQRTAEVLVAEVGTDMARFPNADHLVSWAGMCPGANESGGKRRNTRTRKGNQTLRRTLTEAGHAAGLTKSTYLAATYKRIKARRGGKRAAIAVGRSILEITYHVLRDGVAYQDLGANYYDERKKDAVVRNAVKRLERLGYKVTVEAA

SEQ ID NO: 344250 - protein, 501 aa, unidentified
MKAKQRKAKGNDHSSSMASKQRAKIAKAMQAPEQMEIVNRHAGGIDCGSEEHYAAVSPESVEEGEPFVRCFSAFTEGLDALVEWLKDCGVTTVAMESTGVYWVALYQKLEAAGIEVFLVNARHLRHVPGRKTDVKDCQWIQRLHSFGLLSASFRPEDMICRLRSLQRHRLNLVSAGAAEIQHMQKALQQMNLHLHHVVSDISGLSGLRIIEAILAGQRDPSQLAKLRDPRVRKSTVAQMEAALVGDYRPEHLFVLDQSLQAYRFYQARIEECDHEIEPLLQQLAERFECSSSPLAAELSQPEVIQDQAAQSQTARPIKPKRKRKPKANQPKIDLAGYLQRICGVDLTQVVGLDVLSVLLIVSEIGVDMSKWRNAKAFCSWLGLCPGNKISGGKVLDRRTCKVINRVATTLRLAAQALGRSNTCLGIFYRRKKAHLGPAKATTATARKLACLVYHLLKYKDQYREPDPVTYQLKVQKTILNKLQKQAAALGYQLLPTALVPA

SEQ ID NO: 344251 - protein, 391 aa, unidentified
MIYVGIDVAKDKHDCFITNSDGEVLFKAFTIQNNLESFDGLFQRINSIASDLGKVKVGLEATGHYSYNLLGFLLDKGLTTYVINPLHTNLYRKSLSLRKTKTDKVDARTIAIMLMSDVNLKPYSDTSYHNEELKSLTRYRLDKVQERAKLKTSISRLVNILFPELEKLVPTLHMASVYALLQEFPGASKIANAHLTKLTNLLNDASRGRYSKDMAITIREAAKTSIGSIMPAKYLEMRHTISLIKELDSEIDDIEAEIKSIMDEISSPILTIPGINYRMGAMIIAEIGDFSRFDSPDKILAYAGLSPSTYQSGQLESSYSHMEKRGSRYLRYALFNAAKFVCHWDPTFAAYLKKKRSEGKHYNVAISHAAKKLVRVIYHLEKTKQAYIKVA

SEQ ID NO: 344252 - protein, 366 aa, unidentified
MIVIGADTHKATHALAAVDAGTGRARASREIKAEEPGHLAAVRWARGLDDDRVWAIEDCRDVSRRLEQALLAAGERVVRVPPHRMGASRKGEREPGKSDEIDALAVARAVVKDGVEQFPVAYLDEHAMEIRLLFDHRADLVAERTRIINRLRWHLLEMCPELERSCKRGSLSKSRSLDRVERGLRKLPLSARVRVAREQVRELRKLSREIDALHCELSVLVSAHRPQLLAELGCGALTAAILIGHTAGNERFRSEASFALQAGTAPIPCSSGQRVQHRLNRGGDRHLNHALHIIAITRAQHDPATKEYLNRKEAEGKTPKGALRALKRHLARRFHRLLSEPAADQQRAAVDPNSNGLAPSPMACIT

SEQ ID NO: 344253 - protein, 402 aa, unidentified
MNAVGIDVSKGKSMVAIMRPFGEIVSAPFEIKHTASDINSLVELINSVKGESRIVMEHTGRYYEVLAHQLSEANLFVSAINPKLIKDFDNDSLRKVKSDKADAVKIARYALDKWQNLKQYSVMDKLRNQLKTINRQFGFYMKHKTAMKNNLIGILDQTYPGVNTYFDSPARSDGSQKWVDFASTYWHVDCVRKMSLNAFIDHYQNWCKRKKYNFSQSKAEEIYGKAKELVPVLPKDAITKLIIKQAIDQLISVSTTVESLRTLMNETASKLPEYPVVMAMKGVGTSLGPQLMAEIGDVSRFTHKGAITAFAGVDPGVNESGTYEQKSVPTSKRGSADLRKTLFQVMDVLIKMMPQDDPVYQFLDKKRSQGKPYYVYMTAGANKFIRIYYGRVKEYLASLPES

SEQ ID NO: 344254 - protein, 402 aa, unidentified
MNAVGIDVSKGKSMVAIMRPFGEIVSTPFEIKHTASDIHSLVELINSVEGESRIVMEHTGRYYEVLAHQLSEANLFVSAINPKLIKDFDNDSLRKVKSDKADSVKIARYALDKWQNLKQYNVMDELRNQLKTMNRQFGFYMKHKTAMKNNLIGILDQTYPGVNTYFDSPARSDGSQKWVDFASTYWHVDCVRKMSLNAFIEHYQNWCKRKKYNFSQSKAEEIYGKAKELVPVLPKDAITKLIIKQAVDQLNSASTTVESLRTLMNETASKLPEYPVVMAMKGVGTSLGPQLMAEIGDVSRFTHKSAITAFAGVDPGVNESGTYEQKSVPTSKRGSSDLRKTLFQVMDVLIKTHPQDDPVYQFLDKKRAQGKPYYVYMTAGANKFLRIYYGRVKEYLSSLPES

SEQ ID NO: 344255 - protein, 353 aa, unidentified
MNVNIIGCDLHSRYQVVAWVNQETGEVMTRRLVHENGEARGFYASWPRGARVGIEATFPALWFERLLADCGHQLWVGDAAQVRASVVRQQKTDTRDAEHLLDLLRAGRFPRIWVPSLAERDLRQLLVHRDKLVRTRTALKNQLHALAISEGLCRRQRLWSARGRAQLESLALLPWASRRRQELLAWLEQLDHSVSELDQAVEQAAQARPDVALLRTHPGVGAVVGLAFLLTLGPVERFRNSRKLVSYLGLNPREHSSGGRQRLGSISKQGNSMLRWLLVEAAQTAARLDPELRRTYYRLKFRRASGVAKVAIARRLAVRLYWMLRQRIDYAQLVRMSGSPGRGVVPLEAGSGS

SEQ ID NO: 344256 - protein, 309 aa, unidentified
MDAPVVGIDVARDRLDIHVHPSGANFAVDRTTEGVEQLCERLRPLKPKLVVLEATGGLEAMVARALTTWRLPAVIVNPAQVRAFAHALGQRAKTDRIDATVIARFAAATNPPVRARADAETQALADLVTRRRQIVGLIASERQRASQAPPCIRDSVRRVIEALEQEQSVIDRSIDAEVDRSLEWRRKETLLTSVPGVGPTIARTLIAELPELGSLNRKQVAALVGLAPWTRQSGQWRGRSFIAGGRAPVRTALFMGAMVASRHNAALKIFRDRLIAAGKPKLVALIATARKLITILNAILRDGTPWQPA

SEQ ID NO: 344257 - protein, 388 aa, unidentified
MIYVGIDIAKLNHYASAIDSDGVVLIEPFEFLNDNAGFYTLLSKLNSFELDDIIIGLESTAHYGNNLVSFLVTKGLHVCVINPIQTATLRKNNIRKTKTDKVDTLVIAKAVALMDHPRFVTLYDIALMQLKNLGRFRMNLVKQRSRTKIQLTAYLDQVFPELQYFFKSGIHQKTVYAILEEAPSATQIASMHLTHLKNLLVSNSHGHFKKETALELRVLAQKSVGTADRSLSIQITQSIAQIELLDSQIDTVESEMKDIVTSLDSVIMTIPGIGSINGGMILGEIGDINRFSKPRKLLAFAGLDPSVYQSGNFTAKKTKMSKRGSSALRYALMNAAHNIVKYNQTFKEYYDSKRAEGRGHYNALGHCAGKLVRIIYKMLKDDVEFNLD

SEQ ID NO: 344258 - protein, 354 aa, unidentified
MNTTQVFEKRKIAVAIGIDLAKDHCDVVAYNADNKICFTKANWAYPHLMEWLANAQPAVVLMESCKGCHVRARDIADLGHDTRLVKGADVKALRNVCQKNDIRDADYIARLLYVPGTKFVFVKNQRQQSLQFLQNEYKSIQELRIQVGNQIHAGLEEFGCPGSKSKTFIQSRMMAHLEKNAELIPDEVMASFLRRRDMWLNLFEQEEQAKTRMEEIAMTDDDAKRIMTVPGVGAQTAVGMLVHIGGDIGRFKNSGQFAASIGLVPKQNSTGGNTTLNGITKCGPKRLRANLVQCGQVILMHADKLKGNFGDWVRKLRDSGKKRGVIVCAIAAKIAKIIYRLMKDKVDYTPVPSR

SEQ ID NO: 344259 - protein, 387 aa, unidentified
MQKPHDDSKACLTAFVQDSTLTVVIEMSLRSWLVAGMVPGVNREPRKKIAPNPELLLQLLYRWRDEAIKAGKEITRIAVAYETGRDGFWLARWLRARGIDAHVIHATSVAVSREHRRAKTDRIDTAMLQRGFLGWLRGERGHCSMAIVPTVAEEDGRCPHRERETLIKQRTSTANRMKSVLIQFGVRNFNPSLRKAPKKLDSVRTPEGIPLPSNAVAALQRHMERFRIINEQIKAIERTRLQRLQRDPAEKFNAMVFLLVRIIGLGVETAEQLVREILSRNLRDRKAVARYAGLTGSPDESGSMRREKGLSRSGNGRVRNILIQLSWRLLKFQPQSDLVLWFNNRTANAQGARKPMIVAFARKLIIAIWRYVNTGVVPEGFQLRSAA

SEQ ID NO: 344260 - protein, 342 aa, unidentified
MIKLQVIGLDLAKNVFQAHGIDASGQIRLKRRLHRDEVVNFFATLEPTLIGMEACATAHHWARELSVLGHEVRLMPPQFVKPYVKSQKNDAADAEAICEAVQRPTMRFVPIKTVDQQAALLLHRTREFLIRQRTSLISAIRGHLAEFGVITAVRIRNVDRLVELLAVRGEDLPVLAKQMLGVLTDQLCDVAERVKDVERQLLAWHRSNEASCRLATIPGIGPITASALATSVVDAAQFASGRQFAAWLGLVPQQRSSGGKERLGKISKRGDGYIRQLLIHGARSVVSWRRRSTAVKDVWLAGLLLRRPFNVATVAQANKNARIVWALMTTGKTYNPRLVRAA

SEQ ID NO: 344261 - protein, 315 aa, unidentified
MLENKKEIFIGIDVSKKKLDVAVRPTGEFMSFSNNDDGISCVVDFVKSFFPTLIVLEATGGLETATVGMLADKGLPVVVINPRQVRDFAKATGKLAKTDEIDAHLIARFGEAVRPELRLLKDQDAQKLAALITRRRQIVGMITAEKNRLHAAPKWTSKDIQTNISWLEKCLKKVDKDLQNLLKKSPVWREKDEILRSTPGVGPVLSMTLLSGLPELGTLNRKEIAALVGVAPLNRDSGLFRGKRMIWGGRANIRSVLYMSVICAMRFNPAIKKFYERLRLAGKLHKVAITACMRKLLVVLNTMIKNHTCWSTVQS

SEQ ID NO: 344262 - protein, 334 aa, unidentified
MGAYYVGLDVHSRETVFVIQDPTGAVIGRGALPTTPEAFARMCHQYQVPPGTPVALETGTSAFYVARALSALDLKPIVIDAHEVRLKAHRPAQKSDRRDAFELCDGLRRDLYRSIVHIPSPAISALRTALSRRRHFIRIQTAEVNATKRLLRGAGWLIGTRGSLRNGRGWERLLGALASEPALQTHTRFHYAVWQQAGEQVRAIDLLLAELGHGFRDEVRRLETVPGVGPIVALTAVAVFADVERFGSAKHVASYAGLVPSTYQSADRDCHGHITKRGSAELRTMLCEAAQHARRPSHPLHPYFLKALCPAWLQKRGRRRGPPALPSALRPVAG

SEQ ID NO: 344263 - protein, 430 aa, unidentified
MKSNTQNAKIEAITEKTLVLGIDVGSETHYARAFDYRGIEYSKKPFKFSNTEAGFVTFKEWILDLKEKHEKDKVVPGMEPTGHYWFNLGKFLQDNEMKPVLVNPHHVKKSKELDDNNPTKNDRKDPKVIAGLVREGRYMIPYLPDGVYADLRTASNIRFQLQAELTRIQNRISRWFNIYFPEYKTVYGRPDAKSGMLILKQAPLPEDILTLGIDGVNQIWRDAKMRAVGKARAKTMIEAAEHSVGSKEGAISARMEIRMLLEDYESRNIRLQEIMTLIEELVNQIPMAEKLLEIKGVGIKTVSGFLAEVGDISRFNNPKELQKLAGLALVENSSGKHKGRTTISRRGRKRLRYLLFEVAMSLVAKNPEFRELHTYYTTRRLNPLKKMQSLMAVAAKLIRVFYVMLTKGVDYDPKKMVGDIKRPAVYLQAA

SEQ ID NO: 344264 - protein, 310 aa, unidentified
MFVGVDVSKDFFDVHLLPSGEAFRCENSSGGQQELVTRLASHAVESIVLEASGGYERSVVAALMAAKLPVVVINPRQVRDFAKALGKLAKSDRIDAFVLARFAEAIKPPLRAIPNETEQKLKEILARRVQLIGMRTMEHNRLQQAVAAEVRSDVQALIVFLEERLGGIERELDELIRDSPVWQETHKLLTSVPGVGEQTARTVIAALPELGQVTRQQIAALVGVAPLHDESGRHQGARRIQGGRGQVRTVLYMATFTATRFNPVIKAHYDQLRQKGKPTKVALVACMRKLLGILNAMVRDRTPWKLPVAA

SEQ ID NO: 344265 - protein, 352 aa, unidentified
MDKGSKLDFTGQQIYVGMDIHKKSWSVSIHTEQFEHKTFTQPPEVKKLAYYLQRNFPGATYHSVYEAGFSGFWIHDQLTQEGIHSMVVNPADVPTKHKEKAGKADKVDCRKLARTLRSGDIKGIYTPSRTEVEDRHLIRTRQSMVRKQTRCKNQIKGMLFFYGIPFPEEGNWSRNFINRLDAVRMEKASGDLALKAHLEELKHLRQIIAGLNKAILALSRSDAYRDKVLLLRSVPGISTLTAMTLLTELYDIARFPSLDKLASYTGLVPDIKSSGETEYTTGITYRRNPVLRSVLIEASWVAVRKDPALMMAFHKFSLRMKKTVAIVHIARKLLNRIRFVLMNQQRYVPAVV

SEQ ID NO: 344266 - protein, 322 aa, unidentified
MSLTILGIDISKQKFDAALFTDGKIRNKTCKNSTEGFDALKTWLEKQGVQAVHACLEATSNYGEDLAIYLHESGHKVSIVNPVRIKGFAQSELIRTKTDKIDASLIARFCLAMKPDPWIPPAPEIRSLRALVRRIDSLIDMRSQEKNRISTAHESVIFLIKEHITYLDQEIEKIRKQIDDLIKQNPQLKQKKDLLASIPGLGKVTISHLLAELNNLDRFTHVREMVAFIGLAPKETISGSSIKGKPRLCKIGHARLRKALYMPALVSIQCNPRMIAFYHRLKERGKNGKVIVCAIMRKLVHVIFGVLKSGKKYDPNYKPYFA

SEQ ID NO: 344267 - protein, 401 aa, unidentified
MTTMRDNVQRVKRFRELKATLRTDRSRLLVGLDIAQAEHLVQVRHAHTRIVVPTLTIPNTTRGFTQLWARLQQAQRATGCREVVCGLEPTGTYHQAVAVFLEAQGATVVLISSSVAYWNRRTQDGTWDKHDRKDAANCAELLEQGKVLFYSQPTGPLAELRPLVKCLRRARTELAACKARWRTTLRPALGPMGEPLPNRLRAELPAVLQAWEAAAPGRPAVAKGRLPLGLATACADLGAQVTAVQARIAAIEAALTPLAERLPAYPLLRTIPGVGPTVAAILLAEIGDVAWFTQFSQLRKLAGLDIVRVQSGQFAGQARISKCGRSLLRWALYHAAMGMARTTAGRARFAALKAKRHGDRYAGFKAIVELAAKVLRVVWGVWRSGTPYDPRRTGGLQRQAR

SEQ ID NO: 344268 - protein, 339 aa, unidentified
MRIIGCDFHASQQTIAMLDSESGEVSEHTLTHVGDSVRTFYQGLPMPVVVGIEATGSMGWFLQTLDELGIQYQVGHPAKIRQADSRKQKHDRRDANLLLQLLTEQRFPAIWLPTSEQRDVQALLRHRHQWVRLRTRAQNALQAIALGHGLRRGTSLWTREGQATMASLPLLQHAGHRRDELQALYRHLDDQIHCLDARVAEQAQQRSRSRLLMTHPGVGPVTALATDVFLGDPSRFVTGKALASYVGMIPSEYSSGVRQRLGRLSKQGNSLLRYLWCQAAIAASRRDPELKRFYGRKLHQRGLGKARVAVGRKLGIRLWIMLRDQIDYQEFCRRRPTRQ

SEQ ID NO: 344269 - protein, 357 aa, unidentified
MKIVGCDLHARQPTIAMVDTETGEFTEKTLFHERNVVREFYAALEGPVVVGIEATGAMQWFLELLEELGIESRVGHPAKIRAKETRKQKHDRRDARLILELLVEDRFPEIWMPSTEQRDLRTLLRDRHQWVKMRARLQHTLQAIALNHALRQGHALWSAAGQSTLQALALPPYTGQRRTELLSLYVQLQKRIQELDQVVEAQARQRPQARRLLTHPGVGAVTALATEVFLGDPSRFATANQVASYIGMIPCEHTSGKRQRLGKLTKEGNSLRRYLWTEATLHAVRKDPELKRFYRRKLVQKGMGKARIAAARKLGIRLWIMMRDRIDYEEFCRRGKLRQKGEAHAGMPGFNSGPARQ

SEQ ID NO: 344270 - protein, 394 aa, unidentified
MTVTNLARSITGGVDTHLDVHVAAALDERGTLLGVESFATTESGYKKLLGWLSDFGTVELVGVEGTGSYGAGLTRHLQGENVRVVEVDRPNRQRRRLKGKSDPQDAITAARAALSGEAAGEAKTRDGNVESMRVLRVARASARKARTQALNQMRTLVSTAPDPIRAELRGLSVFNLLERGSSYRPGAKRDIVSLTKFTLRMLARRALTLEEEISEIDAILKPLVKETAPELVATLGIGTDAASALLVAAGDNPERMRNEAAFAHLCGASPLDASSGKNQRHRLNRSGDRQANSALWHIVLTRMVYDPRTTEYINRRRTEGLTKKEAVRCLKRYVAREVFSLLPHDTLGLDSPIGASYGDTRRATDWGHLHLAHMPDEGHSDRMRMWDWLNPAVR

SEQ ID NO: 344271 - protein, 367 aa, unidentified
MEKSSTVFVGMDVHKDSIDVAVVDAGAARHYGRIGGDAASVDRALRKLRSVHRKFTVVYEAGPCGFWLYRRVRALGLACMVVSPSMTPRNAADRVKTDRRDAMKLARLARAGELGSVYVPDERDEAMRDLVRMREDAVSMQRQARQRLAALLLRNDIRYVGKTAWTAAHRRWIAHLKLPHPAQQIAFEEYVQAVQEASTRLERVNQAIQTHLEHWRWRSVVAALQALRGISAIHAVRIVAELGDLARFESPRKLMAYLGLIPSENSSGPRRRQGRITKAGNSSARRALIEAAHAYAHPARVSWVIARRHTGLTKSVCDTAWKAQLRLCARFRRLAARGVPRNKVVVAVARELSGFVWAIGHEIRPSV

SEQ ID NO: 344272 - protein, 322 aa, unidentified
MRYIGIDVSKATFVVAYSSDKGGEIRTFNNTTTGIKQFIGALPKDGSIHCVMEATGNYSALLLYMLNVAGITVSMENPLKVKNFAKAMLSTIKTDKSDARLITLYGEKMNPRPFKVQGEAILRLRQKRTVIRQLTKQITAMSNLRGSLACLPVPDKGATHTVDETIKFLEKKRDRLQSELTDLVEVEFSRQLALLTTIKGIGITLATALIITTGGFTYFQNAKQVSRYLGICPTYEQSGTSVNIRGHINRNGDVYTRGLLYVAAWTASRFNTKCGETYTRLRQNGKPGKLAMIAVANKLVRQAFAVVTHDKEYVDGFVSNRP

SEQ ID NO: 344273 - protein, 360 aa, unidentified
MKIVGCDLHAKQQTIAMVDTETGEFTEKTLAHEGNKVREFYAGLEGPVVVGIEATGAMQWFLQLLEELGIECRVGHPAKIRAKETRKQKHDRRDARLELELLMEDRFPTIWMPSSEQRDLRTLLRDRHQWVKVRTRVQNTLQAIALNHALRHGHALWSPAGQKALQALALSRYSSQRRDELLHLYVQLQKRIKELDRQVEEEAKRRPQALRLLTHPGVGPITALATDVFLGDAHRFATGNQVASYIGMIPCEHSSGKRQRLGKLSKQGNALLRYLWTEAVMHAAAKDPELKRFYRRKLIQKGMGKARIAAARKLGIRLWIMMRDQIDYEEFCRRGKLRQSGEAHAGMPDFNSGPASAVTG

SEQ ID NO: 344274 - protein, 417 aa, unidentified
MRVMFERVAGIDVHKDMIKVGIRGPGHRAWTRTWEVPEYRTFYGVLLTMAADLRKRGVTHVVMEASGVCTEPVCYALAGQGFEQVAVTSPAHARALKGHKTDAKDCPRPAELFECGLLRGSYIPAPDLKGLRDLTRYRTKTVQARTSEIQRLAKALESAGIKLDSVVSDLTGKSARLMVEALVDGERRGQVLADLAIGRMRTAGKLADLSRALTGRFTDHHAALCRLHLDRIALSGTAVGGLEAKIAVKADPYRRELGLLKSIDGFGDTVAQAWLAEIGPAPHEYFAGYEKLASWVTLCPGNYMSAGKRSHGRTGKAGTYIKPMLVQAAWSAIRTQGRLQARYHRLVRRFGGPKNRAAVKKAITSIARTLLKIACQVLSSGKPYEDLGADFYTRRESPEQRRACPGCVVTITPAGAA

SEQ ID NO: 344275 - protein, 355 aa, unidentified
MTSTKYIGMDVHKESISIAVMNAAGKIVMECVIGTKASTILQFIHGLRGDLHVTFEEGTWAAWLYDLLKPHVTEVVVCNPRKIALLKDGSKSDRIDARKLTEQLYLNKLQPVYHGEHGLRTLKELARCYLTITKDLTRVMNRLKALYRSWGIPCAGNEVYAPRHRSEWLSKITEAGVRRRAEHYYQQLDALRSLRQEVRRDLMVESKKHKAWKLLRQIPGIGPIRAALLVALIQTPYRFRTKRHLWTYSGLGLETHDSAQYRVVEGQLKRSKKPVTLRGLNENHNHDLKDIFKGAAMRASTAAGPLHDFYEALLTKGRKPTMARLTLARKIAAITLIVWKKEVRFDANYLNQQAA

SEQ ID NO: 344276 - protein, 311 aa, unidentified
MKSAVHVGIDVSQEYVDVVVSGNKSVMRVTANEGALETLGQQLLELEPKLILMEASGGFERLPLAILQAAGLPVAIVNPRQVRDFARSLGYLAKTDAIDACVLARFAAVLNPEPARVSEEAEEQLRALELRRRQLIGMIVAERNRLRTAPRTAGRIEGHLRWLEDEVKAIERDLQDLVESDPDMQAKAVILRSVPGIGPVLSFILLSGLPELGRLNRKEIAALVGVAPFNWDSGKFRGKRVVWGGRAHIRSALYMAALVASRSNPVIRALYERLCAAGKPKKVALVAAMRKLLITLNSMVRTQTNWLEATP

SEQ ID NO: 344277 - protein, 349 aa, unidentified
MLHAGLDLSRRRVDFHLLDGEGATVEIGSAPPDADGLRGLSERLERHGGPIRAAIESMNGARFVHDRLERAGWQVEIADAQKVKGLAPLACKTDRIDAWVLAELSRRELVPAIWLPDPHVRAERERARWRLHLVRHRSSLKQRVHAVLLAHGKPCPVSDLFGVAGRRLLARLALPEPWYDNVQASLRLIDELDREINDRETELRQLGADHRYVPLLLTVPGIGWVLAYTIAAEIGDIDRFPTPRKLAGYTGLCPRVYQSGESDRRGPLANKDPATCAGRSSRPQPTLAPTAPTASATSGQRPESASSAAPRLLRSTSPADSPKRSGTCSAATNPSLRQAPPTPWPPDGP

SEQ ID NO: 344278 - protein, 332 aa, unidentified
MENFYFIGVDVSKKKLDFCVMFEGKVVHEEETANHQNAIMALLHQFEEDYGIAGGQMLVCAEHTGQYTFPLACACKAVECKLWLENPAEIKYSSGVQRGKNDKVDAKRIAIYAKRFQDRVQYYERPTEDIERLKQLESERTLYVTDLAKYKGQMKDQKDYMPRKLYERKMKRLQTLMDDLEKAIQAITYEMDEVIASCPVLCRQRELLMSIDGVGRVVATNMIITTEAFTRFDDPRKFNCYAGVAPFSYSSGSSQHSKARVSHRADKVMKRLLHLAAVAVTHRIGGELKKYYERKVAEGKNKMSVINALRAKIVARMFAVIKRNVKYKPILS

SEQ ID NO: 344279 - protein, 343 aa, unidentified
MSEVTTIGLDIAKSVFHAHAADAAGKQVFSRRITRGKLLEFIGQQPRCLIAMEACGGAHHWAREFVAMGHEVRLIPPAYVKPFVKRQKNDAVDAEAICEAVQRPNMRFVAVKSEDQQAAGMVFRTRDLLVRQRTQLVNAMRGHLTEYGWVAPKGRAYVTMLGDLLDEELGAALPPAAQAMLQVMADMLRQLDDKIADLDKEIAKRANADEVCRRLMTIPGIGPIAATALVALAPPAETFRRGRDFAAWLGLTPVQKSTGGKTRLGRTSKMGDRTLRRLLIIGSSSCVLAASKRGAPAGSWLEDMMARKPRMLTVVANANKMARTIWALLTRKEDYRAPVPVTA

SEQ ID NO: 344280 - protein, 356 aa, unidentified
MTRIAQLEPTRVTVGVDTHRDVHVAVALDQLGRRLGEIELATTRAGYQRLLAWAERFGAVEAVGIEGTGCYGAGLARHLRARKVFVIEVMRPNRQTRRRKGKSDPTDAEAAARAVLSAEAAGSPKAGDDLVEMIRVLRVARSTAIKARTQAINALRALLVTAPPELRDELRALSTSGLVAKAAQVRPGEPRNTLSASKLSLRHLARCCQALQAETQSLDAQLAQLTATASPHLAEAFGIGADTAGALLVAAGDNPERLRSEAAFSMLCGSSPIPASSGQTRRHRLNRGGNRQANAALYRIVLVRMRYHQPTKAYVERRTSEGKSKREIIRCLKRYVAREVYTALRQSDEGKLTRAA

SEQ ID NO: 344281 - protein, 316 aa, unidentified
MAPKREVSVNVGIDVGKHQLDVYIRERDLHFNVPNDPDGIRRLVGRLGRYRPERIVVEATGRREYEVVLALAEREWPVVVCQPIKVRRYAAARGVLAKTDKLDAALLADYAAVMQPEVRPLAAGKLRLLRDLVARRRQLITMRTMELNRLDVMPKGLLADIRRHVRHLDGQVAKLDQHLAALIEATEEWRDKRDILSSVPGVGPQVVATLLADLPELGTLTNKQIAALAGLAPFNRDSGTFRGRRRIRGGRSSVRTVLFMGMMSAIQCNPKFKAMYRAMVAAGKHKKVALTACMRKMITVLNAMLRDGKEWTFNNA

SEQ ID NO: 344282 - protein, 350 aa, unidentified
MVVIGVDAHKRTHTMVAVDELGRTLGERTVAATSDGHLQAVQWAARWPGARFALEDCRHLTRRLEADLLAAGCRVVRVPTKLMAGARRAAREPGKSDPIDAEAVALAALRHPDLPAAELDGPAREVKLLSDHRHDLVVQRTRIASQIRWYLHELDPDLAIPSRGLKRHCVVAELLVELDRFDCMVARLARNLLDRCDELNHQINALEAELRKLVRALAPSLLDIPGCGVLSAAVIIGETAGVHRFRNKDAFARFTGTAPVPVWSGASKGKVRLNRGGNRAINCALHMIAVTQARKIGPGHAYLAKQQARGKDKTAALRLLRRRLSDTVFTALRADQQHDTQTTPPAAVAA

SEQ ID NO: 344283 - protein, 391 aa, unidentified
MILVGVDVAKDKHDCYIMTSEGEVLFKSFTIANNMEGFNQLYEKILSVIDNFDNVKIGLEATGHYSYNILGYLLDKGLTPYVINPLHSNLYRKSLSLRKTKTDKVDSHIIASMLMSDVSLKPYSNTLYHNEELKSLTRYRFTKVQERAKLKISISRLVTILFPELEKLVPTLQMNSIYALLYEFPSAHAISKAHLTRLTNLLNTTSKGHYTKDKAVLIREAAKNSIGSNMPAKSLELKHTIKLIKELTSEINEIEEEIKIIMNKINSPILTIPGIGLSTGAQILAEIGDFKNFSSPDKLLAFAGLSPSTYQSGNMYSSNAKMEKRGSKYLRFALFNAAIYVSYWEPTFSQYLKKKRVEGKHYYVAISHVVKKLVRLIFHLEKTNERYSTVV

SEQ ID NO: 344284 - protein, 408 aa, unidentified
MERYYLGVDWADKFHQVWVSDAQGQKVAENKVVENVEGLGEFSRWLNESRARGIELWAAIEKPQGRIVDFLLDHGVVVYPVNPKALDRARDRFRMSQSKSDSFDAHVLAEFLRTDHGHLRALEPNSDDAQELKLLTRDQHRLGRQKTRLLNQIRVTLKEYYPRPLEVFSDLEAQIARDFLKQYPTPRALSDLSPKKWNRFAKREHHLGEGRCKELWEKLNQSQLQVPDHVVRAKSQLLVVLLAQLEASSDAVQTYNERVKHFFASMPAAKLIKTLPGAKTGTIVAMLWAELGDSNNRWQSFRHLQAEAGVVPVTKASGKSHVVHFRFSCNKVMRHASYWLAFVSLNQSEWANHYYRDQRAKGHNHHQALRALGAKWLKIIFVMWRDHKPYDENYHLANITRQKIRQAA

SEQ ID NO: 344285 - protein, 438 aa, unidentified
MVVVGTDAHKYSHTFVATDEVGRQLGEKTVKATTAGHATAIMWAREQFGLELIWGIEDCRNMSARLERDLLAAGQQVVRVPTKLMAQTRKSARSRGKSDPIDALAVARAVMRETDLPLATHDETSRELKLLTDRRDVLVAQRTSAINRLRWLVHELDPERAPAARSLDAAKHQQALRTWLDTQPGLVAELARAELTDIIRLTGEINTLAQRISARVHQVAPALLEIPGCAELTAAKIVGEAAGVTRFKSEAAFACHAAVAPIPVWSGNTAGQMRLSRLGNRQLNAALHRIALTQIRMTDSRGQAYYQRLQDAGKTKRAALRCLKRRLARTVFQALRTVHQPSSEHTQPAAACHRSYCSVTPRRATSSNGYDTENPHPAPTSQASRPVDPRTVSDRQAALRRSSRAVHGHRTSSAAADRQCGARSPAAASVAEATAQRP

SEQ ID NO: 344286 - protein, 450 aa, unidentified
MSPLALDVVTKTGKTPVLVRMLSKYVGRKTSSIENDITKARNHSRQRGNIMRVIFGIDVSKASSEVAILVNGEKIHGYTIPNDAIGFNRLLGDLRTVYQPEIVFEATGVYSRRLQAFFEDNSYAYIRLNPLESKKQLDSLRVRKTDKIDAEKLATSQFILNRKPSYVQEALYQELRDLSRFYQNLTEDIVCSKNRLHKVLQVTFPELENILSSPTGKQYWNLVMAFPCNSFVLELDDAALRAIIRQSTSKRISEKRVTYLVDKLTKLANHSYCAVKKTSPMMEEVKYYAGELLRLSEYRQSVLEEMITLAQPLPEYEILLSIPGIAETTATSIIGELGDIRRFHSANQINAFIGIDLRHYESGNFLAKEHITKRGNPYARKILFKCIQNIASASHTNACHIADFYEKRKRQSQVTSTKPHTIASIHRLIRTMYYLITHNKLYDYTSTQNR

SEQ ID NO: 344287 - protein, 393 aa, unidentified
MICVGIDVAKDKHDCFILSSEGEVVADVFTIQNNAEGFDTLLQMICRCARPEDKIKVGLEATGHYSYNILGFLLDKGLDTYVINPLHTNLYRKSLSLRKTKTDRVDARTIAAMLMSDVDLKSYTDTAYHNEELKSLTRYRFDKVRERAKLKQSVSRLVTILFPELEKLVPTLHMTSVYALLSEFPGAKQIAGAHLTHLKAVLNDASKGRYGRDMATTLRDAARCSVGSVMPAKSLELQHTIRMIRELDAEIEDIETAIQSMMAEIQSPITTIPGIGVRMGAMILAEIGDFSRFDSPDKILAYAGMSPSTYQSGQISLAGAYSHMEKRGSRYLRYALYNATKYVCLWDPTFSAYLAKKRAEGKHYNVALSHAAKKLVRLIYALEKSKRPYSTAA

SEQ ID NO: 344288 - protein, 397 aa, unidentified
MSKLFVGIDVSKDSFSATGINPEGNICFSLCAAMDKGGFSELMEAITSCCKDLSAVSIGMESTGCYHINLFSFLSARVANTVIINPLLISNFAKMSLRKTKTDKKDSLTIARFLLVHQSSIKQFSISKDTKDFRDIAREKESISNLIASTKNEIKRILQTTFPELESICNIFTTTMLLFLKEFPSARFIRVSKAKVIAEALEHCGRGRSVSINADEIIKAAKNSIASDSLSKELILPQKISILLHLMEQLDKMTEILCNLSESIAIQEMEIITSIDGIGRSTGAAFLAEIGDISNFSSHKSLIAFAGLDPTVYQSGKFQGTSRISKRGNRHLRRLVYLMTIGVIRCNAFFKTYFLKRRKDGLPFRKAVMATAHKLLRTIFAMLSHKLKFNVKEVNSL

SEQ ID NO: 344289 - protein, 408 aa, unidentified
MEVLYPRCAGLDVHKDVIVACVRCVSEPTHHEVRSFDSTTRGLLELADWLALHACTHVAMEATGVYWKPVWHILEGNFELVLANAQHIRNVPGRKTDVNDATWIADLLAHGLVRSSFVPPAAIQELRDLTRTRKQLVREISQHSLRIQKVLEDANLKLGSVLSDVLGRSGRAMLKAIVAGESDPQRLAALAQGTARKKTAELREALRGHITVHHRTMLKLHLDVINALERTLSELDAAVGKSLTPIQQRVRLLITMPGVSDLTAQVLLAEIGVDMTRFPDAGHLVSWAGLCPRNDESAGKRRSTRVRKSGTWLKTALVTAAWAAVRVKTSYLHAQFLRIKARRGAKKAILAVASSMLTAAYYMLRDGVAYHDLGSDHFTRHDTSKTICRLLKRLADLGCNVDHLAHAT

SEQ ID NO: 344290 - protein, 409 aa, unidentified
MDVILDRVCGRDVHRDMVKACVRVSGEGRKRQQTLATFGTKTADLLGLRDWLEQWQVTDVAMESTGEYWKAVYYMLEDRFQTLLVNAAHIKNVPGRKTDAKDGAWIAQLLECGLLRGSFVPPPPIRELRDLTRYRKRLVEQRTEEVLRLHGVLQRAGIKLSSAVSNILGVSGRAMLEALVEGKQDASAMAELARGSLRGKLPLLRKALEGHFTAHHRVMVTQMLGHIDYLEEAIASLSQEVDERLKPFHRQHSLLKTIPGFQNRTADVVISEIGVDMGRFPSERHLASLMGVCPGNNRSAGKRKPEKIRRGGRWLKPALTEAAWAAVRQNDSYLSAQYHRLVPHKGKKKAIVAVCHSILIAAYHMLKNDVKYHDLGADFFIRRNQQAIQRRCLRQLQELGFEVELKKVA

SEQ ID NO: 344291 - protein, 344 aa, unidentified
MPIVGGLDIHRKQITFDYPGTVTGQVRRGQISPADRAHLRAWLARFSGRDDVAFAVEACTGWRYIAGELASAGIAVHLAGPADTAFARGRKRHARTDKTDSRHLRMLLAEGRLPECWIPPGHILEARALLELYHDLRAGHTAWVQRIHAVLFHHGAPALGEGTLRTERGLAALRAAAAHLSPAGQLQVATALEVIEALETRMHAVRHQLLAAARHLTGAKVLAARLYGVGPVTALAMTCWLAGEGRFSSSRKAVRFAGLDITVRSSDRKGPPGRLSRQGPPVLRWALCEAGKTHARASAPDHGYYAAVKDREGGKRAALSEARKIVRQARRILAELGDDALSAA

SEQ ID NO: 344292 - protein, 363 aa, unidentified
MNTTTAAPVVGVDLAKNVFELAVADENWRIVQRHRLSRRQFERWFVNRQVGLVVMEACGSAHHWGRWLRSLGIEVKLLPARYVRAYVRRNKTDAADAAALLEAARCGEIEPVPLKSVEQQGLQALHRIRSRWVATRTARINALRGFCREFGIAIVPGSRAGVGQIARLLAEPDPAIPLVLRGTMAQLLEEIRALEARIGGLEQQLTDVARQSPACATLLTIPGVGLLTATALVAATGGGISHFRDARHFASWFGLTPREHSSGDTRRLGRISKRGDRYLRTLLTHGARSVLRAATAASRAGRPVDPLRQWALAIQARANHNKATCALANKLARICFATLRDQEPFGVARLRSKLQRTSYALSA

SEQ ID NO: 344293 - protein, 452 aa, unidentified
MRDARVIQQIESAMNEGRIPITKSIVMRGIHMKITCVGIDVSDGHSTISAYAWGDVMLMKPQDVPHTVDALHGLADEIGRLPGEVRVVMEHTGRCWLPIAGVLREAGLFVSAVNPKLIRDFGDNKLRSLKTDKADSRKIARYGLRYWNELQPYAPTETTRQKLLEFSRQLDNSNKLLTAQKNNLQAIVSVTFPGVRKLFTSPAREDGRIKWVDFVCDFYHCDRVRKLGAAAFTECYRAWCKRKGYNFTKYGCAKIYALACNCVPSLSCDRDTKLLINEVARQLTAISVAVEVFRAKIYDLASTLPEFGCVMAMFGCGKTTGPQLMAEIGDPTRFRDRVVDGRRIKGKKQLAQFAGVAPGNNQSGSYEQQSVKASKKGSANLRRTLFQIISTHLKKMPDNPIYHFLDRKRVEGKEYFVYMTAASNRFLQRYYAQVRDYLAAQPVDPPSPSIAA

SEQ ID NO: 344294 - protein, 403 aa, unidentified
MQHVIAFDVSMGKSYMVIYNAQKQCIFESEINHSKPDFEELRKRIDQLMNENKKSPHIVFEATGVYSRQLERFMQDNKFEYFLLNPLEAKLQCDSLRIHKTDRSDAHQLALTHFTASRREKTGTDNLFYQLKSLSRFYNELDDELTLIRSRMHKVIQLTFPELEQIFITKSDLFLNFVQLFPHPDFVQNLSKTVMKNQIRKNTNKNISIRIAEKKAMEVLEAARYSYPAVRQDDVLCEQLKSYAKRYQELLHQKEQCITKMVRLAESRTEYPIILSFPGIGPNTAIRLLAEIGDITRFKNNKQLNAFAGIDIRRFQSGKTFFKDKINKRGNKHLRKLLFLIIQNMIKLRRYGQNHIVEYYDKLKTQPYNKCHKVASIACVNKLLKLLFYLITHNIHYDYRLTA

SEQ ID NO: 344295 - protein, 346 aa, unidentified
MLYAGLDLSRQRLDVHVLDEDGETVEVTAVRPDADALRTLVAAVGRHGQAVTAAIESMNGARFVHDTLELAGWDVKIADALKVKGLAPLAAKTDRIDAWVLAELGRRDLVPAIWLPDPTVRAERERARFRLHLVRHRTALKNRIHATLIAFGHPVPVSDLFGIAGRELLASLEIPEPWATTLARSLRFVDELDAQIAGCAAELRAMGADHPDVELLQTVPGIGWVLGYTIASEIGDITRFSSPKKLAGYTGLCPIVRQSGGRDDRGPLAKNGPKYLRWALIEAATGAVRHPSYRERYERTKKRLGKQRGAKVARVDVARELTTAIWHLLTKRQPFSPGRPHNALVA

SEQ ID NO: 344296 - protein, 400 aa, unidentified
MISVGIDVSKGKSTVCILKPYGEIVSKPFNITHTHKDLSELSSMLFRLNDEVKIVMEATGIYHLPVLTYLQEKGFFVSVINPYLMKSYRNESLRKAKTDKIDSRIIANYGIDHWFKMKEFQTSGEIYEELKLLGQQYQHYMKLHLLSLAELTHLLDLTMPGIKNLLASWNETNRKDKRSDFVERFWHYDIITSMSEQEFTEKYILWAKEKKYVPSQEKAKVIYTLAQESIPTLPSETSSVKMLVTEAVRVLKEVDATLGLILSRMQEIAKTLPEYSVVREMGGVGNTLAPKLIAEIGDVRRFRNGKALVAFAGIDPPPYESGQFVGCNRKISKRGSASLRKVGYETMRSLKMRSRPEDPVYRYVVKKESEGKSKKSAKIAGLNKFLRIYYARVTELYKNI

SEQ ID NO: 344297 - protein, 342 aa, unidentified
MKDIRILGVDLGKNSCSVVGMDAEGRVLLRRRMRRESIIALAAKLPGCIVAMEACCGAHHLGRMLVARGHEVRLMSPEYVRPYVKAQKNDDRDAEAIAEAATRPTMRFVALKSEAQLDVQVLHRVRDRLVGQRTSLMNQMRSILLERGISVAQGRRSLLDALEALSQEDSGIGARIRVLLDDMLCQWRALDERIMALDEEFTEMARNDPAARRLATIPGIGVMNATALVAAIGDGRTFSRGRDLSAWLGLVPRQATTGGKPKLLGITKRGSKYLRKLIIQEARAALPSLAKTATALGAWLRGLLARAHSNTVVVALASKLARIAWALLRNETGFVTGRLMTV

SEQ ID NO: 344298 - protein, 353 aa, unidentified
MIVVGVDAHKGVHVAVALDEAGRELSEWRGPNNAAGWRSLIEWATALPTPRIWGIEGAWSYGRGLAQQAVSEGETVYEVNPRWTALGRRRARKPDKSDRLDARAVAHFVRQEASSLPQVAAEDVTAVLDLLTTEREGELAEATRLRNQIHALLLQVEPEYRARLKKFRSKAALDALETYAPAGDGLLHAHRLTAVRMLAKRLRLALSQVDELARRIETLAAEDFAPLTRLCGVNLLTAGALAGILGPGNRFSSEAQLAAYAGAAPLEASSAGRIRHRLNRGGNRRLNCVLYRIVLTQASHLPEAKAYIERRVSEGKTRREARRALTRYIARAVWRLWQECQSTSVSVSMDEAA

SEQ ID NO: 344299 - protein, 311 aa, unidentified
MNTKNDPIHYVAIDVSKSTLQVQDDRRAFPVGNDPNGHRKLLGFLKTRANPLVVFEASGGYERALLQSLHKAGMPLAMVNPARVRDFARSEGVRAKTDPIDGKMILAFAKSKALRAMEVPSEACTKLAALLDRRGHLVEQLAREKNRLQNSEPFIHRSIKRMIRILEKEIAAIEEAIDQLVGSDPGLKPRSEIIGSVKGVGNITAWTLLAYLSEIQEINRNRLVALAGIAPFNRDSGKFSGRRSIVGGRAKVRKCLYMAAHTASSCNPVIAAYVQGLRDRGKPYKCAIVAAMRKLLIHIQSLMKNAQLSPC

SEQ ID NO: 344300 - protein, 353 aa, unidentified
MKTYYVGMDVHRASIVIAVLNGAGKVVEQIVLETSAARVRSYLKGLKGRVFVTFEEGTQAQWLYDVVQPLVTEVIVCDPRQNRLLAAGNKSDRIDAQKLAELLRNGSLKAVDHADHGVRELKELVRNYDCLVRDTTRVQNRLKAIFRGRAIACSGHEIYRQDRRAQWLKKLKEPGAKARAGFLYEQLGAMKPLRHQAKQLMVRTAKRQAAYPWLQSIPRLGPVSVAQLLAVVGSPHRFRSKRQFWTYVGLAVVTRTSADHEVVNGVLRRSRRPVATRGLNRNHNHLLKRVFKTAATSACHSQPFQAAYEARVRQGMDPALARLTVARQIAALTLTIWKCGETFDVTRIKQPAM

SEQ ID NO: 344301 - protein, 356 aa, unidentified
MANPKQNKKLDFIGQVFYIGIDVHKRSWKVTIRSNHMVLKTFSMNPSPIALAGHLRRNYPGAEFRSVYEAGFCGFWIQRRLTALGILNIIVNPADVPITNKERSNKSDPIDSRKLARELEDGSLVGIYIPNEEQQSIRSLSRLRFQIAKRRIQIKNRIKGFLDFHGIKTPERDEISHWSGCFIQWLKSIEFQEQLDRQTLYYLIMDLEYQRMRMKDVLKTIRRLFQQIPVLNYIHSITGIGTITAFTIYAELMDMRRFKDLNHVAAFIGLVPSVESSGEKEVIKGLTYRQSRYLRYLLVEAAWVAARQGPAPVMSYARLIKRTSKQKAIIRIAKKLLNRVRYVWLNETQYVTAVVS

SEQ ID NO: 344302 - protein, 401 aa, unidentified
MKYVLVLDVAKGKSMFMLSSNAGEVLLEPTEYVHNKIYFELIDCNINKLNIKDSLTVIMEATSIYHKAPERFFRENNYHVIVFNPLISKEITNTIRKTKTDKQDCIKLTNLFWKGSIPDRNYTEDDIYTKLNELSRQYHHLEEGLNRYKNRYKELLHLCFPEFELCFRNEKIYELTALNFIKEFPHAYIIKEKRVDALAYNMANTNNRHLNYYKRKANTIKEYARNSYPGVSENSEDVNNLKQLFKIIIDITEQKDEVKNRLIELAKQTKNFNSIVSVFGIADLSASLIIAELKDITRFNNVKQINASCGLDPTIVQSGKSINYHGPISKRGNRYARKILFNCSRNIITISAKCDKENPIYIYYKKKKQEGKHYYACLTACSTKLIRIIYALCMNNSNQQD

SEQ ID NO: 344303 - protein, 505 aa, unidentified
MVLGFYGYDIGEGKSFLSRLKDYLNECIPRSGHFDQLRGTKMKLPSNQQRSQSVKPEKASSHLEQINHNAAGIDLGGFEHWVCVAPDKAEKNVRRFGCFTPDLMAMADWLIECGVTTVAMEATGVYWIPVFQMLEARGLQVRLVNAHYVKTVPGRKTDVNDCQWLQQLHTYGLLSGSFRPENEVCVLRSYIRQRDSLIKSASTHVQRMQKALIQMNLHLHKVISDITGLTGMAIIKAIVTGERNPQVLAALKDPRIKSSTAEIAKALTGDYRPEHVFVLKQEFNLYEIYQQEIACIDREIEKCLINFEPRTLNELPKTQKKRRKKSTANHPNFDLRSLLYRMVGIDFTLIDGLDSMSVQNILSEVGLDPKRFPTVKHFTSWLGLCPGQKITGGKVKSSKTRPVVNRAANAFRLAALYLTQSRSALGAFYRRLRSRLGAPKAITATAHKLARLFYRMWTSSGQYADPGVDYYELKYHEQVLNHLQKKALSLGFQLVPQPSVTEGVS

SEQ ID NO: 344304 - protein, 344 aa, unidentified
MHSMYYIGLDVHKRTISYCVKDGSGTIHAEGTIPATRFDLDRWMRTLPQPWSAAMEATVFTGWIYDHLRPHGAALKVAHPLMLRAIAAAKKKNDRVDASKICDCLRCDFLPECYMASTAIRERRRTLRYRNLLIRQMVQMKNKISGLLMEAGVNYNKQRLHKAGYFRELLATNPDIDEGLCSLLRLCRETVVRLQRTESALVRSLERDSLLMERVERLMTIPAVGPITALTWALEVGDAKRFSSIKKAISYCGLCGAEKSSANTVQRTPLSKQRNKHLQATLIEAAKMAPRNSPELAMVYDKEKQKGNANRATLAVARKLVAYLMAVDRGQRNFQVVETNCIAA

SEQ ID NO: 344305 - protein, 312 aa, unidentified
MMTDNSIGIDISKDFLDAHRLSDGAAARFHNSPAGFRTLSTWLGDDMPTRVVFEATGAYHRSFERTFSGKLPLVKVNPLQARRFAQACGTRAKTDEVDARMLASFGNALVLEPDQPIDGEQFELKELFSARSGLIKDRVRLTNRLHTQSLALVKRQTKARIDQLTRQLKALQQDINTKLQVSPDRARVNTILRSIPGIGEVAAATILIEMPEIGTLQKKKAASLTGLAPMTRQSGKWRGKSTIQGGRKQLRDALYMPALVASRYNPDLRDKYQVMIKNGKPQKVALTAIMRKLIELANTLVKADREWVPNGT

SEQ ID NO: 344306 - protein, 391 aa, unidentified
MIYVGIDVAKDKHDCFITNSDGEVLFKAFTITNNLDGFNELHQKIASVMDDVTKVKVGLEATGHYSYNLLGYLIDKGLPTYVINPLHTNLYRKSLSLRQTKTDKVDARTIASMLMSDVNLKSYSDISYHNEELKSLTRYRFDKVKERAKLKTSVSRLVCILFPELEKLVPTLHITSVYALLSEFPGAKHIATAHLTRLTNLLSEASKGRYGKDTAITFRDAARVSIGSNMPAKSLELKHTIKLIQELDSEIDEIENEIKIIMDEINSPILSIPGINYRMGAMIIAEIGDFNRFDSPDKILAYAGFSPSTYQSGQLDGAYAHMEKRGSRYLRYALYNATKYVCHWDPTFAAYLAKKRAEGKHYNVAISHAVKKLVRVIYHLEKTKQQYIKAA

SEQ ID NO: 344307 - protein, 342 aa, unidentified
MSDIITVGLDLAKNVFQAHGADASGRAVLRKKLRRDQVLAFFGQLPSCVVAMEACGGAHFWGREIGKLGHEVRLIPPAYVKPFVKRQKSDAADAEAICEAAMRPTMRFVPVKSEKTQGAAMVFRIRELLIRQRTQAINALRGHLGEFGQIEPQGSANAAKLIAIVEDPDSCLPADAIATLKVLVAALGHLETEIGTLDAEIARRAKENEVARRLMTIPGIGPLIATAIAVLAPPPETFRKARDFAAWLGLTPRQHSTGGKQRLGATTKMGERSLRRLLIIGANSVIIKRHVHAAARPGTWLGGMLTRKPPMLARVALANKMARIVWALIARGGVYQSPVAAA

SEQ ID NO: 344308 - protein, 340 aa, unidentified
MSEITTIGLDLAKNVFQVHGVDETGQVVVRKQLRRGQILGFFGRLSRCLIGMEACATAHHWARELMALGHEVRLMPPQYVKAYVKRNKNDAADAEAICEAVRRPAMRFVPVKPVEQQAMLMMHRARDLLVRQRTMLVNALRGHLAEFGLVGAQGLHNVAALVRIIRNGADECVPEAARQVLTVIAGQIDEAEARIAVLEAQILAWHKSNPVSQRLATIPGIGPIIATAITATVPDPGMFRSGREFAAWLGLVPRQNSTGGRARLGGISKRGDSYLRRLLVNGAHAVLFWSKTAKTDPWLTSLRARKHRLVVAVALANKTARIAWAVMSSEEKYRTTPAAA

SEQ ID NO: 344309 - protein, 411 aa, unidentified
MDVLIERCAGLDVHRDTVVATVRRPGPGGVRRSETRTFTTMTGQLEALADWLAAQQVTLVGMESTGIYWKPVYCVLEDRFSVWVINAEHLRNVPGRKTDVADSMWIAQLIEHGLVSPSFVPPRHVRLLRDLTRHGRRLTEERTRTIQRLEKVLQDAGIKLTSVASTILGKTGRAILAALLAGQEDPAVLAELAKGRLRPKIPALREALTHRFRLEHHGVLIAQMLAHIDFLEASIAETHQRVGVLLRPVADMVELVMTIPGVGRRVAEVLIAEVGLDMTVFPTAGHLASWAGICPGNNSSGGKRRPGRTRHGSMWLRIALTEAAQVAARGKGTYLAAHHAQIRGRRGTQKAIGATRHDILIAYYHIVRDQIPYQDLGPDLNNRRRSTEQQTRRLVRQLERLGVNVTIEYTA

SEQ ID NO: 344310 - protein, 316 aa, unidentified
MSATPYFVGIDVAKAQLDMALRPTGERWTVTNDDAGIAALVARLQAVPPTLIVLEATGGYQRAVVAALAAAGLPVAVVNPRQARAFAKATGQLAKTDALDARALARFAEAVRPTPRPLPDAQADELRALLARRRQLVAMRTAEQNRLGSAPPRLQTDIQAHITWLNTRLAALDDDLDTTLRTSPLWREREELLRSVPGIGPVCTRTLLLDLPELGTLSRQRLAALVGVAPVNRDSGTRRGTRTIWGGRAQVRTILYMSTLVAVRYNPVLKACYERLRAVGKAAKVALTACMRKLLTILNAMVKHQTPWQPQAVSVD

SEQ ID NO: 344311 - protein, 460 aa, unidentified
MNRKTSKSSVDRTMPMMHPNAAAIDVGATLHAAAVRADRATEPVRSFGTFTTDLHRLVDWFTECGVETVVMESTSVYWIPIFELLDARGFTVFLVNARDAKHVPGRKTDVSDAQWLQRLHSYGLLRASFRPKGQIAELRAYVRQRERLLEYAASHIQHMQKALTEMNLQLHHVVADITGSTGLRIIRAILAGERDPEVLACLRHYSCHSSAETIAKALTGSYRTEHLFALEQALALYDAYHEKASACDVRIEAVLKELCIHRGRGIGSVAPAPRRRHRTDQANALAFDVRAALFALLGKDITTIDGLGPYLSLKLVAECGDDLSSWPSAKHFTSWLGLAPSNKVSGGKMLSSRTRRSGGRAAALLRLAAVTVGRTDTALGAFYRRLSSRIGKAKAVTATARKVAVLFYNAVRHGMEYVDPGPSSYETRYRTRVVNNLHRRAKAFGFVLQPLEPKAGAVVS

SEQ ID NO: 344312 - protein, 349 aa, unidentified
MKSIACDYHPSFQQIAMLDHDSGELSGRRLGNPEESAAFYRGLKGPVRVGMEAVGNTLWFERLLAELGHELWVGDAARIRALAVRQQKTDARDAAHLLELMLQDRFPRIWVPSPAERDLRQLLLHRHKLVQMRTQVKNPLQHLALNQGVQRKHRLWSRAGIELLEQLNLPPWTAGRRQDLLKLWRELEEAVGELDRAVEAEAEARPECQRLMTQPGVGPVVALAMVLTLGPVERFPRGKQVASYFGLIPREHSSGGRQRLGSISKQGNPFVRALLVQAAHAAVRHDSELRRQYLRLAQRKNRAVATVAMARKLAVRLYWILRNGQGPVEVGSMSGSPSHSLAEALQPIR

SEQ ID NO: 344313 - protein, 412 aa, unidentified
MKDLLEISCGLDVHKEKIVACILTGPLGKPTRSEIREFSTLIPDMIALRNWIVSKNCHHVAMESTGIYWMPIYEILEDAFSGDITLLVVNARHMKNVPGKKTDMRDSEWISTLLRAGLLNGSFIPEKRIREFRDLNRYRKSVIRDITSQKNRIEKFLQSSGFRLSSFISDIFGASGRNIILHLIEHGQIDKTALDSCLKTKTRNRIDEILMSVNGTLSEHQKAFLRILMTHYDSLKKHLAEIETSLEEDMAPFALQIEQLNSIYGISTTASCAIIAEIGIDMKPFKTAEHICSWAGLCPGNNESAGKRKSTSVTKGNPYIKSMLCEIAWVIAGKRNTYLSAWYWRIKQKKGAKKAIVALARKLLVIIYTMLKQGTLFDESCFETRRKHCEQKQLSRYIRELEKHGYHVEAQS

SEQ ID NO: 344314 - protein, 366 aa, unidentified
MKKISTVQSFGNEIFKEQKLTIGVDLGDRWSFYGVLDEAGKIILEQKVPTTQEAMKQTFGKIPRSRIALETGTHSPWVSRVLTELGHEVIVAHAQKVQLISKSNRKDDRHDARTLARLARIDPELLGPVRHRSVQAQIHLTVIRARAELVSARTALVNAARGLVKSYGERLPKCGTYQVSRELAAELSTELRDVLEPLLKEIESLNERIKEYDERMEKIAKEVHPEVSLLKQVKGVGTQIALTYVLTIEDPYRFLKSREVGCFLGLRPGRRNSGESEPQKRISKEGDRYLRTMMVQGAHYILGPFGEDSDLRRWGLKLAERGGKNAKKRAVVAVARKLAVLLHRLWVSGEVYEPLRNSQKAMRAVA

SEQ ID NO: 344315 - protein, 448 aa, unidentified
MIKAKSKLEIVNPDTAGIDIGSAVHYVCVPEGRDEQRVKKFGCFTVDLHNLAGWLKKCKVRTVAMESTGVYWIPLFQILESYGFEVKLVNARYIKNVPGRKSDVQDCQWLQQLHSYGLLHGSFRPDDQMCVLRNYVRQRSNLIESASTHILRMQKALIQMNVQLHKVISDITGVTGMQIIKAIIEGERNPEKLSELRDVRIRNDRSTMAKALKGDYRKELLFVLKQEFELYNIYQEKIAECDKSIEQYYKTFETKSDENKRCSKIKNRFSKNRPDFPLHEELYRVTGIDFTKVPGLDVLTIQTIISEVGLNHDKWPSEKHFTSWLGLSPANKVTGEKVFGTRTRKVIARAANAFRMAAQCVSRSNSGIGAYCRRLKKRLGAPKAITATARKLACIFYSMLKYGQEYVEKGIDYYEKLYKEKIVKTLSKKASEFGYVLIKKELLAERVS

SEQ ID NO: 344316 - protein, 404 aa, unidentified
MYNAVGIDVSKGKSTVTVLQPGGTVIRKPFDVSHTSQNLNELSSYLESLDGDTKIVMECTGRYHEPILKALSEAGLFVSVVNPHLIKNFGSNTLRKVKSDPADARKIARYTLDNWAELRQYSSMDNTRTQLKTLNSQFSFFMKQKVAAKANLIALLDNTYPGVNKLFDSPAREDGSEKWVDYAYSFWHVDCVRGIGLKAFTERYQAFCKRHHYNFQADKPEKLFNASKELVAVFPKEKTYKLLVQQSIQQLNLASGHVERLRREMNELASTLPEYNTVMGIYGVGKTYGPQLIAEIGDVSRFTHREALTAFAGVDPGVDESGQHKSKSNRASKVGSARLRKTLFQIMTTLLQNAPEADPVYRFLDKKRSQGKPYYVYMTAGANKFLRIYYGKVKECLRNLEQTE

SEQ ID NO: 344317 - protein, 356 aa, unidentified
MSMVAEAPAAAKLIVGVDTHKHLHVAVAIDSFGARLGSLTVAADRAGYAALEAWAVSLSPTPAFGIEGTGSYGAGLASHLRRCGHRVVEVNRGDRRTRRGNGKSDTIDAELAARAVRSGQASAVPKTADGASEMLRQVKIARDTAVKSRMQAIIALKCLIVNAPPELRELLDPLADKKLIDRCAALRPGPIDAPLAAAKHALRSLARRWLDLAAEIAGHDRILDQLTRASNPTLRDGFGMGPDTAAEMLIVFGDNPDRIHSEAAFAKLCGTAPVPASSGQTSRHRLSWGGHRQANAALYRVVIVRMRFHQPTIDYVTRRTQEGLTKRDIIRCLKRFLAREIYRRVMTDHATATASP

SEQ ID NO: 344318 - protein, 430 aa, unidentified
MDYNTQNKKIEAITEKTLVIGIDVGSETHFARAFDHRGIEYSKKPFKFSNDEAGFAELKTWILEHMKVHDKDKVMPGMEPTGHYWFNLGKFLQDNDMKPVLVNPHHVKKSKELDDNTQNKNDRKDPKVIAGLVREGRYMIPYLPDGVYADLRTASNMRFQVQSELTRTLNRISRWFSIYFPEYKTVYGNLDAASGMLVLKKAPLPEDILALGVDGINKIWRDAKMRAVGKKRAQTLVDAAEHSIGSKEGAISARMEMRMLIEDYESRKARLQEIMILVEELVAKIPMAEKLMEIKGVGLKTVSGFLAEVGDISRFKNPKELQKLAGLALVENSSGKHKGETTISRRGRKRLRYLLFEVAMSLVAKNYEFAELHHYYTTRKQNPLKKMQSLMVVAEKLIRVFYVILTKGVDYDPKKMTEDIKRPQGSSQAA

SEQ ID NO: 344319 - protein, 377 aa, unidentified
MVLEGTTMEKIVYVGLDVHADTIAIAVADDGRNGEIRFHGVIENTADSVQRLTKRLVAANTRPTFCYEAGPCGYGLHRLISKLGFDCAVVSPAMIPRRTGDRIKTDRRDAEMLARLWRAGELTPVWTPDEEQEAMRDLIRTRKQFLDALKIAKQQLQSFLLRHGLRYNRPTYWTKIHWRWINDLRKFRFPHQQLAFEELKRAIRQIEERISTLDQAIEDAVKDWRFGDLVDALRSLRGVNTTIAATLAAEIGDISRFESPRQLMAWLGLVPSEHSSGNTVRRGRITKTGNALARTMMVEASWSYRHPAREGHPYLKRCQHQPQEIKDIGWKAQTRLCKRYRDLSKTGKPQPRVLTAIARELAGFIWDIARRIPIQVR

SEQ ID NO: 344320 - protein, 338 aa, unidentified
MYYTGIDLHKFTSYLTTVDSSGVVVKQENLKNVAHNFIQYFSSLPGEHKATVESTMTWYWLNDLLTSINIPLVLAHAKYVKAIAYAKVKTDKVDSLTLAQLLRMDYIPVAYKISPEKRLLRDALRARLKIVQRHTSVTNSMQLLLAKYNFDSPTQLTGISEFQYQQLSEVEQLLDEQMLDLEKQLYPFLIPNDDIQRLLWIPGIGKMNAFTILLEVDDINRFPDIKNFFSYCRLTPSARNSGGKSKQRSSKDGNKYLKVAFSDAATHAVQYYPVIRKYHSSLLRKKNKQIAKTILAKEIASIVYYVLKNKSYFNNKFRGQELDHRKSLQWPRVVSPCA

SEQ ID NO: 344321 - protein, 415 aa, unidentified
MASEPTKVIAGIDTHADTHHVAVINEHGKSLADKEFLAVGSGYRKIIDFITSYGTVTAVGVEGTGSYGAELGRTLRGEGLAVLEVNRPNRAARRLNGKSDPLDAYQAAKSVLEGRTKAIPKAKDGPVECLRIVRSGRASAIKARTAAINQIKALLVSAPDKIRARYRAMANSALITALQRTRPSGHLGDPEYVTLLSLKALAARCQVLTTEIEAADAALKEILASYAPMLCDLPGVGTEVASQLLITFGDNPDRLGNEAQFASLVGVAPVPASSGKTTRHRLSRGGDRSANNALHQVVLVRMGSCQRTKEYVAKRTSEGKGKREIMRCLKRYAAREIYRQITNPRPAPDNSDLRRIRTELGLTITNVAGELGQWVSLISRLERGHIRNDKLAATYRQWLTEQSDKRAEVAQCRRG

SEQ ID NO: 344322 - protein, 340 aa, unidentified
MRFYTKQHRYYCGIDLHARSMYVCVLDWQGEIVLHKNMPCTPDLFLKAIAPYREDMAVAVECIFTWYWLADLCGKENIPFVLGHALYMKAIHGGKAKNDKIDAHKIAVLLRGGMLPMAYVYPALMRSTRDLLRRRMHLMRKRSELLAHIQNTNSQYCLPQFGKKIAYKANRQGVCEHFTDSSVRKSMEMDLWLIDHYDKLLTEVELYITKTAKVHNVNAFFRLRSVHGIGKILALVILYEIHDINRFPTVQDFVSYARLVKCAKESAGKRHGTSGKKIGNVHLKWAFSEASVLFLRGNPAAQRYLDRLTSKHGKPKRYRSSLTNWAGRSITCLRGNKLST

SEQ ID NO: 344323 - protein, 363 aa, unidentified
MQNSITWVGMDVHAENIVLAALRDSSDAILFRAEFPNTPKGRERLAGRLAENAPARCVYEAGPCGYELRRFLEEKSIDCQVAAPALIPRKPGDRVKTDRKDAEKLARLHRLGELATVFVPTPAQEALRDLLRTREDAREDLLRRRHRLSKFLLRQGRRYTEGVRWTTRHWDWIRAQTFTDHNTETVFREYIVAIEQEVERIRRIEQQIIEESRSPEVGKAIARLRALRGVDTITAMTIITEVIDLNRFRSPRELMAFIGVVPRERSSGGRERRGSITKTGNAHIRRVLIESAWHYQRLPAGTPKSILVRREGQPPEVIETARKAELRLHRKFMKLLGRGKPKGIAAVAVARELAGFIWALGRE

SEQ ID NO: 344324 - protein, 381 aa, unidentified
MNPQAALAQQISAEETVLYIFMDVSRSRWSLAFTDGSQMKFSSIVAGDFDELDERIEWAARKFKFTDDFRVISGYEAGDGFWVHRMLEKKGILNLVVDPGSFEERKNHGKRPKTDRLDARRGARKMVQFCGGDSLAFSPVRVPDPDDEDDRRLHRERRRRIKERCAHITRIKHLLANQGIVDIPDPTDEQWAVWLEDAHTPDGQPVGRYLKAELRRESKRLVEVDEMIAEIEAAQQAYLDEKADAKKAEMVEQLMWFKGIGLQTAWILVMEMFGWRNFENRRQLGSYVGLCGTPEVTGGRGWDKGIDKRGNTYVRWIAIEMAWSWHRWQPDSELSQWFDERFYDEGSRMRRRGIVGLARKLLNRLRVFLADGVVPRGAVLG

SEQ ID NO: 344325 - protein, 457 aa, unidentified
MMETKRRREQRSMLPVHPDAAAIDIGATVHVAAVGPARDPEPVRSFGTFTGDLHRLADWFAQCGIKTVVMESTGVYWIPVYEILDQRGFEVWVVNARDAKHVPGRKTDISEAAWLQRLHEFGLLRGSFRPQGAIAALRAYLRQRERLLDYAAAHIQHMQKALTQMNLQIHHVISDITGTTGMRIIRAIVAGERDPDTLVSYRDIRCHSSVETVRQALIGNYREEHLFALAQAVELYEVYQAKVATCDEKIEGVLERLKQPCRAPAKPLRAARHKTRQPNAPAFDARGALYAVLGVDLTQIHGLGPYLALKLISECGTDLSAWPSAKHFTSWLSLAPGNKISGGKILSSRTRPSGNRAAALLRLAATTVGRTETALGAFYRRLSARIGKAKAVTATARKIAVLFYNAVRHGMDYADPGASYYEERYRQRVLTNLQRRAKALGYVLQPTEIKGVSLAVS

SEQ ID NO: 344326 - protein, 341 aa, unidentified
MHITTIGLDIAKNVFQVHGIDAAEKVVVRKQLRRSQVLKFFEALAPCLVGMEACATAHYWARELRKLGHQVRLMPAKDVKAYVKRNKNDAADAEAICEAVRRPTMRFVQVKSAEQQGRLMQHRTRDLLMRQRTQAINALRAHLAELGIVAAQGREGLKNLLAIIADDGDERLPVDARASLIVLAAQLQALQTMIGSIEKRIIGQHRASEESRRVATVPGIGTLGASAITATVTDPSAFRSGRDFAAWIGLVPRQDSTGGKPKLGPISKQGDRYLRRLLVVGAHAVLRRAKQNTQAYPWLTQLLARRPFKVVAIALANKMARVAWALLVRGGTYRMPALAAA

SEQ ID NO: 344327 - protein, 421 aa, unidentified
MNEKKRKTQQEQRCWVGLDWGNEGHAVSVVNDARKVLEKFEVGASLAEMDKLVGRLRAFGVVAGIAIEATSHPVVCYLSAAGFPIYPINPKLSKNWRECNSVAGIKNDERDGLVLAVELAARHASLRLLEQDASTVELAGLCAKLRDLVDERTSLVQRLEAALGQYYRGGLDFFSDWTSPTAWRFIKRFPRPEVLAQAGKNTLIRFLKANRIGLKPIWLERIDARGDAVRWPKPAQSVALEAMALATIAQLQALQPHIDKLDRLIVQAARDLPHARLLRSLPGAGERLAPALAAITTVQAAEPETLEGIRCISGVAPVEITSGKRRRVRIRRRCNKHWRNVMHLFAKSSTAYCTWAKAFYDLHRNQGDHHGTALRKLADKWLKIIRAMLETGQTYDDKRYVEALRKHGSPVYLRLGGKTGG

SEQ ID NO: 344328 - protein, 314 aa, unidentified
MSNSRFIGIDVSKQNLDVHVRPDDLRYQLSYDAAGLAALVERFHGLQPELIVLEATGGYEHQLVAELLNDQLPVVVINPRWVRNFARASGQLAKTDAIDATILSAFAEKMRPPIRPLPDDDLKELRGLLVRRRQIVDMIVSEKNRQYTAPKRIARQIQTHINWLEKRLDEADDDLRCHIEASPLWKAKDDLLQSAPGIGPACSMTLLAALPELGTLNRHQIAALVGVAPINKDSGRFRGRRTTQAGRSHVRSVLFMSALSAIRFNPVIARFYKHLLAAGKPKMVACMRKLLTILNTMLKSSTPWISNYEKNTCA

SEQ ID NO: 344329 - protein, 352 aa, unidentified
MNKITTVGVDLAKEVIVVCAGDAAGHAVYFRQFSFHGFAQWAVNLPPCTFGMEACSSAHHWARRLTELGHTPRLMAAEFVAPFRKSRGAKNDRNDAQAILSAVRAPDMRFVTAKSVDQQTVLAWHRMRSGWIQERTALINRLRGLLAEFGFWLGRSSAVLTRSLPELAHHSSIPERLRPLIAQGYEQLQILKQRIEECERTINDHAKESVAAQRISALTGVGPLTSSAVIATVSNPRDFRNGRQLAAWTGVVPRQNSSGGKQRLGSITKRGDAYLRGLLTQGARSTLQVALKRAPDKRSRLEHWIVALRGRVGYHKTLVAIANKHMRIIWAILAHDEQYDPNAWQRLAPHRT

SEQ ID NO: 344330 - protein, 347 aa, unidentified
MRKIIVGIDISKEKLNVCLLEEMNIVHEDEIENTVASLRKWFCRMRKSLKCRMDEVLLCAEFTGRYIYPLAVACHEEEAFLWMEDPSRIKNSFGLVRGKSDSVDARRIAEYAFRHQDKAVAYHMPPKELASIKILMTDRELVLSDRKKYEAQLTDQKRFMGKEDYAMQSKMWKSIVNELQKQLDFIDEKIDKLVSDSESLSHQVELLKSVDGIGQRIAVAMVVVTDAFTRFENARQFNCYAGLAPFTYTSGKSIYSKAKVSQRANKQIKALLHLAAVCAATHMKSGDYKEYYDRRVAEGKHPLCVLNVIRAKLVGRMFAVIKRDELYIKNYDRSSSEKKLSTPVQIS

SEQ ID NO: 344331 - protein, 365 aa, unidentified
MNNSVYHTELSSHEETRCQFNGSRCPIKLGIDVHQDFYVVVMQEGGSNPKPPQRFAKEAFLYWAARLKQKSGAEIYAVYEACGFGFALQRQLSALWIGCYVVCPQKLDERNKRVKTDSLDAKALCLRLDRFVQGNKDALALVRVPSEEEEQARALHRQREQLVKVRKVLEAQGRSLMVNHGIEPVQQWWKRRAFAALAVPQWIKELLGNSQPVVLALQKKIDQLTLQLQNASTVEPPRGLGKMTSVIIDREIGNWHRFNNRRQIASYTGLCPGEYSSGGKRLQSCVTKHGNPRLRAALVELAWRMVRFQPRYHAVRKWKERLRKGQLTTGATRKKAIVAVARQLAVDLWRIRTGRLTSQQLGLEI

SEQ ID NO: 344332 - protein, 415 aa, unidentified
MKVVFPTCCGVDVHKSFLVATIIKTPKDSLQPNYQKKRFSTFNSDLNRLADWLHENNCLDVCMESTGKYWVPVFNILEKRSIRVVIANPKWVKAVKGNKDDTKDSKWIGDLFRIGLVKSSFIPAKDIRILRELTRYRYKLTSMKSSEKNRFQNAFTVCNVALDSVVSDMFGKSATAITDYLTSDEDFDPQHCVSLLQRSLKKKADDVLASIEGYEIAPEQKCRVGIIRDHLHYIEKLIERVDICINAMVEKYDGAISLLCTIPGIDCSSAITVISEIGVDMAQFGSSKRLCCWAGLTPGNNESAGKKKSVRISRAGVYLKPALVQAAHAAVKDKLNPYYALKYERIAKRRGKKRAIIAIARMILTAIFSMLSTGEIWNPVDLFKVDMPEHLKEQQLQKAVRQAVRFLEAQGLKVS

SEQ ID NO: 344333 - protein, 408 aa, unidentified
MKDTEHDFAAFIGIDWADAKHDVSLQAAGADEVEHRVLKHTPEAIDEWARDLRTRFAGHAIAICLELAKGPTVSALQKHDFLVIFPVNPSALAKYREAWAPSGKKDDPSDSALALEIVVKHRDKLKMLRPQSPQMRALQQLVEDRRKLVNDRVRVTNRITAALKAYFPQVLQWFSDKATNVFCDFLERWPSPEQAKNARTDTLRTFFIDHNVRYANRIDERIQAIKAVIALTGDPGVVLPAKLRVEVLLTQLRPLLRAIEQYDAQIAKLCNDISDYRIFASLPGAAEAFAPRLLAAFGEDRERFRDARELQRYAGVAPVTEQSGNSHWVHWRYRCPTFLRQSFVEWAAQTIPQSIAYTSMETGFSASHKLTRFRLFQRFPRADIAQLIERAADAAGPAVEDMGVDLRR

SEQ ID NO: 344334 - protein, 415 aa, unidentified
MEDVIYERCAGIDVHKRMIMVCLRIGRKTQIREFGTLTHELREMVAWLKESGCQMAAMESTGSFWKPLYNIFEIEELPAMVVNAQHMKTVPGRKTDVKDAEWIAKLLSQGLLKPSFIPDREQRELRELTRFRKSQIEERARNLNRLQKMLEGANIKLAGFVSDIDGKSATEFLELVIGKPDFTVEDVESRRHGRMKASAEELFKSLEGIVTPVQRKLFTHVMQVIREQTVQIEQTEALIQGYMTESYKNAADAIDTIPGIGAISAQQIVAEIGVDMSRFPTAAHLCNWAGICPGNNESAGKRKSGRTNHANKTLKSTLVQCAQSAKKNKNSFFSAQYQRLVVRRGKNRATVAVAHSMLIAIYHVLNGAEFKDLGADYYIQFNREKKINSHVKQLSKLGVFIPDNVLRDAFSRPPD

SEQ ID NO: 344335 - protein, 384 aa, unidentified
MRKNSIAKLQVSKSQIRRMAAKQRLTVGLDLGDRSSRYCILNEAGEKASEDQLPTTKAGLDSLFAKMAPCRIALEVGTHSPWVSRHLAAMGHEVLVANPRKVRLITQSVKKNDRMDAEQLARLARVDPQLLAPIRHRGPEAQGDLAVIRARAELVDCRTALINTVRGLAKPMGERLKSCDADYVKESLADGLNEATQNAIRPLLKSVEEITKQIGVYDKKIQEIEKRYPETKLLKQVNGVGTLIALTFILTLEDAERFEHSRDVGPYLGLTRKQRDSGDSQPELGISKAGDVLLRRLLVQAAHCILRDGAPDSDLKAWGLTKVQAGAKTGSGKKGSKRRKKKAAVAVARKLAVLLHKLWVTGEVYDPQYNRKAVEAAKGKAKAA

SEQ ID NO: 344336 - protein, 461 aa, unidentified
MSKRKKKTSAGTAKRGVLEPSIHPKSAGIDIGAEELVCAVPPDLDQQAVKTFPTFTRDLHALRDWLTSLGVTTVAMESTGTYWIATYEILEAAGIEVCLVNARHVKGVPGKKTDVCDAQWLQQLHAAGLLRASFRPSREVVAVRQLVRHRSDLVRESSRHIHHMQKTLIEMNIKLHHVFSDLDGMSAMAIVEAILAGERDPENLWLLRDRRCRCSREEFEKALEADWQSAQLFILGQSHRAWQQTHEAIAACDEAIENHLEQVSSESDDDLPPEEQNRRKQRGKNDVGFDMRSEAYRQYGVDLSRVDGISNGTLLVLLSEIGNAEELRKNFRSAKAFSSWLGLCPDNRISGGKVLKTKTRPVVNRVSNALRLAAFGVGRSDSALGDYCRRMKAKLGKAEGITATAHKLSRVIYGMIHSKQPYDEAIAFQTQPSTRTRRLKKLRKIAHSLGMQLTAIQPESI

SEQ ID NO: 344337 - protein, 413 aa, unidentified
MDTLFRRCAGLDVHKKNVVVCARIITDDGKLQEQFRTFSTMTSSLLGLKGWLTSLGVTHVAMESTGVYWKPVFNILEGAFEEVLLVNPQHIKNVPGRKTDVKDCQWIAQLLQHGLLRGSFVPARPQRELRDLTRQRAQLINEQTRVVNRLHKVLEDANIKLGSVASDILGVSGRDMLDHLARGEVDPQVLAQLARKSLRKKIPQLEEALRGHFTPHHRFQLKMLLDHLEFLERQIGALSVRIEECTRPFVTSEQKERLDGIPGVNATTIEAVVAEIGSNMDQFPTHQHLASWAGLCPGNHASAGKRKGGKTTKGNPWLRRALAEAAWAAARTKDTYLAAFYRRLAARRGAKRALVAVSHALLIVIYHMLKHGLPYQDLGPDYFDKLHSAGMERYLVRRLERLGYQVSLRPAAA

SEQ ID NO: 344338 - protein, 406 aa, unidentified
MEVIYPRCAGLDVHKQTVVACVRIAGDGAPLQEVRTFATTTSGLLALADWLDSFGVEHVAMEATGVYWKPVWHVLEGHFELVLANAAHVKNVPGRKTDVNDAMWLADLLAHGLIRASFVPPTAVQELRTLTRTRKQFVRERGAHVQRIEKVLEDANLKLSVVLSDILGKSGRVVLQALIDGQDDPERLVSCIGRVKASRAELLEALRGHVSAHHRFMLKLHLGHIDALDKAVADIETEVGLGLEPFRQAAKLLSTMPGLSSVSANVVVAEIGVDMSRFATPGHLLSWACMCPRNDESAGKRRSTRLRRGGKWLKTTMVQAAWAAIKVKGGYLQAQFHRLRARRGAKKAIIAVAASMLTAAWHMLRDGTEWHDLGAVHFDRADAHKTAARLIRRLQQIGYTVQATPA

SEQ ID NO: 344339 - protein, 411 aa, unidentified
MDVYRGTGWAEDHHDIAVVDRDGKLLARRRISGNAAGLAELLALLATRGDSAGNPVPVAIQTPRGLLTACLRVTGRKVYPINPMAVARYRDRHPVAGGKSGHGDAVVLASVLRTGIAMHRPLPEDSGLAQAIAVLARAQQDAVWDRTAARSKLRSHLREYFPAFLAAFAGIRDGIMRPGARAVLAAAPTPADAAKLTLAQLRGLLKKAGRQRGIDTGAQRLRDAFRAPQMRQLPLAEQAMGRKALALLRQLDAACASADDLEQAAVKAFNQHPDAGIITSFPGPGALTGARVLAETGDDRSRFSDAKGLKAYAGAAPITRASGKSRSVTFRRVKNDRLSAAGYTWAFSALTASPGARAHYDRRRDDGDRHAAAQRNLFGRLLGCLRHCLATSQHYDETTAFPAKAAPPAAA

SEQ ID NO: 344340 - protein, 387 aa, unidentified
MYFVGIDISKFKHDCAIIDELGDVITSSWSFNNDCEGFSLFRDLLNALDGEKKIGFESTGHYGHNLKLFLESNNFSFMEFNPLLIARFVRGKSLRKTKSDTLDAQSIAQYLMTVEYKPYPPSFYHMDQLKSLTRFRDSLVRQHSRQLVELTNILDKVFPEFKPFFDGKFSVTALYILSHYQSPEKIANMNAKSYEALRKKSRGKFSMVKFAQLKALAKNTVGRSDDFLLKQMEITIDIENQLDAKIDEIETQIAECIRGLNPPVLTIPGIGELTAAVILSEYGDISRFEGPAQMLSFAGLEPGYYQSGLAEHGGHMVKHGSSYLRYVLLNAAQMLIVHNTTFYEYYHKKRTEGKHHRVALSHVAKKLVRIIFYLEKNNTHFDSDKLR

SEQ ID NO: 344341 - protein, 331 aa, unidentified
MNYSHFVGLDVGKKTFDASLMSADEKELSHKSFDNTPTGIQSLLDWIAGYHLSLSKLLFCAENMGSYVTELSVSSVSMGFSLALVCPLTIKKSIGLQRGKNDRIDAKRIANYAVLHYRKLELYKLPDKDLVRLRGWIIIRDNLVKQKVSSIKLLETFSWMAKLADVTESISFLEEQLKSIKERILEVEEDMEQLIAASTSLYTNYLLLRSIKGIGIINAIVLLCVTDNFQRFDNPRKFACYCGVAPFEHTSGISIRGKTQTSSLANKEVKVYLTRAAITAISWDPQMKAYYKRKIAEGKHKASVINAVRAKIIARSFAVIRRQTPFVTLVA

SEQ ID NO: 344342 - protein, 414 aa, unidentified
MDVIVERCAGLDVHRDSVVATVRVPGKGKSRRRRAQETRTFATTIAQLEQLGDWLESFGVTLVGMEATGVYWKPVFYVLERRFECWLLNAQHLHNVPGRKSDVIDSRWCCELVELGLVRPSFVPPPEIRRLRDLTRLRATEVQERSRSIQRLEKVLQDAGIKLTSVASRVYSVSARAMLEALLGGVTDPVALAELAKGRLRTKIPQLEEALASRFDVAHHGVLVAGLLAHIDALDQAVAMLEARIGIATRPYADLIELLCTIPGVGVRLAEILIAECGLDMTVFPTAGHFVSWAAICPGTNQSGRKRRSGKTRHGDTWLRTALTEAAHAAVRTKNTYLAAHYWQLRGRRGQFKAIGATRHDILIAYYHITRDRVPYHELGPDWLARRHSPEHRTRRLVKQLEALGHRVTLEAAA

SEQ ID NO: 344343 - protein, 420 aa, unidentified
MKVVYSTCCGVDVHKTFLVATIIKTTKGVQPSYQKKRFSTFNSDIRRFKQWLLDNSCFDVCMESTGKYWIPVFNLLEDRINVTIANPKWVKAVKGNKDDTKDSKWIGDLFRLGLVPGSFIPCKEIRILREYTRYRFKLTCCKRSEKNRFQNAFTVCNVALDAVVTDMFGKSASSITDYLITSDEFDPETCKSFLQKSLKKKTDAVIESIEGYQMTSSQKERMLMVRSHLEFVQQSIDSLDSKLDELIAPYENAVSLLCTIPGVDRASAITIISEISTDMTQFNSSKRLCCWAGLTPGNNESAGKKKSVRITRAGVSLKPALVQCAHAAVKSTATPYYKNKYERLAKRRGKKRAIIAIARMILTAIYQILSTGETWNPCDLYKIDMPKEMQDKQKAKAVKQALKLLISQGVISLESAPTAV

SEQ ID NO: 344344 - protein, 376 aa, unidentified
MDSIIYIGIDVHKDSYSYCSYLKDKDTFFAEHKSEADSKNAVKYIKSVIKTAGSQEPVLVGYEAGPTGYKLCRDLQKAGFACVVMAPSTIYKPHGVRVKTDRRDARLLAQTLAYKTFKQVVIPSEKIEAMKEFTRARCSKKRQLKKAKQELLSFLLRMGMIYPERGSYWTQRHFEWLKTVQFKDDYLQLAFEEYFAEVNELMAKVARLDTQIRQMAENSDIKEDVEKLICFTGIDYLTAVSIAVEVGDFSRFSNAKSFSNYIGLCPGEDSSGLRIRRTAITKAGNSRLRQLLVESAKSIKYGRLCSAKSKRLIQRQEGQSPLVIQYADMAIARIRHKMMSMERKGLHYNVITTAAARELSCFIWGMMTGYISRASV

SEQ ID NO: 344345 - protein, 461 aa, unidentified
MKNKHSNPKKKKFKKIALDENWEKINPNACGIDIGARELFVCVPADRDKASVRRFGTKTPDLGEMAQWLKDCRIETVALEATGIYWIASFQLLERKGFKVVLVNPRQIKNVTGKKSDVMDCQWIQKLHTFGLLGGSFRPADPYCVARTYMRLRDDLIAGSTCQIQLMQKALHQMNIQLSHVLSDITGSSGLAIIEAIIAGQRDPIVLAELASRRVKSTKDEMAKALIGDWRPEHLFCLAQAHQMYLRYQLDISQCDAQLADELEKLPNKVDPNSKPMPPKIDRKKQINEKLRLGLYCKFGVDVTAIEGIGPTAALTLLTEVGADLSAFPSEKHFCSWLGVCPDNRISGGKVLSSRTRRVVNRVADVLRMSATTLKSSQTALGAFYRRMVARLGPAEGITAVAHKLARLLYSLIKHGHDYIRTGLEEYERKNADRKMKVLRKMAESLGVQLLEPQLVRAGVS

SEQ ID NO: 344346 - protein, 326 aa, unidentified
MTASHSADNTFVGIDVGKASLDVQWHRGDSAQYANRPDAIAHLVRRLQAGCGVTRIALEPTGGYEKPLVAALRQAQLPVELVHTSRFKGYRTMVGVRAKSDTSDARLLAAYAAAPDEVRGRKADRVELPQDAVRDELRELASRRDQLKHMIHAESCRLAITRHATLRQSILAHLETLRAEDKQVLQLMRALVRQRLDLRRDQKLLQTIKGLGVVSGLTLIAAVPELGRLDNKKAAALIGVAPFVHKSGTLTAPARIHGGRAAVRRILYMAAVTASRHNPVLKSFYERLIAKGKPAKLALVALMRRLVVFANAVLRSGQPWKGAVPA

SEQ ID NO: 344347 - protein, 359 aa, unidentified
MTASNIVGVDPHRKTFTATVLDSRGGELGHAHFPNTRQGHDAGLAWATGLGPTDRWGVEGAGGLGRHLAEFLVAAGCDVRDVPPHKTSVRRRGRHEGKTDRLDSHRVAAETQTNPRLARAFKHAVSAAPDSVRDRIALWHNARTSLTKVRVQLLGELDALVHDLPEDLRTQLRPAKTVSARVNSLRRLDTSGVTDPTVALRLRLIEHRVAMLRDVLEQDKAATAELTALVEETKSTLTGLVGIAPRAAAEIIVETGDIRRFTEAGFARFNGTAPIPASSGEGENAPVRHRLSRGGNRRLNAAIYRIAMIQLRYEPRARQIHDQARAHGHTRREAMRVLKRHLSDAIYRTMLRDARQAGT

SEQ ID NO: 344348 - protein, 388 aa, unidentified
MQIITDRPQAPTAIRTDLGAIFVSLELSRSTWLITSLSPGGGEKMSKHTVRSGDVAGLWARFSQLKDKVQVRTGQVVPIIVIQEAGLDGFWIHRVLQDEGVESHVVDPASIATSRRRRRAKTDKIDGEALVRALLAYKRGEPRVCAMVRAPTPQEEDRRRICRERKTLTAERVEHVNRIKGLLFAQGISDYEPLLRKRRERLEELRTGDGRPLPEHLKAQIGRELDRLELTLQQIKSVETERDAMLSPSDEGTPAPGAMLKNLKGIGSEFAGVLWSEGLFRSFSNRRQVAAYAGLAPTPWRSGSVAHEQGVSKAGNPRLRTTMIQLAWLWVRHQPRSILTLWFHQRVQLNGGRVRKVLIVALARKLLIAFWKYVTAGVVLEGAETTAA

SEQ ID NO: 344349 - protein, 358 aa, unidentified
MAVTGGTRRIVGGVDTHKDLHVAAVVDEQGRVIGTRSFATTRQGYCQMLAWMRSFGELQRIGIESTGSYGAGLLRFMQQSGVVVLEVTTPDKQDRRRRGKNDDLDAQNAAHAAFAGQRTVTPRSRDGMIESLRVLMACRKTAVSARRVALQMIHNTIVCAPDDLRDQLRSMTRMQLVRTLASWRPDLTAYRDLESAYRISLKSLARRYLELHDEIADLDAMIAAIVDELAPNLVARNSIGHTGAAQLLLTAGDNPERLRSEASFASLCGVSPVPASSGKTVRHRLNRGGDRAANSALHIIAIGRLRTDQRTKDYVARRIAEGHSKLDAIRALKRYLAREVFTLITQRRKEINATRIAA

SEQ ID NO: 344350 - protein, 317 aa, unidentified
METKQVVESFVGVDVSKGALDVCIEPLGQSLHVGNDDAGVAQLCKRFKEVSPALIVMEATGGLETRLASELAACGLPVAVVNPRQVRDFAKACGQLAKTDRVDAAVLCAFAKGRRIQPRSLKDGPTRELNGLVTRRHQLVGMRVQESLRLNSAPSGALQKNVKKHITWLSKQIAQIDDDLSTRLRQSDAWRIKDDLLQGIPGVGAVTTSTLLAKCPELGQLNRHEIAKLAGVAPLANDSGKHHGKRHVWGGRADVRTTLYMAALSAKRFNPAIKEFADRLQRAGKPAKVVTVACMRKLLTVMNAMLKNNSPWRPKVT

SEQ ID NO: 344351 - protein, 324 aa, unidentified
MTQHSTTTALAPVAGIDVSKDKLDVALESGRSLKRRGNDEQGSADLIDELTALGVGRVGLEATGGYERKLVAALRQEGFEVIVLQPLQVRAYARYRLHHAKSDKLDARIIAQCAAEWKALRQPADPRLEGLAAHLTAIEQIGEDIARSRIRLEFAACQEAQAHHKALIAWLKARRRDELKDLEAKLRAHADLATRLDLVKGIPGIGRLTALCLVIRMPELGQVSREKAASLLGVAPMIRQSGKFKGEEHVAGGRTRPRTALFACAQAAILHNDQLKAFYKHLRNKGKHHAVAIMACARKLAIYANTVLTRGTPWQNEPPKRAAA

SEQ ID NO: 344352 - protein, 319 aa, unidentified
MNSSNIIAGIDVSKNKLDIHIHPLGHYKVFENDVQAIDQILDFLRLHNVTKVGLEATGGYEKLCAYTLLSHGFEVYVIQHRWVRDYAKSLGIATKTDKIYCSIISRYINNTDMRVTPLKVSNIDSLKQKLSRINQLVEMAKIQKTQAHQVTDISIIKQMEELLAILQSQIQVLEDEMITLIEQSQELKEKYISITSMPGAGRILAITMICYLPELGTLRHKEISSLSGVAPFNRYSGFSKGKRCIQGGRSQIRTVLHMCVISAQKYNSYIRIFFDRLYDQYKKPYKVASTAAMRKLLILANSLIRDSRVFTEEYSPKAA

SEQ ID NO: 344353 - protein, 339 aa, unidentified
MAEGSWVGLDVHARTTLAGVLDGASGELSSQRVSPRSEETVAWLVSLPQPVRVAYEAGPTGYGLARACARAGVACTVAAPSKIPRAPGDRVKTDRRDAERLARLLRLGELVGVRVPDPVEEAARDLVRAREDARGDLMRARHRLSKLLLRHGLVYEGSAWTLAHDAWLRRQRFESRVLALAFDESYGAVLQAKGRRDALDRAIAELASEAPFSDVVSRLVCLRGVSTLTAFALTVELGDWERFRPQSLGPFLGLVPSEDSTGERRRQGGPGTSAARCARAQRSSVGGRDSRRPFAPVPTRARADCTHAGTRSRAAASDGRSWRSRSPASSPATAGRWRR

SEQ ID NO: 344354 - protein, 315 aa, unidentified
MDATVAIAGIDVSKGKLDVHILPGNLAFSVERNRHGLAGLVRRLHKAGVGQAALEASGDYERTVIEQLEAGGLVVHLLNPARVRLFAEAAGILAKTDPIDARIIALYCRHFPDKGLTRRPENARKLGEFLSVRAMLHKIAGEARNRLEHLRDPDLKALAARTLADARRQLKDIDERMGRLIAEDEAMARKARLMRSLKGAGPVLVTTLLARVPELGTLSRRQIARLCGVSPTDNQSGKARRRAKLAGGRDQIRPILHMVVLAAIRSNPAISAFAKRLAAKGKPHRLVFAACARKVIVTLNAMMRDQTAWRTVKAA

SEQ ID NO: 344355 - protein, 381 aa, unidentified
MNRSYDYFVGLDVSQRTTSVCVIDADGKKFCEGKCNSRPEDIRGWLVNRVAEDKTLKIGLEAGNMSSWLYSGLVKFGFNVVCMETFQAHRFLATYRNKTDKNDARGLAQLVRMGGEDFLKVVSIRSQASQETRVLLAMRDHLVSQKVGLENHIAGVLKPFGVLVERGNVTANTFYKRTLEGLAEAEKNGVHVRSYVLPSLNLYMEAVEAIAPLTEKIHAIAHSIEMVKRFMDIPGIGPVTALSFYAAVDNPQRFQKSSDVAAYFGLTPRQFQSGETNFMGAISRRGDPATRRVLVIAATVLLSGTLEWNSLKAWGVRLAKRIGFSKARIAVARKLAMIMHKIWVNNDRFRPKNLSAQERIKLKQELIVVASKSGRVASAPV

SEQ ID NO: 344356 - protein, 342 aa, unidentified
MQTVTTIGLDIAKSVFQIHGIDAAGNVIVRRKLKRRYVLAFFQKLPPCVVGIEACASSHHWSRELQALGHTVRLMPPAYVKPYIKRQKNDVADAEAICEAVTRPTMRFVATKTPEQQSCLMLHRTRHLFIRQQTSVINAIRAHLAEFGIVAPVGRNGVEQLLVVANAGDNRLPEIARACVLALGAQLQTLKAQILNFDRQIMAWHRSSEASKRLDDIPGVGPALATALVASVADPKAFRSGRDFSAWIGLVPKQRSSGGKDKLGSISKQGDRYLRSLFTAGALAVIRYAKIHGTKHRPWLTALLARRPTKVAAVALANKIARMAWAMMARGDRYKEPIALAA

SEQ ID NO: 344357 - protein, 389 aa, unidentified
MTAFEQEAIWPAAIRTDLGAIFVSLELSRSTWLITSLSPGAGEKLSRRPVSAGDMSALLEVFGALKAKVSARTGRDVGIIAIHEAGLDGFWLDRALRLEGIESHVVDPASIAVCRRKRRAKTDRIDGESLIRTLLAYKRGEPRVCAMVRPPTPEEEDRRRVSRERRTLLTERVEHTNRIKGLLFAQGVADYEPLLKNRRARLEAVVTGDGRTLPDHIKQQIERELDRLELVTAQIKAVEAERDALLAAASQASATSPAASLPRLKGVGEEVAAVLWLEGLFKSFDNRRQLAAYAGLAPSPWRSGKIDHEQGVSKAGNRRLRSTMIQLSWLWLRHQPDSALTQWFQARVRQDRGRVRKVMIVALARKLLVALWKYASTGVLPQGAQLKEA

SEQ ID NO: 344358 - protein, 316 aa, unidentified
MAETLFVGIDVAKESFDVASEPAGLKLSLPNDPTGRQKLLDTLQGHSVALIVLEATGGYERTLVADLLHAGHRVVIANPRQVRDFAKGIGILAKTDEIDAGVLAIFAKTVQPQPRPKPSGNVSLLKELVTRRQQLSRLLTAESNRLGMAQYSQVRKSLQKVIRTLERQILDLDRLIRDNIESDENLRRKDEIVQSVKGVGPGTSAMLLSHLPELGTLNRQQIAALVGVAPWDFKSGKWAGRSRIWGGRMEVRNMLYMAAMTAARYNHTIRRFYDRLISQGKLFKVAITACMRKLLVILNTLVRNNCLWSPTTAKNL

SEQ ID NO: 344359 - protein, 395 aa, unidentified
MYRLFVGIDVSKDSFSVTGLNDKAKFLFSLAPLMNAQGFSDFLKALRSHQKDLSSVIVALESTGPYHLNLFSFLVSKGITTIVINPLIIANFAKLSLRKTKTDKRDATTIARFLFLNRDSIGQLPSSQQTTDLRDLARERESILKMIASMKNDIRRILQTTFPELEHLVDVLGDTMLYFLKIFPSARLITQAAPEAVAQGFNQGDWRRRISVHYTKIIDLAKISIATSSPSKEMILPGKIETLLYLKKKVDEITKMLVRLCKSMKKEDLAILTSIRGVNVKTAAPFLAELGDYQNFTSYKKMLAFAGLDPTTHQSGKFEGMSMISRRGNRHLRKVIYNMTFCVVRYTGPLRDYFFRRKAEGLPFRKALLATSHKLVRTIFAMLNGRTLYKFAEVA

SEQ ID NO: 344360 - protein, 385 aa, unidentified
METKYCLGLDLSKKDFKACMVVTDHEQDIKVKASRTFPNTTSGFGQLWEWAGKNRKEEIPFSIVMEATGVYHENIAWFLHKKEVDVSIMLPNRTKAYMTSLGHKSKNDQVDAKGLAMMGAVQKLPLWKPISKDIYQLRALTRHLEDLQNMRTRLLNQQEQVKYAMYSVPDVEKSLEKTLKAVDKQVDACRKKVRQVLHNEKELSAKVDSMTSIKGVSDMTVAVVIAETNGFALIRNLKQLASYAGYDVKENQSGQKTGKTKITKKGNAHIRRAMHLPAFNTVRYKVKPFSNLYERVYDRSEIKMKAYVAVQSKLLGMMYTLWKTQSEFDEHYQESVESRDQEAKLPLSVISGGNEKKVAPEGSEATLGGNPSDRSAEVPLSVSQI

SEQ ID NO: 344361 - protein, 354 aa, unidentified
MSSKKAKIDELMSIGVDIGKDVFHLVGFDPNGERILRKKIKRHQLEQVFKDFPRCIVGMEACLSAHFVSRLLRKMGFEPRIIPAIYVKPFNKGQKNDYNDAEAIAEAALRPNLKTVSEKTQDQLDLQALHRVRARLVSRRTATVNQIRAFLIEQGITVRRGLTALRNSLLIILKNRADEISPRMHKLILDLHEDWIGLDARVKMTSSEIEAVSKAESGCQRLMTIPGIGPLISTAMVAAIGKGEAFDRGRDFAAWLGLVPRQHSTGGRTVLGRITKRGSRYLRMLFVQAAQVIMMRPKNWPKFSFGPWLEAASTRMQHNKLGVALANKLARIAWSVLNSERDFDWKDNGIATAV

SEQ ID NO: 344362 - protein, 409 aa, unidentified
MPERKVYEMIDKETPVLAFDVSKGSSHCQAFYSFGKPSGRPIRVAHCKSGMAAAEGISEALEEKTGRRPKVVLEATGVYSRPVIRWAELNGLEVYLISPLESAKVRKSRVRPTKTDALDCGVIAEVAYTRSLRRVTPRSSLYSQLYSLSRRRAAIAGRLVASKNQYRKSLDCVWPLLDEACDPFSGYAMWAVGRYRHPEALAKAKGESIVSGLERAKVRTGGISKAAAASKLSAYAKDAVSGCPADGGEVDSLLSALDDVIRDMRALDEITGRLLGLAKGLPHFALIASIDGTGDALAALLCAEIGDPSRFASRNGIVAYAGLDPTILQSGRNDGLHYSITRKGNAFLRKYLYLAVENMVMSKADNAITRFYSKKKSSGLCHKAAATAACRKLLVCIWGMLRSGSCFER

SEQ ID NO: 344363 - protein, 417 aa, unidentified
MPTGDYDFFVGVDWGSERHQVCVLDPARQVHGERAVEHSGPGLAALADWLVAVAPGAPARIAVALEMPRGAIVDLLLARGLHVFALNPKQLDRFRDRHSVAGAKDDRRDAFVAADALRTDRWAFRRLEPDHPLILQLRECTRLDQEMQQELTRLANRLRDQLLRFYPALLRLAPAADEPWLWAVLALAPTPAAGAHVPRARLTRLLQTHRIRRLSAEDVHAALRAPALPVTPGTVEAAARHVAVLLPRLHLIHAQRAQGTRHIDTLLAAYLAEAPAAGPPRAHHDVAILQSLPGVGRLVVATLLAEAAPLLAARAYPALRAQAGIAPVTRQSGKHRSVLMRYGCNHRLQQAVYHWARVSTQCDAHSRAHYTALRQRGQSHPRAVRGVADRLLAILIAMLKSDTLYDAARPRRREMAA

SEQ ID NO: 344364 - protein, 348 aa, unidentified
MAMMHVGLDLSRKRLDVHVMNDAGEPVAVMAVPPDADGLRGLVARVGEHGEPVHAAIESMTGARFIHDQLELAGWDVDVADAQKVKGLAPLACKTDRIDARVLAELCRRDLVPAIWLPTPDVRGDRERARWRLHLVRHRAALKNRIHATLMTFGHSCPVSDLFGVGGRQLLQRLELPGPWHDTVTASLRLIDQLGEEITACEADLRRRGADHPYVPLLMTAPGIGWILAYTIAGEIGDISRFSSPAKLVGYTGLCARVYQSGGRDHRGALAKNGPTHLRWALIEASMHASKSGVYRDHYLHTKTRVGKQRGTSVARIEVARKLTEAIWYMLTRNQAFSPAGSAKVLAA

SEQ ID NO: 344365 - protein, 354 aa, unidentified
MMRDHGQPTQTFASIGIDIGKDVFHIVGFDTSGKVVLRKKFKRLALEAELAKLPPSIVGLEACLSAHFVSRTLRRLGHTPRIIAAVYVKPFAKGQKNDYNDAEAIAEAALRPNLRVVQEKTQDQLDLQALHRVRARLVSRRTATINQIRAFLIEHGIAVRTGANALRRSLFAILENRADELSPRMSDLIVGLYEDWLWLDERIETLTGEIEQISHREENCRRLMSIPGVGPMISTAVVAAIGTGEAFERGRDFGAWLGLVPRQYSTGGKSTLGRISKRGSRYLRTLFIQAANVILMRPQNWEQFSFGAWLKAAQPRLHRNKLATALANKLARIAWSVLRHNTAFGAHRHEVMAI

SEQ ID NO: 344366 - protein, 433 aa, unidentified
MKVMYERVAGIDVHKDMVKVAIRSPGERPWTRKTEILEFRTFYGVLQHMAAGLHKRGVTHVVMEASGVYTEPVYYALCEQDFTEVAVINPAHAKALKGHKTDARDCARLAELFECGLLRGSYIPAPELKEVRDLTRYRMKTVQARTSEIQRLGKALESAGIKLGSVASDITGKSATGMIEALIDGERRGPVLADLAIGRMRTAGKLADLSQALAGRFTEHHALMCRLHRDRITGFNGAVADLDERIAGKAARWQREADLLTTVPGFGDTVAWAWLGEVGPAPHRYFPSHEKLASWVTLCPGNNISARKRKHGRTGDAGTYIKPMLVQAAWAAIRVRGRLQARYTRLVRRFGGDKNPAAKKKAITAIAHTLLKIAYQVLKSGTPYQEPGADFYTRRESPQQRQAYLERQLHKLHPGCTITITISPSEAALAHGA

SEQ ID NO: 344367 - protein, 330 aa, unidentified
MKKLAQIIGTDISKGTIDLFYDGSQSHIKIKNSLAGFKELLHWFTLHKINLHSAVVVMECTGLYSFHFENFLHAHQIRFAKVNALAIKRSLGLIRGKNDKIDAQRIARYGFEKLDTLVFQYPQDPSLQRLQMLHTTRERLVRQRASIICAVKEYRVVLKATDPIIGSQLKLIKAFTQQIKAIDQAIQNQITQSGEALKRNFELLTSIKGVGKVVATATIIKTKNFTSFKNGRKFSCYCGSAPFEHSSGKSIYKKTRISHLADKSMKTLLTQSAKTAIQHDKELKDYYQRRTEMGKSKLSTINVVRNKIIHRMFAVIKRQTPFVEQYLKTA

SEQ ID NO: 344368 - protein, 366 aa, unidentified
MNYCGIDLHSNRFTCCFLYEDGNREKITFDVSADAIEKFKSMLNLNTSVIIEASTNTFKFAESIKDLVNEIVIVNTYKMKLIPMSGKKTDKVDAEKLAVYLKMCSASGENLISHVYIPDDSIQDLRSLFTTHNLIKRHIGAIKNRIHSLLKQHLQPFTKEYIFGKKTRALVRAIAINSVADYQLNLLFEELEAKEKLLEDIENRIKIEGAKYIEEIKILTSMTGISVLTALAIIADIATIERFPNAKHFTSYLRTAPEVDSSNETVIIKGTNKSGRKLSVTLLSQALNHFRDSNPRLKYWYNKKEEYHFKKGKLRMALCRKVFAEIYHMLDKCEYHYYRNAELHNKKMNEYYKFLEVNGVVLKKTA

SEQ ID NO: 344369 - protein, 468 aa, unidentified
MVAVGIDVSKGRSTVAVVGEGKKVLQKPFDIYHNKTELADLVALVKKFDDVRIVMEHTGVYYQVVAESLVQAGFRVSVVNPVLINQYGDNTLRKGSTDRTASLKIARYTLDNRDKLRDYSTLDNIRDNLKSITRQFNFEDKTLSAHTNRLYSLLERAFPRIDEFFGSPAKSNGHQKLVDFVIEFWHSDCVSSLSLAKFTEKFRKFCKKNHYCFSESDVTQIYAISRENVTTLQKDDFTKMLVADAAKQVLQISIRVEKLRAEMIKLAKQTPEFPAVIKLYGVGETLASKLIAEIGDPRRFVDKWALVAYAGVDPGKDDSGKKVTKSGKISRTGDALLRRTAYQVVECHLLNSPADEPVYQFLDKKRSEGKNYYVYMTAACNKFLRIYYARISEHLNALESETTANVSEIADSSERIIAAVFMKNINAFTCGQDSAMQERNVSGLQGLAYTNGAVFDASCDNQLAQTSG

SEQ ID NO: 344370 - protein, 339 aa, unidentified
MKDIKILGVDIAKDVFQLCGIDEWGEVIYTRRVKRAQYVSTVASLKVGCVVMEACGGANHWYRTFMGMGIPTQLISPQHVKPYVKSNKNDRNDAQAIAEAASRASMRFVRGKTVEQQDVQALLKIRDRLVKSRTALINEIRGLLQEYGLTMARGAKRFYEELPLILASEAVGLTPRMKRVLNCLYTELLNRDEAIGDYEEELKAVAKANEDCQRVQSIPGVGYLTALSVYASVGDIHQFHRSRQLSAFIGLVPRQHSSGNKEVLLGISKRGNVMLRTLLIHGARALLRHVKNKTDKKSLWLKALIERRGMNRACVALANKNARIIWALLTRQETYRCGA

SEQ ID NO: 344371 - protein, 392 aa, unidentified
MQLEVQMTKSNDLNMSLVPFKQDACVVAVVELSQSNWLVAAAVPGIERQPLKKLEPDEEALLRLLHRWRDESAGKGHEINRIAVAYEAGRDGFWLARWLLRHGIDVQVIHPTSIAVSREHRRAKTDRLDTALLMRAFLGWLRGETGHCRMAAVPTLAEEDAKRPSREHETLAGECTRTINRLKSALVRLGIRDFNPKLRGSQGGLEVLLTPEGEPIPPNTLREMNNELARLAFIRAQMKATERARLERIKEAPNAGTNSMVQSLTKVVGIGIETADMLVHEVLARDLRDRRAVARIAGLTGSPDESGARRREKGLSKAGNARVRRGMIELAWRFLQHQKESALAAWFRSRVEAPGVRKKTMIVALARKLLIALWRLVQTGEVPRGVVLRQTA

SEQ ID NO: 344372 - protein, 346 aa, unidentified
MEVYIGLDVSLASTAVCVLGEKGEIVTEARVASTPDALISFMHRLPCGIVSIGLEAGPLSQWLHKGLAVAGFEAVLMETRQVKAALKAMPIKTDRRDAEGIARLLQLGWFRPVHCKTVSSQEMRALLTSRKSVKETLTAMELSLRGVLRNFGLKLGVVSKGRWEARVRELIAGNPMLEAAGEPILRARAALRRELAGLEKLVRKLAGTDPVCALLMTMPGVGPVVALTFKSAIDDPERFRRSKDVGPWAGLTPRRHQSGERDIVGAITRAGDVGLRTALYQAATVMLHGGAPNWLKAWALRLAVLRGKKRATVALARRIGVVLHRMWRDGTEFRFTREAAMAGRAA

SEQ ID NO: 344373 - protein, 333 aa, unidentified
MSKAFIGIDVSKEHSTAQSIDSDEKKLFYLRFSMDSEGFAELRSAIKGCGVNLEDIAVAMESTGCYHINLFSFLCAEGLRCAVVNPLLISKFVQGSLRKTKTDKKDAMTIAQFLLTNEKKLCVVTSSQDAQDLRDLARERESQSWMIASLKNDLKRLLQNTFPEFETLRKNIYTETMLNFVRQYPSARLIRQAKRKDIDKALICPGEKRKRVQISADDLINAAKRSVASAGTAKELIVSEKATTILYLQEKCEKITEALVNACEATRIEDLEIIKTLDGVKNILGSSFLAEMGELSNFKSYKSLIAYMGLDPSTRQSGKHVGPSKISKRGNRQ

SEQ ID NO: 344374 - protein, 360 aa, unidentified
MKKDIKERSGLTVGVDLGDRWSRYCVLDERGQILEEDTVATTGRAFGKLFSDRPAARVVIEVGTHSPWAQRLLEELGHETITANPRYVRLIYSSRNKNDKLDAERLARLARVDTKLLHPIQHRGGTAQADRALLRSRNALVECRTKLINHARGIVKSIGGRLPSCSTTCFHKRVREDLPDELKPALSPVLDTLAALTKKIQCLEARIARLAAKRYPETGLLRQVSGVGPLTSFSFVLTLEDPERFKNSRAVGPYLGLRPRQSQSGESDPELRITKAGDTDLRRLLVGSAHYILGPFGPDTDLRRWGLALAARGRRNAKKRAVVAVARKLAVLLHRLWVTAEVYEPLRNNKSLIVPEAVSA

SEQ ID NO: 344375 - protein, 361 aa, unidentified
MAKARTLVGLDVHAAKIVAAILDSETGELRFARLGGQSAAVVELCRALPGPVRATYEAGPTGYGLARGLASAEVECLVAAPGKIPRGATDRVKTDRRDAEHLVRLLLAGKLSPVRVPGPPEEAMRDLVRAREDLRIDLMRARHRLSKLLLRHEISFEGPGGNWTERHLAWLAKLEFSDPAAQATFCDYRGGVEALLHRRGELERRIEGLISTSPWTTEVGRLRCLRGIDTLTAIGLCVEVGDFARFARAGQLMSYLGLVPSEHSSGESRRLGSITKSGSRHARRLLVEAAWHYRNPPRVGREIERRQQGQPAAAVAVAWSAQRRLHRTYSQMRKRNKRATVTTVAVARELAGFCWAITQIE

SEQ ID NO: 344376 - protein, 475 aa, unidentified
MTPRRQKNGRVVPSPEPLRVANPHAAGIDVHAAVHWVGVPPDHVPPPKSADGAANLPPHVRKFGACTADLELLADWLQQCGITSVAMESTGVYWIPLFELLERRGFQVYLVDPRQTKHAPGRPKSDVLDCQWIQRLHCYGLLTASFRPDDQVVVLRGYLRQRHMLIRYAGQHVQHMQKALEQMNVKLPEVVSDITGVTGLAIIEAILAGQRDPRQLAKLRHERCKRTEAQIARALQGNWREEHLFALKQALELYQNYRHLLRECDAKLEAHLATFADKSGGQKLAPKPRRCGRRHNEPAFAARLALHRMSGHDLTVLEGIDDNTALVILSEIGTDMSKWPTEKHFTSWLGLCPQHQGSAGKIKSRRVRRGSNLAARALRLASQGCHHAKNALGAFYRRIQARCGGVKAVFATARKIAERIYRLLKYGVDYVRQGVDAYEAAYRKRLLKGLAHRAQSLGYALVAVPEPPPAAPATP

SEQ ID NO: 344377 - protein, 339 aa, unidentified
MQEQITFFVGTDVSKLTLDMSITSRGIELHCSQIANTKKSVISWFKKIGKQHAMNTSNTLFCMEFTGIYNYHIVEYLNSLKAKIWIMPGALLKHGEGMQRGKSDKADAKKIALYGFTHPHEVRLWKKPRLVLQQLRALINNREDLVQTKHQYERRLKESKGLVDKKELAITKKYCQPILKLAEKGIRKIDMDIKLLIQSDEKLNEINSYVQSVDGVGIATAGEMIVTTNEFENFDDAKKLACHCGVVPFKKESGTSIKGKATVSHKANKRMKRLLHLAALSAIKVKGEFKQYYERKKAEGKHVMSIINAIRNKLVLRIFACVKNKRYYEKDYQYSLVKP

SEQ ID NO: 344378 - protein, 392 aa, unidentified
MRKPKQREPLNDLSRSLTTLDVDHTLIAVIEMSQKSWLVAGIVPGVERQPLKKLDTDENELLNLLDRWRVEAEKAGHKIKRIAVAFEAGRDGFWLARWLRARGIEAHVIHAASIAVSREHRRAKTDRLDTELLKRAFLGWLRGERDHCKMVAIPTLVEEDAKRPNRERESLVGEQSRIVNRMKAALTRLGIRNFNPKLKKAADRLEDLRTPQGEPIPPNTLDELRRDMERRRLVMDQVRQIEDARLERLKQAPKAGPNVMVLLLARVIGVGIETADMLVQEILSRNLRDRRAVARYSGLTGSPDESGSKRREKGLARSGNARVRRGMIQLAWRFLKFQKDSALAKWFQARTENARGSRKKMIVALARKLLIALWYFVRDGVVPEGIILRPAQ

SEQ ID NO: 344379 - protein, 431 aa, unidentified
MRDLPFLDAPDREFPAEDRSMEVIHPVCAGLDVHKADVKVCLVWRDAHGARQQEIRTYATTTGALLELGDWLAQVQCPIVAMESTGVYWKPIFNLLEDQLTVWLVNPAHLKHVEGRKTDPRDAAWLAKLLEHGLVQPSFIPPREIRDLREVTRYRRKLVQERASQVNRIQKLLEDANIKLAAVASDVTGVSARAMLAALLEGTKTPAEMAALAQTRLRSKQAELAAALEGRFRPHHARLLRLMLEHLDELDLAIAECDTLVEELLRPFAAQVEALTTIPGVAQRAAEDLVAETGTDMSVFPTHKHFCSWAGLCPGDHESGGKRKSGKTRKGNRHLRVTLVQCAHAVGRSKKTYPGARYQRLAKRKGKQRAAVAVAHDLLEAAYFILRDGVVYQDLGPDYFDRLQREHLVKYHTKRLQELGFTVTPAETVAA

SEQ ID NO: 344380 - protein, 440 aa, unidentified
MGIPTLQNETPPMTDQREDTAPRTWVAIDIAKRTHVVLVEFADGTRRHYRLRRPLEEVDRFVAFLHDQEAPIRIGFEATSNYHRTLAHRLGREGFELRLISTVASARYREAMFNSWDKNDPKDAAVILALLKQGLTQRYYEPLEAGIHDIQEISKTYHQIVLARMRIQHSLLTHYLPLCFPEMDRYWHSTRGEWFIRFLMRFPVPSSIRALPREAFVSEAWDLVGRKVSKRLILEEIYELAHRSAALPIEEATPAVEMCRVQLRRYLSLSEERSRMEALSHTLLRDHSDYTQLRTIPGIGPILALTVLAEAGDLRRFNHHRQFLKYCGLDLAKSQSGATRGLNQLSKRGNARLRCAFWFAGRVAVRMRENSFRAKYERYIRTDPKNPDRRRKALTAVSAKMARVAYAVVKHNRPYRPYYEHDVPGGVIPFNLAVEALGTS

SEQ ID NO: 344381 - protein, 387 aa, unidentified
MPQPNDLSRSLVALDQDSTIIAVVEMSQSSWLVGGVVPGIERQPRKKQEPSPERLLALLHRWRDESVRAGRTITRIAVAFEAGRDGFWLARWLEARGVEAHVIHPSSVAVSREHRRAKTDRLDTELLRRGFLGWLRGERGHCSMARVPTIAEEDAKRPNRERECLVKERTRLVNRIKGTLARLGIRNFKPTLRQATERLATVHTPEGTPVPPNALAEMQRYLARLRFVVGQIKQIEEARRQRLEEEPECGRHATVRLLARVVGIGIETADMLVNEVLSRPMRDRRAVARYAGLTGAPDESGAKRREQGLAKAGNARVRRGMIQLAWRFLRFQKNSALAQWYQARTADRRGATRKTMIVALARKLLIALWRFGTIGEPMDGVTLRPAR

SEQ ID NO: 344382 - protein, 408 aa, unidentified
MEVLFPRCAGLDVHKDTVVACVRCVSPPTHHEVRSFETTTTGLLGLADWLRSHGCTHVAMEATGVYWKPVWHMLEDRFELVLANAQHIRNIPGRKTDVNDATWIADLLAHGLIRSSFVPPAPIQELRDLTRTRKQLVREISQHSLRIQKILEDANIKVASVLSDVLGSSGRAMLAAIIAGVDDPEHLANLAQGTARKKQAELIEALRGRVTTHHRDLIKLHLGLVSALESALRDIDAAVGKSLAPIRARARLLTTMPGVSDIVAQVVVAEIGVDMTRFPTAAHLISWAGLCPRNDESAGKRRSTRVRKSGTWLKTTLVTSAWSAVRVKDSYLRVQFLRIKSRRGPKKAILAVAASMLTATYYMLRDGVEYRDLGPAYLDQHDRTKTIHRLVRRLRDLGCAVDVQTNAA

SEQ ID NO: 344383 - protein, 409 aa, unidentified
MRYYLGVDWADQTHAVWVVDERGAKVALRTVPHTAEGLSEWGRELDEWRAQGIELWAAIERPEGRVVDVLLDHGVVVYPVNPKALDRARDRFRQSEAKSDPFDARVLADFLRTDHLHLRALQPSSEAAQELKLLTDDYQRQIRQQTRLVNQLTTTLKAYYPRGLEVAELTTALAREFLQAYPTPAALTALTERQWQRWARAHRLSETRTQELWVVLQRPQLPVPLHVVRAKARLMQSLVAQLMVVMEGVGAYREAIEDFFARLPAAQWIRTLPIGDHGITAPTLWARLGDAPGRWESFRHLQAQAGTVPVTIRSGKQQVVRFRFACDKSLRYVIDHVAFLSLRWSEWARAYYDEQRARGHSYRQALRALSAKWLKIIFVMWERQVPYDEQYHLAMMTRQQLRQRQKKVA

SEQ ID NO: 344384 - protein, 378 aa, unidentified
MSQSTTLYVGLDVHKDSIDIALAEASRDAEVRHLATVGGGNEAVTKALRRLVSAGHRLHIVYEAGPCGFALQRHLSALGWRCDVVAPSSIPRPSGERVKTDRRDAMKLARLARVGELVPVRVPDSADEALRDLVRGREDAVREQRNARHRLKALLLRNGIAYSGRAAWSGAHLRWLASMKLAHPAQQIAFQEYLHAITEAGARIVRHEQALRDALSGWTLAPVVLALQALRGVQLIAAITLVAEIQDFWRFATPRQLMAYLGLVPCEDSSGPRRRQGVITKAGNAPARRMLIEIAHQYRLAARVSPSIARRQSDLELPKAVTDIAWNAQTRLCARFRRLSARRLPHNKIVVAVARELCGFVWAIARQVTPAPSTPQTT

SEQ ID NO: 344385 - protein, 347 aa, unidentified
MTIVEPAAGAVTGGVDTHLDVHVAAALDDIGGLLGVESFEATRAGNDKLLAWLRSFGAIAQVGVEGTGSYGASLARSLRAAHIRVVEVDRPNRQARRRTGKSDPADAVEAARAALSGRAQGAGKTRDGSVEAIRALVVAKRSARSTRIKSLNQIRHLGFTAPDELRDRLHGVSRDHLAGVAAALRPRVGSDPVISATKTAIRILGRRVVALDEELATIDGLLAPLVAATAPSLLDVHGVGVDTAATLLVAAGDNPQRLRSEAAWAHLCGVAPIPASSGKVTRWRLNRGGDRQANGALWVIVITRMSSNPRTRVYVERRLKEGRAKREIIRILKRYVAREVFHHLPRG

SEQ ID NO: 344386 - protein, 397 aa, unidentified
MYIVGIDIAKRKHEAAVIDGEGTVIIKPFSFTNNCSGYNRLLAMLAKAKLPLDEVSFAMEATGHYWLALFTRLQKEGFRVQVINPVQTNSIRSFYIRQAKTDPRDALLIAEVIRFGHFSESTLHPENIYELRELCRGRHAIVSMQADVKRKVVALLDQVFPEYETAFTNMFSDTSMAILQTCPTPKELSEMPLEELCHLIEVSSHKRFRMAKAQELQELARSSFGFAMAGDVFSTMIRLYAKHLDFLKQQVREMDRKIAEIMDTLDTPITTITGIGPTLGAYILSEIGDINRFSSSAKLAAYAGIDPTMRQSGEYNGVRNRMSKRGSPYLRHAIWLATSSAVLHDPALKLYFQKKRDEGKPYMASVGHACRKMVSIIYAVMRDNKAYTPYIPNEISA

SEQ ID NO: 344387 - protein, 341 aa, unidentified
MSAIGIDTHKDTLAACVVDVLGMPRAERTFDNDPAGHRALLAWAQTSDPDAVIGVEGSASFGAPAARFLIAAGCSVREVPPQLSRRERIRTRRSGKSDPGDALAIARVTLREPDLPPVRSADRSLDLQLLVGAREDVVTEMTRVRNRLHADLRILVPGYGAKASNLTTIQHQRTVARLLGRLVGVQAELARGRLRRLRALASEEHALAARIGARVEGHPLLALPGAGAIVTAMLIGEVGDVRRFRSADAFAALAGVAPIPASSGQTQRMRLDRGGNRQLNRAFYTIALSQAFHHPPAKAYIARKRAEGKTWREALRALKRQLVRTVFRLLQAGAGSLDLAA

SEQ ID NO: 344388 - protein, 366 aa, unidentified
MGWMAPSRHQSAKLVVVEEHQEREPSMNEITTIGLDLAKNVFQIHGVDGLGTAVLRKRLRRGQLLAFFAGLPRCLVGLEACATAHHWARELQAVGHDVRLMPPQYVKPYVKRNKHDAADAEAICEAVRRPSMRFVAVKTAEQQAALLMHRGRELLVRQRTMLANALRGHLAEFGLIAAQGLHKVAGLIAVVRDEKDDRVPGMARQVLRLIAEQIDELEARIAAIEAQIMVWHQANPVSQRLATIPGIGPIIATAVAATVADPSVFRSGREFAAWLGLVPRQNSTGGKARLGGISKRGDSYLRRLLVNGAHAVLLRSKAGKADPWLIALRGRKPRLVVAVALANKTARIAWAIMSKQDIYRRAAAAV

SEQ ID NO: 344389 - protein, 412 aa, unidentified
MEGETVIAGVDTHKDVHVLCLLDGLGRKIWSGSFGADPEGYDRLAEAIGDPGSCMVVGVEGTASYGAGLTRRLAELGYNVVEVLRPKRDKARPGEGKSDPLDAERAARKAASGRGCSVPKSQDGWVEAVRQLYVARRLAVATSTSCVACAKSMLTTAPSALRERFRGRERPKDLMPLLARGRKAGDALEESVLASLRSVAAVWKEARSQVESLDERIRALLEANAPALLGVEGCGTTTAAALVVAAGDNPGRLRGEAAFSMLCGASPIPASSGKTERHRLNRGGNRQANWALYEIAIKRMAYDERTRRYVARRTSEGKSRREAVRCLKRYIAREVYRVLMDPNPDGAAPEGPELAKMRKAMRVTQKKAAAELGLSAATLGHLERGKRRSTKLERRYYELLCELERTLPQTAS

SEQ ID NO: 344390 - protein, 370 aa, unidentified
MIRRFHGIDRHRRSSAVMVLNREGVEEKLISSIGDLDGYIKTLRSEDAVVMETGAGSFYWADKIKSRGAQCLIIDPYRFRIIKDSWNKTDKRDLRNMSKALWVYMVTGEFGLPTVYKPSTLIRELRKLYAQYEVLNKQIRVFKNNIQSVLADNGVVLPILQKNHLLSEKRGKDVLEELDISEASRISIKMNQEILWRVLEKKEELVKEILRIGEPLKEDVELLISIRGITPLTALAFLADVADIHRFKTVRKMNSYLGLVSKLRESGSRSRSGHINRASRKLTRTILTQSLIHITDASFDFRYYYDELKSRRGPGRARIALIRKLCGIMRRMLLNKEEFRHIKLGLYEKKRKDYKKQLMQIKEEMERKSA

SEQ ID NO: 344391 - protein, 365 aa, unidentified
MRIDIGVDLHKTQFTVHARREEKAGESGQYPTSEDGYREFLGKLGGWRHSGHDIRIGVESTGNTRYFKHRLEEKGYPVVVINTLKFKVINESVKKTDKHDAATIAEFLSKDMLPESRLCSEDSEQLRRLLKVRSTLVRTRVTVKNQIHGLLVSMGMEDTRASLQSKRGRQKILDTLAGAAKGLVVQPLFETIDRLSENVKTIEGEIEKLVSGDKVVELLQTIPGCGPVIACTIRAYTDDIRRFSNHKKYASYAGLAPWVQCSNETEHYGRITKRGPEELRTAFVQLVVGIRRSRQSTSWRLMEHYEAMKTVKGSGKSIIATARKMSKIVWCMLTREEEFNVRLMTDKSLEKKIDSMRTALNEMSA

SEQ ID NO: 344392 - protein, 356 aa, unidentified
METAYDGRQVVGMDLHRRRSVLVRMTEDGRRLGTAKITNSPAELRRAIARAGKHPRVVLEATYGWYWAADVLAAAGAEVHLAHPLGVKAFTYRRVKDDVRDSADLADLLRMGRLPEAWIAPHEVRELRELTRYRIKLVRMRTSCKDQVHGVLAKLGVPVTCSDIFGVAGSAWLDGLRLPQPYAGKVTSLRHLAGELTTEITMLSEVIASLLAGDRGYQVIQQLPGIGPVLAAVITAEIGDVTRFRNAAQLCSWAGLTPRHRESDTKVARGHVTKQGSRLLRWALIEAIQRIPRDSVIGAVKDGIIGRRGKEAKNIAKVAAARRLLTLIYYGMRDGQIRCLSRPPAGPPVTETARAA

SEQ ID NO: 344393 - protein, 335 aa, unidentified
MKKIHVGIDISKEKCNLCYRSGLEIVREEECPNDVKALKKALKVALKALGTSLDEVLACAEYTGRYIYPLTVACQELDIFLWMDDPTRIKNSMGLTRGKNDVIDAARIAEYAYRYSDKAVRYCIPDAALVSMKNLLADREFLLIDQKRYQSQLTDQKKYMAPGDFKQKNSRWKKVIKSIDEQIAAIDAEIEALIAADPVLTRQKELLVSIDGIGPRIAINMIAITGGFTRFQNARQFCSFAGLTPYKYDSGTSVRSKAKISKRANQTMKALLHLSAVNVATRMKSGEYKDYYERKLKEGKHVMCILNVLRAKLVHRMFSVIKRDTKYTKEYKPAC

SEQ ID NO: 344394 - protein, 312 aa, unidentified
MYYIGLDVHKKTISYCVKDASGQVHREGTTGATRNELDCWVRTLPQPRIMAMEATIFTGWIYDHLLPHAEQVKVAHPLMLRAIAAAKKKNDRIDAGKIADCLRCDFLPECHMASTEIRDRRRTLRYRHLLVRQMVQMKNRISGLLMETGVSHNKQRLHKVGYFRELISNSAEIHESIRPLLRLSRETIVWCQKTEYALVSSLERDPLLAERLKRLRTVPGVGPITALTWALEMGDVSRFRSVKQAISYCGLCGEEKSSADKVLRTPLSKQRNKHIQHVLVEAAKLAPRQNHELAVVHEGRHRRGIETARPWP

SEQ ID NO: 344395 - protein, 354 aa, unidentified
MKQVTQLDFSGQKIFAGIDVHKKSWKVSIRSEQMELKTFSQNPSADELSNYLKRNYPLADYHVVYEAGFCGFSHQREFSQSGVNCIVVNPADVPTTDKEKRRKSDTVDCRKLGRSLSKGELTGIFIPDVEQQDDRDIIRTYNQMVKDQTRHKNRIRGWLNFQGVTFAESDSRYWSNNFITWLKELSLTSSARIALDLKLQGYQQARGMVLAATRQVRILSRQERYRKKIALIRTVPGVGEITALLFVTEVGNINRFKSLDVLCDYVGLVPNTHSTGDKEIVLGLTRRANHQLREKLIEASWTAVRTDPAMTMAFNNYCSRMKKNNAIIRVAKKMLNRIRYVMKNETGYVTAVVK

SEQ ID NO: 344396 - protein, 411 aa, unidentified
MDKVYDICCGIDVHKKLIVACLRNGNKNAIREFGATTRELLSLADWLKESDCKMIAMESTASYWKPLYNILESSGLNAMVVNAHHMKAVPGRKTDVKDAEWIADLLQHGLLQASYIPDKDQRELRELVRYRKSLTGERSRELNRLQKMLEGANIKLSGTVRDINGKSARNLLEYLITGERFDEAKFDEMYSKKVIAHNLKASKEQIIDDLNGVMSPLQRRMMKELLVHLDELNAHIKNLDDEIDNLMKPEEKKASEAIQSIPGIGNTSAQAVVSVIGTNMNRFPTDSHIASWAGLCPGDHESAKKRKSGKTRKGNALLRSTLVTCAHSAVRNKQSYFYAQFMRISAHRGKKRAYVAVAHSMLIAIYHILKDGMVFKDLGADYYNQFNKERKINAYLKKLKALGWEAPVVAA

SEQ ID NO: 344397 - protein, 322 aa, unidentified
MQGQKSPERSAQGVYVGVDVCKDWLDVYLHPVGQKFRVANTPEGLKALKRRLAELPVELIVMEATGKFHRQTHRTLHAAGFAVAVVNPLRARLFAEAVGQLAKTDRLDARVLALMGHALEPSAAAPAPEAIEALQELARARAAAKADQTALSNQRGASQTAFLKAELGRRLKTLAGHIERLDAEIDRRLGADPALKRRYDILITIPGVGPVAAIALVVGLPELGACSAKAASLLAGLAPLACDSGDKAGERHIKGGRAFVRTSLYLAAIAAARFNPQLSDDYNRLRDAGKKAKVAITAIMRKLVVLANVLIKEDRPWQPIHP

SEQ ID NO: 344398 - protein, 411 aa, unidentified
MRRVIGIDVHRTFGEVVFWEDGRLRHAGRIDMTRTALEGFGKTLLASDEVVLEATANSMAVSRVLAPFVARVIIANPLQVKAIAQAHVKTDKIDAGTLASLQAAGYLPQIWTPDAETERKRRLVARRYQIVRHRTRLKNEVHSILHAHLIPKCPHADLFNARGRAWLAAQQLPDDERAAIDRHVRELDRLAEDLALLDREIAQDAIEDSAVNRLMTITGVNLAVAAGIVAAIGDISRFNGPQKLVSYFGLNPRVRQSGLGAAHHGRISKIGRSHARAMLVEAAWAAAKAPGPLHAFFVRIRARRGHQIAAVAVARKLTVLCWHLLTKGEDYLWARPALVASKTRAMQLQAGHPQQKGSRRGPAYAYNIKALRDREMLIAAQAEQSYERFVSQWKPRRPKSGARAPQLGRTK

SEQ ID NO: 344399 - protein, 404 aa, unidentified
MWYAGIDWADDHHDILVIDEKGRQVGSLRVSHTAQGLAKLNTFLEHIVGTTSKEEMVCIIETTHGLLIAHLLEGSWPVYPVNPRTVDRRRSASGAKTDTIDAYLLAKTGRADFADLHRLTPDSEKVSELKELTRDQDALIRMQTRLVNQLTACLKAYYPVALELFTKLHQKSTLAFLQTYPTPQAAMAASLQQLEEVLRRAKHPNPITVAAKIFEQVHQPYLQADAVTTRTKARLMLVLVSQLLPLIEQIAQYDKEIGTLFLTHEDHELFESLPRAGRHLAPRLLAEIGDDRSRYQNASSLQALGGTSPVLFQSGMYSKAHRRLGCIKPLRNALHQFAWQTTQSEPWARDYYQRKRAEGKSHTVAVRALANVWVRIILAMWVHQRCYESTTFEQAQRQHARKAA

SEQ ID NO: 344400 - protein, 363 aa, unidentified
MIVIGADTHKRTHTCAAVDGATGRPAGELTAAAREPGLRELLAWGRGLDEERIWAIEDCRHVSGSLERFLVASGERVVRVPPKLMGQSRRGERAAGKSDPIDALAVARAALREGPETLPAAHLDEEALELRLLLDHREDLVRSRTEDQCRLRWHLHDLWPDLELPAGCLDRMVWLDRVARRLARAEQGARVRVARDLVVEIRRRTRRAKELGREIAALVRARAPELLELEGCGPLTAARLIAETAGAGRFASDAKFARLAGVAPIPASSGARNRHRLDRGGNRRLNCALHRIAVTQGRCHAPAREFLARKQAEGKSRIEALRCLKRHLARRVWRVLLKIERGRPIHAVHAQRDPAGPRIAATA

SEQ ID NO: 344401 - protein, 335 aa, unidentified
MWTRGDRGSCYCVLDEAGEILLEQKVATTPEAMKQIFEKIPRGLIAMETGTHVPWVSRLLTELGHRVLVAHAQKVQLITKSKRKDDRHDARTLARLARIDPELLGPVRHRSAKAQIHLTVIRARAELVRARTSLVNAARGLVKSYGQRLPQCGTQQVSRELAAGLQTELREVLEPLLQEVESLNERIQEYEVRMEKIARESYPQVELLKQVKGVGTQIALTYVLTLEDPHRFPKSRDVGCFLGLRPGRRDSGESQPQMHISKEGDPYLRTMLVQGAHYILGPFGADSDLRRWGQKLAARGGKSAKKASRGCGGEKASGTAASVVGEWRGIRTTAQ

SEQ ID NO: 344402 - protein, 353 aa, unidentified
MKEHTSNERVVKVVGIDLAKRSFHVYGVDERGRRVISKTFTRTRLKEFMANLPACTVAMEACGSAHYWARQFRSHGHEVRLIAPQFVKPFVKSNKNDAIDAEAICEAAQRPNMRFVAVKSEEQQDIQATHRMRSLVVERRTAQVNQIRGLLLEYGIEIPQGRAAVGQHLPDILEDPANGLSGRFRAELRGLAEELRHLDERVTHYDRQIETLAESHPQAQALMTIPGLGAKGATALIAAVGEDPRLFKNGRGLAAWLGLVPRQHSTGGRDRRLGISQRGEVYLRQLLIHGARAVLRWVEHKDDPTRRWATGLKARRHGNVAAVALANKIARIAYAVLTTGPLYDPAKGAFVKV

SEQ ID NO: 344403 - protein, 369 aa, unidentified
MAKRSMFVGMDVHKESIDVSLAEEGRDGEVRHYGVIPGDLEAVAKVVRALRAPSRRLRFVYEAGPCGFGIHRYLTAQGEECVVVNPSSMPKRSGDRIKTDRRDGDALARLHRAGELTAIYIPTPDDEALRDLVRAREDAVGLSTQAKHRLKAFLLRQGRRYPGRAGWTRPYRRWLADLSFPLAPQHIALQEYRDTIDETERRVERLTDQLRQLTPAWRWAPVVGALQALRGVSFVTAVGLVTEIGDIRRFTHPRELMAYLGLVPSEYSSGPSVRRGGITKAGNPHARRLLAEAAWAYQGVPRIGRQMLYRQEAVSKTVCDIAWKAQLRLTSRFRKLVARGKAKPKVATAVARELTGFIWAIAREVPPPV

SEQ ID NO: 344404 - protein, 348 aa, unidentified
MSQLLSTVTVIGIDIGKNSFHVVGLDGHGAPVLRQKWSRGQVEARLANMPPCLIGMEACVGAHHLSRKLKTLGHDARLMPAKYVRPYSKGQKNDFRDAEAIAEAVQRPTMKFVATKTAEQLDLQALHRVRERLVSQRTGVINQIRAFLLERGVAVRQGFRFLRAELPRILTAPPEVLSPRMVRLIGGLAEDWRRLDERIGCLSGEITALAHQDAGCERLVSVPGIGPIISSAMVAAIGTGEAFSKGRDFAAWLGLVPKQLSTGDRTILGKISKRGNRYLRVLFVQAAWVVLIKPQSWERHGLKRWIEAAKKRLHRNVLAVALANKLARIAWSVLARSRIFEASKLQAV

SEQ ID NO: 344405 - protein, 434 aa, unidentified
MSKLYDLPVIGIDVAADFSVATVLKQNGDIYRKNFRFNHSLEGFSSFLELFQKTEEELNDRPKVFCESTGIYHLTLLHFLIDRGIDIRVINPLITNSNKNYNIRKVKNDKLDSFSIARLCKFNDVKTSFYTSKDMLHLKLLVRDYYKIVDLKANAKKSFVNALYVYYPGLQSAFSDLTSKTPLAFITRYPTPQDLLSAPSDDVLTLLQASSRRGLKWAKSKLELLLDIASSASVLGINPMTFSSKVKRFVDTYSLYDQQRLSLIDEIKQFINVASFADEFNHNISLLCSFKGAGFMSAVTLLAEMNTIHNFSKASQLVAFFGVDPAVNESGHFKGDSNKMSKRGTAIGRRVLYALALASIRKTKAGVPLNQVLYEAYHTTLKGKKKKVRLVAIMNKLLRYIFSVLKNQKPYVVRNPKVHQQMFMSIGQATTDAA

SEQ ID NO: 344406 - protein, 320 aa, unidentified
MESAGVYQSAMGIDVCVERLDWHRVPQGSSGGYPNTSEGIRALLSDLKQCGMDIVVIEATGGLQRQVASALAGAGLAVAVVNPRQVRDFARASGQLAKTDQIDAQVLALFGLRIQPQPRQLPDAAALELTDKLARRGQLIEMRVAEKNRRLRASTAMKRSIDKHLAFLDLAIKNLDQDLDDTLRGSPVWAEKVDLLQEVTGVGPQTLRRLLIDLPELGTLNRKAIAKLVGVAPLNRDSGTLRGKRAIWGGRVNVRNTMYMAALSASRFNAPLRAFFQRLKAAGKPHKVALVAVARKLLTILNAMLRDRSAWNPQLVEKRA

SEQ ID NO: 344407 - protein, 371 aa, unidentified
MLYLAIDQHSKQITVCVRNADGDTVLRRQVSTRREKIEAFFQQLTEMDADFVAILEVCGFNDWLIAELHKWKCHEVVLIHPEKPSKKKTDRRDARKLADLLWLNRERLAAGEPVHGLRRVYIVNQQERENRQLTALRKNLGQLRTRTLNKIHRLLNRHNLMWDYPTKTFQTQAGRRWLEKLELPEIDRLEMDVQLQAWKTWDAQIAQIDERIAARASEPIPGAIFNATQILMTAPGVSHYSGLTLASRIGPIERFPRPRSLANYFGLTPGCRNSGNDQDRLGSITKEGSKIARFILGQLVLHFLKRDPKMRSWYRRIKIRRGSKIARVAVMRRITTIFWHMLTYQEPYTIGGPPPRLREQQASPTTRSEAA

SEQ ID NO: 344408 - protein, 342 aa, unidentified
MAAIGIDTHKATLAACAIDELGRAVGEATFANDPPGHDAFIAWARATSPQATIGVEGSSSFGAPLARSAQLAGLVVREVPPHLSRAERRRTRRPGRSDPGDALAIARVTAREANLPPIRLPDRTSELHLLLEAREDLVGEATRARNRLHAHLLVPIPGYGGTVANLVATRHRTTVGRLLRGNHTVQAELARALLVRLSRLEREIAVPTRRIGSLIEGHPLLGLPGAGPITVARLIAEVGDVHRFRSADALAALAGVAPIPASSGQVQRMRLNRGGNRQLNRALYIIALSQWRFHPPAKAYVARRMEVDGKTWREAIRALKRQLVRTVLRLLMEGEDTLRAAA

SEQ ID NO: 344409 - protein, 358 aa, unidentified
MNNAKSSRLDFTGQPIYIGLDVHKKSWSVSIFSNYGEYKTFNQPPEVDKLLHYLRHHFPGGDYRSVYEAGYCGFWIHDQLREKGIQCLVANPSDIPTKNKERRTKRDRIDCRKLGRGLRNGEIEGIYVPCRSKLEDRTLTRTRQGMVRKQTRCKNQIKGMLLFYGVVIPEETEMGHWSRRFIQWIEGIRMERASGDIALKAHLEELDHLRQLIASLNRAILRLARTEEYRPLVRLLKTVPGISTLTAMILLTELGEITRFPSLDELSCYVGLIPDTQESGEKEYVGSITQRRHSQLRWLLIEASWVAIRKDPALLMAFEEYCKRMRKTKAIVKIARKLLNRIRYVLKNQAEYVPCVIQ

SEQ ID NO: 344410 - protein, 330 aa, unidentified
MKFKNIIGIDTGKNSIDFSFLENGEKKLISQVENSVKKLELFYNGLKIDVKETLFCMEHTGIYNYHLLSVLQRHGANIWLENPIQIKRSMGMTRGKNDKIDAIRISKYAYLHQEKAKLWQPTRLVIQNLKLLMGQRSRLNKAKKLIEIPVVESKEFIGKEQYKLLKQNCKSTLTGIKKDLELVTAQIKEIIDSDETLKELFKYVASVPNVGLITATAIIVSTNEFQKIDTARKFACHAGVAPFEYTSGSSVRGKTRISHLADKELKTVLHLATLSAISRPGELRDYFVRKVKEGKNKMLVINAIRNKLIHRVFACVRDQRKYFKKDLTFA

SEQ ID NO: 344411 - protein, 320 aa, unidentified
MSASSVVVGIDVAKAHVDVSVLGAKLDVQRIDNLAEGHSALTAALKPLDVALVVMEATGGYETELACALQAAGLPVAVVNPRQARDFAKSMGRLAKTDAVDARMLAEFAAVLLRREDLARFLRPLVDEQQRWLAALVTRRRQLLSMLLSERQRLQITPKGLHPSIEAIIAAIKAQLDDIELQMVTHVGQHFAELDALLQSASGIGPVASATLIAELPELGRLNRREIAALVGIAPMANDSGSSKGRRRIQGGRFDVRRVQYMAALTASRRNPVVKAFYERLIAAGKLPKVALVACMRKLLTTLNAMVRTNKPWDNSLHGA

SEQ ID NO: 344412 - protein, 312 aa, unidentified
MEAKFVGIDVSKARLDVDCLPVSTARQFSNDAGGIAALVEWLLGSGVERIVVEATGGYEIAVASALAAAGLPVVVVNPKRVRDFAKAQGVLAKSDRLDARVLALFGERIAPPVRALPQAAQRDLTELLDRRHQLVSMRAQEQARLATVLPVARGDVEQHIAWLDQRIRKHETVLLKRLRANEIWDAKVKLLDSVPGIGPVNLFTLVGRLPELGSLNRQQIAALVGVAPFNDDSGKRRGQRYIRGGRAQVRCALYMATLTAKRCNPAIAQMFERLIAKGKPFKVAMTACMRKLLTILNAILKSTQPWENRLAT

SEQ ID NO: 344413 - protein, 381 aa, unidentified
MLYVGIDVAKNKHDVTVIDNTGKMVLNLITITNRKQGFELLHNTLKQLNQNCLIAMEDTGHYALNLLTFLHQNNYQIYTYNPLLIKEFTKSLSLRKTKTDKKDARTIALKLLSDPNRALFMHDNRQEELKIMTRHMNRLKKHQSDWKVQYTKCLDIIFPELHQVVTKHSDYVYELLKRFPSPEKMVTAGFDKLIEIKRLTAKHALDILELAPNSIGTTSLAREFELIEIIENIQHYEKLIKQTEKKIDELMAELNSVITTVPGISNRLGSVILAEIRNINTFNHSAQLQAFAGLEPAIYQSGQLDAQGKMVKRGSSHLRWALIQAAIKVARYSPAFKAYFKTKLAQGKHYNVAISHVAKKLIRVLFYLLKNNETFDEDKLR

SEQ ID NO: 344414 - protein, 387 aa, unidentified
MMYCGIDVAKLKHAVSLMDENGQMLKAVFTISNSRTGFDQLHGELQALGGTVTVGLEATGHYWLALYDDLTRNHYPVIVLNPLQVAAYRKSGIRKIKSDASDAVWIADYIRIANLPPSEQNLPVFLQLRELSRFRFRLTEQVGNLKRKLLTILDRVFPEYERLFSNVFLQASRAVLQEAVSAQEFADFDLQELAQVLAEASHGRFGHEKAEKIQQQARQSVGVGFLTNAVHIEMGCLLAQLELLDAQRGEIDQAIADLMQQIPQHITSIPGIGPVTGAAILAEIGDIQRFETLDKLVAFAGIDATVYQTGQFQASEAHMSKRGSPYLRHALWCAATAALLHDPSLKAYYQKKRDEGKHHGTVLGAVCHKLLARIFVVLKEQRAYVIR

SEQ ID NO: 344415 - protein, 341 aa, unidentified
MDQKLSVLGIDLAKQVFHLVGMDTHGTIVVRKRLYRAQVMAFIAKLPPALIGMEACGGAHYWARRFREHGHDVKLMAPQFVTPYRKANKNDMRDAEAIAEAVTRPTMRFVPVKSVAQQDLQALHRVRERLMKARTALINETRGLLHEYGIIVPQGAATFRTHVLEKLATEDAKLTPLSLELFRQLLEELGTLEARVATYDAQLAQVAQAHPVCQRLMTIPGLGELTATALVAAVSDATQFKNGRQFAAWLGLVPRQQSTGGKPRLLGISKHGDSYLRKLLVHGARSCLRWVGRKHDRRSQWVQALMDRRGWNRAAVALANKNARVAWVLLCTEQVYRTAAA

SEQ ID NO: 344416 - protein, 337 aa, unidentified
MQYFAGLDVSMAETHVCVVTRNGAVIHQAKVPSTPADIAAELAQVPACRRVLFETGRMAPMLYHGLSQLGLRVVCVESRQAYQALKSLATHKTDRNDARGLAHLARTGFFKPVHVKSLPAHAVRSLIIARKKLVGQRVTLENQIRGLAVVFGVRLPRALSPAFIKQALQASEGIPGLSAAMRGLVAARAAVLAAVVAIDGDIRRMVRASDACRRLMSIPGVGQLTALAFTAAVDDPKRFRRSRDIGAYLGLVPRRYQSGEVDYIGSISKCGDRRIRTLLYEAANVMLTRYKGPLKLKDWAFAIAKRSTMRKARIALARRLAIIMHAMLRHGTEFKPA

SEQ ID NO: 344417 - protein, 383 aa, unidentified
MRKEPVKSKLRYVGLDVHAETIAVAVAEPTGEVRSVGQIPNRPEAVRRLVKKLGAPEQLRACYEAGPTGSGLYWQLTALGVACEVVAPTLVPVKAGDRVKTDRRDAEKLARCYRAGDLTAVWVPDPAHEALRDLVRAREAAQQDQLRARHRLGKFFLRHGQRPPLPMKAWTQKYLGWVKTAVHFAQPAQEATLLDYVHEVDHAAGRVERLEQAIDAVVRTTPAALGTVIGALQALRGIAQVAAVTIACAVGTFTRFRKATPLMGYAGVVACEAASGARTWRGGITKTGNAHLRRIVVEAAWAYRHRPALGSALKQRQVGVSAAVQEMAWKAQHRLHDRYRTLLGRGKAKQLAVTAVGRELLGFIWAIGVHVEQQARASQPRAA

SEQ ID NO: 344418 - protein, 422 aa, unidentified
MGRQIAAGFKVAIPLNLEATDVARSPEHPTAIRVQFGAIFVSLELSRKTWLITSLSPGKGEKMSKHSVTAGDIAGLLARFSELQRKAAVRTGKSFHLIVIQEAGLDGFWIHRVLQQEGIESHVVDPASIAVPRRRRRAKTDKIDGEALLRALLAYKRGEPRVCSMVVAPSPEEEDQRRLCRERDTLTAERVRHVNRIKGLLFAQGIADYAPLLRNRRKRLDELCTGDGRPLPQYVKAQISRELDRLELVLEQIKVVEKERDRILLSPAPVVLNTGPEAACDQPRGASGVRMLTALRGFAADGATKLWSEGLSRHFSNRRQIAAYAGLAPTPWQSGGIAHEQGMSKAGNPRLRTTMVQIAWLWLRHQPQSALARWYFASVGVGATKARKKVAITALARKLLVALWKYVTAGELIEGAIMKRVA

SEQ ID NO: 344419 - protein, 455 aa, unidentified
MEQKELTLQIINVKAAGIDVGSRSHMVAIDQDKENVREFGVYTKDHLQMIEYLHAHGITTVAMESTGTYWQTLFDALQAEGFEVLLVGGNQTKNVKGRKTDVIDCMWIQKLHSLGLLSGSFLLSNVLQELRTYYYHRQHLIEQAALYIHKIQKALRLMNIRLDIAIRDVAGKSGLNIIEAILAGNRDPEYLASLVDVRVKKSKEEIADSLRGWWRDELLYELKAALEFYKLYEKALVDCDKTIEQVLIKHLPQHTVRSQEKKEFKVTNKKNRKHAPAFNVSKIAYQYFGTDLFAIQGISHTTVLCLLTNMGHDIHKFSSAKSFAAWLRLVPNNKVSGGKIIGNSTTKGRNYIAVALRQAANSIGNQKDHDLTPFFKRVAFRKGRVAAITATARKLAIIIWNMITKLQPYKKNEIIMNNEKHKINHLKQIERKIGALHLNGNELKRLFERTSLLVN

SEQ ID NO: 344420 - protein, 345 aa, unidentified
MNYIGIDLHKRFSQFTVLNEKGETIDRKKVDNREEEILSHLNNFDLPSKAVIEATFAYGWLADLLSSNRIEVMLAHPQKVKAIASSKIKTDKVDSEILAKLLRADLIPQAYYFSKEEREIKELLRCRGSLVGLKTQIKNKIHSLLHKVNVRDDEKYTDLFGKEGRRFLDNLSLGEKSTFALKEYLSILDFLEEKIKETSKEIKEVFEKDNQAKFLEQLPGLGYYTSLILSKEIGNIKRFRREKNLVSYAGLAPSTFQSGEHQRHGRIKQGNKYIRWVLIEAVPKAIKKDKILRAFYLKILNKKGHNKAKIATARKMLAQIWYLLTYKKIFIDPETGSPVFFSGHS

SEQ ID NO: 344421 - protein, 346 aa, unidentified
MDYVGMDLHQKFSESCVVDDAGEVVERATVSTTEKALRRWFKRDPMRVAVEASSVSPWVDLLLRELGHEVYVVNPRRVRLIAEATLKTDKVDAETLARLVRIDPQFLSPITHRSEESRQQRAVLRVRAVIVETRSKMISVVRGLVKQFGRRIPACSADVFVERFREFADQLDAAVVTTVTPLVEEIEALSARIDTADAEVKALASQREVVERLDEIPGIGELVAVAFVLCIDDPKRFKDSRDVAGFLGLRPAMRSSADVKHYGRITKQGDKYMRSLLIQAAHAAMKSKKDTDIKRFGERLLGRVGKAKAHVAVARKLAVLMHRLWVTGERYRATSAPPPEPAREAA

SEQ ID NO: 344422 - protein, 353 aa, unidentified
MEQRTTVGIDLAKEVFAICILSPEGAVVEARTMRRAAFERWLTGLQGGIVVAMEACSSAHHWGRQLAAAGHTVRLIAPAFVVPFRKSGKNDANDAEAIAIAAKQPTMRFVPVKTVEQQTILSWHRAREGWVAERTALINRLRGLLTEFGFSIAQSAFRLRKALPALSTDIAVPGPIRALLLEASEQLRCLDARVARCDEQIAAHGRDNDAARRLRGLLGIGPLTSSALVATVPDAAAFRHSRQFGAWIGLVPRQHSSGGKPHLGELTRRGDKYLRSLLVQGARSALQVALRVAPDKATHLQRWILSLYARKGYHKTLVAVANKHARIIWALMARDEHFDNSAWQRHPLQRAAG

SEQ ID NO: 344423 - protein, 352 aa, unidentified
MDRYVGLDAHAETCTLAVMGPTGKRLTSKVVETNGRALLEAIDGIPGRIHLCLEEGTQSTWLYEILEPRVSEIVVAVPEESKGSKDDLRDAWARADELRTGRIRTRVYKAPKHLTALRSSAVAYRMATQDMVRVKNRLKAVLRSRGILAESDVYLPRSRTKWLKQLPEGHRELAEWLGRELDTLVPLREEAEERLLKEAKSHPITRKLATAPGMGPLRTAQLVAIVATPHRFRTSRQFWSYSGLSIVTRSSSDWTRDKRGQWVRAEVQQTRGLTRKRQPMLKAIFKGAATTILTQLVDHPLHADYQRRLQAGIKPNLAKLTLARRIAAIVLSMWKHEEVYDPARLKVVTDKP

SEQ ID NO: 344424 - protein, 390 aa, unidentified
MHKLFVGIDIAKLNHQATVIDETGKILGGSIRFPNTTKGGTTLLDHVTKFRDGDTPIVFGMEATGHYWLALYSFLVGKGHTAIVINPYQSESWRKVYMSAVKTDKEDAFLIADLLRFGSIKKSQVPSEVTIALRNLTRFRVSMSLQLSDTKRRILTVLDQVFPEFPALFSDAFGKTAISILEEYQTPEALETLSSRKLTNLVSKLSRGRFGKAMAQSLHAAASDSFGITFALDSFSLQLKLLLHQLGLLVGQLNLLDEEIAKLFGTESKLLTIPGVGPTTAAAITAEIGDIQRFKTSAQLVSFAGINPTVRQSGNFIGNKNKMSKKGSPYLRLALWQASVVASRKNPVLKAFYEQKVKEGKHKMTAIGAVSRKLTGIIFAIMRDNKSFMI

SEQ ID NO: 344425 - protein, 376 aa, unidentified
MKKNISTTVMNTATSVEGAAAQPQSATPRYQAVVGLDVGDRQSHHCVLDLDGNVVTEGVVNTKDAALRVLFEGKGRMRIALEAGTHSPWISRLLIGLGHEVLVANPRKLRLIAESDAKHDRAEARLLARLAHVGPALLSPIHTRSAQTQIDLTVIRAREVAVQTRTKIVNAVRGMVKSTGHRLPASPTLTFARKATEACPEALQPALLPLIRLVQTLTDDIAAYDRLVAEKARAYPETQAIQTIHGVGALTAVAFVLVLNNDRRRFKRSRDVGCYLGLRPKQRDSGMRTPQLGITKAGDPLMRRLATQCAQYILGPFGRDSALRRWGFALASHGGKNAKKRAIVAVARKLVVLMHRIWITQEAYDPMRGVPERSVA

SEQ ID NO: 344426 - protein, 368 aa, unidentified
MGKFITYVGLDVHKKTIAVAFADEGDSEVRPYGVIDSDLSSLDKIVRKLVSRGVEPRFVYEAGPCGYGIYRHLKEQNIECMVAAPSLIPKKSGDRIKNDRRDAKKLARLYRSGELTAVHVPKSEDEAMRDLTRAREDSKTAERKARQQLNAFLLRHGLIYSGKSNWSLAHWRWISDIKMEHEAQQFTLQEYVDTARSCSERVERITEKIRLLAGQWHFSQVVEAIQALRGVSLVVAATVVAEIGDLRRFDNPRKLMAYLGLIPSEHSTGEHTKRGGITKTGNGHARRMLTEAAWSYRMPARVSRRLRDRQQNLPEKVWKIAWKAQVRLCKRYQRLIARGKLSKVAITAIARELAAFMWAIFRTVEVGA

SEQ ID NO: 344427 - protein, 296 aa, unidentified
MKFYTKTHQHYCGIDLHTKNLYVCILDHEGEVLIHKNIKANPKALMTLIKPFLDGLVIGVECMFSWYWIADFCEDHKIAFVLGHALYMKAIHGGKAKNDKIDSLKIATLLRGGMFPEANVYPRTMRATRDLMRRRMHMMRFRAELLAHIQNTNSQYNLPEIGKNLRYAFNREGIAERFAHPSTQKSVELDLNLIGLFDQQLSKVEWHIKKHATECDYQSLMLLKSVPGIGHILSLVILYEVHDIKRFPRVQDFISYCRLVKCRKESAGKSYGTTGAKIGNAYLKWAFSEAAVLGMF

SEQ ID NO: 344428 - protein, 322 aa, unidentified
MTECILGVDIAKKKFDVALLINGKLKHKVFTNDQEGFEMLLYWLHQKNVDRVHVCLEASSTYGDELATHMYDAGHTVSIVNPARIKGFARSELLRTKNDKVDAGLIARFCLAMHPEPWKPAPPEIQHLQALARRVDALITMRTQELHRLGTAQDTIEHSIREHIVYLDRQIKALKQQIADLIKDDQDLKAKRDLLKSIPGIGEATVAAILAELHMFERCDHVQKVVAFIGLAPRQFISGTSIKGKPRLSKIGHARLRKALYMPALASIQCNPIIQIFYHRLKENGKNGKVIVCAIMRKLVHLIFGILKSGKPFDPKYAPHYA

SEQ ID NO: 344429 - protein, 334 aa, unidentified
MQNITLIGIDLGKHSFHIHCQDKSGKVLLRKKFTRTKLIEFLAGCASSTVVMEACAGAHFMARRIADLGHEAKLISPQFIRPFVKSNKNDFVDAEAICEAASRPSMRFVQPRTEAQQAMRALHRVRESLVSDKVKTTNQMHAFLLEFGISMPTGVAVVKRLSTVLAENELPPYLAQLLMRLHAHYIYLVGQITELEIALEQELSRDEVGQRLQTIPGIGPITASVLSSQLGDGKQYSCSRDFAASTGLVPRQYSTGGKNTLLGISKRGDKNLRRLLVQCARSFIQRIENQSGRLADWVRALLARKHSSIVCCALANKLARIAWVITTQQTVFER

SEQ ID NO: 344430 - protein, 280 aa, unidentified
MRIVMLGIDLGKNLCSLAGLDETGAVILRRRMKRASVLPFTAQLEICTVAMEACCGAHHLGRQLVAQGHVVRLMSPAYVKPYVKAQKNDERDAEAIAEAATRPTMRYVEIKSEVQLEVQSLHRVRGRLVAERTALINQLRALMLERGIAVPQGRCKLARYLPEILADERNGLGPRLRRLIEDMREEWRSIDCRIKGFNDELAERVRNEDTAKRLIRIPGIGVLTATALVAAVGNAQTFTCGRDLAAWLGLVPRQATTLARIAWTVLARDRQYVTVQAIGK

SEQ ID NO: 344431 - protein, 346 aa, unidentified
MLYVGLDLSRKRLDFCLLDELGERVEVGAVPPDVDGLRGFAARVGRFGEPVRAAIESMNGARFVRDQLELAGWTVEIADAAKVKGLAPLACKTDRIDAWVLAELCRRDLVPAIWLPNPRVRAERERARFRLHLVRHRSSLKQRVHAVLLAHGQPCPVSDLFGVRGRRLLERLALPEPWAGTVAATLRLIDDLDREIAACERELQRLGADHPYVPLLRTIPGIGWVLAYTIAAEIGDINRFASPRKLAGYTGLCPRVYQSGDSDRRGPLAKQGPKYLRWALIEATSHACRHPAYRARYQRTKQRLGKQRGAKVAQVDLARRLAEAIWHMLSRNQPFAPAGAPDPLAA

SEQ ID NO: 344432 - protein, 320 aa, unidentified
MSKKKSKSFIGIDVCKQQLEVAVHESDYQFRCPNKASAFGELIAELIALRPALIVLEATGGLEIPVVNALHAVGLPVVVVNPRQVRDFAKALGQLAKTDRLDARVLAHFAAAIKPPLRPIKSKEEQELDALTGRRGQLIEMLTDEKNRRGSAASDTVRDEIKEHINWLEERIAELDEQLKALLQSSPSWQAKDEILQSVPGIGPVVSFSMIADLPELGTLNRQKISKLVGVAPLNRDSGKQRGTRHIYGGRARLRSVLYMAALTASRHNPAIKEFYERLCAKEKPFKVAITACMRKLLTIINVMVRDSTCWKSKEETVSA

SEQ ID NO: 344433 - protein, 351 aa, unidentified
MRNVTIGMDLGDKNHIITILDEAAVIVKSCSLENVRASIVKFFRKYKGSTVAIEAGTHSPWISRELKALGCNVLVGNPRKLRSIWNSDDKTDVHDSEMLARIARFDSGLLYPITHRNEQAQADLELLKARDMLVKTRTSLINHVRGAVKSFGERLPKCSAASFHKQCGDFLPANLKTLLEEVVETIEHVTGRIKEFDRRIEKISREVYPETELLKAIGGVGPLTALAYVLVLEEPGRFGKGRQVGKFLGLTPRRDQSGETDKQLRITKAGNRFLRRLLVGAAQYILGPFGPDCNLRRFGLRLMERGGKNAKKRAVVAVARKLAVLMHHLWRNGEIYDPFYKSHKVVMKNAA

SEQ ID NO: 344434 - protein, 418 aa, unidentified
MKVVYPTCCGIDVHKSFLVATVITSDSIKPKYFKKRFSTFNNSLKKLKDWLLEFNCLDICMESTGKYWIPVYNILEDTCNVTIANPKWVRAIQGQKDDVKDSKWIAELFRLGLVPGSFIPEKPIRILREFTRYRSKITNCNCSEKNRFQNAFTVCNVALDSVVSDMFGVSAKAITNYLITSDTFDSEVCTSLLKTSLKKKADIVLDSIQGYSMESAQKDRMLLIRNHLNYTEQMLEIIDSKLDELILPYENAISLLCSIPGVGRRSAITIISEVGIDMSYFRNSKRLCSWAGLTPSNNQSAGKKKSVKVSRAGVYLKPALVQVAHAAVRSNQNPYYKIKYKRISKRRGKKRAIIAIARMLLTAIFHMLLTGELFNPCDLFKFDMPEEMLERQKKKAINNAIKLLNREGLINNLEALAT

SEQ ID NO: 344435 - protein, 432 aa, unidentified
MRSTKMAKQNEETIAAYIGLDWADSEHEVTMLVVETGEVESRKLKQESEALADWVQSLRERFSGRKVAIAIEQRKGALIYALMCYDFLILYPVNPKTLARFREAFYTSGAKSDPGDSGLLLDLIRLHRDKLRPWVPEDADTRLLQMLVEERRGLVDEVTRLTNRLKSTLKQYFPQALEWAGELDSRQALDFLTRWPMLESIRKAGAVTVEKFYRQHSMRNQDKIEQRVKAIKEARALTTDRAVLAASKMKALAIVRQLRSLGKSIVEMEARIQELFEQHRDHEVFSSFPCAKKVLGPRLLAAFGGDRTRYESALELQSFSGIAPVTRSSGKSETIHKRMACPKFLRQTFHEYAAQSIKKPGWARTYYRRHRDKGVKHHAAVRALAYKWIRIMFRCWQEQEPYDEAKYITSLKRRSSPLVSGLPPAPGPLVEV

SEQ ID NO: 344436 - protein, 366 aa, unidentified
MGKYDYTGKVVYMGIDVHKKTYACVSVCDGEIVKKDTMQADPVSLIAYIENQFSGARVETVYEAGFSGFYLHRELIKVGIKNQVVHPGSIEVATRDRVKTDKRDAKKMATQLAVGRLKGIYVPSLEQEAKRSASRLRDNIVKLRHQVGQKIKSLLFTQGLISAEDDTVLSKRWLNKKVEEVKASNYPIGFYYTIKRYADQWVAFSKDLVDIKKELLAMQTEVEQALLMIYQSAPGIGEITALKLKDELADMKQFPNEKKLFNYLGFTPVEYSSGEHVRQGHISRQGRAALRHLFVEAAWIAIRKDPQLNEIYQRLAKTRGAKRAIVGVARRLAGRLRSCVQQGVLYEIKPLQTETSDAKNELCVTS

SEQ ID NO: 344437 - protein, 407 aa, unidentified
MERVYARCAGLDVHKNSVWACVRADGRQFTEKFGTTSRELLRLGDWLASHGVAVVAMESTGVFWKPVWNLLEDRVQLMLVNARHVKQVPGRKTDVADCAWIAQLLEHGLLKASFVPPRPQRELRDLTRQRTQLLGDRARVVNRVQKTLEDANIKLASVATDITGKSGRAILDALVEGELTPEQMAELVHKRMEAKKPLLREALAGRVTAHHRFMLKQLLEQIDYLDRMVESFDRRVEEVMSPLGRESVKRLDEVPGFDLRTGQNVIAEIGTDMTRFPSPHHLASWAGICPGNHESAGKRKSGRTRRANGWLKGALTQAAWGASRTRRSYFSARHARLTTRRGVKRATIAVAHSLLVTAHRLLSDPRPYVDLGVNHFENLRSPEKQAEQMIRKLKRLGFLVEVSRPAA

SEQ ID NO: 344438 - protein, 493 aa, unidentified
MTHRAVGATTDYENDRGKVRQNARAAANEADLFWRAEARVRMWSGTHERHNAMSPPPLGGEHEKEFLEIAASLVGGTKERPMDGVHRCCAGLDVHKDTVTACVAWAESTGKKRHEKPQFATTTRELLALADWMRGCGVTHVAMESTGVYWQPVWHVLDGQFELLLVNAQHVKAIPGKKTDRRDSVWLAELLQHGLLRSSFVPPTPIRELRDLTRYRVTLCQECNRIANRIQKVLEDANVKLASVASDPLGASGRAMLKALIAGEADPAKLADMARGLLRRKLPALQAALDGRVTPHHRFLLGELLDHLEFVEGKILRLETTIEERLRPFEDTVRRLCTIPGVDRVSAWGIISEIGLNMDQFPDARHLASWAGLCPGNWESAGKRTSGRIRKGSAWLRRHLCQCAWAVSTKRHTYLSALFRRLAARRGVKRASIAVAHAILTIAYRIIRDGSTYRDLGPDYFDTLDPARLKRKLVKRLEGLGFQVTLAAQPLPA

SEQ ID NO: 344439 - protein, 352 aa, unidentified
MSDARAQQVANDPVTNLFRERSKATAPGLAKEVWVGVDTHKDVNVAAAVDESGRTIGGDQPASISASTTPEGNSDLLAWARGLGETVVAFAVEGTGSYGASLTRFLQGKSQIVVEATRPKREDKAVRRTLGKSDAIDALLAAQRLHRLELRISPKSRVGDVECLRMLRIARKTAVKARTQAINSMKALVVTAPDDLREQLSGLTKDTLPDKCASFRPKGYTPDAAAKTALRSLARRIHALEDEIKALDTEMAAIIKKAAPKLLARQGVGTDVAAALLVTAGDNPDRMKNESSFAAMAGVSPLPDGSGKTGGRHRLNTGGNRDANNALWRIVLTRMNHDPRTKAYVARRTLEG

SEQ ID NO: 344440 - protein, 335 aa, unidentified
MQIYGIDLAKEKFDVSFFDLTSKKVSNKPSHKVVKNNFKSIGRFLETLPSDAVLVAEHTGVYGDTLLKCCMDSNVKIAFVGGYVIHRYRATPDRAKTDVLDCALLREFGERYPDKLKYKTFPEEALYELRQLARHREMLVEQRKQLITADKSEDCRPIRSLAVKRSMDRIKEMLDTEIAETEKEMLKVINGHDSIHHNYEIVKSVNGVGLVTAVELLVKTDNFTKITTARQYAAYAGTAPYEKSSGKMDKGAHISKIGNRRSKTLLYICAESARLHNKEIKLYYERRTLIDKKPRHYVLNAIANKLLRIIFTLVEKGEYYDANFIRQDPRVVKYN

SEQ ID NO: 344441 - protein, 367 aa, unidentified
MPSGWPRHRFHTRVKGGKAMMMLGIDAHKRTHTVVAVDELGRRLGVKTTTATTTKDHLELIQWADQFSTDRTWAVEDCRHLSRRLERDMLAAGERLVRVPPKMMAHSRDSARTYGKSDPIDALAVARAALREPDLPTAYLDEAARELRLLVDHREDLIAERTRHINRLRWHLHDIDPAWAPKDRALSTMKHLRQTQDGLAGLNTVVARIARDLVERIRALTIDINSLEAELDERTTSVAPHLRRVHGVAAVSAAKFIGEVAGIARFRSRHAFARHNGTAPTPVWSGNTERHRLSRAGNRQLNAAIHRVALTQARSWPDARSYLDRRQEAGATRKEAIRSLKRRISDVIYRAMLADAQAHEKHQLTAA

SEQ ID NO: 344442 - protein, 356 aa, unidentified
MSEKPNSAIAVIGIDIGKNSFHLVGLDKRGAIVLRQKWSRGQVEARLANLSPCLIGMEACVGAHHLSRKLQALGHDARLMPAKYVRPYSKGQKNDFRDAEAIAEAVQRPTMKFVATKTVEQLDLQALHRVRERLVGERTGIINQMRAFLLERGVAVRKGPRFLRVELPTILAKRSDVLSPRMLRMVEDLAGDWRRLDERIEGVSSEIAALVDQDAACKRLMTVPGIGPIISSAMVAAIGTGDVFSKGRDFGAWLGLVPKQISTGDRTILGGISKRGNRYLRVLFVQAARVVLGKLKPKHWERYGLKSWIEAAQRRLHRNVLAIALANKLARIAWAVLHKGRAFECVKTNATAPQPA

SEQ ID NO: 344443 - protein, 342 aa, unidentified
MWYVGLDIHQRMSCLCILDANGKVIKEQKITGCWSVVLAELAALPERFAICYEASCGYGYLHDQLRRMAQRAVVAHPGKLRLIFRSKRKNDRVDARKLAILLFLDQVPAVHVPGIDIRGWRSMIEFRQRLIGRRTQLKNGLRSLLRGYGVSLPAGKRLWTTAGRAWLAGLELPDEMVLQRDMLLETLTSLGPQIKRVEKILRKRADAHPGVYLLRTIPGVGIRTAEAVVAYIDDARRFARNKQAGAYFGLVPCEDTSVKHRLGHITADGPATVRKLLTEAAWQAVRRSPQVRARFERIQAGKSDRKKIAIVAIAHYLVRVMQAMLRTGEVWRNEPTATKAVA

SEQ ID NO: 344444 - protein, 332 aa, unidentified
MESNILGIDIAKDKFDVALISSKLSEKPQKEKIKFAAFENNTRGFKLLLKWISDNDADDLHACMEATGGYSEALGTYLHECGYKVSIVNPSQICNYAKSELSRNKTDKTDAAIIARFCRANRPHEWKPLDEDGRKLKSLTKRMGELEKMLQQEKTRLKAPGLDPEVKESIIEIIDKFKSEIEAIRKKIREHVKSCEYLRKNVELLDSIPGIGEKTAFVILGLVGEITRFSDVNQFCAWTGVVASKRESGKSVRGKPRMSRKGNAAIRKAMFMPALVAMEHNPVLKKFKDVLKTRNKNGMTIVVAVMHKLLRMVYGVLKNQKPFDPESYPHYA

SEQ ID NO: 344445 - protein, 419 aa, unidentified
MKIIYPRVCGIDVHKKFIVAVICISESVEPVYLKKRFSTFHNDLIRFREWLIQNDCQNVCMESTGKYYIPVYNVLESHISNIVVANPKWVCAVKGEKDDDKDAKWIADLFKFGIVRSSFIPQKDFRILRELTRYKYKLVNMRSSEKNRYQNALTSGNCKLDMVFTDVFGKSASNIIDLILSDNPYTDEDILSKVHKNCKASPDMILNSINGTDLTPVQKSRIELVNDHIKQLSSNIQRLDKLIDLMIEPYEDYISFLCQIPGVSRNSAIIILSEIGVDMNQFTSSRRITSWAGLTPSSNQSAGKKKSVRISRAGVYLKPCLVEVAHAAVKDKNHSYYANKFNKISKRRGKKRAYIAIARKILVAAYHMLLTGEIWNPADLAEVETPVEQRIKYVKNNLKSDIKQLLDLSLIHISEPTRH

SEQ ID NO: 344446 - protein, 407 aa, unidentified
MDLIHKRCAGLDVHQRTVVACARIVEDKVTEEVRTFETTTTGLLELSSWLEAQGCTHVAMEATGVYWKPVWHILEAKFELILANAAHIKNMPGRKTDVKDATWIADLLAHGLIRGSFVPPTPIQDLRALMRTRKQLVREAARNTQRIQKTLEDANIKLTGVVSDILGKSGRAILDALVAGETDPEKLVELTKGRLKAPRPTLVEALRGHVRDHHRFVIKLHLAQVDALNQAVRDLEARVEKHLDPFRKNVEILVTIPGISDVAASVIVSEIGYDMTRFKTSAHLVSWAGMCPRSDESAGKRRSSRIRYGAPWLKTTLVQCAWAAIRTKDSYLRAQFYRLKGRVGPMKAIIAVAASMLTSAYHMLATGSEYKDLGAAHFDRRDHAQLAKRLVRRLENLGLKVTVSEAA

SEQ ID NO: 344447 - protein, 328 aa, unidentified
MWQWRNTISSCPSRLTPSEFVPWVEALLRAGHTVHVVYEACGFGFNLYRGLKALGAHCYVIAPRQLDEQCTRIKTDPRDATTLCQRLSRYVEGNTRELAVIRVPSEQEEMDRHVSRQREQLVRHRQKLEAQGRSLLINHALPAPAHWWKQQTWSRLGKHLPAWIRLRLEVARPALLSLQEQINALTSELEAAAPASIPAGLGKLTSVVLTREICNWHRFHNRRTISSYTGLCPGERSSGSKRVPGSVTKRGNPRLRAALVECAWRMVRFQPNYPPVKKRLGVLAKGARATRAQRKKAIVAVARRLAVDLWRVHTGRCSAQQLGLNISN

SEQ ID NO: 344448 - protein, 423 aa, unidentified
MNELTLCVGADVHLDEIVLRAVDKSDGHEVLERFHVTNNLPGAQRAASTIAQAAAQNGYTHLEIGWEATGLLWVPFHRFLSTTPLWQPFAPELVCFNPKLVANFKEGLVLRRPKNDERDAWDVAARVRFGEWPVSYVPADFWQGLRRLTRYRYQLARCLSREEMRFQSYAFLKASDWKRVKPFSDVFGATSIALLTEFTVAELAAMSHDQLADLITHRGHGRFGDPTATARAVQEALRTSYPIDPLMDEMVTATLTTGWEHIRYLKRLMKQQDQHIARYITPVPNPLITVKGLGAVITAGMLAEVVDITRFPAHPHVAQYIGLTWEKRSTGNFVSQNTRLTKVGNVYLRYYFILGAEQLRRHNLEYQTYYWRKYQEVAKYQHKRALVLTARKLVRLVHALLTKNHPYVMRHAVPESEERIEST

SEQ ID NO: 344449 - protein, 346 aa, unidentified
MQITTIGLDIAKNVFQVHGIDAAEKVVVRKQLRRGQVIAFFKALAPCLIGMEACATAHYWARELTKLGHEVRLMPAKDVKAYVKRNKNDAADAEAICEAVRRPTMRFVPVKSAEQQGQLMQHRTRDLLMRQRTQVINALRAHLAELGIVAAQGREGIKELLAIVADDQDARLPIDARASVIVLAAQLQALQTLIGSIEKRIKMQHRSNEASKRLESIPGIGVIGATAIVATVVDPTVFRSGRDFAAWIGLVPREDSTGGKQKLGPISKQGDRYLRRILVVGACAVLRYAKQNPERYPWLTQLLARRPFKVVAVALANKMARMAWALLAKGGTYRAPALVPAFAAAA

SEQ ID NO: 344450 - protein, 345 aa, unidentified
MTESKIVAFDLAKRIVQACVIDGTGAVIAEERMGPERVLSFTARHPHATVALEACGGAHHWGRALERQGHRVLLLPPQRVKSYGDPACKDDRRDARAIAEAASRSYLRPVPVKSEEQQALQSLDRVAALLARQRTQTVNALHGHLSEFGITLPKGPHLLKRRFTELEASPRWRELPEELGAAMGELFAAFLALEDRLSAIKARLARSAKQSKLGHLLLEIPGIGPMTAVSLEAAIGDDPGRFSSGRQFAAWLGLTPRVSASGERRQLARITKRGSARLRSLLVVCAQAMLRQYRQGRHGDPLACWARHLLARKRWNVAVVALANKLARIVWKVASSGAAYQARTA

SEQ ID NO: 344451 - protein, 435 aa, unidentified
MSFTSPASIDPVWAAFAAIDWASQKHSWSLLPAEGGSIESGQLDNTPEAVELWAAELRRRFPQAPIAVALEQKRGSVVYMLSKYQHLVLYPVPPSMSAAYRRAFCPSGAKTDPGDANLLLDLLVHHRQQLSPIATDTAETRLLRFLVEQRRQLVQQKVCLIQQLTDSLQQYFPQIRTWFGSLDTVLVTALLHRWPTLSDLQHAHPGTLRRFFVDHACRNDDLIQQRIQAIYAALSATTDPVVIEAGTRKTAAIGSLLAAAREQIHALDKRIAAVVADHSDAELFASFPGAGAATVPRLIAAFGTDRNAWTSAAALQCFSGIAPVHKSSGNSTVVVMRHACPKFLRQTFHEFAGQSIRFSEWAKAYYRHRREDQKVSHHTAVRSLAFRWIRILYRCWKDRQLYDERLFLEAQGRRNTPRTGWNTAAGFHKPATPNS

SEQ ID NO: 344452 - protein, 364 aa, unidentified
MAQEHPQAGAGPSVTIGIDPHKGSHTAAALDGRQQVIGQIRVLATPAGYRELRRWAGAWPERRWAVENVGGLGRPVAQWLLGDRETVIDVPPKLSARIRVLSTGHGRKTDTADAVSTALAACGPAELNAAMLESHATSLRLLSDRRDDLVARRTQVLNRLHALLADLIPGTVPAHLSAAAAAALLRRSRPAAGPRRTRRLLAGDLVREARRLDTEIAALESSIAEAVTESRTTLTSLFGIGPILAAKILGRVGDIRRFPSAARFASYCGVAPIEASSGDVVRHRLSRAGDRQLNFALYMMALCQARQHPEGRAYFLRKRAAGHSDREALRCLKRRLADVVYRQLVRDARPAPPTAPSAAPAPRA

SEQ ID NO: 344453 - protein, 342 aa, unidentified
MNREIYIGVDVSKNWLDLAYYDGVTVDWKQGHIRVDNKQTGFSKIGKWLGKLKANEDSVLFCMEYTGLYSQDFRIWLEKEGFVYGMVQPRKMHRFEPDLGEDERALDRIKTDEMDSFRIAMYCEKHCRKIKASPSKLPSEAYFKLKRLLAERKQYTKQTAIYKQQLHDISVYDTDGSCKRKQAALNFLNRQIRQTDEEVQSILNEDSAMSRNYELLCSIRGIGLVVAVETIILTENFTSITNPRKYACYIGIAPAKKESGVSVRGGEHVSRKGFTQAKADLSIVCLSAIRWDSNIKSYWERKRADGKHTGIVLNAIKFKLVLRMFAVIKRQKPYVSIDGHKK

SEQ ID NO: 344454 - protein, 406 aa, unidentified
MSDAEFDWFVGIDWASREHEVRLLDVQGQDCGRRGISHSGEGLEALADWLTEQSAGRPDRVAVAIELARGPIVESLLARGFAVFGVNPKQLDRLRDTYTLAGAKDDRLDALVLADTVRTRRSLYRRLKIGDPKLIALRALVESVEELEAEERRLANRLRAILESYYPQVLAVCPAADEAWVWAVLEKAPTPADVRRLTKARLAKILREHRIRRLDASDVLRTLREKAIRVAPGAAEAAAGQVVLLTARLRLTHTQRARCSRQVEAALAELEDDPDGDAAIVRSVPGAGRCVSAALLVDAADLLAARDYRKLRSYAGIAPVTRQSGRSRLVVMRRACSTRLREALYHWARCSVQRSSHFRAIYAAARARGQSHGRALRGLADRLLRMLMAMLRSRTLYDPEKLTAPA

SEQ ID NO: 344455 - protein, 341 aa, unidentified
MQVTTIGLDIAKNVFQVHGIDAAEKVVVRKQLRRSQVLAFFKALPPCLVGVEACATAHYWARELTKLSHRVRLMPAKDVKAYVKRNKNDAADAAAICEAVRRPTMRFVPVKAAEQQAQLMQHRARDLLMRQRTQLINAVRAHMAELGMTAPQGREGIKQLLAIVADEEDTRLPVDARASLMVLAAQLQAMQTTIGSLERRIVVRHRSNQDSKRLQSIPGVGIIGATAIAATVTDPTAFRSGRDFAAWVGLVPREDSTGGKRRLGPISKQGDRYLRRVLVGGAVSILRRAKLNPERYPWVTRLLARRPFKVVAIALANKMARVAWALLANGGTYRRPRLAAV

SEQ ID NO: 344456 - protein, 400 aa, unidentified
MNYFLGIDIAKTNHVASLINNNGDVVIRAIKFTNSNEGFNKLLNTIQDKIGDLSNIEVAMEATGHYWLSLYSALTDNSFNVSVYNPYQIKSYRGAYNNRKQKNDIIDSIIIADFLRVFGSKESKLPEENLLSLKQLTRFRSNIVDNVSSLKVQVIGIIDKVFPEYKKLFCDTFGTTSKQLLLNCPTPDDIIKISTTKLVNLLSKYSKGKFNKDTALHIKEVAKESFGIKFTTNACSFEIKQLINQIIFLEKQIDEVSKEIKELYNKLDSHLLSVPGVGINLAPVILAEIGDINNFNKPSKLIAFAGTDPSENQSGNKLSSNDKTSKRGSPYLRHAIYTASLVAISNEPELRAYYDKKISEGKHHFVALASISRKLLTIIYYILKENRDYIRYDNIKDKHN

SEQ ID NO: 344457 - protein, 322 aa, unidentified
MEQRVLGIDVSKETLDIALSDGIGIKHNQFLNSQKGHEQLEQWLRKQTSSDIHACLEATGSYGEDLAIYLHEAGHIVSIVNPARIKGFGQSELIRTKTDKIDAALIARFCLAMNPGPWNPPSPEIRSLRALVRRVDSLIDMRSQEKNRISTAHETVALLIKEHIAYLDQEIEKIRQQIAELIGKDPHLKRKKDLLDSIPAIGKATIPHILAELDDLGKFNHVREMVAFIGLAPKETISGSSIKGKPRLCKIGHARLRRALYMPALVSIQRNPLMIAFYNRLKDKGKNGKVIVCAIMRKLVHVIYGVLKSGKMYNPNYTTACA

SEQ ID NO: 344458 - protein, 379 aa, unidentified
MIHVGIDLHTRNMVNVAINDNAEQIKQAKLPTSRKALYDFFRDFDEPVQAVVECTSSWYWLSDWCRANGVPLTLAHAKMVKAISYAKVKTDKVDARTLAELLRAGLIPEAYQVGPERRALRELTRGRLRMIQRPGKLQSRLWSQAAKYNVHIDRNQWRYPDELVQWLQSQLPEVATVEAELLVDQILQLQSHIHRLEQMIERREAFSGDLELIKPIPGIGLVNGWSILAEIGDIGRFPSDKQFVSYSRLVPGSSDSGGARRHKSGSKDGNKYLRVAFGQAAICAYTHYKPVKQFYRKIKRRSGRHVARAVVAKELAKIVWHVLSKQEPYKGFSRRDPLGKRAAHAGDLSSILAPADKPVRLTGTPSPRALIGESAGWPE

SEQ ID NO: 344459 - protein, 289 aa, unidentified
MITIGIDPHKGSHTAVAVDEHEEVLDQLRVKASRRQVHDLLAWAERWPERRWGVEGANGLGLLVAQRLVAAGQDVVDVPARLAARVRLLDEERTTKSDPNDARSTAIAALRHRRLRTVTAEDHTVVLRMLATRRAQLQAGRTQAVCRFHALVRDMHAGGARTRLSTKKAASMLAAMRPDGVVETERKERARELLEDMRRYDRLLIDNEAKTTAAVKASGTTLTEILGVGPITAGLIIGHTGDVTRFPGRGNYASYNGTAPIEASSGDVRRHRLSRRATASSTTPSTSSP

SEQ ID NO: 344460 - protein, 339 aa, unidentified
MKKTFQNFLGIDVSKLTFDVALIVSASSLNNIVSSSFSNNKKGVSQLLKFLKKQGIKNLNDELLICMEHTGMYSRILVNNLSNFTTNIWVENAYSIKHSTGIKRGKTDAADSIDIAKYAFRFMDNAKQYDEKTNTVQSLQDVLSNRTRLMNALTNLQKPIKEMESIGLNEAANLLAKHCKAAIDGLTKSLKLIEKDIAEIVKKDEEAIQKINLLQTVPGVGLLTALSFYCTTNGFTKFINKKQLACYCGIAPFPYQSGTSIRGRNQVHFMGNKTLKSTLFLCSMRVIQLKGEMQDYYKRKVEEGKSKMSVLNAISNKIIARMCAVIENNKPYENYLLLS

SEQ ID NO: 344461 - protein, 339 aa, unidentified
MERFIGVDLHKNMFMVSFFDSQTGNHQLKRYYIKDITSFSSELSSEDTVGVESTNNTRYFVNQIRECVKEVKVINPSQFRIISKSVKKTDENDAKVIAEFLSKDMVPEVRMKDKKTAQINSLANTRDKLVKLRTALKNKIHNILSSHGILLKKESLSSDKGLNRILEQPVDPTACVELEVIVSQIRSLNDGIKKLDKELEEKGKELPGHENITSIKGIGNKSGSILLSVIGNINDFENEKKLAAYFGIVPRVSNSNETEWQGRITKRGSKLGRTTLVQCTLVAIKYSPYLRSFYERIKAKKGSGKAIIATSKKLLGIIYNTLKNNWVFEDFPSGLIRTT

SEQ ID NO: 344462 - protein, 411 aa, unidentified
MELLLERVAGLDVHRDTVVACARFPRPSGRGRDSQTREFMTTQRELALLRAWLSELAITDVAMEATGVYWVPVFSALEANFEVVLVNAAHMKNVPGRKTDMADAAWIAQLLEHGLLRPSFVPPADIRQLRSLTRYRRALVNERTRTVQRLEKALQDAGVKLTSVASTVLSKSGRAMLEALVAGVRDPSVLAELAKGRLRPKVPQLREALAGNFDQRHATIVAECLAHVDGIDASIAHISAEVALLLEPHRWAIELLVSIPGVELRTAEVIIAEIGSDMSVFPTAGHLASWAGLCPGNHSSAGKATKGTTRPGSPWLQKALTEAALSAAHSHSSYLAVRHARIRARRGKQRAAVATAHVILVSAWHMLTDRVPFADLGPDYYQRHRDPEAETKRLMRRLEALGHKVVLGPAA

SEQ ID NO: 344463 - protein, 390 aa, unidentified
MQALCPRPDEHIAVRTDLNAIFVSLELSRSTWIITSLAPGGGEKMSKHSVPSGDVAALLARLSQLQEKARARTGRIFPIIVIQEAGLDGFWIHRVLQQEGIESHVVDPASIATSRRRRRAKTDRIDGEAQVRALLAYKRGEPRVCAMVQAPTPQEEDRRRISRERETLTAERVRHVNRIKGLLFAQGIGDYEPLHRNRRERLEALITGDGRPLPECLKAQIRRELDRLELLIEQVKAVEAERDAVLARAQASPGVPAPAALLLALKGIGPEAAATLWSEGLFRTFSNRKQVAAYAGLAPTPWQSGSVHRDQGVSKAGNPRLRTIMIQIAWLWLRHQPQSALAVWFRARIKRTGGRLGKTMIVALARKLLVALWKYATAGVLIEGAILKPA

SEQ ID NO: 344464 - protein, 429 aa, unidentified
MTGSNDTPQGVTLVAIDIARHYHDVLIDPPPPKRRSRLRLANHRDAFEQLAEYLRTLKSSVLIGFEATGNYHRPLAYFLHQQGFALRLIPTLALARTREAMHNSWDKNDPKDAQVILHLLKTGLAQTWHDPVVNGINDVQELSKTHFQVTLARVRVWHTLRNHYFALYFPEIDRFVRSNHSVWMTQLLASFPTPAAITALSAEEFQKQAWNLVGRKVNKRALLAEIYAVAQQSIGVPVALDSAAITMFRLMLEQYLALDKLRERIAEQAAVLLGDNADSRRLMTVPGIGPANALTILAEAGDLRRFRHHRQFLKFCGLNLSTLQSGKSRGQSHISKYGNARLRTALWMAAQSAVRMRENSFRRKFDHYIRANPLNADLRRKAYTAITAKLARVVYGLIKQQRDYRPFFEHEFQVEEPLRTRAVGALATP

SEQ ID NO: 344465 - protein, 374 aa, unidentified
MENTITYVAMDTHKKQHKIALHYPCQEEIVEFTISNTVRDIKKIVNKIKKQAPGEVEFCYEAGVCGFTLKRRIEQFDCRCCVIAPSLVPRKPGERVKTDRRDAKKLLMMHRAGLLTEVHAPNEHQEAARELTRLRETARDNLKRIRHQLLKLLTRHGYVYTEGRHWTQKHITWLRTVEFAVSTLTDVFENYFNEMIYCIGRLENLDKEVGLLASSQEYKEIVGLLCCYHGIDTLTAITIITEIFEFGRFESPRHLMSYLGLTPSEDSSGDKQKKGAITKAGNKRIRRLLNEASWHYRHRYVPSTALKKRRKGQPKWAIEIADAAGRRLSTRHRYLVNKGKMPCKANIAVARELAGFIWFTVTQYQARKNTNDAA

SEQ ID NO: 344466 - protein, 390 aa, unidentified
MYYCGIDVAKRKHAIALLDEHGQPAHRSFTIDNTRAGFDQLLQALAQLPGPVLIGLEATGHYWWALYEALTQHDYAVVVLNALQVHAFRKSGVRKVKSDRTDANWIAEFLRFSQPAPAHPTTPLLRQLKEVSRFRYHLTDQIGDDKRKLLSILDRVFPEYETLFSSVFLTSSRQLLAQAASAQELATFDLAELTDLLKTARRSRLGRTKAETVQAAAQQSVGVRFLADAAQLEVRCLLAQIDLLEEQRDQVDEALAQLLAQVPQHLTSVPGVGPTTGAARLAEIGDIQRFDAPEKLVAYAGIDATVYQTGQFEARQMHMSKRGSPYLRHALWQAASMAIVHDSELRAYYDRKRQEGKSHGTALGAICRKLITRIYLVLKENRPYEVRAQH

SEQ ID NO: 344467 - protein, 366 aa, unidentified
MKKTSTVQAFQNEIFKGRKLTIGLDLGDRWSFYCVMDEAGQIILEQTLPTTPEAMKQTFGKIPRSLLALETGTHSPWVSRLLSELGQEVIVAHAQKVQWITKSSRKDDRHDARTLARLARVDPELLGPVRHRSAQAQLHLTVIRARAELVSARTALVNAARGLVKSYGQRLPKCGTYQVSRELAAALSTELRDVLEPLLKEIESLNERVKEYDERMEKLAKEVYPEVALLKQVKGVGTQIALTYVLTIEDPHRFAKSREVGCFLGLRPGRRNSGESEPQKGISKEGDRYLRTMLVQGAHYILGPFGEDSDLRRWGRKLAERGGKNAKKRAVVAVARKLAVLLHRLWVGGEVYEPLRNSQKAMRDVA

SEQ ID NO: 344468 - protein, 453 aa, unidentified
MSQTKKRKLKEKKATELPVLNPNAAGIDIGATEIYVAVHPDRVPEPVRSFATFTEDLNRLADWLQACGVDTVAMEATGVYWIPLFQILEARGFEVCLVNARYYQNVPGRRTDVSDCQWLRHLHSVGLLRRSFRPADQVCVLRSLVRHRDGLIQTASSHVLRMQKALNQMNLQIHHVISDITGLTGLRIVDAILAGERDPAKLAKLRDGRIKASEETIIKSLVGDYRREHLFTLRQSLAAWRHYQQLMTECDREIEQQLKTFDDAIDTQTKPLPAPKVHRRKLFNNEPNFDLRGHLYRIFGVDLTAVPGINVLTAHTLLAEVGPDVSRFRYAAAFASWLGLCPDNDISGGKKLSVRTRRVSNRAAWALRMAVHGLHKSETWLGNFYRRMRAKLGAPKAVTATAHKLARIIFHLLSTRQAYDESIFAKVEQQARLRMEAKLKAQARALGLQLVPA

SEQ ID NO: 344469 - protein, 324 aa, unidentified
MTNTNIVDHIFVGIDVSEDNLDLWIHPLNKYKTFNNTEQGISKIKDYLKPYNVAKIVVEATGGLEYKAAEALQATGYYVSVVNPLFTAAFRTMRGKFTKTDTKDAQMLALFAERINPEARAVASVVEKELKELIARRNQLITMIVSEQNRLRRINSSKVINSISSIIALINEEKEKIEAIILQEIKKNENYKTIYDLLTTVPGIGPVVAITLLIELPELGALNCKQIASLVGVAPHARESGKSKLYAKTKGGRKTVRAALYMAAISATRFNSAIAPFYKKLVARGKPKKLALVASMRKMVIILNNIVKNKRPWQKVYQQILLTS

SEQ ID NO: 344470 - protein, 459 aa, unidentified
MNRRERREMIRKMQSEDLSLEVVHPHAAGIDIGNESHYVAVPPTRDPQPVRRFGCTTAELKTMAEWLKQCAIRTVAMQSTGVYWIAVFDILEEAGLEVYLVNARETKNLPGRKSDVQESQWLMKLHTYGLLRNSFRPSRQIRMLRTYWRQRQDLVRSGGRHIQRMQKVLTQMNIQLANVISDISGTTGQTIIKAILAGERDPHELAAYRNARIEASEEEIAQRLEGNWQDDLLFVLGQEQSAYEFCQKQMMECDRQLSHCLAQLEDRSQGATMPQETRKNRLRSKKGNKPQFDLRAELFRRSGTDLTQIDGVDVMTAMTIVSEVGWDMTKWKTENNFVSWLKLCPDNKISGDKVIGKGRMPTNNRATSALRMAASNLRLSGTYLGAQFRRLRSRLGAPVATKAMAAKLARLIYRMLHYGMRYVDQGAEFYEAQYRKQQVSYLKRKALKLGLQVIEVVAA

SEQ ID NO: 344471 - protein, 374 aa, unidentified
MGDDSEAFIGIDTSKLRNAVAIAEAGRDGEVRYQGEIDSSDAAMRKLVARLAAKYRRLTFCYEAGPTGYGLHRLITGLGHDCMVVAPSLTPKKFGEQVKTNRRDAQNLARLLRAGELTGVWVPDERHEAMRDLSRAREAWVDDLRAKRQQVSSLLLRLGLHYPGKTTWGRAHLSWLAAQKLAHRQQRIAFEELMGAVRQAKARVERLEQALREAVPEWSLAEVVTALQAMRGIDTIAAVTVLAEIGDLSRFGSPRELMGYLGLVPSERSTGDSVKRGGITKAGNRRARRVLVEAAWSYRHPPRIGREKQAKVEAAPTAVREIAWKAQVRLSGRFRALSRKGKRPTIVATAIAREMCGFIWAINREMRDVRVPKD

SEQ ID NO: 344472 - protein, 443 aa, unidentified
MRLIYERVAGLDVHKKNVVACRMRVTAEKRLEWETKTFGTTTVELLALHDWLSEWDCTHVAMESTADYWKPVYNLLEGDFEVLLVNAQHVKKVAGRKTDATDAEWLAELMLHGLLKASFIPAKPQRVLRELTRYRSTLVRERARVVNRVEKLLESTNIKLTSVVSDVMGVSARAMLEQIVAGTTEAKTLAELAKGRLRNKLKELEAALTGVVDEHHRFILAQQLGHIDFLDEQIETMSAEIGRQLERMSQPPTADGSANSDQPNQLDSSASAEQPPLSWTEAVALLDTIPGVDERVAQVMLAEMGLDMSQFPTAKDLVSWAGLAPGNHQSGGKRYASHTTKGNNPLRSMMTQAAWAASRTKDTFLKARYHRLAARRGKKRAIVAIAHSMLESAWYMLTRRQSYQELGGDYYDQRKKESKVTYLTKQLTKLGFVVSLDPIPTAA

SEQ ID NO: 344473 - protein, 347 aa, unidentified
MMRILALDLGKYKTVACEYEAESGRHRFATVLTTPKALHDLIVDREPQRVVIEICSIAGWVSDLVRSLGIELQVANTSDERWQWRKVKQKNDRRDALKAAQLSAVNQLCPVHVPELTMRQWRALIAYRYKLVQRRTKVKNHIRDLLLREGQLLPRGRAAWTQAGMATLAAIAQPFTTVDSDQLWRGELGIELAQLTQMQPQIQEVEAKLDELAAADARVQLLRTIPGVGPRLAEAIVTMFDDVTRFTTAGQVGAYLGMVPKQFDSGERERSGRITRHGNRLVRSLLVEIAWASLRHNPWARQTFQRISGGKKSRRKIAIVAVGRKLLVRCWGMLRHQTPWDWQTSGA

SEQ ID NO: 344474 - protein, 372 aa, unidentified
MTSIIYVGMDVHTTNYTLCCYSMEDDRFFAEVQVEPDAKNILKYLARIEKQQSRGCRIVCGYEAGCLGYSLYHQLHAHGIDCVILAPTTMMTKPGKRIKTDRRDARLISKCLAFHTYSPVYIPTEVDDAVKEYIRMRDDANSALARVKQQIIAFCIRHGKIRGGKSYWTNKHLEWLSSLDLGNKILSEVLQEYLIRYYHLQEQVDMYDMRINELAQAEPYQQKVEKLGCFRGIAAHTALSFCVEVGDFRRFATAQQFASYLGLVPGECSSGDKQQYTGITKAGNSHLRKLLVETAQVFGRSATKSGKSVALKERQAKCDSLTVAYADKANARLKKKYFKIAMRSKVNIAKTAVAREMACFIWGMMTDNISCA

SEQ ID NO: 344475 - protein, 370 aa, unidentified
MEQITRAAVRGEAVRVGVDLAKRVIQVHAVDTAGRVLGSRALARDKFIAWCAQLPAGCIVAMETSSSSHHWARKLSALGLDARIIAAQLVSPYRRQGASGKNDANDAAAVCEAASRPQMLFVAVKSVEQQSMLCVHRLREGFKAERTACINRIRGLLAEFGLVFAQGPAALQVVLADVLEDASNEMNTLARLVLQRAHSQWRELDEHIAWCDERIAAHAKHNDAVKKAATLMGIGPVTASAVVATVGDFKQFRHGAQFGAWIGLTPRQDSSGGKSRLGGITKRGDVYLRSLLIQGAKSAVMTAHKRSDPISKWTAALRDRAGWQKAAVALANKNARILWAVMTKGEAFDPRHVSVKPNVPTPTTPAAMAA

SEQ ID NO: 344476 - protein, 411 aa, unidentified
MSVQQGPGPARLFAGVDWAQNSHVVCVIDDVGEVVERVTVAHDKAGIGRLVALLTGHQVAGTGIERGDGPLVTALLAAGLTVFVIAPSQVKALRGRYGSAGNKDDRFDAFVLADVVRTDRRRLVPLVPDGLDTQALRALVRARQDLLGHRLAVANQLRAHLLTVLPGVVGLFADLDAPVSRAFIAEFGTQDAVDALSQATLAPWLKARHYHVKPAQALLERLRQAAPGIRGAAGQALAGITQAYLAALNTLVQQIDVLEAQIAAALATHPDAAIFTSLPRAGTVRAAWLLAEIGDCRARFPTPASLAGLAGVTPSTRQSGNTRIVAFRWAVDKHLRNAVCNFAGDSRLANPWAANLYQQARTRGKKHNHAVRILARAWLTIIWKCWTTNTPYNPTKHRALQTLLNQPPPTG

SEQ ID NO: 344477 - protein, 315 aa, unidentified
MTQTITTTAGIDTSKAKLDIAVHGRTERWQVANALPGWRALAVNLAKVDVTRVGIEATGGYERGVVEHLRGAGFIVLVLQPVQVKAFGRVHLRRAKNDALDAELIAACTAAIDDPRIAPDPRLAEMAQNLTFLEQLEEDIARFKTRLEHIDEPGLRRLVNSDIVRLKARRTVQIRSLAKRLRAHDDLARRFDLVLSIPGIGERTALALIIRMPELGLISREEAAALAGLAPFDDDSGKHRGQRHIAGGRGRLRRSLFAAALPAAFRWNKALIALYARLVAGGKAHKSALIACARKLLIYANTVVQRGTPWSEKAA

SEQ ID NO: 344478 - protein, 428 aa, unidentified
MNPEDGTRLEEFRQFRKEVRGSGEYLLVGIDIAKEKHYAFFGTAQGKTLLRRLVFENNLEGFRRLLAQAKALRDQNGLKRIVFGMEPTGNYHKPLGEHLIQCQHLVVLVSGVAACENRKTLDGRWDTNDTRDAANVADLMSQGKCLFYEFPVGPLQDLRNLLSLKRRFKRVEHGYRVRIRNHLLAKYFPELDRYYQRATPTNLAIVRWCLDPSVIAGLEYKRFAEMVSSSRGRSSQEKRLQAIWKLAVDSVGCEAGPVVEFEAQVMVEGLKEIQKALEEIEEKIKEVCSPFPEYEILLSIPGFGPDVAARVLGAIGDPFRFENGRQVLKLAGFDLSAKRSGKSSESVIPVISKKGKADLRYALYQAALIASVRNQDFMVYYTCKLRGREKEAGIKTKMRVKLSAKLLLIAWTLMKKKESYNPDHLVIE

SEQ ID NO: 344479 - protein, 345 aa, unidentified
MTVYIGVDFHARAQTISYLTTEDGEIRRAQLDHGQPQEVRKFYEQFAGQQVIVGFESSGYAAWFEELLEELGYEIWIGHATAIRLYARRRQKNDRRDADLILDLLWRGDFPRIHRYSPESRAVLQQLRYRQRLVKMRTMIVNSLVFMASSRGVSLRTQLKSRRGIERLQQIALPQPLIEQRAELCQLLQELKTRIARVEQWLEAKANSDIRVQRLRTHYGIGPLTGLCLVHTLECVERFANPRKVTAYVGFDPVEDSSGERRRIGSISKQGSRLLRFFLVEAGQIAIRKDQDLARIYQRVLVRRGHAKAKVAVGRRLLVRAFIMLRDEIDYAEFQRRGVAARSSR

SEQ ID NO: 344480 - protein, 336 aa, unidentified
MFQLGIDVSKKTLDLCLLREGVKGRVKTRKLQNDINAVSSVIAWLSKQHCKPEDVHIIMEATGVYHESLAYGFHKAGGRISLANPHRTREFARGMGILTKNDRVDAYMLACYGALKVPEPWLPPPEEVRHLSALLRRRDALVADSTREKNRLEKYLATDTPPVIAESVEAMIGQLNAEIKRLDSLIRSHLNQHPELKKDFDLLTSIKSVGYQLGLNMLVILRSHDFATAEQAAAFLGVVPVEKYSGTSVRGCPKLSKIGPPEIRAKLYLASLCGLRFNPLMKAMYERLCLRGKAKMCAIGALMRKLVHWCYGVLKTQKPFDVGYLSSDARSACKAA

SEQ ID NO: 344481 - protein, 426 aa, unidentified
MNESTPFACTIGLDWADQKHDLWICPAGSSKSEHLRLDQTPEALHEWVAKLRARFDNQRVAIGIETSRGPVISGLLAYDFIVLFPVNPKALKDYRAAFSVSGAKDDRTDAMLLEEWVRLHRDKLKALEPDTELTRKLAGLAENRRRLVDERTRIVNQLHSALKTYYPLARSLLEGQMTKPMATEFLIRWPDLEALKKTRAQTLRAFFYKHNSRSAPLIEQRLQAVQQAKALTTDPAIVEPARVLVSALAGMLRPLHKALSHLDQQIQHAMDQHPDAALVRSWPGAGPALAPRLLVAFGTHRERFGSATEVAQFYGIAPVVQQSGNTKTVHMRHRCPKFGRQTFHENAACALKKEPWAKCFYENHKNRHDGKHHQACRALAYKLVRIYFRCWKDRKPYQPDQYLQALQKHGSPLHKSLADQPQSPCE

SEQ ID NO: 344482 - protein, 404 aa, unidentified
MKGPIVSIDVSKGKSDYQAFKDLNVKYTGSRSIKHNKEGFDEIVNLVREMEKKLETEVCVVYEATGVYHRVLKKVLEDNNIKQFIINPLLSAKTRKNDSLRSPKTDKLDPKSIAKTYYSHSLHNSHKQETIYHELRELSRYYEDILVHIRKDKVAFRAQLDIVFPGYDTLYDDLYGPVALAVIEKYPHPEMLQKKKINTVSKVIQNKTCHRQAVSDTMADKAIEYSKTIYSGCDKDDIEVLILQRFIKKLNEDMAEAERTIGEMIKLAQELPDFNIIKSIPGIGDNLAARIIAELGDMTRFKKKNELVAFAGLDPRISESGQNDGDHMHITKKGNKRLRCLLYLAVTCSIRLKRDDNSIKEFYIKKKQQSNPMCSKAAKTACASKLVRIIYSMCKTGELYQYNK

SEQ ID NO: 344483 - protein, 337 aa, unidentified
MGNYYFIGIDVSKKNLDCCLLSNGVVVKQDVISNHQKSIEDYLSVICAEQNIDAEQIVVCAEFTGLYIYPLTISCQAGNYKLWLEDPTQIKYSSGLQRGKNDPVDAKRIALYAYRYIDKLKIYNHPTISVESIKLLTTELNMLCVDRAKYQAQLSDQKEYMPDRVYKLKSKRLSLLIKELDKAIANIEAEIEDIVAKDALLSHQMKLLLSIEGIGKKTSLKMILETQGFTRFTDSRKFCCHAGVAPFSYSSGSSQHSKNRVSHRANKSIKSLLHLAALSAIQNKNSGLRVYYDRKVAEGKNKMSVLNAIRAKLVARMFAVIKNNELYNSNYTNQFVV

SEQ ID NO: 344484 - protein, 348 aa, unidentified
MTVYCGVDFHARKQTISYLTTEDGEVQQVELEHEQDNIRGFYAKLRSQGPVIVGFETSGYAAWFEELLEELGCEIWIGMPAAIRRQARRRQKNDRRDADLILELMLRGDFPRLHRYTLESREVLQQLRYRHRLVKLRTIVVNSLQYLALSRGVSLRTKLLTGRGQKRMKELKLPSHLAKQRDEMCELLKELTEKIETAESWLNLRAEQDTRVGRLRTHPGIGPLTGLCLVYTLEQVQRFANPRKVTAYVGFDPVEDSSGERQRIGAISKQGSRLLRFLLVEAGQVAVRSDEDLKAAYWRVQLRRNHQKAKVAVARRLLVRAFIMLRDEIDYAEFQRRGVAARSTRRTA

SEQ ID NO: 344485 - protein, 481 aa, unidentified
MKKRTIFQQQSQELMQTYEEAGNSKKVLVVAMDYAKKEHTVMFCNGNGDILRKPFAVWNNPEGINYLLEQVKKNCNYHKIKTKHVFFGGEDCGSYTENFTQCLRERGYLVAGVNAHDAKKQRENMQASTDRLDLLGLARMLISRRGNCAPSQSGAYRNLRTLVRHRRKIVTLSTEERNRMHCLVDQLFPGFLEERKSGLMPFHGPSLRVMEGRFSAAQIKRRKQVTLADILARAGAQKPQQKAKQLQAYAATVLQPPKEYVVTLQTSLTQHVSLYRCLLGNITSLEREMAIWLAQTQGAFLMSVKGIGLVLAAGVTAEIGNPVTQKPVGNLTSYSGIIPRVAQTGGSDSSGHTGSVAKRCNRTLKDYLVQSASHLGLHGVDDLMADHKRRDANGQHANFGIARRYLRMILHMMRFSHIYLPPELRIDAGCEARGEYYQMIWPYLLDKWKKYDAHEVAFAPENPLGRWRDMVQGIYNITLKI

SEQ ID NO: 344486 - protein, 365 aa, unidentified
MSNGYYTIIGMDVSDRKTQVCVMAKEGRSINIVMETTIPTTKEGLSRFLSAQDKSVPLAFETGTHCRWMHELATNLGFKVYLANPYRLKVITSSKTKNDTNDARLLARIALADPELLHPVRLRGAEYQKMINLHEMRNLLVKQRSGIIVQMRAIAKSMGFRLAKGSAAQFHKLDAKSWPKEFRDIAWPMVKNLTQLAITIRTYEKLIRELAGTPAFKAKVDRLMEIHGVGIMVATGFIATIGGDVDKFEKPRDVGPWLGLVPKQAQSGDVDRQCHITKAGSPFMRRLLVESAQRIMCECMADTDLKAKGMRMCVRGAKIAKKKAITAVARSLAVLMVAMLKRPDAPYVPLSERGKKELFAIRACA

SEQ ID NO: 344487 - protein, 521 aa, unidentified
MSRPRANRSAKTRKAFLLQKPTGQFTPRVQAVGPEHFGIVAIDCAKARSRYLLADFYGRPLLEPTTLAHTAGDFHNAIARIRQSLQQHDLRDVVVAIERTGEYHQPVQRAFRQARFDTRLVHPFTTKQYRQPADPGNKTDDTDLAAIFRATTQGFGLCEPTWPDTYVALQLLRRHRRDLVAKNTILCCQIREVLHAAMPGYAECFDRLWAAPTALMLARHTTSAQAVNQAGRQGLQQIAADAHIPCHRGTLDKILAWAQQAPPGHDQSLHLRHILNVLDDDRRQKTQQILELERSLAHLVVATPYALLLRIPGINIVSIADLAGELGPIPLYLNANAITGRAGLMPCRYQSDQVDCANGPLQRRGHRRLRAVLMQCASNLVQYNNHFKARAQLWKHAGKDPRWIRVKVAKIFSRLLFASVAGRHVFPHPCCQPRHYILDKLLTFHHEHHTPPDQIRQDLEAAIDFLPASARADEAQPLQGLLDEQAKRRRGPQPLASVIPLVLARLGLTAVQSTGSESAGP

SEQ ID NO: 344488 - protein, 342 aa, unidentified
MPVIIGVDPHKATHTAVAIDNAEVELARARVRATRKQVPQLLRWAEPLGERTWAVESAGGLGYLLSQQLVAAGETVLDVPSTLAARIRVLGTGRSDKNDPNDALSVAIAALRTPALREVVAADHSEVLRLLAKRNIDIGNHRTRVVCRLHNLLMELAPGGIAKELNASDGVALLQRIAPASPAEAARRHQALELLEDVQRLDEQLKASHRRIRTAIAASETSLTELFGVGPIIACYLIGFTGNIGRFANRDAYAAYNGTAPVERSSGGRVVHRVSQRGNRRLNHALHLAAICQARQPGSDGRVYFERKLAEGKTKKDAIRSLKRHISNAVYRQLLVDADVGR

SEQ ID NO: 344489 - protein, 355 aa, unidentified
MTVTIVGEASPVTGRAAITGGVDTHADTHVAAALDPVGGLLGVREFPATAAGYAGLLGWLGGFGTVCLVGIEGTGSYGAGLARHITAAGVRVVEVDRSDRQDRRRQGKSDPLDAVSAARAAQSGRARGAPKGRDGAVEAIRALMVARRSAAGERTRTINQARALILTGPDDLRARFSRHKPAPLVTGLASLRPRPGDVAGHATRIALRELGRRALFLDGQLARLDELIIPLVTARAPGLLAIYGAGPRTAALLLIAAGDHPERLRSEAAWAHLCGAAPIPASSGKVTRHRLNPGGDRQANHALWRIVFTRLGSHPATRAYAERRTAEGKSKAEIIRCLKRYVAREVYRQLRLAAG

SEQ ID NO: 344490 - protein, 355 aa, unidentified
MSKRITKDGGLTIGLDLGDRFTEGRVLDATGELIESFRVRTTEPAMEARLSSYGPSRVVLEVGTHSPWVSRCVAKQGHETIVANPRRVRLIAENDSKSDGVDAELLARLGRVDPSLLKPIVHRGEAAQRDRILIQARDGFVRARTQLVNQVRGFAKALGTRVPSSSTEAFPKRVRATTRMDLFPGLETLLDTIEQLTATIRQMDREVERLCRERYPEAELLRQVPGVGPITALYYVLTIEDPSRFARSRSVGAYVGLRPKLRNSGDQQPQLRITKAGDRLLRRLLVSAAHYILGPFGPDTDLRRAGLRMAERGGSIAKKRAIVAVARRLAVLLHRLWVTGTAYAPLRKDADMQAA

SEQ ID NO: 344491 - protein, 429 aa, unidentified
MNVLPVAGIDVGKEFSEMAILSPTNKVYARMKIFHDSFKKIDKAIDLLKKAEKNFANRPIVVMESTGHYHKILFHAFAVAGFEIVITNPLQTDSIKNLGIRKVKSDKIDAQKIALLYRFQELETTSIPNDTIDCLKSLCRQYYKMTDQLTAYKNKLIGIVDQVMLNFTDVFKDVTSKTALALLERYPTPTLMLEGDRDKIISLISKNSRKGIKWATSKYELLIQKAKDFEPLSISSPANISLIQININMVRTLEKSISDIENTIYKLIENDKKQDMPVLALILELLCSIPGIGLMTAATILAEVGDFSAFQKPGKLVAYFGIDPSVKQSGKFEGTQNKMSKRGSRFLRRVIYTSALACIRKKRNGELINPVLYEYYQKKCVNKPKKVALGAVMHKLVGIIFAVIRDKKPFELRTPEQHAKQLVARNKAA

SEQ ID NO: 344492 - protein, 345 aa, unidentified
MANILKQVVGIDVAQNELVVSLGRMDETAEKEVYAFRQFANKPSGFKALESWVKQRANKEVPVRYVMEATGVYHEKLAYHLSGQGHEVSILLPNKVSNYMKSLDLKTVTDKTASQAICQFGLERKYELWQQPKKVYRDLKQLTRERDQIVAERTVSKNQLHAEQAEAFPNENSIARLEQRIGLCNIQEKEIKVEIAGLIKQDKELAARIKNVATAPGIGWLTVVIAVAETNGFDLVRNKKQLIGYSGLDVEEKESGTSVKKKPKISKKGNRHLRKAMHMPALTAIRVDERFKAIYVRLVSKHGIKMKAAVAVQRRLLELVYTLWVTNKPYDKKHVHRSVENIKTL

SEQ ID NO: 344493 - protein, 374 aa, unidentified
MNIIYIGVDFHARQQTICYLKTETGELVTCELQHQDKQAVRAFYAQFPGPVVIGLEASGYSPWFEALLEDLGCEVWLGDATEIRRRARWRQKNDRRDAELILDLMVHKEFPRLHRPAIESREVLRMLRYRQKLIKIRTMSKNSLQALALQSGLAKGSRLFTKAGQQELNSAVMSPVMQWQCEHWLQLLQPLNQQLLETMVWLKLQSKGDVQITRLRTHPGIGLLTSLCLVHTLQPISRFRNQRKVAAYAGFDPVERSSAERKCFLGISKAGSRILRYLLVEAAQTAVRKDEDLKRFYKRLAERRGRPKAKVAAARKLLIRAYIMLRDEIDYAEFRRRAVAARLARRGQGPNVPAVLIGQPASADYRDDLPSASQ

SEQ ID NO: 344494 - protein, 320 aa, unidentified
MNIIGFDVSKKELVGIRTDKSASVRDKIIINNNSESIQTFIEEAKRKYPHLMVASEATADYHRRLAEQCLKLNIPFRLINPILTKQFTRATIRKKKTDLTDAWIIAKLALQGEGSLLNLKSLDPLKSINRTVFKIQRIAGMLSAIYQRFERVFPEDGEMLKELAKPLPLLKSTVENLRSKVDGRTDKSTKELLISIPGIGPIIANTLIAEISDINRFSSGKSLVAYAGLDPKVKQSGVSLKHNTKITKRGSPYLRKSVYVSAYIAKRHDPELKEYFDKKINEGKRYKEATVATARKILYRVYAVWKRGTPYIKYPQKMLT

SEQ ID NO: 344495 - protein, 343 aa, unidentified
MKDTIYDHYIAIDWSIKNMAIARMTKKSNKITAIDVPSDIEDLQAYLKNLRGTKILAIEETTTSQWLYAELKDYADKIFICDPNRNKLLNEGPKTDKIDAAKLVQLLRAGLMKEVYHSGDKFLYLRRVTSGYEDLVKAGVRLKNQRYALLRACGKRGKEKAGSSIDSQGEQFVLDCLDRQIEVYEREKQGYENEFERLARKNPEIKHQKSLPGIGTINSVKIVTRVVTPHRFPDKGHYLSYTGLVKLDKISGGRSYGKKNPRFSRQLKSVYKSGILAAIGGNNPINDYYEHLIQEKGYAEHNARHKACRRLAILSLRVFKSGRKYQPYRRDHVKGGKEDTSGL

SEQ ID NO: 344496 - protein, 429 aa, unidentified
MTIMQSTPEAFVWVAIDVAKDRHEALIEAPGWRSRKRIRVQNAAEDFRSFAALLHSLGFPVRIGFEPTSNYHRALAYFLHSEGFELQLISSLALARTREAMHNSWDKNDPKDAQVILHLLQSGLTQHYHDPIVHNLNDLQELSKTHHQVSLEKTRTQHRLLTHYLPLYFPEIARYHGSARSEWLWALLIEFPTPRSMTRWSKAEFIRRAWPLVGRKVAKERILTDIYLTAQTSIGLPAEEHSETVAMLRVVLRQLLTLCQLRATIEERAEVLLQNHTDYQRLRCIPGIGPITALTVLAEAGDLRRFSHHRQFLKFCGLDLATEQSGQFRGLTRLSKRGNARLRAVFWMAASVAVRMRENSFRAKFERYMRTDPGSVDRKRKAYVAVAAKIARVAFALIRSGADYRCFPEVAVPSGRTRSARAVEAISTS

SEQ ID NO: 344497 - protein, 300 aa, unidentified
MLIIGVDYHPSFQEIAFLDQDTGECGERRLNHGDGEAEKFYRDLQQKGVRVRVGMEATGYSRWFERLLSELSVEVWIGDAAKIKTKRVRKQKTDRQDAQLLLKLLLENNFPRVWAPSPENRDLRQLLWHRHRLVQMRTRIMNQLQALAMNEGTRRKNRLWSAQGRAHLEKLPLAPWASRRRQDLLELLDRMNPTIAELTAAVEQEAKKRPDVLRLMTHPGVGPLTALAFVIIIMTPERFPCGKQIGSYVGLIPCEDSSAGRQRLGHISKQGNALLRFLLVEAGGKQRCVVMRTGGVGTYT

SEQ ID NO: 344498 - protein, 367 aa, unidentified
MRNSIIAGMDVHERSIKVMWAADTGTPVVWDVANTIDGRWELIERLKAEGRCDGSSAQIVVCYEASCLGFGLYDELTNAAITCHVLAPSRIRKSRRDVKRKTDLADAKMLFETLRGHVLAGNELPTVWIPPKELRDDRDLVRMRLTVGNKVTEIKNQIGMLLKKNEIRRPESVGNCWTAGHRTWLKNLTNSGGHLSTAACFVLGSLLRQLHGMETEQDRLEKEIVKLAETPRYRAQCAAMSADIKGVGIFTAMVFLTELGDLTRFRNRRELASFLGLTPNSDESGEVTDRKGHISRSGPSRVRWVLCQAAWCYIAHESSAREAYDRIRKNSDKLKKVGLVATMRRLAIRMWHKAIDAKMEATAQAAA

SEQ ID NO: 344499 - protein, 353 aa, unidentified
MNNMHYVGLDIHKKTISYCVRQSDGTMLQESTIAATRPALDTWMRQLPQPWTAGMEATMFTGWIYDHLVQSGATVKVAHSAMLKAIAAGKKKNDQVDARKIADLLRCDYFPECHMAPREIRDRRHVLRYRNLLVRQAVRMKNKVSGLLMEVGVPYNQQKVHGKKYFAQLLHEQRKEMPPSLPELLQLSRSTIESLTGMERQLLRALEQDDLLAARVERLATIPGVGRVLSLTWALEMGEISRFRSVKNAVSYCGLCGAEKNSGGKTERTSLSKQRNKHLQSMLIEAAKLAPRWNAELALVYEREKQRESQPGHARSGAEAGCLPDGGGSEREGLQQNAGQGWREASCLIGYKD

SEQ ID NO: 344500 - protein, 358 aa, unidentified
MKYVGIDVHKKMCQAAILDEDGELLEEKRFMNTPEGIEEFAQSLTTIRGEVQAVLESTGNLWIQIHDRLEDHGIPVALSSPANSRLISESRVKTDKTDARALARLHRADVLSICYVPNAEERSRREILRHRLRLVKNRTQVRNRIHALFDKHGLRVPYPSKFSKKAVKWMRGLSLGFMDDAILCSDLALLETLGEQIGFVEKKLAALAVDDPKVRLLMTMTGVDYFAAMLILAEIVTIDRFTGEKQFCSWMGLTPRVWQSGEKTWVGGIGGLGNRRMRWLLVQCAHTASRYDPRMRRLYERHAGRKGGKSAVATVAHEMARIIFYMLKRGEPYRGVKGELWERKLKRMERNALSGLRN

SEQ ID NO: 344501 - protein, 344 aa, unidentified
MERKFKLIFGIDISKQTLDVTYFQNDLSHYLQVPNNAKGISQLVDIIKELDVEEKEVLICCENTGNYTEKLSLVMKSLDVTFWVVHPIIMKGYRLDLQRAKTDKVDSMKIAEFALAHQHKATNFHHPDQKTKELKELYLLRKQLIGLRQRTLNFIASEKDKAIPGILNTVIYDQLKHFLTDLIKEVEKSIQLLIKSAKTINGYYNILLSIPGIGPVIAQHILAVTDGFKKIVDYKAFACYVGIAPFERSSGTSIRYRPRTSKKANQELKAEMHQGALSVIKKGQLFHSYYKTMLDRGKHHLWILNTIMNMIAKSIFVLVNKMIPFNKEIFVKNKKSWQNNLVLS

SEQ ID NO: 344502 - protein, 369 aa, unidentified
MPHVTSIGLDVHARSVAAAAFNPFTGEVVHRDFGTDAAEIAEWALGFEEPRACYESGPTGFHMARELRALGLDCAVAAVSKMQRPAADARRKNDRRDAEFIARMLATHNIVEVPLPDAAVEAARDLDRALDDATAEYRRARQRLNMFLIRLGHVWDERNADGTRKGSWTRAHWRWISGIRLEGPQRDVLEYYVTAARCAESDRRQLEKKVLALARTDRWRPAVEALSCIKGIDALTAFRLAAEAGSFTRFRTAPAFASWCGLVPSERSSGETERRGGITKTGNRLARTALVESAWHYLTCTPRPKAPAPGADVPAAIRARADDCTARLCRRREALAAAGKSSCKANAAVARELACWVWEIGRRAEGTLG

SEQ ID NO: 344503 - protein, 330 aa, unidentified
MTNAKVRESTSSPLEFVGVDMAQQVFEWALHGVRGTHSAGNDERGFEALREALKGRNLGLIVLEATGGLERALAGYLLRHGLPVAVVNPRAAREFARSMGHLAKTDAIDAVALAHLAQTLAAKADQAGVRLMPPSAEVELLQAMVARRVQLLSMRTAEKNRLGGAVRVLHKSIEAVIKTLDKQIAKLDRDIDAHLEQHFTEQAQRFDAIKGLGMTTCAAVLAFMPELGTISGARAAKLAGLAPLNNDSGKEHGKRHIWGGRSIVRSALHMATLSAVRFNPVIKAFYDRLLAAGKPKKVALTACSHKLLRILNAMARTGQPWDESFHAITP

SEQ ID NO: 344504 - protein, 351 aa, unidentified
MNYIGVDYHKKYSYIVVKSEDGHVGGRGTVNNTREEVQRFLEPYRPGMAVVEATRNWGLIYDWLDEVLDDVTLAHPLKVKAIAEARIKTDKISADILADLLRADLLPRAYAPSKQTRELKNVLRQRMFFVRVQTMVKNRIHDILDRHPEVLSQAPEASDLFGAAGMQWLSQTALPGEDNKLLTSELGFLKFLKEEISQSNGTVKKLAKKDRRARLLQSIPGIGPFFSVLILYEIDDISRFRDEKKLCAYAGLVPSTHASGGKVFHGRITKTGSKWLRWAAIEAAQTAVRSDSEFHDYYQRIRIRKGTNAAKVATARRLLTIVYRLLRQGRFYERRTTNTRKIVIPAALVTD

SEQ ID NO: 344505 - protein, 324 aa, unidentified
MNAKNDPVYVGVDVAKATLQVHLREAQIEFKNTPAGHAELRQKLQSIAGAHVVCEATGGYEQALVQSLNQVEIPVSVINPAQVRASAQAKGQRAKNDPIDARMLTDYGQRYRPAPTPPVSKVQRQLVALTQWLKQLIEAQAVAKTQAEHHTEAFVRKQHQALIEHYGSQIEATEAQIKKLMEQDPVLKQRVECLDAIEGVGLRTAVLLLTHMPELGQLNRQQVAALAGLAPWTRDSGTMKGKRCIGGGRPEVRVALYMASLSVVRCNPILRAFYERLVGRGKLKKVALTAVMRKLLIYMNHQLKSLASQSASPEEQKKNQQKNS

SEQ ID NO: 344506 - protein, 346 aa, unidentified
MNNSVSTFNPCGIEVSHLTLLVALRAHDHDEALREFPNTSEGHQAVLRFLDRSGGSVRVALESTGLYGLDLALALHQARVAVMVANPRAVRHFATALMQRSKNDQLDAAVLREFAARMPFVAWCPPSASALKLVAVARRLEALTDMMAAEKNRQHAASLSQALPAILRRDIQRSIQTQQRAIDRLTRAAQEFIADDPELARRYELLLSIPGIGATSGLHLLAELLLLPAGMDVRQWVAYAGLDPREYTSGTSVHKKVRISKAGNKHLRRALYMPALVAVQHQPHVRAYYEHLLARGKTKLQALVATMRKLLHAIFGMFKHDQLFDGQKVCAALDTSVPAPQEVLCS

SEQ ID NO: 344507 - protein, 331 aa, unidentified
MQTGETGPNHNFHKVIIRRQLKRRYVLAFFQKLPPCLVGIEACASSHHWSRELKALGHTVRLMPPAYVKPYVKRQKNDAADAEAICEAVTRANMRFVATKTPEQQSCLMLHRTRHLFIRQQTAVINAIRAHLAEFGIVAPVGRNGVEELLDVVADPSDKRVPEIARACLLALGAQLRKLKEQILEFDRMIRAWHRSSEMSMRLDEAPGIGPVLATALVATVTDPKAFRSGRNFSAWIGLVPKQHSSGGKDRLGSISKQGDRYLRSLFVAGALAVIRYAKIHGTKRRPWLTALLARRPTKVAAIALANKIARMVWAMMVRGERYKQPVALAA

SEQ ID NO: 344508 - protein, 423 aa, unidentified
MNHATLSIGADVHLDEIAFHTVDKADGHEVIDPFRVTNNLPGAQAAATTIAETAARLGCARIEIGWEATGMLWIPFHRYLCHCPQLQSFELQLVCFNPQLVTNFKDGLVLRRPKNDKLSASAIAARLRFGELPLSHVPGDFWQGLRRLTRYRFHLSRNLSREKMRFQSYAFLKCSDWKRVKAFSDVFGATSITLLTEFTVAEMKEMTHDQLVDLVSRRGHGRFEDPTGTARKVREALRSSYPIDPQTDEMVTAALATGWDHIRFIKRSMERLDKHIAHYIDPVPNPIITVKGLGAVITAGLLAEIADIGRFAEHKHLAQYVGLTWEKRSSGNFVSQNTRLTKVGNKYLRYYLILGADKLRLFNLEYKAFYWRKYSEVSKYQHKRALVLTARKLVRLVHALLTKNVPYVRPQALAHVQQEGTLQ

SEQ ID NO: 344509 - protein, 406 aa, unidentified
MSGLPKEILDGGLVVAIDPGKAVHRVWVTDREGVVGQPLSLPSSRAGLDRLEALVGRSPATFAIEATGALHRAWVAELERRRPGALRLFAPSETVAARAQLGARRFKTDDRDCAALVWLARQGAGRPVRSTGVEAMQAAVSHRRQLVLALKPLRQRLHDQLNALAPGLSAPAGHGRTLLLDTPTGQAVLACAAAFAGRAPSRRSLQARADGRLSDATAGFWAARWKQCLAPPPDAELRAARLTRDLQRFAALRADIAFVDGQLEDLLADSPGRVLTTLPGVATVRAAAFAAYTLPIERFPTPEQLYSATGLAPASYQSASVRRHSGIARTGLPEHRDALMGIAWGLGQFAPAFQRRGRELAARGKTGIQARVALARHACRLCWRLLSSQQPYDDRRYDRARRDRGR

SEQ ID NO: 344510 - protein, 328 aa, unidentified
MSKERFEVGVDVGQSEVWAFLGSGKPRKFQHDESGVKQLYRWAKEKNGELLLHFCMEATGVYSQSLAVRLLGCGRCEVSIVNPAQIAAFAKAQMRRSKTDQIDAQVIWAFAQAQQPRCWQPERQAIQELAALVTQADALQKTQRSWKNRQHAHQYRPALPNMVRQTSAVVEETLKQQLEEVQNEIYRLCQADAELRRDVDLLCTIPGIAKLTATRLLAYGKSALTERSPKELTAHAGLAPRHRQSGTSLNGRSRLSKQGDARIRFMLYMPTVVATAHNPIIQYHYQRHLANHKPRMVALMACMKKLLLMAQAILISQQPFNSNLKPLT

SEQ ID NO: 344511 - protein, 361 aa, unidentified
MSSTVDRVVIGMDPHKRSATIEVMAGDETVVGAGRFGTGRDGYAAMTRYARQWRNRVWAIEGCQGIGRHIANRLLGDGEQVVDVPPKLSARARVFASGQGRKTDATDAHSVALVGTRMAGLHPVVNDEQLALLRILVDRRRSLGEDHTRMVCQLHQLLLELIPGGAKKDLSAAQAGALLATVKPRDPVGKARRRVAAELIGDLERVYQRSKEADKELKELVAASGTTLMDLHGIGPSGAARLLVEVGNIRRFPDRAHFASWNGTAPIDASSGEQVRHRLSRAGNRQINRVLHIMATVQLRNPTEGRAYFDRKKAAGKTSMEAMRSLKRRLSDIIYRQMVHDAAATERRAREDTGERLLTPA

SEQ ID NO: 344512 - protein, 343 aa, unidentified
MQAITTVGLDIAKSVFQVHGVDAQGNVLVRRQLKRGHVLPFFQKLPPCLVGIEACATSHYWSRELQALGHKVRLMPPAYVKPYVKRQKNDATDAEAICEAVGRPNMRFVATKTAEQQGCLTLHRTRHLFIRQQTSVINAIRAHLAELGIVAPVGRRGVDQLLAVVADTSDKRLPEVARACIAALGAQLQMLKARILEFDRMITAWRRSSEASKRLDAIPGVGPVLATALVATVADPKAFRSGRDFSAWIGLVPKQNSSGGKDKLGSISKQGDRYLRGLFVAGALAVIRYAKIHGTKHRPWLTALLARRPSKVAAIALANKIARIAWAMMARGERYKEPAALAA

SEQ ID NO: 344513 - protein, 417 aa, unidentified
MKKNSKSTVKKEQKATRAKARRPVQREPKEVLAELVEKLQGKLEAKATWASAAEAGPRAELDPNLDRLTVGVDLGDQRSNFCILGLQGETLSEGQLQMREAEVAEFFHAIPPARVVMEVGTHSAWMQEIIAGEGHEVVVANPRLMEGSKRGKRKNDRIDAKKLARLGRVDPQSLHPIRHRSREVRQDLVVLRAREALVAARTELINATRGLVKSMGTRLPKCSSPSFGQKVKDVIPEKVREALLPLVQLADALSDCIRSYDQKIEELGSEKYGHTKLLRQVKGVGPITALAYVLTLENPEHFAKSRDVGPYLGLVPKQEDSGESQPQLGISKAGDTMVRKLLVGSAHYILGPFGPDSDLRSYGLRLCERGGKNAKKRAAVAVARKLAVLLHRLWVSGEVYEPLGYASSREIVQQAAA

SEQ ID NO: 344514 - protein, 363 aa, unidentified
MSSSAVLSLSSPALSEVILGVDTHRDVHTAAVVSTLGAVLACREFAADAAGYEELLEWASAHGVVRRAGVECTGSYGVALSRRLQAADIAVVDVNQPDKRARRHGKTDVVDATAAARAVLTGRADAIAKSGAGEVEAVRILKLSRDSAVHARTKAINQLKALLVTADPVLRSMLHGLSSKVLIRRCAELPSSTADTPTQEATRYALRSLAARIRSLTDEAAETERRIIGLVTSRVPELLARTGVGPDSAAALLVVAGDNADRIRHEGSFAALCGVSPVEASSGNTQRRRLNRGGDRQANAALHRIVISRLRWDSTTQDYMRRRLGEGKTRREIIRCLKRYVAREVFAIIQPAGMPIGPAAAAA

SEQ ID NO: 344515 - protein, 424 aa, unidentified
MSQRTLTERVTMVKPGMLLVGIDLGRDDNVAVVLTDTAQRLTRFKFPHTRAGYDFFYRQLEQLRAQHPGQGLLIGMEPTNHYWKWLAADLEAHQPPLPYRLVNAYTVRKHREGEQLERAKDDVRDAFQIAELLRTGKFTETQLLQGAYAQLRQYATLHMRLRHDAAQLQNVLTTAVDLGFPELRQVFKDLSGETALALLRTASCASTIRKLPLSEFLAQVREQLQGHRLSVSKLKQAHALAQTSVGLVDTGALHFTIQVYSEQLAHAHESLKRTETALVELFLTLPEAPYLLSLPAISPLFAALLLAELGDPQDFSCASQWVKLAGVQPVADSSGHRTRSPTPMSHKGRSRLRELLYWLVLRWVQHDPYFKAEYERLQTRPQHPLTKMEALGALMNKALHVIWAVLRDRTFYDPQYRQAGAGAL

SEQ ID NO: 344516 - protein, 407 aa, unidentified
MEVLHPRCAGLDVHKQTVVACVRIVGNAPPRQEVRTFATTTSGLLALADWLDSLGITVVAMEATGVYWKPVWHVLEGHFELVLANAGHVKNVPGRKTDVNDAMWLADLLAHGLIRASFVPPAAVQELRTLTRTRKQFVRERTAHVQRMDKLLEDANLKLSVVLSDVLGKSGRAVLQAIIDGHTDPERLASCVTTRVKASRAQLLEALHGHVSAHHRFMLKLHLGHIDALDQAIAAIEKEVGLGLDPFRQAAKLLSTMPGLSAVGSNVVIAEIGIDMSRFTTPGHLLSWACMCPRNDESAGKRRSTRLRRGGKWLKTTMVQAAWAAVKVKGSYLQAQFHRLRARRGTKKAIIAVAASMLTAAWHMLRNGSEWRELGAAHFDRADAHKTAVRLVHRLQQIGYAVQITPA

SEQ ID NO: 344517 - protein, 350 aa, unidentified
MIIIGCDYHPSFQQIAFLDSETGELQERRLQHREEAEKFYRDLAAQGMKVRVGMEASGHARWFERLLAELQLELWIGDATVICAKRGRKPKTDRQDAQHILKLMLKDDFPKIWVASWENRDLRQLLWHRHRMVQARTRMMNQLQAVALNEGLRYKKRLWREAGREQLEAIQLAPWASQRRHDLLELLDRLNPTIAKLTQAIDREVEKCPAAWRLQTHPGVGPLTALAFVLIIGKADRFQCGKQIAAYLGLVPLEDSSGERRRLGHITKQGNSLLRFLLVEAAQVTARSLPEWRSKYCHLTMRRGRKIAKVAMARKLAVRLYWMMRKEWDYEQLRKFGSHAGKPGTGDGVK

SEQ ID NO: 344518 - protein, 344 aa, unidentified
MSKHSVPGGDFAGLMERFAQLQEKARLRTGQSFRIIVVQEAGLDGFWIHRALQNEGIESHVVDAASIATSRRRRRAKTDKIDGETLVRALLAYKRGEPRVCAMVKAPTPGEEDRRHLCRERKALIAERVRHVNRIKGFLFSQGVSGYQPLRRDRRQRLEELQTGDGRAFPQHLKALINRELDRLELLLKQIKTVEAARDALLAVKQTAKPAPAAMLLDIKGIGPEFAAILWSEGLFRHFENRRQIAAYAGLAPTPWQSGAVDREQGVSKAGNPRLRTTLIQLAWLWLRNQPRSALSVWFHERVSRNGGRLRKTTIVALARKLLVALWKYVTAGVVIEGVTMKVA

SEQ ID NO: 344519 - protein, 409 aa, unidentified
METIVERPAALDIHKAQVTACVRVPGEGRAREQHVAEFSTTVRGLLTLRDWLAAHRVTQVTMEATGVYWKPVWAILEDEFECLLVNARHVKQVPGRKTDVSDAAWLCQLAEAGLLRASFVPPKPIRALRNLTRYRKTQIQERAREANRLHKALEDTGIKLDCVATDILGVSGRAMLDALINGTTDPEVLADLARGRLRAKLGALREALQGRFDHLHTVWIGAILAHIDFLDEQIAGLTETIGEQIAPFEPAVELLCTIPGVQRRTAECVIAEIGVDMSVFPSAKHLASWAGLCPGNDQSAGRRRSGKTRNGSKWLDWALEEAALAAVRTKDVYLAAQYQRLRPRRGHKKALGAVKHSIICAAWYMLTTGELYRDLGGDYYQRRDPEKTTKRLIAQLERLGHTVVLQEAA

SEQ ID NO: 344520 - protein, 385 aa, unidentified
MQKLNDLSRSPSPLDPDGTLIAVIELSLSSWLVAGIVPGVERQPLKKLSVDESALLKLLHRWREEAAKAGHRIKRIAVAFEAGRDGFWLARWLSARDIEAHVIHASSVAVSREHRRAKTDRLDTELLKRAFLGWLRGERDHCKMVAIPTTKDEDAKRPNREHESLVGEQSRIVNRMKAALIRLGIRGFNPKLKKAAERLDGLRTPEGEPIPPNTLAELRRDMVRRRLVSDQIRQIEDARLERLKQAPSDGPHAMVRLLARVIGVGVETADMLVQEVLSRSMRDRRAVARYAGLTGSPDESGRRRREKGLARSGNARVRRGMIQLAWRFLMFQKDSTLAQWFRARTESARGTRKTMIVALARKLLIALWRLVREGVVPDGVVLRPA

SEQ ID NO: 344521 - protein, 388 aa, unidentified
MIYVGIDIAKLNHFASAISSDGEELIKPFKFTNDNDGFHLLISKLDPLDKDSLIIGLESTAHYGDNLVRYLVAKNYKVCVLNPIKTSTMRKNNIRKTKTDKVDTFIICKTLMMQESLRFVTFYDLDLMDLKALGRFRQKTIKQRTRLKIQLTSYVDEIFPELQYFFKSGLHQKSVYALLKEAPTPEAIASMHMTHLAHLLKVNSHGRFDKEMAQHLRVLAQKSVGASDSSLSIQVTHTIQQIELLDSQLERVEAEMTEIMKFNDSVIMTIPGIGYINGGMILGEIGDIHRFSSPNKLLAYAGLDPSVYQSGNFQAKKTIMSKRGSKVLRYALVNAAHNVVKNNATFKAYYEAKMVEGRTHYNALGHCAGKLVRIIWKMMTDNLEFNLD

SEQ ID NO: 344522 - protein, 387 aa, unidentified
MQKPHDDSKACLTAFVQDSTLTVVIEMSLRSWLVAGMVPGVNREPRKKIAPNPELLLQLLYRWRDEAIKAGKEITRIAVAYETGRDGFWLARWLRARGIDAHVIHATSVAVSREHRRAKTDRIDTAMLQRGFLGWLRGERGHCSMAIVPTVAEEDGRCPHRERETLIKQRTSTANRMKSVLIQFGVRNFNPSLRKAPKKLDSVRTLEGIPLPSNAVAALQRHMERFRIINEQIKAIERTRLQRLQRDPAEKFNAMVFLLVRIIGLGVETAEQLVREILSRNLRDRKAVARYAGLTGSPDESGSMRREKGLSRSGNGRVRNILIQLSWRLLKFQPQSDLVLWFKNRTANAQGSRKPMIVAFARKLIIAIWRYVNTGVAPEGFQLRSAA

SEQ ID NO: 344523 - protein, 352 aa, unidentified
MKNHKYVALDVHKASVTMGVRDGAGKCVGHAVVQTKAETIKELIAGLSGTIHVTFEEGTQSAWLYDLLKGRVAECVVCDPRRNKLLESGSKSDHIDVDKLSELLYLGGLRSVYHGDHGTRALKELVHNYESLVKDQTRVKNRLKAIFRGRAISYEGAELYELKERQQWVSKLNERGVRQRTEQLYEQLAALEPLVVAARQKMLRESRQQKASKNLQLISTLGEISVAELIGTVDTPYRFRSKRQFWTYCGLAVVRHTSSDYRFEQGELQRRRKPGPTRGLNQNYNRRLKKIFKTAALTGSHTGPFKPYYERLVQRGLSPELAQVTLARKIAAVTLNLWKKGERFDPKNCKAN

SEQ ID NO: 344524 - protein, 457 aa, unidentified
MDVIHQRVAGLDVHKETIVACVRIMVDARVSRECRTFDTTTAGLKDLLAWLTASGCSHVAMEATGVYWKPVWNILSDGTFELLVANAAHIKNVPGRKTDVNDATWIADLMACGLIRGSFVPDQAFQELRTLLRTRKQLTREQTRHVQRLQKTLEEANIKLDTVISDIMGLSGRRMVEAMIAGERNPQKLAALADRRIKASPKALYDALHGRLTDHHRFRLRLHLAQYDVLAAAIEAVDQEVDAAIDQMDEAEKGGQAFFRSLIRLLSGIPGVNTLSAQTILAEITPDMTRFATAGHLVAWAGLCPGQNESAGKRKSSRLRKGAPWLKRRTLAQDNAGPVRDFGRQEEGQLFQGTVSAPQEPPWPAESDLRRGRCNAHDHLPHAQGRHPVSGSWRPSFRSTPSRGQGQTSGRPTHQTRIHGPASAPGRGSLMSAARLNSRALTVRGTLPQIGSFSLGA

SEQ ID NO: 344525 - protein, 344 aa, unidentified
MKHYAGLDVSVKETAICIVDENGRICREAKVVSHPEDLSKALTGTGFRIERIGLEAGPLSQWLFEGMARAGLPVICVETRHTKAFLKAQINKSDRNDARGIAQMMRVNLYRQVHVKTLASQKRRALLRARKLLQEKAIAIENDIRGLLRNFGLKVGIVGAAKFEARIKELIEDMPDLEEFIDVLLAARRKLRDSFSRLHGKILELVGNDAACKRLMTIPGVGPVTALAFISTIDIPARFRSSRSVGPALGLTPVLKQSGESERVGRVSLCGDGMMRGLLYEAAQSMLTRVKKWSWLKAWAMTVARRGGLKKAVVALARRIAVIMHRMWIDGSEFRWSREGAAEI

SEQ ID NO: 344526 - protein, 355 aa, unidentified
MTASYEYHIGVDYHKSYSHLVVQDSSGKTLRSGRVKNDRQSLGGFLERYRENSHAVVEATRNWMVIYDWLDDICDDVVLAHPLKVKAIADAKIKTDKIDATVLAHLLRADLVPEAWAPSDRARELRIALRERMFYVRLRTMTKNRIVTVFDRYPEQTAQLKKLGDLFGKAGRAQLAQVNVSEIDRIQIDRGLAFIGDIDGRIKQSEKTIRAMTKANANVKLLKTIPGIGEFFARLIDAEIDDINRFRNAKKLAAYAGLVPSTYSSGGKTYHGKIIRQGNKWLRWAFVEAVSPAIASDPQLRAQYEHLKFRGVNKARVAIARKLLTIAFQILRDRRRYEPRDTSTREGASTISRLS

SEQ ID NO: 344527 - protein, 337 aa, unidentified
MDSNFLNTATFIGIDCHPIEHTALAMNRFEDEKGMLRFENTKEGIAQFLSWLPTIDKEHSNIIVGVEGGGNVRHALIASLLKDYHNIYEVNPLYTKQRRTFGTNPDKSDSRDSKLIAEVLTRKLSELPKVTHHDLSSSLLILKKTVWFYEEVTSHGTAIQNQLHQLKREYALSLDRAEKQALNMIVCEREKELRQICKTQQRVRIRLDTLLEKQGKNLKTMKGIKTVLAAKIIAHSGGIERFANLDDFIQYAGIAPRERSSGKTKKHKKAIIGNRKLNNAFYLAAMVQLRWNPKAKDYFEKKIKEGKTKKHALKCLMKRTACIVYGMMRNKESYREQ

SEQ ID NO: 344528 - protein, 320 aa, unidentified
MTSFLGIDVGKTDFHATLLVDDRSWAKSFPNAKSGLTQLASWLRNHKIEQVHACLESTGGFEEALALDLHERGHIVSVVNPSRVKAFAQSELLRTKTDAVDSALIARFCRAHVPEAWLPPAPEIRALQALVRRHAGLQDMLQTESNRLGAARVDSAVERSLREHIVYLEGELQRVLDEIENLVNRYPPLRGQRDLITSIPGIAALTAARILGEMPNIADYESAKAVAAFAGLSPREHQSGTTRGRTRLAKTGNSRLRKILYFPAMSATRCNPVLKALYQRLVAAGKPKIVALAAVMRKLLVLAYGVLKSKQPFDPAYIRA

SEQ ID NO: 344529 - protein, 310 aa, unidentified
MDAPVVGIDVSMDRLDVHVLPSGEAFFVANDAIGVETLADRLAGLGATVVALEATGGFEMLAASALSAAGLPVAVVNPAQVRSFADALGKRAKTDTIDAAVIARFAVASGVKAKPLADEQTRLFAELITRRRQILAMIVAEEARLKRAANRQLKKSISRLLVALRRELESLDEDLDSQVRASPLWRIKENLLSSVPGIGKGIARTLIAELPELGCLSARQIASLAGLAPFTRQSGKWRGKSFISGGRASVRAALFMGALVASRHNPVLKAFRDKLVAKGKPKIVAIIATARKLLTILNAIIRDQKPWQNA

SEQ ID NO: 344530 - protein, 412 aa, unidentified
MLFVGDDWAEGHHDVEVVDEQGRRLARARLAEGIEGISQLHGLLADHLPEHWADPGTGTAAHQVVIGIETDRGPWVQALAAAGYRVFAINPLSVARYRERHSTSGAKSDAADAHVLAEIVRLDRAHHRQIAGDSAAVEALKLVTRAHQSLIWERQRHVLRLRSALREFFPAALEAFADLTAPEALDLLSQAPDPDRAAHLSRSKITAALKRGRRRNAEDKAAGIQAVLRAPQLRQPAPVQSAYATIVASQARLISALTRDIAELEAVVGQGFGRHPDAEIYRSQPGLGQVLGARVLGEFGDDPARYASAKARKNYAGTSPITRASGKKTVVLARYARNKRLGDALHQWAFCALTASPGARAYYDQLRARGTSHHAALRQLANRLTGILHGCLKTRTPYNEHTAWPHHTTTAA

SEQ ID NO: 344531 - protein, 401 aa, unidentified
MAIVMGLDQHRAQITAEWIDTDSGELGRARISPALRGDVRRFFGRFAGQRLEVALEATTGWRFVAEELRAIGAEVHLAEPGETAARRGNKKRAKTDRADARHLRELLMIGRLPESWIPPDHLLDLRAQVRLRHTLIDQRGEWQQRIQAVLYHHGFPQRNGLLTTENRAWLEALELPPSAHELITVVLEMIDALDAQSAPITRALRLYARRQTGCKALMKHYGIGELTAIAILAELGDARRFSSSRHAVRYAGLDITVHHSDQRRAPGHLSRQGPPALRWALFEAAQAARRPGSPDRGYYEQAAERLGGNRACLALARKLLKKSFHTLRELGDEALQPAERTFGARPALSHSDAPQLAPRMLLPPPPGGRPSKDRAAAPHPAGTPHHPSRHRPAARRGRGPR

SEQ ID NO: 344532 - protein, 345 aa, unidentified
MKNSNVIGIDLAKHVIQVCKIDKHGELISNKAISPSKLKELLAKTVPSIVAMEGCGACHYWARLAQKHGHDVRVISPKKIKAFLQGHKTDANDALAIAIASIQFGMKFSQIKSEEQQALQTLETSRKFLDKELVALNNHIHAYLYEYGITSRRGRKSLRETMAIVLDDFDTRLPTCLKNTLGLLWERYKLTIEQLTEAEKYKAYLVNQLEPCQRLMALEGIGKVCAPMLYASIGDGGEFKNGRQASVYIGLTPKQHSSGGKTYMVGIDKQGGNKELRAALYQGALSVIYKLPSEPRTLKEAWLIELVKRAGVKRTCIALANKTVRTAWALLSTGKSYEPVLLGGS

SEQ ID NO: 344533 - protein, 324 aa, unidentified
MIDGVLGIDVSKNTLDASMSSCNKVRARSFANSPDGWRHLLDWLITQRVRRVHACLESTGRYSLGIAGALNEAGHVVSIVNPAQIWDFARTKLGRNKTDGVDASHIREYCELFKPKPWAPPSEAHRRLGELQTIRAGIITGLTEWKNRKNSGMIDAVAQSLADVTISHFTSQLSAVDEAITQTINNDSVLRRKRDLLLSISGVGETLAGVVLAELPGPDVLHSSAEVVAYVGLNPRQHQSGTSIDRVTRISKIGNAVLRAALYMPAMSAMRYNPAIVALVARLKSQGRLKPKQIVVAAMRKLLVLCFGVLKTGKPFDPAIAMGC

SEQ ID NO: 344534 - protein, 355 aa, unidentified
MSSEKYIGLDVHQATISVAVMDSQGKLIMESILETKASTILEFLGGLRGTLFVTFEEGTWAAWLYDLLKPHVAKVLVCNPRKNAALKHGNKSDKIDARKLAERLRLNDLKPVYHGESGVRMLRELARSYLTIVKDLTRVMSRVKALYRSWAIPCAGRDVYYTRHRSQWLDKIQEPGVRCRAEQLYQQLDMLQHLRQQARRALLAESRKHTITAKLRQIPSLGPIRSALAVALIQTPNRFRTKRQLWTYSGLGLETRDSGEYQFVQGQPRRRKKQVFVRGLNRDYNHDLKGLFKAAAVRASVQPGPFQEFYQRSLSKGIKPTMVRLTLARKIAAVTLTLWKKGENFDAEKLKSQAA

SEQ ID NO: 344535 - protein, 430 aa, unidentified
MKSTQNKKIEQVKETSMIVGIDVGSEKHYFRAFNWRGIEFTRKPIPFSNSMAGFDMFHSAVAELMENNHLEEALVGFEPTGHYWFNLGQFLSGKNIKFVMVNPHHVHKTKELDDNSPSKNDRKDPRIIANLVRDGRYFYTYMPTGVYAELRNASNRRFVLMEEHTRAKNRLHKWIAVYFPEYKGVYTHIDAKGGLMVLKKAATPEDIVKLGVDGIQQIWKDAKLRGSGRKKAMQIVTAATNSIGLKEGLEEAKMELLDLIEDYEIQTKRIERVNDLLKNLCSQIKYVDKLLEIKGIGITTVAGFIAEVGDITRFDDVKELQKLAGLELVSADSGKHNGRTKISKRGRKRLRYLLVQAAVSVIGKNDEFKEIHQYYTTRDNNPLKKMQSLIAVACKLIRVFHVILTKGVDYDASKMLGDIRHPGVADRKAA

SEQ ID NO: 344536 - protein, 342 aa, unidentified
MPVVGGIDIHRAQLTFDYVDLDSGEVVRGRIAPADREHLRRWLQRFADRSGVEFALEGCTGWRYVAEELARAGITAHVAEPAETAARRGPKRRAKTDRSDAQLLRDLLLEGRIPESWIPPQPVLEARALVRLYKDLLDERTGWLQRVHASLFQMGAPDLDVSTLSATGRERIAAAELSAATRTAVDVAMGQVDRLTADMTRVREQINAIGRRQPACRALQAAHYGIGPLTSVVIWAEMGDTRRFHSSDDAVRHAGLDVTVYSSDGRRSAGHLARQGPPMLRWALYEAAVYAGRPSSPDHAYFQQVKARLDGQLALLSMARKLARRCHHTLRNLDDQVLAAAA

SEQ ID NO: 344537 - protein, 408 aa, unidentified
MEIVGIDWGRKKHYCYLLHEGKKLVLNNKEEDFAKLLKIKEAIYVIEDGNNRIVDYLLRNNRQVYMLSSRRSSEARSFFVIEGKSDFIDSKVIAMTYEHNPNWCFQVKREGIACELDVLVEEIFVLNKSMMQDVGRLDAYLERYWPEIKEVFEGTSVRKMALISICPTAKDLLSISEKELIRKLKEMNVRIDSDFRKKLKELRKIAVERYVPASTRKLIIAFSRHAMEKKVMKEEIGRQMKKTIEKSQYKVLLTIPGVGVTTASQLIVAYLTHKFNSYRDLQRYAGTTPTYYGSGNKNTTKMRRNCNHHLRGTLHMATLAAKKNSKWMKTYYDNKKSEGKRSALALRALANTILKIAFAMLRDLTPYSEEKFLKRNPPSDYTPSRKERKQKPECSLKVPSVATCRSTA

SEQ ID NO: 344538 - protein, 474 aa, unidentified
MKKHKQAEAKTKSEAIKPLREQEPDCAGIDLGANEIWVAVPPDRDQKPVRQFGAFTRDLMAIVQWLVQLGVRSVAMESTGLYWIGLYQLLEEAGLKVCLVNARHVKNVPGRKSDVRDCQWLQYLHSVGLLLGSFRPTQAICASRSIYRYRQNLLSMAAQHVQHMQAALDQMNIKLHHVIDDLTGVTGQAIVAAILAGQRDPVQLAQLRDKRIKASEATIAKALEGDWRKEHLFVLAKAWAQYQEVQKQIQDCDQELWNYTRELETCTQVIKAAKVMRLKPELVGAEALTEPPTKKRLRRKTSKNQPEGPWQQELERFFGVDLTAIPGISVLTGLTLMTELGNDLRAFKTEHHFASWLCLCPDNETSAGKVLRRRTRRSQNRVRQALRMAASSLHHDKSSFGDKFRRLRARLSPAKAITAMAHQLARIIWTLITRQLPFDSRVFAYHEKAHQQRRLKRLAASARQMGYQLTPIAA

SEQ ID NO: 344539 - protein, 356 aa, unidentified
MSSNIKYIGLDVHKEAISIAVLNGAGKLVMESIIETKALTLVQFLQGLRGELHVTLEEGTWAAWLYDVLKPRVHEVVVCNPRRNALLKEGSKSDRVDARKLAELLRAGLLRPVYHGEHGLRTLRELGRSYQTISKDMRRVLNRLKALYRGWGIPCSGTQVYAPRYREEWLNKIRQAGVRRRAELFYQHLDGLQVLRRQVRSEFLAESRKHKTVKVLRQIPCIGPIRAALLLAQMQTPHRFRSKRQLWTYSGLGVETHDSAQHCYVDGRLQRSKKSQQVRGLNQNHNHEMKEIFKSAATNASRCAGPFHDFYAGLLAKGMKPEMARLTLARKIAAIALTLWKKGGRFDAEYLKAQAV

SEQ ID NO: 344540 - protein, 340 aa, unidentified
MERYIGLDPHGRSCTFGVIGPSGRKLRHEVVETNGAALVGYLRSIPGRKHLCLEEGTQSAWLYEILSPHVEEIVVAGIGESRGQKSDRLDAFQRAEELRTGTIKKPVFKAPRLYGRLRELGRVHSMLVRDVVRVQARLKATYRARGVGTPGKSVYGPRVREQWLRQLPVSARWATEKLHEEYDRLLELKREAERELVAESRKHRVSRILFTAPGLGPIRVARLLPIVVTPHRFRTRRQFWAYCGLGIVMRSSSDWVQTPNGGWIRAQVARTRGLNRNHNSNLKNIFKTAATTVVTRLPTDPLYKHYVQLTSAGTKPNLAKLTIARQIAAIVLRMWKDEEE

SEQ ID NO: 344541 - protein, 395 aa, unidentified
MDRMFVGVDISKDTFSAAGLDAEGNECFSGLYSMDSDGFCKFLEIVTTHGQDRQKVLVGMESSGCYHINLFSFLTTQGVQAVVINPLLIANFAKRSLRKTKTDKKDARTIAKFLRENGEEIFQLPISQDLQDLRDLARERESLSHLISATKVEIKRVLRTIFPELESIADIYTWVMLRFLQAYPSARWVKATKLKVLAQALRQPYVGHKLTFSAEDILRAAQSSVATASPAKEIILKGKMATLLHLQERMEEMTKLLTDLCKATRIEDLQILRSIKGVGPKTGVPFLAEMGSVENFSSPKKLIAFAGMDPSVCQSGKYIGKSKLSKRGNRHLRRAIYLMTAAVVSKNAFFKAYFLRRKKEGLIPQKALLATAHKLIRVIFAMLSHRTYFQAKMAI

SEQ ID NO: 344542 - protein, 376 aa, unidentified
MTTISAERPNTEVAVILGVDTHLDFHVAVAVDHLGRRLGEASVPTTVKAYERLLRWAEGFGPVRCAGVEGTSSYGAGLTRHLRARGIEVLEVERPTHRPRSSRRSLQKSDPSDAERAARAVLAGEASGEPKSGDGRVEMIRALRAARRSAMKARTQAANQLQGLRLTAPEELRNRLRGLSTKELVCVVARFRLAGGPTDVPAATKFALRSVARRYEALSVEIAELDAHLDRLVAQAAPELVASPGIGTDSAATLLIVAGDNPRRLGSEASFASLCGVSPIEASSGKVVRHRLNRGGNREANRALYMICLARMRRDQRTKEYVARRTAEGKSKREIIRCLKRYLAREVYRVLISCCARSSPTGPKKEAHIASESSAA

SEQ ID NO: 344543 - protein, 416 aa, unidentified
MKLFVGIDVSSEKLDVCFLTDDNQLSILSEISVANDIEGASFIRETILEFNNSYHFDQIVIGMESTSMYSFHPSMFFHEDEKLKKLNTLVTIENPFRVKQFSRMFDENKTDRNDALRIADFLRIQRFTTSPIKEEKYMALQRLTRTRYQLIKQLIRTKQHFLENLTYKCNTLAREMRDESTSLFSATLISLMTEDFTLDELAELPLEAFCDLLQEKGKGRFKQPEKIAKAIQRAITMSYRLGALAQESINVVLSVLVREIRALEKNIKELDKAIEQVIVVIPEYQCLTSIPGVSKVYAAGLIAEIGQIERFEDQTKLAKYAGLSWKVNQSGNYQSQNTPLTKQGNRYFRYYLVEAANSVKNYLPEYKAFYQSKYKEVPKHQHKRALVLTARKFTRLVDTLLRKHQLYTPPRSVIEK

SEQ ID NO: 344544 - protein, 352 aa, unidentified
MEQFIGCDAHKRYSVFVAVGEDGGCSPAWKVSHTEGAFEAFLEELPKGSEIALEACSSYYWMVAAMERTGHHPHLAHPLEAKHRMGKTHKTDKLDAGGLGILLRNGTLPEVWIPPAELRDQRELLRLRMQFVQQRTRWKNRIHGALTRYNVHVGASDAFGVRGREQMTQQLGALPGHTRRSVEQQLAVLDFVESQIADCERRLAGLLEPSEEVRLLRTLPCVGPILSAVLWLEIGDVNRFPDAPHLASYAGLVPRVRASGGHIRLGQVCRDVNHHLKWAFVEAANLVAVNQRRLGPCHVLELYQRLKKRKNHQKAVVAVGRHLAEAAYWILKKGEAYREPKRPRLAVSSTHG

SEQ ID NO: 344545 - protein, 342 aa, unidentified
MRIYTGLDLSRKRLDWHACAVDGTLVEVGAVPPDPDGLARLVHRLGDADVLAVVEVMNGARFVHDQLELAGWDVRLADPQRARALAPLACKTDRIDARVLAELARRDLIPEVWLPDPGVRAERERARFRMHLVRHRTMLKNRIHQTLIAHGHARPTANLFTAKGRDLLNRLELPEPWQGTLAASLALIETLDEQIAELERELRRLGADHAYIPLLRTVPGIGWVLAYTIASEIGDIHRFPSPRKLIGYTGLCPRVYQSGDQDRRGALAKNGPAYLRWALIEAAHTAARQPAYSEIATRHRDRHGRPRGSAIAAITIARKLTEAIWWMLTRNQPFAPASAKAV

SEQ ID NO: 344546 - protein, 392 aa, unidentified
MLYIGIDISKRKHDCFIANENGEALSDVFTIQNSREGFNELYLAIKAHQPCPTSVNTKVGLEATGHYGDNIVRFLGRKGLPPVILNPLIVSLYRKGQSLRKTKTDKADARFIAKMMVAESFAPHSQPSYHIEALKSLTRHRHRFVGMRSKLLVSYDRLLSILFPELEGFVDDTKGATVTKLLLEFPSAEAIAGCHLTRLANLAKTHSRGRFKKEWAVKLKELAGNSIGSSCPAKAFELQQTLRQIASVSEEIDLIEKEIKSVVDCSGTTLMTIPGISYTLASIIMAEIGDITRFASPAKLQAFAGLEPTTYQSGQYTGNKDVMVKRGSKYLRWALIMAAEKACMFDKGFGEYLERKLAEGKHYNSAMGHVAKKLIRVIFRLMNTGEVYQAKA

SEQ ID NO: 344547 - protein, 415 aa, unidentified
MEVVRPRCAGLDVSKADAKVCVRVQGSGSRRTLSTVSTWGSMTRQIMELREHLIAEKVTCAVLEATGDYWKPFYYLFEDAPFETVLANPTQVKAIPGRKSDVSDAAWLADLGAHGLVRGSFVPPPPIRELRDLTRARTALTQERTREWQRMEKLLEDAGIKLSMVASRLTLVSVRLMLDALVAGERDPKVLADLAKGKLRSKITELNEALFGRFSDHHAFMVRIHLGVIDQLEASIIELDQRIEVMVAPFQEFCDLITTIPGVDRLVAQVVVAEVGTDIRADFPTAGHLASWAGVVPGSNSSAGRSKSTKARPGNRHLKGALGMAAGSITRSPGTFLCAKYRRIASRGGTKRANVAVQHAILVAIWNMAGTGEVFNDLGADYHRKRNPDRSRRNAVNQLEALGYEVTLTPIQQAS

SEQ ID NO: 344548 - protein, 305 aa, unidentified
MISWVGIDISKSNLVVWVQPQKDGFEVPNTVEGFDVLVARLGQYTVGRVLLEATGGYERKVMAALQQASFSVLRINPRRARAFAVAMGKNAKTDPIDAAVLADFAEALHASREKPISPERETLRELIQLREHFVQQRDDNKRRLQQAQLPAVVEAIRDHIRYLQTQIKQLGKAIDQSMRELDAEKADRLLSVKGIGTVATASLLVYLPELGELDRREIAALAGIAPYNDDSGNHSGKRQIYGGRARVRRALYMSCWVVIRCQADFKARYESLRERGKSAKVALIACMRILLIRLNAMLRDGTEWR

SEQ ID NO: 344549 - protein, 345 aa, unidentified
MAEVSTIGLDIAKAVFHAHGADARGQMVFSRRLTRAKLLEFFATQPRCVVALEACGGAHHWAREISALGYEVKLIPPAYVKPFVKRSKSDAIDAEAICEAAQRPSMRYAAIKTEAQQAAGMVFRTRDLLVRQRTQLINAIRGHLTEFGWVAPKGPSHISVLASLLEEGEEIGASLPKAARTMFLVMTGQLEQLNEQVALLDKEIATRAREDEAARRLMTIPGIGPITATALLALAPPVEGFARGRDFAAWLGLTPRQHSTGGKERLGSISKMGERTLRRLLIIGSSAVVLQASKRGTPRGSWLEQMLARKPRMLVTVALANKTARIIWAVLTKGEDYKAPVAAAA

SEQ ID NO: 344550 - protein, 408 aa, unidentified
MNAVGIDVSKGKSMVAAALRPMGEVALLPQVFLHTVVGLEQMAYAILALGEDTRVVMEATVRYYEPVAAALHEYGIYVFVLNPLFIKQSGGGSIRKVKTDKADAMKIAKYVLDNWVDLREYTPMDTIRQQLKLCSCQYNLYMKTVVSLQNNLISLTDKTFPGVNELFSSPERADGHQKWVDFVMTFWHCDCICRASEKAFTERYQKWCKRKGYHFSAEKALDIYAGSCGHFTTLPKNENTKLLIVTAAQQLLAGKTTLATLRAEMTRLASQLPEYETVCAMYGVGKITAAQLMAEIGDVRRFPRRSSIVGFAGVDPGVDESGKHSAKSVPTTKRGSPHLRKTLYQIICTYLKKSPADEPVYQFLDKKRAEGKPYFVYMTAAQNKFLRIYYARVKECLEAFDTEPAKQS

SEQ ID NO: 344551 - protein, 342 aa, unidentified
MDVRTIGLDLAKQVFQVHGLDEAGAEVVRKRLRRGSVLSFFAGLRPAVIGMEACATAHYWARELRALGHDVRLVPPRYVKAYVRRNKTDAADAAAICEALRAPGLHVVPVKSERQQAVLALHRTRELMVRQRTMTANALRGLMAEFGIVAPQGQAGLSRLVAMVGMDELDIPSEARMALMALSGQLEVLKTQTVALERRILAWHKSDTTSRRLASIPGVGPITASALAASIGDPRTFRTGRHFAAWLGLTPREWSSGMKRRQGRISKRGDGYLRRLLILGALAVMRQDGRIGGREADPWLIELRRRRPTAVAAVALANKMARIAWAVMARNETYRPRPVAAC

SEQ ID NO: 344552 - protein, 349 aa, unidentified
MEHYAGIDVSLELSSVCVVDAKGKIVKEAKISSDPVALVTIFRGLGIAIERIGLEAGPLSQWLHAGLTQAGFEVVLLETRHVKAALSAMTVKTDRKDARGIAQLIRMGWFRPVHCKSVGSQEVRALLVGRKLLLGKLLDVEFSIRGILRGFGLKMGMVTRRNFEARVQELCAGHSMLEQICAAMLAARSALQIEYTKLHKAMLTIVRKDEVCRRLMTTPGVGPLVAITFKTGIDDPSRIRKFKAVGALFGLTPKKYQSGETDVTGGITRVGDEMVRTALYEAANILLSRVTRFSALKRWGMDVAKRRGTKRAKVALARKIGVILHRMWVDNTNFRWTKEAPNAPRLIQA

SEQ ID NO: 344553 - protein, 316 aa, unidentified
MNSQVFVGLDVSKQHLDVAVRPQGRHFVTPNDDRGIKQLVKRLAVLKPQLIVLEASGGYEFLVTAALAEVQLPVALVNPQAVRKFAGATGKLAKTDKIDAQVLAHFAEALRPEPRPLPDQAQQMLKAALQRRLQVVKMIGQEKNRLEKTFMPAVRQDIQAHLTWLSQRLKQLDRDLSDQIRQSPLWRDRDRLLRTIPGIGPIVSRAIIAQLPEAGALPGKKAVALVGVAPYNRDSGRFRGKRMIRGGRSYLRRMLYMAAVVASRWNPVIRAFYQRLLAAGKPKKLALTACMRKLVLILNAMLKNNQPWNQFIAQVP

SEQ ID NO: 344554 - protein, 354 aa, unidentified
MDTLVSNTSLSGTLIALDIAKKHHDAKIRHPDGRTSYLRIENTLEGFNRLLALTASHDDIIAAFEPTADYHRNIAWWLHKQGVKCHLVSSVRCARAREMLFKTWDKNDRKDASVIMYLLEQGLSSPFYDPLANGIIDIQEISNTYHQVTLARTRCLNSLVNHYLTLYFPEAEQFLHMSRAEWFCQFLLQFPTPSCITSLNRDVFVKQSWDVVGRKQYKQQFLEHLYDVAADSIALPLSEDSLAVTTFRLQLHRYVGLSAQRLQLEKQAENYLQERSDYRHLRTIPGSGAIIALMIIAESGDLTRFAHYRQYLNFCGFNLSANQSGQKHSGYRLSKRGNARLRYAFWLAATVAVM

SEQ ID NO: 344555 - protein, 354 aa, unidentified
MTTTTTAARTILALDLGKYKSVAYLYTGDPATATFLTDCDRLHKLVAKHRPDAVVIEACLLAGWVHDLCHEVGLPCHVANTASEAWKFKHQKRKTDRDDALRLAQLFALGQLPTVTVPPPATRQWRALIAGRQRLVGRRVAVQNRVRAILVGQGLAAPRGAKAWTELGLEGIGQFAKPLADCGPDELWRGLLDLALTELRQVRQLADQAEARLDELAQASGAVQLLETVPGVGPRTAEAIVAHLHEPGRFDSGKQVSAYVGLVPRQYQSGESDRRGRITRRGPALLRKLLVECAWVMLRYNPWARAVYQRLSRGKARKKQAIVALARKLLVRCWAMLRDQTPWRDSPAAEAAPA

SEQ ID NO: 344556 - protein, 355 aa, unidentified
MSHLNSGIAVIGIDIGKSSFHVVGHDRRGAIVLRQKWSRGQMEARLANLPACLIGMEACVGAHHLSRKLKMLGHDARLMPAKYVRPYSKGQKNDFRDAEAIAEAVQRPTMKFVATKTADQLDLQALHRVRERLVSQRTGIINQIRAFLLERGVAVRQGPRFLRTELPGILATRTDVLSLRMLRVIEDLAGDWRRLDARIDSLSSEIETLARQDQHCERLMTVPGIGPIISSAMVAAIGTGDVFSKGRDFGAWLGLVPKQISTGDRTILGSISRRGNRYLRVLFVQAAWVVLVKLGPKHWERYGLKSWIEAAKKRLHHNVLAIALANKLARIAWAVLNNGRVFGCDKTDAMASRPT

SEQ ID NO: 344557 - protein, 353 aa, unidentified
MKILAIDLGKFNSVACLFDTTTNQSEFETIATQRWAFEQLLNQNQPDQIVIETSSISGWVHDFCQSLGYKVVVANPSAEAWRWKNVKRKTDKDDALKLAKLTALAQISAVYVPVAERRQYRQLVKYRKTLVNRVTRIQNRIRALFDQQGISIPGGHRAWTVTGIETLSQYRKPLAECELDELWQGELDLELQSLDILWQQLQSVDEQLEKIAQQDEQVKLLQTIPGVGRRTAEVIVAALDDPNRFQNARQVSAYAGLVPDQRQSGQTNRLGRITRRGSRILRSALVEVAWAMLRYNPWAVSIYQRICGGQTTRKKIAIIAVARKLLVRCWAMLRQKQPWQDDTPQLGASTAPS

SEQ ID NO: 344558 - protein, 379 aa, unidentified
MYRILKIGMDVHSTNYTLCAVESRFGTEDNVLANIDIGPDYKLIVDFIKKIKLKMDPSSKDDIDVECGYEAGCLGYSLYYQLAGCKVRCTILAPTTMLTEKGSRIKTDHRDARNIAFCLSNGGFHPVHIPTPEENAVKEYIRMRDDHRDALKKIKQQIGALCLRFGQCYNGSYWTGKHVAWLRALKLSAMIRETLDEYLSTYDDLTARINRYDERIQEIAGQKEYNEKVRKLECFLGIKTHTALSLIVETGDFNRFAKGNIYAAYLGLAPGEHSSGESTGRLGITKAGNSHLRRLLIEAAEGICKGHIGQKSKSLVARQKGNPGDVISYADKANIRLRSKYYRLINHGKKRNIAVTAVARELACFVWGMMTDHIHGKEA

SEQ ID NO: 344559 - protein, 311 aa, unidentified
MSADEKELSHKSFDNTPTGIQSLLDWIAGYHLSLSKLLFCAENMGSYVTELSVSSVSMGFSLALVCPLTIKKSIGLQRGKNDRIDAKRIANYAVLHYRKLELYKLPDKDLVRLRGWIIIRDNLVKQKVSSIKLLETFSRMAKLADVTESISFLEEQLKSIKERILEVEEDMEQLIAASTSLYTNYLLLRSIKGIGIINAIVLLCVTDNFQRFDNPRKFACYCGVAPFEHTSGISIRGKTQTSSLANKEVKVYLTRAAITAISWDPQMKAYYKRKIAEGKHKAAVINAVRAKIIARSFAVIRRQTPFVTLAV

SEQ ID NO: 344560 - protein, 361 aa, unidentified
MTDISMSDPQRAVIGGIDCHTDFHAAVALDPLGRALGTESFPATGDGYRSTHRWLTSFGPIAAVGVESTGSYGAALTRFLVEHGCRVIETCQPHAHLRARRGKNDAIDAEAAARKVLSGEATAAAKDTTGIVESIRQLSVARNSAVKARSAALCHLGDLLVTAPAALREQLDTRRSLEGKAGVCARLRPDPDRLADPAQAAKAALRSLGHRIAQLGAEADELGRRLDRLVATAAPATTSRLGCGTHHTAALLVAAGQNIDRLGSEASFAHLCGTAPIPASSGRTSRHRLNYAGNRAANRALHMIVIVRLRYRERTRSYLERRLSEGKTKKTPSAATDASSPERSTAPSCVASDFATIKTRT

SEQ ID NO: 344561 - protein, 316 aa, unidentified
MTSTRFVGIDISKATFDVAFSADLRAVYSNDPAGFTQFRQALADDDHVVMEATGTYFLKLATFLSAQDITVSVINPAVISYFARMRLVRTKTDRVDADIIREYGCFEALSAWTPTEDVFIELNQLDSHLNGLQGDRNRVIGRLEALQQCAKINAYTLEDLQQQLTDLEVRIKQTEKELVVLTEAHFPELLTLLTSIKGIGQKTAIMFIVLTRGFTRFSSPKHFASFLGLSSFIRQSGTSVRGSGGISKMGNPRMRQLLYMAALTARTRNSACKTFAERLAGNGKPPKVVRIAVANKLIRQAFAVCLKGESYSECYA

SEQ ID NO: 344562 - protein, 414 aa, unidentified
MDNSPTPRFVGIDLHKHFAVVAAVNAQQRLVLPPTRPIDLDEFPAWASTHLYPTDVVVLEATSNAWWLYDLLAPLVQRVVVANPLQVKWIAHAAVKTDKHDAIRLAKLLAANLIPEVWVPPRHVRELRALLAHRRALVKQRTAVKNRLHSILHRQALKLPSGDPFAAHNRTWWLALDLSPTERLRLRQDLDTLEHVEKQLADLDSELARLSNQSPWNLAMPFLIQLPGLALLSAMTVLAAIGDITRFPTAKHLVGYAGLGTRIHDSGETSSEGHISKEGRRDLRRILIEAAWIAVNTHPYWKAEFERLCRHKPQGVAIVAIARKLLVVIWHVLTERAADHHADPVMVACKLMRWSWELTEEQRGGLTSRQFVRYGLLRLRLGNELTTFTYGGMPRRLASVEEMLARFPDLAESS

SEQ ID NO: 344563 - protein, 454 aa, unidentified
MQKQDSYDYYVGIDCAQNKHDFAMKNNQDKFLIKKGHFSNTLQGYEKFLNTVLSKCLNKDKILFGMEVTGIYGTNLYERLKSDGYHVVMISPDSVKNYRDYKRLNKTDKIDSACIAELLLNGDAQIVHVEKNGYTDLKAYIRRRNALKVTCTQETNRFLAKVCLYFPDLLKVFPSGRATLKAIFSIYPTPYSIIEADFDELVSVLQKASKNKFCVDKANELIHAARNSIVVRKSISDGELYNIHSLIDSIDSLESEIRNLEKIIDSKAEEFPAYHVLLTLTGCGKITAATIVAEIGDISRFHKASQIVSLAGLYGDNSKSGSSVNKRGKISKKGSRYLRHAIYMVAEFARRNNPIFKAYFTRKKNGDRTKHTLAVNAVANKLCKVIYSLMKNQSTYIIQYRDLAKLSESTQNEFFQNAETDFSAKTRRKKYLYEDEYGELHEFVFKSLKTALIE

SEQ ID NO: 344564 - protein, 374 aa, unidentified
MSESTAWHVGIDLHKDWVVMSALRGAGDDPQHEQTLPNEWSKLKRYFERLLKDGGVRACYEAGGCGYGLRRRLLEIGVDCDVIAPSHTPTQPGDRRKTDQRDARKLARFLRSGDLVAVHVPTPQEEEVRDLVRSRLVLVHEIHRSRQYALKLVQRLGRRFEGGRNWSRAHRQWLASLELSAEHRRVLDRYLSLLTSKELLLAEIEQDVERASRKAPYAEPVARLRCLRGIDTTSAMVLATEVVDARRFASARDFMGWVGLTVSEKSSGGPGRQSMGAITKTGNSRCRFVLGEAAWNYARPAKGGAALLRRQEGRPAEEVAYARRAQRRLHRRFEALAARKHRTVAATAVARELAGFVWALLRGEKELLLPRVGA

SEQ ID NO: 344565 - protein, 397 aa, unidentified
MRFAGIDVASKTHVIAIVDEAGDVLFKPTSFTEDAAGYEKLFATLGMPDDVLVALEATGHYTRNLLAALHERNFRCCLLNPVRTRRFAQEDLARAKTDSIDALGIARFAAQKRPLPTPAVDMATDELRELVRLYDRVSQDFFDRVRQIHRLVHLCFPEFNRHVRTLRSRRATAILSEYPTAKTFTEDSLGKLTEIRYDGKHYVGRVLAHTLVEAAKASVARHHGAAYCAEMRYLCAELNALRAKVSSLASEIESKVAEHSVGALLLSIEGLGVLSAARIIAAVGDPARFRNGAALAAYAGVVPGTNRSGLRRPSRASLCPLGNARLRRALYMTTLGAVRRNPWLRAYYERLRGNGKLPKVALGAAMRKLLLAAFSVAKHKRPFVPRLTPPSGDAAAP

SEQ ID NO: 344566 - protein, 347 aa, unidentified
MLIIGCDFHSRFQQIALLDTETGEVVGKRLEHENGEAQRFYEGLKEPALVGMESMGYTQWFEELLAEFGHELVVGDAAKIRAQEPRKQKHDRRDAEPLLNLLAKGDFPRLWLPSAAERDARVWLEHRHQLVQLRTRTLNGLQAVALNHGLCRRQKLWTKRGQEELQKLPLREGRARRRADLLALRAQLDRWIAELEERIAQEVAQRPDAQRLLTHPGVGPLTALGTVLILGPVERFPDAKHVTRYGGLIPQEESSGGRQRFGRLTKQGHGLLRFLLVEAAQTASRLDPGLRRAYRRLTFRKGRASAQVAVARKRAIRLYIMLRDQIDYTEFCRRGSHAGMLGEVALA

SEQ ID NO: 344567 - protein, 351 aa, unidentified
MPRKSSVCTVTAIGIDMGKTTLHMVGLDSYGAIVLREKVSRGRIASRLANLPPCLIGIEAGMATHYVARELAALGHDVKQVPPAYAKPFRQGHKNDFRDALAVAEAVQRPTTRFVPPKSNEQLDLQALHRVRSRLVSQRTAVINQIRGFLLERGIIVRQGLRFLRQLLPDILAKRTDVLSPRMVRIVSDLAGDWRQLDDRIETVTDEIETLAKADDSCRRVMTVPGIGPIISSAMVAAIGNGSAFSRGRDYSAWLGLVPKQMSTGDRTILGRISKRGNSYLRMLFIQAARVILLRPANWPKHGFGAWLVRAIQRLHPNVLAAALANKLARIAWTVLAQERSYEARVTKAEA

SEQ ID NO: 344568 - protein, 370 aa, unidentified
MAARERDRSQRSGSGFIKAVGQLGSSRSSVHQPGQLKGSRARIVQGRETRRCARSPAIFVGMDVSQDTVDIAVQPGTAFQIMNDDRGIAEAVERVQALQPTLIVLEATGGLEVPLAGALVGVGVPVVVINPRQVRDVARATGQLAKTDRLDAQILARFAEAIRPPVRPVPDEQTQALAALVARRRQLIERLTAEKNRLRLAARPIQKRVPAHIAWLEKELAATHTDLTATIRKSPVWREKEEVLRSVPGVGPVLTTTLFANLPELGTLTRKAVAALAGVAPFPRDSGTLKGRRAIWGGRAHVRAALYRAALVATRRNPVIHAFYQRLCQAGKAKKLALTACMRKLLTILNAMVKSRTPWRRAMAPAGAEA

SEQ ID NO: 344569 - protein, 382 aa, unidentified
MNLSVNQTIKSIVSISPHSLSKVTKDQIEFQFNPNKGFSHRNHFNNYKYKSMEILDTVGIDMSKLTFDVRIHSTQAYAQIENSNEGFKQLLNWAYKNSSFSRENIFFIFEHTGLYSHKISVYLTEKKVAFALVPGLEIKRSLGLARGKDDKVDATNIAKYAYRLRDEIEPYEMPSEQVQALKRLLSLRDRLVKQRAGFKASLKEQKRVLLKKENQILFTSQEKMINYLTKQIGTIEEEMMGIINSNEQLIEQFKSITSIKGVGKQTALFMIAYTHGFTKFKNWRKFASYCGIAPFPKLSGTSVRGKTKVSNLANKKIKSLLDLCAKSSIQHNLEMKTYYNKRVNEGKNKMSTINIIRNKLLSRIFAVVKRKTHYVNLMKYAA

SEQ ID NO: 344570 - protein, 400 aa, unidentified
MNPVIGLDVSKGESHAQAFADRGMPYGKTFLFKHNVEGLTSFLRFAQDIESFTGKRPAVVLEATGHYHSSVVQFMDENQYLYIVINPLLSHQAKKANLRKVKTDAADAYQLGEMFYKEDLEPYKKRGQYLMNLRYLTRQHESLTDMYVQVKLQLQAVMDQVFPEYHGVFGDLYSKVSLRFLALYPTSQAVLAMSEKDVTANIQSLAGHVNPTRWSQESAQKLMAAAERNPFKETAFPSHLISLELLIHLLLQYQEHLAKLDKSIEALAEELIEYDLIQSIPGIGTKIAATILAEIGEIDRFDHAKKLIAFAGIDPSVFSSGKFTATQNSITKRGSRRLRTALYQAVRCGLRSSRNKKLRAYYDKKRAEGKLFKVAVIACANKLIHWIYAILTKKETFRLN

SEQ ID NO: 344571 - protein, 407 aa, unidentified
MDVFVGVDWGNGAHAVCVIDTKGAVLDRFEVGHDRDGLRLLVTRLKKYGPPADIPLAIERPAGLLVDTLVEAGFRVMPIHPNVVKACRPRYRAVAAKSDPGDAYVLADILRTDGHRLRPLSPQSDAIKALRGLVRGRDDLVGARVALANQLAALLESFWPGAATIFADIASPIALAFLERYPTPDAANRLGPKRLAGFLAQHRYCGRRSPDTLLQRLHAAPEGRAGEAECDAKGELVRAMARTLHTLVGEIAKLSSRIEHTIAELPDGKIVMSFPRAGQICAAQILAELGDVRERFPTEAQLAAEAGVAPVTYQSGKSRGVGWRWACNKRLRAAITCFADNSRHQSRWAADVYRRARARGCDHPHAIRILARAWARVLWRAWTDRLPYDPRKHAAAKAFLLPATDEG

SEQ ID NO: 344572 - protein, 406 aa, unidentified
MELVALHKRVIGLDVHQAQITACAIIEEADGTTRIEQRQFGAFKRDRRALAEWAAALLPDEVVMESTGIYWKSPYAALEALGIRAQVVNARHVKNVPGRKTDVGDAQWLATLARAGLLRGSFIPPAKMRELRLISRQRQKLVGQLASEKNRLHKVLTDGGIRLGVVVSDLHGQSARAMVKAIVAGQPPHEVLKLASRRLKASREELFDALQSELTDSHRFVLDELMQHIEEIEARIARFDAKLLEGLASEKNALTLLQTLPGVDLIGAAMLLVEIGTDMDAFGSADRLASWVGICPGNKESAGKRKSGRVRKGNLYVRRLLCEFAHAASRTKSVFQSKFRSLILRRGHKRSIVALAHKLLRNIFFMLKRREHYRDSATDYEALSVQRNAPRWIKALTRFGFIPAAA

SEQ ID NO: 344573 - protein, 343 aa, unidentified
MEHYVGIDVSLEQSSLCVVDAAGKIVREAKVASEPEALVVFFRQLGVKLARIGLEAGPLSQWLHAGLTKAGFETVLLETRQVKAALSAMVVKTDRKDARGIAQLLRMGWFRPVHCKAPPAQETRALLVGRKLLQGKLLDVELSIRGILRGFGLKVGTVSKGRFAARVRELIGGQPMLERVIEPMLRAREALQREFHTLHRAMLAIVRHDTVCRRLMTVPGVGALVAITFTSAIDDPARFRRSRAVGAHFGLTPKKCQSGETEVTGGISRVGDPMVRTALYEAAHIMLTRAVRFSGLKRWALEVARRRGMKRAKVALARKLAAVLLRLWTNGSAFRFGQEAAAA

SEQ ID NO: 344574 - protein, 324 aa, unidentified
MTMNPALSAFNHVVAFEVAKDSLVIHVLPAEKQSIAANKPAAIRKALMAEMRASLGPLLVVCEATGGYERHVLEVCEELGIAAHKAHGSRVRHFARYLGLLAKTDPIDARVLALYGLKTTDLRLYVPPAPEVLALRDLKTRRDQLQQMLFAENSRLDHARHASVSRSLKAHIAGLRKALAALETEIAAHVKACEALARKARLMRTLKGVGPATVAAILAYMPELGDLKKGEAACIAGLAPINNDSGAFQGLRHIQAGRAAVRKTLYMAALVAIQHNPVMRLFANKLRRNGKPSKVVITAVMRKLIVTLNAILRSGEPWSHAKIA

SEQ ID NO: 344575 - protein, 416 aa, unidentified
MNAVGIDVSSRKSTVAVLRPLGEVVCLPFDVSHDADGLASLAEKLKALDGETRVVMEHTGRYYEAVAKALHEAGFFVCAVNPLLIKEYGANSLRRVKTDKADAVKIARYALDNWADLRDFTPMDAIRYDLKTLNRQFQLASKQRTASANNLIALLEQSFPGIRKCFDSPVRSDGTQKWVDFAHSFWHVDCVRKQPFPAFCERYRKWCKRHAYLFKLSNAEEVYALAKRAVVLTPKSKVVKVLVQEAANQLISISRSVEVYRAEMDRLAAMLPEYPVVMAMYGVGKSYGPQLMAEIGDVRRFERKQALVAFAGIDPMPNQSGDKNVRSNKSSKRGSPYLRKTLFNVIRTYLQCAPQDEPVFQFLNRKRAEGKPFYVYMLAAANKFLRRYYAKLRDYFASLDTLQPVAPIPTILKATL

SEQ ID NO: 344576 - protein, 363 aa, unidentified
MQNSITWVGMDVHAEIIVLAALRDSSDAVLFRAEFPNTPKGRERLAGRLAENAPVRCVYEAGPCGYELRRFLEGKSIECDVAAPALIPRKPGDRVKTDRKDAEKLARCHRLGELATVFVPTPAQEALRDLLRTREDAREDLLRRRHRLSKFLLRLGRRYTEGQRWTTRHWDWIRAQSFTDRNAETVFREYIVAIEQEVERIRRIEQQIVEESKSPEVGNAIARLRALRGVDTITAMTIITEVIDLNRFRSPRELMAFIGVVPRERSSGGRERRGSITKTGNAHIRRVLIESAWHYQRLPAGTPKTILARRDGQPPEVIETARKAELRLHRKFMKLLGRGKPKGIAAVAVARELAGFIWALGRG

SEQ ID NO: 344577 - protein, 450 aa, unidentified
MNKGVKKTGKGKKEISFQLVNPMAAGIDVSVSEMVVAIPESLAQESVRAFGTMTCDLRELCNWLKECEIETVAMESTGVYWQPLFYMLLSAGFDVCLVNAAHVKNVSGRKTDESDAQWIQKLHSCGLLSGSYLPEDVQRSIRCLTRTRRSYTEEQNKHLNRIQKELESMNIKFHTIINSIAGVSGMAVLHAILDGERNPESFLPYIDPRVKASREEIIKSLEGNWDPTHLFLLAIHVASYKECQKTIEELDKELEKKLVLLEAKVNHGEVKSQPESTKRGHKNSPQAQVEQHLQNIHGVNVLSIYGMGMISALEILAETGIDLSKWRTENHFVSWLNLCPNNKRSGGKELSSKVPRRRANPASQAFKSAANALQRSQHWLGDYFRRMKSRGGNKYAIVATANKLAKIYYRMIQEKEEFKPINLQEYRSKFNQDKIAYLERKLQLLKNQAA

SEQ ID NO: 344578 - protein, 307 aa, unidentified
MEPNAGIDVSKHTLEWCLGPDQKIQHIRNEPRAIAALVRRMVQSDPARIIVESTGGYERKLVTKLAEAGLPVVVVNPRRVRSFGEGMGFLAKTDAIDARLLALFGEKAEPEIRPILQGTDRLLADLVARRRQLIAIIVAEKNRRETAAPAVLRTIAAVLRTLEKQVRELEERIDTMLRQDADRAELLELLQTVPGVGPAVARTLLIDLPELGHLGRREIASLVGVAPFARDSGTFRGARRIRGGRASVRTALYLAAMTASRFNPVMTATYQRLRQAGKPPKLAFVAVARKLLVALNAIARDRVAWQA

SEQ ID NO: 344579 - protein, 355 aa, unidentified
MSQDKYIGMDVHQASVSVAVLDGGGKLSMECVLETKASTIVEFIRGVRGSLAVTFEEGTCAAWLHDLLQPHVSRVVVCDPRKNALLQDGSKSDRIDARKLAELLRGNQLSPVYHGDHGVRTLKELARSYLTLTQDLTRVMTRIKALYRSWAIPCSGTRVYGARQRSEWLAKISQAGVRLRAERLYEQLDLLRPLHQQARCALVEESRRHPAVKWLRQIPSIGPIRAALLVALLQTPHRFRTKRQLWAYSGFAVETHDSGEYRYVRGKLLRNRERIRVRGLSDNYNRDLKNLFKSTAISASTRPGPLRDFYLALLAKGIRPSMARLTLARKIAAITLAIWKKGVDFDATQLSRQAA

SEQ ID NO: 344580 - protein, 330 aa, unidentified
MQFVGIDVSKKHLHLSWLRDPERGLARSKAVDNTPAGHAQALTWAMQHSGAAPAELCFVLEATGVYHEAVALHLHQAEAQVVVANPLHIKRFAESHGFKTKNDRHDGQILARFGHERRPKPWQPAPEPVRQLRALLARLEALEEDRQRETNRLEKARVQGVPAPVLDSLQAMLGTLKEQIETLSRQIDQHIDSDPGLKGQREDLESIPGVGEKLSAHFLALFAAKRFVDAKQAAAFLGLVPVECQSGTSVRARPRLAKNGDPRWRARLFLPAMVAARFNPDVSALYQRLLKAGKTKMSALGAAMRKLVQIAFGVFKHGLAYQSQCTPAPV

SEQ ID NO: 344581 - protein, 425 aa, unidentified
MQNVKATRMKSWQDITHYAGFDWAKDHHVVVIVDNQGHIVSDFEFEHSLEGWRRFGEKTAVWPNLAVAIETSQGAAVDQLLQRAYMLYPIHPVAAQRYRERKAPSGTKTDHLDGWGLADALRVDGHGWKALQPISPLTQQLRLLCRDEVSLIEQRTALVNQLQQSLMEYYPAALQVFDDWTQSFTWEFVIAFPTPQELVKAGKRRWEKFLHTHRLWRPETAEKRLKIFAEADQFKASDPIVRAKSQLAVSLSKLLRTLGQQLDEYRKQIEVLFEEHPAHDLFGSLPGAKRVLAPRLLAAVGSEPDRYASQEVLQCMAGTAPVSYQSGKINKVQMRWSCDKFLRHTVHLWADCFRKASAWGAIYYQNKRDSGMSHACALRCLGQRLLKILFRMIVDKKPYDAELHARNQQKHGSWVLALGGGKTTA

SEQ ID NO: 344582 - protein, 344 aa, unidentified
MQITTIGIDLAKTVFQLHAVDADGTTVIRKRLRRAEVLSFVSGLEPCLIGMEACATSHYWARELAKSGHTVKLMPPAYVKPYVKRGKNDATDAEAICEAVTRPNMRFVPVKSADQQAVLMLHRARALLIRQQTMLANAFRSHLAEFGIVVPQGIRHVRALIERVFGEGEDPIDLPALARTALRPLVAQLMELRLQIKTIEKELLAWHRTSPESRRLETIPGVGFITATAIAATVADPSHFRSSREFSAWLGLTPRQNSSGGKDRLGRVSKMGNGYLRSLIVVGATAMIRYAREKGAVSARWINALLEKKPARLVSVAVANKTARIAWALLVRKEAYRVPVPVAA

SEQ ID NO: 344583 - protein, 413 aa, unidentified
MDVLHTNCAGLDVHKKTVVATMIISQGKGKPLKAIQTFGTMTGDLLALSDWLMSSGVTHAAMESTGEYWKPIYNILEDNFEVWLVNPQHIKTVPGRKTDVKDSEWIAELLRYGLIRASFVPPKGQRELRELTRMRSTFVKERATLVNRLHKVLESANIKLASVASDVNGVSGKVILQALIEGKATPEQMAELAQGRLRKKRDLLTRSLQGYVKPHHRFVLSELLLQIDGLDETIARFDEEIREYCRPFEEAVELLDTIPGVARRTAEVIVSEIGVDMSRFPTANHLASWAGVAPGNNESAGKRLSGKTTKGNQALVSALTQAAHAASRVKNTYLSAQFHRLAGRRGKKKAIIAVAHSILIMAYHMIKDKEPYRELGRDFFDKRNVQATTRRMVRRLEQLGYRVNLEVFTPIAA

SEQ ID NO: 344584 - protein, 410 aa, unidentified
MLKIVYPVCCEIDVHKTFIYCCIATTDNKGITTYKSNRFSTFTNQLKRCATWLKEKDCKDVCMESTGKYWIPVYNILELSCNIVLTHPKYVKAIKGKKTDKRDAKWIADLFKHDLINGSFIPPADIHQLRNLTRYRNKLTNFIVGEKNRAQNCLTVSNIKLDYVFTYVFGKASSSIINALLLNPSEKITDVSKFRTRGMKSTDEEILAAIDGNICNEQAEKLKIIRSHMDSIEECKANLESVILNLAEKYLPKLNLILSVLGIKSFSAVSIILEIGVDMSVFPTSKHLCSWAGLTPQNNESAGKKKTTRISRGGAYIKPLLVQCALAAVKSNKHPKIRNRYLALKKRRGHKKAIIAIARTLLTAIYNILKKNEPYNPDLYKKSDLPPQHKTVSFDEAVFILQRQGYIITS

SEQ ID NO: 344585 - protein, 406 aa, unidentified
MTLASATPQEPSVVIGGIDTHADTIHVAVIDEQGRPIGDREFVTTPAGYRAALAFLVDHGRLGVVGIEGTSSYGIGMTRAAQAAGIEVREVTRPDRSVRRRQGKSDPLDAYEAARAVLAGRAQAAAKTELIDPLRALFTARRSAAKARQSAQVQIRQQLITAPAQLREKYRSLSIVRLVKTLTGCRPAVCDDPAARAVLVALKALAHRHRYLTDQINALEHELALLIHDIAPHLLQTRGVGVSVAAQLLITAGGNPDRLRSEASFAALCGTAPVPASSGKTTRHRLSRGGDRGANYALHVIATVRMSCDPKTKEFAARQRDRGRSNAEIIRILKRAIAREMFTHLTRPAPALDIADLRDLRRAKNITQDAAARALAVPQITISRTERGLYIDTDLATRYRNWLNVA

SEQ ID NO: 344586 - protein, 368 aa, unidentified
MIVIGVDTHKRSHTLVALDAATGATRGQLTIAASDDGTLDAVRFAGKLDSERVWAVEDCRHVSGRLERGLLATGDRVLRVAPGLTETSRRAVREPGKSDPIDATAIARAAIREGLDTLPAAFLDEQALEIRVLNDYRDQIITERVRLINRLRWHLVQIAPEAEAAIRPAGLIGPQIRARLARKLGRLPHSPQLRIAKALLKRINEIYREELELLAELKTLIEAHCPQLLAEHGCGTVTAAIIIGHTAGAQRFTSEAKFARHAGTAPIPASSGNTQRHRLHRGGNRQLNRAVHIIALSRSRTDPATRAYLDRRHREGKTKREAIRCLKRHLARRIWHVLYATTPTPPAPPSRPANTVAIGAPGITPCTG

SEQ ID NO: 344587 - protein, 329 aa, unidentified
MTPMTMTPNPSPFNHVVAFEVSKARLVAHALPADTQCEIANTRSAARRLLQAEAKRNGKGGLGPLLVVCEATGGYERHVLEAAAALGLPCHRAHGARVRFFARYLGLAAKTDPIDARMLALYGLRTERLRLYAPPAPEEEALRALKDRREQVQQMLIAETNRLDHAHPGILAGLRAHIRSLQIALKALETGIAELVRATAELADKARLMQSVIGVGPVTATAFLAYLPELGSLTKGQAARLTGLAPINRDSGASSAPRRTEAGRTGLKRALYMAAGIAMRRNPALAAFAARLKSRGKPFKVVVTAVMRKLVVILNAILRDNQPCKHASA

SEQ ID NO: 344588 - protein, 482 aa, unidentified
MKKRNIFQNQSQEILTLFESAKDRSKVMCIPMDYAKKDHVVMFCNGNGKILRKPFSIKNSPEGVEYLIDRVTRSCRHHGIDIKHTFLGGEDCGTYADNFIEALRSENWLVAGVNALDAKRHRENVQASTDRLDLLGISNMLLSCRGNCSPAQSGIYWNLRTLCRQRQKLVVTKSGVKNRIHTIVDQIFPGFLNETKSGIPPFSPASLILMENRFSVHQIRRRRPSALSKALAKQGLPNPERRAEKLQRYAGQVLKPQKDHIVTLQLSLKQQIKLFLCLQESTEQLKRDIAELLAQIPGAFLTTIRGIGLILAAGVSSELGDPDKQKSLANLVSYAGIIPQIKQTGGEQGKTQVIRVGKRCNRILKNYAVQSGLHMGIHGPGELRADYKRREAREQHADFGMARRFLRMAMCLMRTHQSYLPRRLRSQQCSMGERARYYNKAWPLIMDKWRRVRMLDIAFDKKMPLGQWRKMIKELYGINLSL

SEQ ID NO: 344589 - protein, 367 aa, unidentified
MKKVSTAASKQGRNISQATRTIGLDVGDRNSWYCVLDEAGQIEREQRVRTQGKALREVFEGMARSRMALETGTHSPWISRLLSELGQEVIVAHARKVRLIGESRKKDDRLDAQTLARLARIDPELLCPVKHRSAQAQADLTVIRARAALVRVRTALVNSARSLTKSYGERLRGCNVRNMNPEKAEGLSPELRRALEPLLAEIEGLSGRIAEYNERLEALAENSYPQVEQLKQVKGVGTLIALTFLLTLEDAQRFRKSRDVGSYLGLQPGRRNSGQREPQLRISKEGDPYLRTLLVQGAQHILGPFGIDCDLRRWGLKLAERGGRNAKKRAIVATARKLAVLLHHLWVSGEVYEPLHNRSRTTVAAAA

SEQ ID NO: 344590 - protein, 366 aa, unidentified
MKKISTVQEFGNEIFKEQKLTIGVDLGDHWSFYCVLDEAGKIILEQKVSTTPEAMKQTFGRIPRSLVALETGTHSPWVSRLLTELGHEVLVAHAQKVQLITKSNRKDDRHDARTLARLARIDPELLGPVRHRSAKAQIHLTVIRARAELVSARTALVNAARGLVKSYGERLPKCGTQQVSRELAAELSAELRDVLEPLLKEIESLNERIKEYDERMEKIAKEVYPEVSLLQQVKGVGTQIALTYVLTIEDPYRFLKSREVGCFLGLKPGRRDSGESKPQKGISKAGDRYLRMMMVQGAHYILGPFGEDSDLRRWGLKLAERGGKNAKKRAVVAVARKLAVLLHRLWVSGEVYEPLRNSQKAMRAVA

SEQ ID NO: 344591 - protein, 370 aa, unidentified
MNSITYVGLDVHEATVAVAVAEGGRGGEVRQLGVFENRPEVLSKLVRRLSNGDRRLSFCYEAGPCGYGLHRLLTGCGHDCVVVAPSLIPMKAGDRVKTDRRDALMLAKLHRAGELTPIWIPDAGHEAMRDLVRARATAGRVLSKARQHLQSFLLRHDRIYRGLRAWTSAYRRWLTTVRFDHPAQQIVLQDYIHAVQDAEARRDRLTRQINDLLPSWSMAPVAMALQAMRGVALVVAVTVVAEVGDFRRFANPRQLMAYLGLVPSEHSSGGSIRRGAITKAGNALARRVLIEGAWTYRMPARVSRKLHDRLEPLPAVIRDIAWKAQIRLCARYRRLAAAGKPKVIVTTAIAREMTGFIWAIAQIAQPPLAA

SEQ ID NO: 344592 - protein, 347 aa, unidentified
MKYMGIDLHKRYFVATTVDDAGRVLRKDRVSTDRAAIRGYFDRVNGDGDLKAVIEACYNWGYFYDEVHEKIQEVKVAHPLKTRAIAEARIKTDQLDSEILAHLLRGNLIAEAYAPDFDTRDKKNLLRYRASLVKIRTMIKNMVHAVLARNHIGNLGFRKLTDKFGKKGKTYMRSFQLRGNDTEIVNRYLDVIEAIEENIKRSEQEIKSLFEKDDICGFIESVPGIGELLAVLIRYEIDDIKRFVSASKLCSYAGLVPTTYSSGGKTFQGKITKQGNRWLRWALIEAAQRAIVKDDWLRGYYYRIANRGGTKRARVAVARKLLEIIFRLWKEKRPYSEKKLAVALSTL

SEQ ID NO: 344593 - protein, 362 aa, unidentified
MMNDSETTSGNSECAATNEGADKAPPTMFTPETIFAGIDVSKAHLDVALTQSAQSAQAKQRMPAQGARFTNDASGVRLLLAKLKALPELGAVLLEATGGLEREAATALCGAGLPVMVVNPRQAHDFAKALGYLEKTDTIDARALAQFAQTLASSPKFEALQMRLPEPEQVALQALVTRRSQLVEMRVAEGNRLERAPKAVKKSIKAVIVLLERQIRALDGDIDGALEAHFADKLALLKGLKGVGPGTQAALMAGLPELGRLTHKEIAKIVGVAPLSHDSGKMRGKRTTWGGRADVRSALYMGTLTAVKHNAVLKAFHQRLLANGKAKKVALVACMHKLLSIMNAILKSGKPWTPNFNACQNA

SEQ ID NO: 344594 - protein, 356 aa, unidentified
MMNGTKYVAMDVHTASISVAVLNFDGKLIMESVIEAKRSTIVQFIQGLRGELLLTFEEGTWSAWLYDLLTPYVTKVLVCDPRRNALLKKGSANDRIDARKLAELLRGNLLRSVYHGQNGLRTLKELARAYLTINKDLVRVMSRIKAVYRSWGIPCAGQSVYHPRHRDEWLGKITQASVRRRAELSYEQLDALVSLRKQARQELLAESKKHPAWKLLRSIPALGPIRAAVLMAIVQTPHRFRTNRMFWKYSGFGIVTQTSADHQVVDGQLQRSKKPPFVRGLDPAHNHQLKEVFKSAAIQASTMKGPFQEFYEALIAKGMRPEIARLTLARKIATISWIVWKKGVALDAKYLKPQTA

SEQ ID NO: 344595 - protein, 345 aa, unidentified
MQTMYYIGLDVHKRAISYCVKDGSGAIHAEGAIPATRFDLDRWMKTLPQPWTAAMEATVFTGWIYDHLQPHAAALKVAHPLMLRAIAAAKKKNDRVDASKICDCLRCDFLPECYMASTAIRERRRTLRYRNLLVRQLVQMKNKISGLLMEAGVSYNKQRLHRAGYFRELLATNPGIDEGLCSLLRLCRETVVRLQKTESALVRSLERDSLLMDRVERLMTVPAVGPITALTWALEVGDAQRFSSIKKAISYCGLCGAEKSSANTVQRTPLSKQRNKHLQTTLIEAAKMAPRYSPNLAMLYDKEKQKGNANRATLAVARKLVAYLMAVDRGQRNFQVAETSNCIAA

SEQ ID NO: 344596 - protein, 332 aa, unidentified
MNMHPQGGVANRDQRPNAGIDVCKQHLDVCLGTLEQRVANEASGWNELIAKCKAADVDLVVLESTGGYERAVVCALQDAGITVARVNPRQARDFAKSMGVLAKTDQVDARTLRDFADVLARHQDRAKYITPMLDEHRRQLAELMTRRRQLVDMRVAENNHLEHAGKRSVRSITSVLKTLDKQLAAIDREIDDHIDCHFKDQRTLLDSVKGVGPVTILTLTAALPELGSLGRRQIAKLVGVAPLADDSGPRKGKRRIWGGRADVRAVVYMAAVVAMKHNPAIRDFHSRLIAAGKPKKVAIVACMRKLLTILNAMLRDQKLWDAAKHVHIPIAA

SEQ ID NO: 344597 - protein, 316 aa, unidentified
MSESTSFVGIDVSKNTLDVHVLPAGEHWRVANDQAGCVELIERLKPLGETGLVVIEATNVFWRMAAAALAGAGLACAVVNPRQVRDFAKAMGKLAKTDALDAQVLALFAQRIKPPVRALPDAQCQVAAEMLARRAQLMGMRVAEKNRLATATAKKVRKDIEVTIAFLEKRLSALDQEIDSWLQSTPIDQSRANLLQSFIGIGQNTARSLLITLPELGRLNSKQIGALAGLAPIAKDSGTHRGERHIRGGRAAVRAALYLPAITAIQHNPVIRALYRRLIQTGKHHYVAITACMRKMLVILNAMLRSNQPWKYSQNA

SEQ ID NO: 344598 - protein, 343 aa, unidentified
MSACYFIGLDIHKKMIAYCIKTIDGRLVDQGMVSADRASLSAWVQNLPGPWIGAMEATIFTGWVYDFLAPHALALKVAHPEMLKAITAAKKKNDQGDAEKIADLLRVNLLPECTMLPQEIRELRRILRYRNHLVRTAVNMHNKMSGLLMEVGAGYSKNRLRGKKYFHELLDRLDEIPPSVKELLMLSRSGFEMFQTFQKRLIQTLRSNPLIQERVARLMTIAGVGEVTALTWVLEIGPVSRFGSIRQAISYCGLCSAQRESAGKQQRGPISKKRNKHLQTILVEAAKLAPRWNPQLADIHQRELSRGNRNRATLAVARRLVAYMMAVDKSETNFAFREEQKAA

SEQ ID NO: 344599 - protein, 358 aa, unidentified
MTTVSKKQKWFNTIHLTKDDDLYVGIDAHKKSLHVALWLNGAPAIDFVSPPDNKKLIETLNNLRPALRMVVYEAGPTGYSLARAMQNADLPVSVVAPSKTPRQAAPDSKTDSLDARKLAEYAAKGLLRHITIPTKHQEAQRQLTRLREQLVAKQTRVKLQIKRFLLQHGTDQPQDLSRWSRAAVEYIKNIRLSEPLRYCLDTLIEELLSVAVRIKSTELKIKEAFSEKPLSTTCKLLATHPGVGPTIAAQFAAEIFNPKRFTDKTQLAKYVGLAPSIRQSGQTLRDGPILKTGRPQLRSNLIQGAWQWIRKDQDAYKTFCRLVQNTGHKNKAITAMARKLAIHLWRMACDNKPYNCAI

SEQ ID NO: 344600 - protein, 413 aa, unidentified
MLAQTNQRSYCPTDFDIFLGMDVDKKSIDFTCSDAQRIIRSVHIPNHSDHLVRYVRKHFPDQKVLFAYEAGPTGYGLYDGLTAAGFACLVSPPSMIPTAPGQRVKTNRLDSKKITEALRAGQLKSIHVPSPTYRHLRHLTKIRDLVVRQITGTKCRIKALLLFEGIPFPEAPRGSQWTRSVVAQLHKLPCSGAVRFRLDRYLEALEFQRAQYLKVTREIRTFCRQDPELKRCLSYLMSLPGIGQIVAPHLLARIGSWQNLQEHRVDELAALVGLVPTEHSTGDRVHRGSITRAGDGRLRSKLIQAAWTAIRQDPELREFYRSVYRRHPQPVAARKAIVAVARKLTTRIFAVLKEQRPFILRPQVHSRPLLPGEIGPRERLDDRQKEEDRDLPSFVPETEVPGPPPKRGASKPV

SEQ ID NO: 344601 - protein, 436 aa, unidentified
MDANYANRLRWFRQFKEQINASKNTLIVGVDIGKDKHYAFLGTPAGRTIQRRLIFENSMEGFGNLLFSIQRYLSDEKLADVVIGVEPTSVYHKPLAEYLIGQGYSVVYVTNSAIKKNRAILDGRWDKNDTKDSANVADLVSRGRCHFYDLPDVNLRDIRNLLSLRKRLKKQEHRLITRIRNNLVAQYFPELDGAWYRCQQENLAIVRFCLSPQKIAGLSLDDFCRMVTRRRRGIRQYQRLLHIYEVAEGSIGCRQGSSVAFEAQLLVENLQRVREQIAEVEAQLHLICGSYKEYELLQTIPGFGPYVAAVVLGAVGYAQRFENTKQLLRLAGLDLNASRSGKRSQTAVPVISKAGKAELRYALYQAAKVATSLTAEFKAYFKRLLKGREKERGIKTKMRVKVSAKMLVIAWTLMKTMQPYKAGLLVIDEPVQPRGR

SEQ ID NO: 344602 - protein, 430 aa, unidentified
MGLIVPTTIRPERADQPLPYEWFVGIDWGSQQHQVCVLDRDRRRVGERAVDHDGASLARLADWLWGMAVGQPQRVAVAIEVPRGAIVEGLLERGFHLFALNPKQLDRFRDRHSVAGAKDDRRDAFVLADSLRTDQPSFRRLQLDAPQLLLLRELSRAEETLLEECRRSANRLRDQLHRFYPQMLQLCSAADAPWLWDLLDLAPTPAHAALLSAEQVQRVLKAHRLRRITAPEALACLQAPALPVAPGATEAAQAHCGFLLPCLRVLAEQLRACGQQVDALLRTMADEPGAGERPSDVAIVLSLPGVGRKITAWLLAEAAQPLAARDYQVLRTHSGVAPVTKQSGKRRLVVMRRGGNPRLRHALYHMARVAMQRDTHFSSVYTALRAKGQRHGQALRAISDRLLRILVAMLRNGTCYDASRIRRESAVQMG

SEQ ID NO: 344603 - protein, 348 aa, unidentified
MTIVGNNPGAVIGGVDTHVDVHVAAAVNHVGGVLGVESFPTTHSGYRQLVSWLRSHGELTLVGVEGTGSYGVGLSRYLARDGVSVVEVDRPNRQMRHRKGKSDPVDAVAAARAALSGQATGLPKTRDGNVEAIRVLGIARRSAVDTRIETLNQLRHVVFTATPEIRAKFSGLTAISLANKASRLRPRQGDDPVRYTTLVTIRALGERVQYLREETKRLNRLLRPLIRDTAPALLDVFGVGFDTAAKLLVAAGDNPERIRSEAAFAHLCGVAPIPASSGKTKRHRLNRGGNRQANSALFHVVITRMRHHQATRDYVARRLAEGKTMGEIARILKRYVAREVFKLLPRPA

SEQ ID NO: 344604 - protein, 500 aa, unidentified
MALRAAEHDESRVERCGMLLYGVGGRGRYRSGSVEAVREFGPEHAQEPMNVRGGPGRGSGSTKRCVTTICVFSASTPETTMHDIIAGIDVHKRVLMVVVGTVCGAAADDGSEPREPIRFVQRRFGTTTSELLHLLAWLQQHGAQEVVMESTAQYWKPVWLVLERHFRLRLAQAWSNRAPRGKKTDFKDARRLVRRHAAGELTLSFVPDAEQRQMRTVTRRRTQLTRDRVRIQNQLESLLEETRIKLSSVVTDLLGSSGLRILAALGQGETDPAKLAAMGDARLQCAPAELADALTGSVSEIHRRLLQQHLAHLALIDAQMEELSLLAADAMRQHSDAVIRLVQIPGIRVLAAQQIVAEAGPQASAFPSAAQFSSWIGVCPGREESAGENHSSHCAKGNTYMRRVLCQAAQAAVRTKNSYFQQKFQRLIPKLGYAKAIWAMARHISVVIWKILHDGAQYEERGLPTTPQAAKRRIQRLTKQLRALGYSIELKPLSPKAVVA

SEQ ID NO: 344605 - protein, 332 aa, unidentified
MSVYVGIDVHRKRSQVAVVNEGGEVLANRNVPNGAKPILSVIGGLPAGTPAAYEAAFGWGWLLELLEAYGFEPHMVHPLQCKAIASARLKNDKVDAATLAQLLRADLLPEAWIAPPEVRQLRAMLRHRAQLVRLRTLLRNRVHAVLADHGHGRPAGCWSGPGRAWLAALELPAVSREVIDDALALMDALQVPVDRLDAEVRQRAKADPRVKVLTQLPGVGPFTALVLLAEIGDITRFSSARKLASWAGLTPTVRGSDRTVHHGHISKQGPAWARWVLCEAAQTAKRHPDFAPGYEALARRRGKKIATTAIARKLLTRAYHLLTDASAAGAPS

SEQ ID NO: 344606 - protein, 339 aa, unidentified
MTTIKPASAITNSPVPDSTPDTQEPFTQFIGVDIAKDHLDVFLAASNQLHRIENCPAAIDKFLRRFKQPERTQILVVMEATGGYEYVLTQRLHAAGIAWAAVNALRIRHFAPGCGLIEKTDAIDAKIIAKFGQMSPPRPTPMPDEATELIRALSFRRGQILRQFQQEKNRLQQCHCSAAKKFIADACKFYSKQLKAIDAKIAEAVKNDADSAQKAATLTSVPGVGTVTATVMISQMPELGKLNRGQIDKLAGVAPIANDSGRKTGYRKTMAGRSSVRRTLYMATLVATKHNPLIKGFYQSLLKKGKPKKLALVACMRKLLTILNCMIRNNQPWKDTLTA

SEQ ID NO: 344607 - protein, 349 aa, unidentified
MSMMATSTRPVTGGVDTHKDTHVAAVVDHLGGVLGTASFPNRSLAHGALLAWMRGHGAVVCVGVEGTGSYGAGLARHLRNEGVVVLEVNRPDRRTRRIHGKSDDIDAVAAAQAALAGRHAGVPKAGDGIVESIRMLRMLRRSAVRARTQCANQIHTLIDTAPAELHDTWAKLTLNRLLEIADHLPTPGDMAQPATSAPWARTALAGRWHWLDDQITELDYHLDRLVPVAAPSLVTLFGVGTDTAGALLVAAGDNPDRLRSEASFAALCGVSPLPASSGRTRRHRLNRGGNREANQALWRIALVRMAHDPTTRAYVERRTKEGLSKPEIIRCLKRYIARQVFPRLGRDLT

SEQ ID NO: 344608 - protein, 362 aa, unidentified
MPKMIWLGMDVHAASITVAQYEDQAPTAMVQTIANDPAQVRRLVRRLPAGSDVRACYEAGSCGYGLHRQLTALGVHCDVIAPALIPRRPGERIKTDRRDAEKLGRFYRSGELTTITVPTPSQEAVRDLVRAREDVRRDRTAARQRLAKFLLRHGHRYPGSHWTKRHWEWVCGHTFDGPARTVFVHYCDHVLALNERLAHLEHEIHTFADSPVYQPVVARLSCLRGLATLSALMLIAELYDLRRFRTPRELMAYLGLVPSEHSSGARERRGRITKTGNALARRLLIEAAWAYRHPARQTRRVHQALTTQPPAVHAISDRALHRLTARYRRLLSRGKTPHHAVTAIARELCGFVWAIALVPDLA

SEQ ID NO: 344609 - protein, 419 aa, unidentified
MFKIFRKNCCGLDVHKTWIYACIGITDPQGRTEYKEARFSSFSRGLRDLAAWLAQYSCREVCMESAGKFWIPVFNILEKTCWVTLAHPKYTKPQKGNKTDRKDAKWICDLFMCNMIKPSFIPPLDIRELRDLLRYRAKLINCMTGEKNRAQNCLTVSNLKLDDVFSDVFGKSASSITGYILDHPGEKFDVTPFIHKNCKHPIEEIQAAVDGSISREQATKLRECLKHIEEIEAHIRRIEAEILRLAEPYAFALELIRTVPGFSANPMTAIAVISEIGVDMSVFPTAKHLSSWAGCCPRNDQSGGKRKSTRISRAGVYIKPLLVQVANAVVKSDKHPEFKERYRRLKARRGHKKALIAICRMFLTAIWNILSKLEPYNPKGFLAEPPPDKARTLSQAQALNLLRSRGFIIQDDTPSLAPV

SEQ ID NO: 344610 - protein, 381 aa, unidentified
MRQVCGLDVHKDSVFVCILNENGIVFREKFGVLTPELEQLAAKLQELDVSEVCMESTSVYWMPVWRVLEPYVDDLKLVNPYFIKQLPGKKSDVKDAEWIATCLLKDLIRGSYVPADIIQQLRQYERRISDLNAECVRKLGKLDAAIQRCNIRISNYLSTTDTKSYKDVVRLISEGVRDPKELMKAIYCRIVKRVGEDVILASLTGVISDTDIDMIRQLHEEVELAQRHKDECQSKMDAICRQHFPKQLENLQTIPGVKGRSATAIIAEVGSDVSSFQDATHLVSWSGLKPRNEESAGKIKARSITHGNRYLRKTLVECAWAASRTQGCFFNAFSYHQVVVRRKNKLKVQVAIARKILVAVWHVLHDNATYRDHTPDIAPAA

SEQ ID NO: 344611 - protein, 418 aa, unidentified
MDVVVERCAGLDVHRDDVVATVRVPGAGRRRWEQQTRTFRATLAGLSALADWLAEAGVTLVGMEATGVYWKTVFQALEQRFECWLLNAQHLHNVPGRKTDVKDSEWICQLIQHGLVRPSFVPPPEIRRLRDLTRLRKAQINERARSIQRLEKVLQDAGIKLTSVASHTYSKSARAMLEALLSGVTDPAQLAELSKARMRAKIPQLREALASRFEIEHHGVMVAQLLAHIDTLDAAIENLNERIELVLAPHARIVELLCTIPGVQTHAAQVLIAECGLDMSRFPTVAHFASWAGACPGHHESAGRRRSRQTRPGPRWLTDALTECAKAAVRTKGTYLAAHFAQLRGRRGEPTAIGAIRHDILVAYYHIVRDQVPFRELGADWQRKRYSAEHRARRLQRQLEALGYTVTLEATAEVQAAA

SEQ ID NO: 344612 - protein, 341 aa, unidentified
MIFYCGIDLHSKKSHVCIIDKNGKKVKEENLNNDLSLILQFLKPYGKDVHIAIESTINWYWIVDGLQEAGYDVKLAHTLGLHMITGAKVKTDRRDAFKLAKLLRMGEIPEAYIYPKEKRPLRDLLRRRAGLVQQRATCYSSLRVQFMRYNLNTMSLTELKQFLPADIYVMPIPQELKDYCVMILQRIDLLSNQIHELDTYLKNVTLEDPKFKILLTLPGVLYVLGLMIYYEIGDISRFSNVRQFVSYCRLVPGISQSSDKVKRGKGSNQGNHYLKFAFTQAANIAVRYYPILRKFRDKHANRRKGNAATMVANCILAHKIAIATFHMLKEGVPFDEVKLFG

SEQ ID NO: 344613 - protein, 343 aa, unidentified
MYIGIDVHLRQWNVCIYQGGIRRRPFQQSPSVKALLSHLRANYPGMIYHSAYEAGVCGNSIHYELEDNGIHNIVFNPADIAQKDKERKRKTDKVDSSKIARALSNGELECIHIPTKERTEHRNMLRVRNCCISDVKRSKTRLRHLLHVNGIGIPPEYCNGRWPQSFFAWLQELYPDPNATGQAIRAMTHGLQSQLSLLKDVESRIRNLMEEACYAEDFRLLRTIPGIGETTAYTLLLECGDLSAFSSADKFCAFVGLIPDSDISDLHEVKCGITRRRHKTLRYMLTEAAWRAISMDSSLSKLYAKYTHRMPKQKAIVKIAHKLAKIIKFVVTNKTAYDASKAT

SEQ ID NO: 344614 - protein, 401 aa, unidentified
MRSIGMDVHRTFAQIAVVEDGLCRDEGKIGVRPEDLRAWAATLNPDDEIALEATTNSDAIATLLRPLVSKVVVSNPRKTRAIAEAKVKTDKVDARILAQLLAADFLPGTWVADDRTRMLRRLVMRRTHLVKQRTRVKNQVHAILARNLAPTCPHADLFSGVGRRWLRTQDLPTDEWRSVDALLRQLDFHGDELAEVERDIAIEAIDDHVVARLMTVPGIDVIVAIAIVAAVGDFSRFESPDRLVAYLGLNPRVRQSGNSKATHGRITKAGPAQARGMLVEAAFAASRTPGPLRAFYRRVKDRRGFQVATVAVARKMTVLCWHLVTKDEDYAFGRPSLTAHKRRKLELAAGAESRRGPVAGASRDYHIKRLRDEEKALVEHAERAYEVAVAHWQPQGPPREG

SEQ ID NO: 344615 - protein, 368 aa, unidentified
MSNNVLYVGLDVHKNSIDVALAEAGGEIRHYGSIGGELKDLEKVIRKLHSKGSELHFAYEAGPCGYQIYRFLKDKNYPCLVAAPALIPRRPGDRIKCDRRDALNLARLFRAGELTAVRVPDADDEAMRDLTRAREDAISVERRAKQRTAAFLLRHGRRYPGKTTWSRGHWSWLLQQVLEHPAQQIVLQEYLDAVRVAGVRVQRLTDQIRELVPQWRRAPFVKAYQALRGVSLIVATTVVAEVGDLSRFHNPKELMAYLGLVPSEHSSGASVRRGRITKTGNGHARRVLVEAAWAYRLRARVSRTLFKRQEDLPESIRQIAWKAQVRLCARYRRLLAQGKSKQTIVTAIARELAAFIWAIGQAVVPVTA

SEQ ID NO: 344616 - protein, 341 aa, unidentified
MKFVGADLHKKSIMFCVVSRTGVKTQVLQSTRILCSETHKIEQFFKSLGKFQVTVEATIGYDWFAALAEKFAERVVIAHAGKLRIIAESTRKTDKIDSRILADFLALDMIPEAWRPTPRVRQHRSLVRRRCKLQSRITGIKNTLHAILTRYNADRTDLFTRLGRAQVAKLKLLEQERWLIEDLFEDLDQSLARLKKVDNRLAEFAADAPLVEREARAVLATMPGVGVITIETVLAELGDVQRFRCADAVVSFAGLDPGVRESDGKRKDLKLSKSGSPLLRWILIQLAHRVKKKSPRWHRSFARISQRAGNKKATCAIARRLLLVIYAMLRDGSAYRLPATA

SEQ ID NO: 344617 - protein, 930 aa, unidentified
MYSSFVGIDIGKWNHQAAFLEVSGKETARSLAFQNTSEGFQSLLDSLAPFDKGQTVIGLEATGHYWLALFSFLVDNGWTVKVINPMQSDALRNMNIRKAKTDRKDCVVIADVLRFGRYTETVLPDEDLLQLRELSRCRVAHVELLGDLKRRVLGILDRIFPEFASCFSTVFGAAPTELLQECTDPEELADYDIDKLIKLLEKESRGRHSREKAEELKAKASRSVGTRFGRDALKFELKMLLEQLDFIKGQVKEFDKFLKKLMKNHELIYTIPGISVTLGSAILGEIGDVKRFGTPQQLQAFAGMDPSVTQSGNFQGTQGKMSKRGSPYLRRAVYLAANAARRFDPVFKDFYDRMIARGKHPKQALAAVGTKLLRVIHAVMTSQKPYNPQKLLPPAAISHPNPQAKKSTPQELLERTVLSLSCETTSHHLRGAAIIMPYRLPKIEVKTTDKMQDITPFAGLLPVVELWNRLHLPEIIDASIGIRKCKGYRDSEQILSMVLLNLSGGSAVEHLKFLKEQLGTKSCPLPFPSPTATRDYACGFHNESEDKHRGPGRSFVPASNAALKGFEELHRHLLHCAFEASPQEELTLDQDATFIETETSGALYNYKGKRSYEALNVYCPEYDLSVATEFRDGNVNPGYGQLEQLQEVLSHLPGGVRKVKYRSDSAGYQTHLLRYLAEGRDARFGVIEFALSCPVCAEFRKAVEAVCETDWHPLGNGREWAEVVYAPNALSFSRKGPTYRFLAVRESFDLEKSVKKRRLSLELEDSRQLRIPELIEDLEGENERVKKLHLTELGGRVYKVFGIVTNIEDLDGGAIIRWHRERCGKSEEVHRILKYDLAGGHVISHRFGANAFWWNVAVLSLSLHSLLKRLLLPSEVRACRPSTLRFLFYTSVGRIVRHARRIVLRVKEGLTGSWLLGAYRRLEKLSFSLE

SEQ ID NO: 344618 - protein, 318 aa, unidentified
MEIMHWIGIDDHADKWTIAYFRGDAEKPTKEFELMPDESGYRKLIAFAKTLGKKVRIVYEAGPCGYELYRRLRKAGLQCEVAAPSLTPRKPGQRVKTNRRDAAKLARYLRSNDLTLIVVPDEQRESLRDLIRARAAAQKDLVSVRHQITKFLLRHGHRFRDGRAWTLRFWRWVGQATFEGEYGQFVLDDMVAVHTERLERVARYDEEIEAAAKKPEYAPYVAAMSVLRAIDTRSAMTILAELGDLRRFATAPQLMAAVGLVPAEHSTGDKNTRLSITKTGNAHVRHIVVQAAWHYQRVSHSATTQESTAGTATDRPPV

SEQ ID NO: 344619 - protein, 414 aa, unidentified
MYYVGIDWADQKYDVMIVDHNGVIISPPVTIKKNAAGFEQLLEKLRKLSDDPQQFKIGIETPNNLVVDFLVDLGYAVFALFPGAMKSLRQRYRSSGARDDQFDAFVIADALRTDQARPTTPSVWRAVDFGSELVREIRLLARDHHDLVAERVRLTNSLRSTLKEYYPEYIQFFSDVACATSLAFLQAYPDFDTASQLTRQQVTDFFKEQHWRRHQTTVNNIYERLQGKRLKVPAALIRTKKHKALAVAKKLLALASDIEQYTQRLQELVEQHPDGQIFLSYPGVSYVTAARLLAIFGDNRELYADVSELQGRTGTCPVTEKSGDFSITYFRRACNKFYRDIMQLLAFSSLRVAAWAKAFYQKHRVQGHTHSHALRCLANLHLRILFAMWKNRTGYDENIFLAQRARHLIAKPNF

SEQ ID NO: 344620 - protein, 343 aa, unidentified
MQTITTIGLDIAKSVFQVHGVDADGQVVVRRQLKRRYVLAFFQKLQPCLVGIEACASAHHWARELQALGHTAKLMPPAYVKPYVKRHKNDAADAEAICEAVTRANMRFVATKTPEQQSCLTLHRTRHLLMRQQTSLINAIRSHLAEFGIVAPVGRNGVEHLLGIVADSNDKRLPEVARACVAALGAQLRVLKVQILEFDRMITAWHRSSEASKRLDQVPGVGPLLATALVASVAEPKAFRSGRDFSAWIGLVPKQNSSGGKERLGNISKRGDRYLRSLFTTGALAVIRYAKIHGTKHRPWLTALLARRPTKVAAIALANKLARMAWAIMAKGERYKEPASLAA

SEQ ID NO: 344621 - protein, 392 aa, unidentified
MIYVGIDVAKDKHDCFITNSDGEALFKSFTIPNNRKGFETLFQKVQSVSDDLTKVKVGLEATGHYSYNLLGFLLDKGLPTYVINPLHTNLYRKSLSLRKTKTDKVDSRTIATMMMSDVNLKSYSDTSYHNEELKSLTRYRFDKVKERAKLKSSVSRLVCILFPELEKLVPTLHMASIYALLSEFPGADAVANAHLTRLSNLLSESSKGRYGKDTAVMFRDAARGSIGSHMPAKSLELKHTIKLIQELTVEIDEIEAAIKRIMDEEIHSPILTIPGISYRMGAMIIAEIGDFSRFDSADKILAYAGMSPSTYQSGQLDNCYSHMEKRGSRYLRYALYNATKYVCHWDDSFGAYLAKKRSEGKHYNVALSHATKKLVRLIFAMEKSGRAYLTTT

SEQ ID NO: 344622 - protein, 351 aa, unidentified
MTIVGGLDVHRQQITFEYVDDDGLVHWGQIRPATRTTLRSWLGKHCPDGDAEFALEGCTGWRYVCEELTAAGVVAHLGDPAETAAARGPKKRAKTDRADARLLRTLLLEGRFPESWIPPAHVVEIRTLGRLYCALMHERRIWQQRIHAQLFHQGCPPIRALLSQAGRKTLATAELSAAGRQYVDTALRRIDELSAEIEPLRAQLVSFARRQVGCQALQRHYGVGWLCAVIIWAEIGDARRFASSDQLVRFAGLDVTVYSSDTKRSPGHLSRQGSPELRWAAFEAAKSAARRGSPDHGYYHKLAAKRDGHNGKNPTLAVERKILRRCYHSLRELGDAVLALPVAERTHTAAA

SEQ ID NO: 344623 - protein, 452 aa, unidentified
MKENEIAMEIVNPHAAGVDIGSRSHWAAVGQKNEDVQEFGVFNEDLKRMALWFKEKNIKTIAMESTGTYWQSLYAVLLSEEFEVILCNGKFTKNIKGKKNDIKDCQWIQKLHSLGLLSGSFLPDKQTEKLRTYCRQRALLLDSAASASKKMQKYLRLLNLRLDVVVNDICGQTGLAIIKAICDGENDPQKLASLRHYNCRKSETEIAKALESNGREDYLFALRQELEMYEMFQSKIEQCDQEIGKLLDQIVDGDDHKRQHHIESKPYKKINKNTPKNIDLNLKSYQYFEGVDLMAIEGMSYSTVLAIMSEVGLEGIRRFKSAKHFASWLRLAPNNKISGGKILSSKVPKGSNRLKIALRNAANAIGNLKESTPLRDFFQRINFRKGRVSAISATARKLAVIIYNMVAHNKPYYNPKEYLYLDQKRKLGLVKRIQKQITRFELSEDNFEFVTT

SEQ ID NO: 344624 - protein, 415 aa, unidentified
MSGKREIACGVDVHNRFIVATILSSDGLKLQDRFETNLEELLRFKDWLKDNGCRKVALESTGNYWLPIYHVLEGSVNFILANAYQIKHIPGRKTDALDSEWIAEICLKNLISPSRIFCRNHRELRSLTRTRESLMKVRTKIKNRVTHELEAACIKLSSVLSDVFGKSGRHIVDGLLNGMDLEEILETIPSSKVKAIKKEIRGTIQSSLSALQIFLIQSHLDMIDAITKQIVEIDAKISDQISSRNEDMRIALSMPGMGVVSASTILAEVGDFRDFSSPEKLAAYCGLVPSVYQSAGKQINGHITKHGSPHIRSMIIEVAHAIIRTKRNSRLKKFFLRVKARRGMKIGVVALARKVLCILYHLLISQETYQDDLLSKPRSVRYSNVQSTSMSLDEMIKTIIKAGYEVKKNGYLESG

SEQ ID NO: 344625 - protein, 370 aa, unidentified
MLDTTTFVGLDVHARSIKAVSLDVMTGEVRAATFGYDAGAVAEWVRSVDPGARCVYESGVTGFDLQKRLSGLGVDCVVGAVSKMIKPSADRRRKNDRNDAEFLARMLSVGNVVEVWVPDDECEAARDLTRALEDARDDLSRSKQRLSKFLLRHGLVFDERTPTGRRKGNWTRAHWSWIESIRFAEGADNEALAYYVDAVRRAAEEKARLEGLVEAEARKPRWRKRVDSLRCLKGVDTATAADLVFEAGEFSRFGNARSFAAWVGLTPSEHSSGESDRRGAITKAGNKHLRKTLVEAARHYLTCSGRPKDLARGQAPDRGARRHAAKGVRRLVERREALLARGVHNNKANVATARELACWVWAVGLMAEEA

SEQ ID NO: 344626 - protein, 368 aa, unidentified
MSNYVTAIGLDVHARSIKACALNPMTGEVERASFGYDPASVAEWALGFESPKAVYESGVTGFHLCRALRALGLDRAVGAVSKMQRPAADRGRKTDRRDAEFLARLLATRNVVEVWVPDERTEAARDLSRALADARGDLQRAKQRMSKFLLRHGHVFDEPTPTGGRRGNWTRGYWRWADAIEFVEPDDAAAYEHYRDCVRRCEEARDALARRVAESAGRPEWKPAVDALRCVKGVDVATAFLLACEMGDPARFPSAPSFASWCGLAPSEHSSGETSSRGGITRAGNAHVRRALVESAWHVPMSSRDPKPLAPGQEVAPAVRRHATKCNRRLIERREAMAAAGKRPCVANCATAREMACWVWAIARMAAS

SEQ ID NO: 344627 - protein, 416 aa, unidentified
MKGPGKSRETQDRYIALDIHKEYVLAGGQNAAQEWVMQPRRISMERFQEWAIANLREGDAVVLETTTNVWDLYVIIAPLASRTVVAHAGGVRQIAEARVKTDKEDVKRLIRLLIADIVPEVWVPPVEVRELRGIISYRNRLVKTSTMIRNRLQSLLHRHNLMLPKGGLTDQVWWASQKISALERMQIRQELAMLEGIDQHKAEVDAELGRQSLGETWGKQAVRLLQLPGFGVVISMTVLSAIGDITRFESAKKLVGYAGLGAGVHDSGKEHIEKRITKSGRKELRWALVEAAWRAIRISPYWKEQYEKYLHHMRKPNLAIVAIARKLLIAVWQVMTKEETDIHASEEDLAYKMLVLAWDLGENERMGLTYKQFAKYALMKLGIETDITRFVRRNVPRRLAPREEVLARMEELGLTC

SEQ ID NO: 344628 - protein, 331 aa, unidentified
MTKMTLGIDVSKAKLDAALWLDSRKWYATQAGNDADGARKLLKWACAKSGGMSSDCRVVLEATGVYHETAAQGFHDAGCEVVIANPKRVRDYAKGKGFLTKTDAVDARMLASYGAQGDELLAWMPPAAEVRILRALVARLDAIEQDVQREENRLEKAQATDTPLAVRDSLHRSLTALRAERDRLRQDIDDHYNQHPGLKQERERLKTIPGVGNASASRMLCLLKRHRFDSARQAAACAGLIPVEYESGTSVRKRPRLSKQGDPKVRATLYMAAMVASRHNPQLKTVYEGLIKRGKSKMSALGALMRRLVHIAFGMLKHQTDYNPAFVSKMS

SEQ ID NO: 344629 - protein, 401 aa, unidentified
MKEFNAEQHRVESASALAVVSNAGGAERYAAYVGLDVHKETIAVAVAEPGRAEPVYRGEIANRPKRGEKMLAKLSETYDGGLLAFCYEAGPCGYVLHRQILASGHDCQVVAPSRIPKAPGERLKTDRRDALKLARLLRSGDLKAVWVPDTDQEMMRDLSRARDDMKGQERKARQQLNAFVLRHGHHWPRGKSRWSQAHYHWLESLRFEQPWQQVTLQEYIDAAKAASERVAQLNAHLMRALPEWSLAPVVDSLIALRGVDKLAAIVLLAELGDISRFDSPRELMAFLGLVPSEHSSGARRRQGGITRTGNAHARRMLVESAWSYRFPARQTMHLKRKAVKASASAKQIAWAAQKRLCGRYRTLTRAGKNIKVVCVAIARELAGFIWDIVRQEMPRLAPQAT

SEQ ID NO: 344630 - protein, 310 aa, unidentified
MSHQSRYLGIDVSKDTLVVAFERNRWQFSNSKEGHRKLIARIQKQSAPIHVICEATGPYHLLVCLALQAAGVPVTIADAARIHYYGRSEGIVAKNDPIDAALIEAFGNAKRPPANPPLCKEQIALSELLNHRRQLVDSAKMLRTHSKQVLDATVKKDIERSLRALEKRIEALEKKLCAKVEAVPAWKQKFERLQSVKGIGPITALVLLIKMPELGTLNRGQCAALAGLAPYDNDSGTARGKRRIQGGRSEIRGALYMAAVSAAHFNPVSKVSYQRLLAAKKPFKVAITAVMRKLLIYLNALLKTPESVPA

SEQ ID NO: 344631 - protein, 450 aa, unidentified
MTDEPAEMISRAAAIDVAKGSGMVCTRVPHEASPHRRIQRVWQVSARYADVVALMDELVSAGIQRLVIESTSDYWRIWYYLAEAAGLHVWLVNARDAKHLPGRPETGKLDCVWLCKLNERGMLRRSFVPPEAIRDLRALTRLRSRLAADSARHQNRIEKILEDALLKISAVISDLMGQSGRRFLAALVAGQRDPKTLAALGDRRLKASTAQLEAALTGRFRDIHALEIGMLLELIDGLTAQITRLDEKVTAALAAIPGIAPACTGCGEIGGTHAPGCAGAGNPVLSVIERLDEITGIAVDGAQILIAELGTDMTVFPTPGHAAAWAKLTSRTIQSGATSRNGRTGKGNPYLRAVLGRAAMAAAKTGSYLGERYRRIARRRGKQKAIVAVGRTMCEIACMIIADPSVRFCELGPDYYARLDAGRQTRNRIRDLERLNPGMKVTLTPATQAA

SEQ ID NO: 344632 - protein, 342 aa, unidentified
MKYIGLDCHKKYDHATMIDTATGEVKAKRLTHLKEDFAEFIGERSDTRLVMESCWNWCKTYELVKDLVEEVTLAHPLKVRAIASAKIKTDAIDSRTLAELLMADLVPQAHLRKAENRIKQRVIRHRAFLIVMRTRLKCRIHDLVDSQLLSRDVIQAKPVNIFSKKGMKWLCSLEFTTEEERNMSDSYLRLLEVINQEIASSNEMIEEIYDKDKDAQLLATIPGIGVTLATLISTEIDGIDRFRSPSKLCSYAGLVPSTHSSGGKTYHGRITSEGNRWLRWGLIEAAVPASYGDAEIRRQLDDLRKIKSGNVAKTIMARRLLKIVYHVLKERRAYVTDYPSRL

SEQ ID NO: 344633 - protein, 377 aa, unidentified
MDKDSRFVGLDVHAETIAVGVAEPGGEVRSLGTIPNTPEAVRRLVKKLGPPETLRVCYEAGPTGYVLYRQLSALGVPCAVIAPTLVPVKAGDRVKTDRRDAEKLARSYRSGDLTPVWVPDPGHEALRDLVRAREAAKKDQLRARHRLGKFLLRQGRRAPTGIKAWGVKHRAWLQTIRFAHAAQDATLLDYRTEIDHAADRIARLERAIATAADLTPAPVRAVIAGLQALRGIAKLSAVSVVTEVGALSRFAKPRQLMGYSGAVASEHSSGPHRRRGGITKTGNAHLRRIVIEAAWAYRHRPAIGGTLRTRQAGLSEEVKALAWKAQHRLHGRYARLIAKGKAPTQVVTAIGRELLGFIWAIGVHVEQHAAGSAPAGA

SEQ ID NO: 344634 - protein, 400 aa, unidentified
MLSIGIDVSKGKSTVCGMKPGGEIVYTPFEVQHTREGMSELVSLLRSSGEEVRAVLESTGSYHCPVVAALLENGIFVSVVNSLRMKRFCSQSIRKVKTDRIDAMQIALYGLAYWQELQPARLPEDTYRELQLLARQYYQMTSMLIKAKVDFNAICDQVLPGMQELMNDHAGRHKLSDFVLRYRHTTHILEMGETRFRKDYCKWAEKKGYRNCERMAALIFATAQNGIPVLPNAPSTQIVITEAIRVLHTVEASRDAILTQMQALAKTLPEYSLVREMPCIGDTLAPRLIAEIGDVRRFHSKRALIAYAGIDAPPYQSGKFCANNRHISKRGNRYLRKTGYEVMQSYVMHKPANDPIFTFIEKKRSEGKSGKLAMVAGLNKFLRVYYGKVTELYRSLPAIE

SEQ ID NO: 344635 - protein, 352 aa, unidentified
MQHFIGCDVHTRNQVVAWIEEETGEIKKRRLEHEGKEVKEFYAQFPRGTVVGIEATFPAYWFERLMGELGHELWVGDASRIRACDVRYQKTDSRDAELLLDLLRTGRFPRIWVPSLAERDLRQLLVHRMKQVRVRTQVKNQLHALAISQGVCRKGKLWSAKGRKELESLALLPWAARRRKELLGSLDRLDEQVRELDRAVEEAGRARLEVARLRTHPGVGMVVALAFVLTLGPVERFSNSRKLVSYLGLNPRENSSGGRQRLGSISKQGNTMMRWLLVEAAQTAARLDPQLRRLYQRLKKQKTSAVAKVAVARRLAVRLFWMLRTRHNYTQLVHMSGSPSSAVVPPQGGPNL

SEQ ID NO: 344636 - protein, 361 aa, unidentified
MAQAMTLVGLDVHARQTHAAVLDLGSGEIAARRLVGAPEVVVAFLEDLRRPVVAVYEAGPTGFGLARAATERGIDVRVIAPGSIPKGPGDRVKTDRRDAIRLVRLLAAGELRFAFIPTVADETFRDLIRCIEDLRGDLMRARHRLSKFLLRRGYRYEEGQAWTPKHGRWLRQLSFEEIAQATFADYCASVELLVGRRATLIATLEQTVPGSSHATTIGRLRCFRGVDTLTAAGLCAETGTFKRFPRPTMLSGFLGIVPSERTSDLKRRQGSITKAGSPHARRLLVEAAQHYRKQPSIGQTLARRQAGQDPRVIEIAWRAQRRLHQRWAHLHYERRKPAGVVAIAVARELAAFLWEAATFDA

SEQ ID NO: 344637 - protein, 397 aa, unidentified
MFYCGIDIAKHKHEASVIDSDGKALIDSISFSNTKDGCEKITDIFEKLGASVSDVVIGMEATGHYWLSVYTFFVELGFSVKVINPIQSEAFRKMYIRQTKNDSVDSFIIAQIMRFGEYSSSGLAEENIIALRQLSRYRLALVDACGDCKRRVIALLDQVFPEYDSLFSDTFGKTSEEILLSCPTPEELLEVSTRKLTNILSKASHGRFGKEKANELKAAAKGTFGVAFAKDAFSFQIKQLMEQIVFLEHQLSELVEQIANLLHDTNQYITTISGIGETIGAIIVSEIGDINRFERPNQLVAYAGLDVTVKQSGEFSGTKNRISKRGSPYLRRAIWLAAQRATFCDPVLSEYYQSLRARGKHHLTAVGGVARKMCNIIFVILKENRPYQPLPPKHFKN

SEQ ID NO: 344638 - protein, 323 aa, unidentified
MNKDMNYFGIDISKDVFDVTDSKGSHFQFKNTLKGFKEFLRLLDNRSHCVMEATGYYHYQLAYFLRDNDINVSVENPLSVKRFIQMKLSKIKTDKSDSKLICEYAQQVDLKLWEGHSRHQIECLQITRLLSVYTKQSTMLKNKVHGEEVLGNPSLFVVRSLKRSLKATQKEMAILEERLLKLVKQTHQDLLTRLETIPGIGRKTAIMLIVLTDGFKRFTSASELCSYSGLTPLIRQSGSSVNARARISKIGNKKLRNLLFMCSFNACKYNKACRELYERIVAKGKSKKLALIAVCNKLLKQAFAIAKSGLIYDETYRSTLVKN

SEQ ID NO: 344639 - protein, 343 aa, unidentified
MQNDTRIAVDVAKAVFEIAVSDRPGRVSRRERLPRTQFLAFFAQQPAATVVMEACGSAHYWGRRIEALGHRVTLLPPHQVRPYIRRNKTDRTDAKGILEASRNEDIRSVPVRTVAQQVLTSLHRLRSGWMAERTARLNALRGLLRKLGVFIPVGAHQVVPAVWALLEDADSDLPEALRPLFAEACHEIRDIEARVKQVERQLEAIAEQLLAVEHLRTIPGIGLLTATALVAFIGNIHRFPSGRHLASWLGLTPREYSSGLKRYLGRISKRGDGYLRTLLIHGARSVLLHARQQQPDQLREWAHKLGETHVHNKAAVAVANKLARIVWAVWSRQQPFAQAPRAV

SEQ ID NO: 344640 - protein, 518 aa, unidentified
MAKSKRQHIQKVKGRRFTDEIRNLNLEKVLVIPIECGKNSHKALVANYFGDILYDSFEFANSNTGVKMLDSIIQDISSSVNAQKIVVGIESTGHYYENLYRNLITLSYDVAIVNPSSVYSQRTGQLNWCKTDEIDLCAIGQVLIDNQATETKLSDGLYYNLKHLARLRRDEVNKRARLKIQIKVLCDHIFPGLQKAEVFSDFWGKASVLLLENYPTPASIISLGVNRLARFFKKHNTKLGLTTAQRLVNLAKNSLTTDASNIYAHLFNLKFKIQDLKMADEKIRKLNIELASCLIKTPGLLLLSIRKINVPSAAEFIAEVGPLSQAGNAKKIISRAGLNPSRFQTAEYERTDNPITKHGSNHLRNISLTIAHNLVGDDPHLVNQPANPYFRNFFDHLVIEEGKDKRVAKVACANKFIRVACAMMIQKMLFCPPTWKQDLVADDPLIKLSKFLQDNDAKDMFDDIVHIAKEQLPDDYGSYVKQKESDIDSLVSSLTNDTERDPDNFLGPMPLEFVEVKG

SEQ ID NO: 344641 - protein, 333 aa, unidentified
MKFTIVGVDIAKSVMQLYYIDAETGEIVNKPVKRVAFLEHFANRSPCLIGMEACGGSQHWARKLTAMGHQVKLMPGKFVKAFVMGNKNDAADARAIWMAVQQPGKSVAVKTETQQAVLGLHRMREQLVKFRTTQTNSLRGLLTEYGEVMGKGRTALDKAIPGVLERLVDRLPTILINTLREQWNGLVELDKQIAQIERRLQTWMKEDKACKTIAAIPGVGLLTATAAVATMGAAKTFRSGREFAAWIGLVPAQTGSGGKVQLLGISRRGYTYLRTLLIHGARSVLFHPKEPSLFDKCVRNVHVRQCALRPAISLFQNRRRRTSEGTGTGKYTR

SEQ ID NO: 344642 - protein, 348 aa, unidentified
MNAVHYIGFDVHKKTISFCVKTAAGEIVEEGSLLAQRAVLRRWAAARPQPWRGALEATLFSNWIYDTLQPYGGQLEMAHPAKMKAISAGKKKSDTIDARTIADLVRCNLLPACYVAAPQIRELRRLLRYRSLVVSEAVRMKNKMAGLLMETGALYVKEKLHRKKYFASLLEELEEVPESVVDLLRLSRGALEMFESTQKRLVRELLAYPELAEGVERLMTIPAVGEITALTWALEVGDPQRFHSSSDAMSYCGLTAALKSSAGKQQRGPISKQRNRWLQTTLIEAAKLAPRWNPQLAALHARELERGHRNRATLAVARKLVAYLLAVDKSGQPFQVRAPSEVPTQKAA

SEQ ID NO: 344643 - protein, 429 aa, unidentified
MTRISVGVDVSKNRSTVCIMDQDGKFIMRPFLVWHSTEELDFLADTLKRLNGEVRVIMESTSVYQYPIALQLKERGLFISIVNAYEMKQFANIDFRGGKTDKKDSRTIASYGISYWDKLVEWQIPKDTYFNLDLLNRTYMNAKKHRQIILQELQHYIDCAMPGMDKELHSLNLSTKKDFMLDFVEKFWHRDEIVNMTEAEFTEVFTAWAKKKGYRPVEGKAAKIYAIAKSCIPYYPANPTVKTILQCIVDKLSGVNRTLVTIVTQMIEEAKKLPEYQIVREMPGVGDPLAARFFGSAGDIRRFKNSKALVAYAGIDSPPDESGDFSSTHRHITKKGSKVFRDTGYEIMMALRAQKRTWEKVRKNPEVYDYMLKKEAEGKPRKVAKIAALNKFLRIVYARIKELYDNMALAERAKAKTRSKTKAKTKATA

SEQ ID NO: 344644 - protein, 380 aa, unidentified
MPDVSSTAPAQARMWVAIDQHKLSLVAAALPASGGQPEVMRVENTERAIRRFVQRLGGAEGLAVAYEAGPGGYELHRLLSSMGVACDVIAPSLIPVRAGDRVKTDRRDAKKLVRLFRAGELSFVAPPSPMQEGLRDMVRCRDDLRCARTAARHRVAKALMRHGHIYRQGKAWTLRHRAWVESQRLADPLAHTALEHMLTHLGGLDTQIAAIDQQLEQIATREPWADPVAWLCSFRGISTHTALGLLSEIGDFRRFAHPRELMSYLGLTPSEYSSGQQQHRGHITKTGNRHARRLLVEAAWHYRHRPRQSTRAARLSEHVPTEVTIRAWQAQIRLHHRHRVLAEHGKRSTVANVAVARELTGFIWAAMTKAPLREQEAAAA

SEQ ID NO: 344645 - protein, 340 aa, unidentified
MRNVKTIGLDIAKNVFQVHGVDCDGVAVVRQRLSRGRMLKFFAKLPPCLVGIEACASSHYWARELVALGHDVKLMPAQYVKPYVKRGKNDAADAEAICEAVTRPTMRFVGIKTPEQQSAMMLHRVRLILNRQRTQLSNALRAHLAEFGVVAPIGRNGIEQLLDVIADPADERVPTNARVCLEMLATQLRMVKEQILENDRRILASARETEIGRRLMEIPGVGPLLASAIVATVPDPAIFRSGRNLAAWIGLVPRQNSSGGKERLGGITKAGHQYLRQMLIVGAMAVVRYAERNGAKRPWLVQLLARRKPKVAAVALANKNARMIWAVMTSGERYREPQIA

SEQ ID NO: 344646 - protein, 429 aa, unidentified
MSEEKSLELRVSVDVGYRRHSVAMGLSSGEVLEEFEIDHRIEGFQEFFSRIEKQRKKKNCAVAVAMEGYNGYARPLDSMVRQRGYRLYNINNLKLARFKEIFPGSAKSDRIDARKGLELFQLSDHLPLAKEVLQEVTGTPPENEVLKRLTRRRRRLVNERVRVVNSLQADLQAVCPGLLEITGEASNQWFLNFLLSADTLPQLARLRRSTLLKIASVGVKCAAIIEGWQKRAHFSQEVEWVGEMIQEDARRCLELDEKIKRLQAKIAEIAKGSKIAKILRSIPGFGAVCTSELAGEIGTIERFACEASLSLYLGMSTLDNSSGKYQGTKAPKHVNTRAKAAMMIALDRHRKYVAQSQRYYEKKRSEGKKHNQAVRALGRHLSRIIYKMLTEEREYQIRPEKGNAKAKVSPRSSIKTQIRRPKILSRKTK

SEQ ID NO: 344647 - protein, 355 aa, unidentified
MTVTIVEETRPATCRTAITGGVDTHADTHVAAALDPVGGLLGVREFPATAAGYARLLGWLGGFGTVCLVGIEGTGSYGAGPARYVTAAGIRVVEVDRSDRQDRRRQGKSDPLDAVSAARAAQSGRARGAPKGRDGAVEAIRTLMVARRSAAGERTRTINQARALVLTGPDDLRTRFARHTPAALITGLAALRPRTGDVTGHATRIALRELGRRAQFLDGQLERLDELIVPLVTARAPGLLAVYGVGPRTAALLLIAAGDHPGRLRSEAAWAHLCGAAPIPASSGKVTRHRLNPGGDRQANHALWRIVFTRLGSDPATRAYAERRTAEGKSKAEIIRCLKRYVAREVYPHLRPAGG

SEQ ID NO: 344648 - protein, 377 aa, unidentified
MIRRACCSRLDGRDRADDACAHPGLTRHMGQHDSPANLRGDRVYAPYALDQLGRRLGEIELATTRAGYQRLLAWAERLGAVEAFGIEGTGCYGAGLARHLRARKVCVIEVMRPNRQTRRRKGKSDPTDAEAAARAVLSAEAAGSPKAGDDLVEMIRVLRVARSTAIKARTQAINALRSLLVTAPPELRDELRALSTSRLVTKAAQVRPGERLNTLAASKLALRHLARRCQALQAETQSLDAQLAQLTATASPHLGEAFGIGADTAGALLVAAGDNPERLRSEAAFSMLCGSSPIPASSGQTRRHRLNRGGNRQANAALYRIVLVRMRHHQPTKDYVQRRTNEGKSKREIIRCLKRYVAREVYTALKRSSDEKRARAA

SEQ ID NO: 344649 - protein, 397 aa, unidentified
MYIVGIDIAKRKHEAAVIDGEGAVIIKPFSFTNNCSGYNRLLAMLAKAKLPLDEVSFAMEATGHYWLALFTRLQKEGFRVQVINPVQTNSIRSFYIRQAKTDPRDALLIAEVIRFGHFSESTLHPENIYELRELCRGRHAIVSMQADVKRKVVALLDQVFPEYETAFTNLFGDTSMAILQACPTPKELSEMPLEELCYLIEVSSHKRFRMAKAQELQELARNSFGFAMAGDVFSTMIRLYAKHLDFLKQQVREMDRKIAEIMDTLDTPITTITGIGPTLGAYILSEIGDINRFSSSAKLAAYAGIDPTMRQSGEYNGVRNRMSKRGSPYLRHAIWLATSSAVLHDPALKLYFQKKRDEGKPYMASVGHACRKMVSIIYAVMRGNKAYTPCIPNEISA

SEQ ID NO: 344650 - protein, 359 aa, unidentified
MATVAHLYPFIIGVDTHARTHTYAVTAANGEQLGIEAFPNTSPGRKRAILWVARRTQGDADTLWVIEGVGSYGALLAGTVSRAGYRVVEAPRSYAPARRGAGKSDPLDAAAIAASALPLEESNLRNPRQDDGIRAALRVLVAAREQMTLERTAKVNALTALLRTVDLGVDARRPLTDAQIAASALWRQRGEELALATARCEAIRLAKRITALDGELKENQERTTELIEASPAAPLLEVTGVGPVTAAVVYTAWSHLGRVRSEAAFAALAGVCPIPASSGNTVRHRLNRGGDRRLNSALHMATIVRTIHDPKTREYAERRKAEGKTPKEIRRILKRYLSRRLYRLLNALHAPDNTTTIAA

SEQ ID NO: 344651 - protein, 462 aa, unidentified
MKRKAKSQATHSGLAVVNPNAAAIDIGATMHVAAVGADRASDPVRSFGTFTADLHRLADWFAECGVKTVVMESTSVYWIPIFELLDERGFEVILVNARDAKHVPGRKTDVSDAQWLQRLHSYGLLRASFRPKGEIVELRAYLRQRERLLDTAASHIQHMQKAMTEMNLQLHHVVSDITGATGMRIIRAIIAGERDPAVLASMRDTRCHSSAEVIEKALTGHYRGEHLFVLEQALALYDVYQQKVAACDIRIESVLKELSSIRGRKEDARADGSGSPRRRSRQSNGPNFDVGKALHSLLGKDLTRIHGMGPYLALKLVSECGDDLSAWPSAKHFTSWLCLAPSNKISGGKVLSSRTRRSGSRAASLLRLAAVTIGRTDTALGAFYRRLSARAGKSKAVTATARKIATLFYNALRHGMDYVDPGASYYETRYRERVVKNLHRRAKAFGFILQAAEMPAAEQAVS

SEQ ID NO: 344652 - protein, 316 aa, unidentified
MAKDYVGIDIAKEKYDIAYLSGEGEIKRDVSRNDIEAHTALVTQLRDQDTHVILEATGTYHQKLEKALQDAGIIVTVINPRQALAYAKSRNRRNKTDKVDALLLAEFGRERQPEARASLTSLTKGIARELEALEEDLSRLKNRLEAANSGVSHPKVIASLKRRRKQLEQEKENLKKQLQDDVKAEQIQEFKLLQSIPGIGMHTASLLLAELGDPLRFNSSRSLVAFAGLTPMLHESGKGSRHTAISRMGSSHLRRWLYMPALAAIRMDTPLKAFYQRLVNKGKAKKVAIVAVMAKLLKLVYGVLKHNKPFDPHYNT

SEQ ID NO: 344653 - protein, 331 aa, unidentified
MKIKEVVGLDVSKSKIDVIIHSNQHYFQIDNKLRGFKSLVKQVAKSSLFNAENIVFILEYSGLYSDQIRMFFHNQNIPHVVVPGLAIKRSLGITRGKDDKIDARKIALYGYRLREELKLSTMPAENIIAIKKLLGLRSRLVKQRAGYIASLKELKGRCVRKDNELLFSTQESMIRDLTKHINKVEAEIQQIVKADEKLNNMYQLLLSIKGVGKQTAWHMIVTTEGFTKFENARQFASYCGIAPFPNRSGSSIYGKTKVSNLAYKKIKVLLDLCAKSAIQFDNELRLFYHKRVEAGKNKKSTINIIRNKLLTRMFAVIKRNTPYVDIFKYAA

SEQ ID NO: 344654 - protein, 312 aa, unidentified
MHGLFLGVDVAKDKVDVHVRPSGERLTVGTDETGLGELVTWVRERAPALVVLEATGGYEVVVAATLGSAGLPVAVVNPRQIRDFARATGQLAKTDALDAAAIARFAEAVQPPGRPLATAAAQALGAVVARRRQLLDMLGAERNRQAQTRDPQLHRQIGAHVKWLTKALADIDRELHDTIRATPLWREQDALLKSVPAVGPVTAHTLIAEVPELGQLGRRQIAALIGVAPLNRDSGTLRGRRMIGGGRASVRRVLYMTALVAVRYNPVIAAFYARLTAAGRPKKVALVAAMRKLLTILNAILREKRPWQPDIA

SEQ ID NO: 344655 - protein, 338 aa, unidentified
MRTYAGIDLHSSNNYIGIMDQDYKRLFGRRQPNDLNNVLKVLEPFKADLEGVIVESTYNWYWLVDGLQEHGYRVHLANPSAIKQYEGIKHTDDKWDSFWLAHMKHLNILPEGYIYPKEQRPVRDLLRRRLFFVRHRTANILSLQSTITRNLGIKISGNDIKKLNLDDAGNLFDSSNLVFMAQNNISTIKHLGKIIKGIEKEVKSQVKFRKEFVMLTTIPGIGIILGLTIMLEVGDIGRFSKVGNYSSYCRCVSSKRLSNGKKKGENNKKNGNKYLAWAYVEAAHFAKRYIPKAQRFYQQKMAKANGAVATKALANKLARASYFIMRDQVPFDEDMLFR

SEQ ID NO: 344656 - protein, 356 aa, unidentified
MSREVKYIGLDVHKEAIVIAVINSSSHLVMESIVETKASSILQFIHGLRGELHVTWEEGTWAAWLYDLLKPHVQQVLVCDPRRNALLKEGNKCDKVDARKLADLLRTGMLRPVYHGENGLRTLRELGRSYQTISKDLNRVMNRVKALYRGWGIPCSGTQVYAPRYREEWLQKIEQVGVRRRAELLYQQLDGLQALRRTLRPELLAESRKHRAAKLLRQIPCIGPIRAARLIALMQTPHRFRSKRQLWTYSGLGIETHDSAQYRFVGGQLQRAKKPQQVRGLNQNHNHEMKEIFKGAATRASCGVGPLRDFYVGLLDKGMKPEMARLTLARKIAAIALTLWKTEARFHAKELKPQDA

SEQ ID NO: 344657 - protein, 350 aa, unidentified
MTTIARTITGGVDTHLDVHVAAALDERGALLGTESFATTPRGYEALLAWLQSFGTLELIGVEGTGSYGAGLTRHLHRRGVAVVEVDRPNRQKRRRQGKSDTLDAVSAARAAQGGDANGSAKTRTGNVEAMRVLRVARSSARRSRTQAINQMRSLISTAPDELRAELRDLSIYKVLELASAYRHTGRTDVTGVTKLTLRMLARRALALEGEVKEIDRILKTLVAETAPELRAIDGVGTDVASALLVAAGDNPERLKNEATFAKLCGVSPLDASSGKQERHRLNRGGDRQANSALWHIVFTRMVNDPRTKHYIERRMKDGRTKKEAIRCLKRYVAREVFAALPRSELALDNP

SEQ ID NO: 344658 - protein, 355 aa, unidentified
MAGIDLHSNNLMIGIVDQDGRRVKHQKIGCDLKQVESFLKPFKAQLKNIAVESTYNWYWLVDGLRALNYPVVLANPAKIDQYSGIKHADDKNDAFFLAELLRLNILPTGHIYDPVLRPVRDLLRRRLSLVHQRTALILSFKSLFVRTTGQTLSLGRLKGMTQDEAVALYEHPANQLIAKVQKEHIEQLGQSVERIEKAVLQSARKLPYYDKLNTLPGVGKILGMTITLEVGDIRRFKDAGNFASYCRAVDSRRTSNDKCKGQNNRKCGDKYLSWAFVEAANFARRFDERCRRWFDRKAARTSKVIATKALACKLSKAAWHVMAHNVDYDEKRVFPQSIGTAVASQRKGLAKNPAD

SEQ ID NO: 344659 - protein, 359 aa, unidentified
MPAAANAKSAKSNSGIAVIGIDIGKNAFHLIGLDSRGAIVLKCKLSRAQLQNRLANIPPCLIGMEACAGAHHLSRRLIALGHDARLMPAKYVKPYRKGHKNDYRDAEANAEAVQRPTMRFVATKTVEQLDLQALHRVRSRLVRERTAAVNEIRAFLLDRGIAVAQGIQRLRKALPDILAQHTDLLLPRIIRIIEALAADWRRLDERIEEIAYEIEDLAQKDAPCKRLMTIPGVGPLISSATVATIGGGDMFAKGRDFGAWLGMVPKQLSTGGRTILGRISKRGNSYLRTLFVQAARVVLIKRTSWERYGLKPWIEAAARRLHPNKLAIALANKLARIAWAVLRHGRDFEVRHADAPQHA

SEQ ID NO: 344660 - protein, 371 aa, unidentified
MKKSSMFIGLDVHKDSIEIAIAEAGCDGEVRSYGGIDGTLDALDKVIRKLVSKGCNLHFVYEAGPCGYDVYRHLTAQGFDCVVVAPSKIPRQSGNRIKNDRRDAQMLARLHRAGELTAVYVPFVEDEAMRDLTRAREDAKAVEKKAKQRILAFLLRHGHRYSGKSSWSRAHFRWISILKMPHPAQQIVLQESLDALAECTRRVDRLTEQIQTLSPQWRLFPVTQALQSMRGVSLIVATTTIAEIGDLTRFGRPAELMSYLGLVPSEHSSGQKTRRGSITKTGNGHVRRVLVEAAWAYRLPARVSRKLLIRQEGLSQEVCAISWKAQLRLCARYKRFTANGKSHQLVVTAIARELCAFMWAIAHEVQGPVKM

SEQ ID NO: 344661 - protein, 325 aa, unidentified
MQTETNYTGIDISKSFFDVAILNEGKYRHYKFGNDEAGFKALLKVLHPGVHIVMEASGPYYLRLACFLAMHQIAVSVINPLVIRRFSQMRMSRTKTDKKDAVMIAEYGKTERPATWKAPEQHVIWLQQREAVLSNLMKERTALLNQLESFTCSGMLDKALNKILTKALGYKEILIAQLNKEMEALASKHYAEMLKNLESIPGMGKKTAMGLIVLSGGFDRFDDYRKLSSYIGICPRLFESGTSVKGKARICKMGMSRIRAMLYICAWSAKRCNKACKELYERLVAKGKAKKLALIAVANKLLKQAFAIATQKTKYNENYSNITCF

SEQ ID NO: 344662 - protein, 344 aa, unidentified
MQMVTTIGLDIAKSVFQVHGVDAAGQVVIRRQLKRRYVLTFFEKLPPCLVGIEACASSHHWSRELQSSLGHTVRLMPPAYVKPYVKRQKNDTTDAEAICEAVMRPNMRFVPTKTIEQQSCLMLHRARHLFIRQQTAVINSIRAYLAEFGIVAPVGRRGVEQLLEVVADVADRRLPEIARVCLAALGSQLRRLKAQILEFDRRIMAWHRSNATSKLLDAIPGVGPALATALVASIADPKAFRSARDFSAWVGLVPTQNSSGGKDKLGSISKQGDRYLRSLFTAGALAVIRYAKIHGTRHRPWLTALLARRPTKVAAIALANKLARMAWAMMARNERSKEPAALTA

SEQ ID NO: 344663 - protein, 315 aa, unidentified
MDTSKHIFQLHGVNIAEEPVLRKKLRRTEMVVFFEKLPPTVIAIEACGGSHHWARLLQSFGHQVKLIAPQFVKPYVKRGKNDAADAEALCEAMSRPAMRFVPVKTPDNQAALMLVGLRDRLIRNRVQLANAIRGYAAEFGLTAAKGVCKIEPLLDRAAADKTLPALARELFAFHAAEYAQLQEQLEKVEAKLVAWHRADECSRRLAQIPGVGPIGASMLVMKTPTPEAFRSARHFAAWLGLTPKDHSTAGKVRHGVITRAGDEALRSVLVVGATAVIRQIRYGRGALSPWLLDLLKRKPPKLAAVALANKIARIA

SEQ ID NO: 344664 - protein, 455 aa, unidentified
MPKRKRIRNARTSPVPRILEPDAAGIDIAATEVYVAVPTDRDPEPIRCFSTFTDDLHRLADWLRACNVQSVAMESTGVFWIPLFQILEDRGFRVCLVNARHVKNVPGRKTDVSDCQWLQYLHSVGLLRASHRPAQTICAVRSIWRHRESLVQMAAAHIQHMQKALDQMNLQLHHVISDISGTTGLAIIDAILDGERNPETLAALRDPRIVASRKTIARALVGDYRTEHLFTLQQSLRAYRQYQQWIAACDVEIERQLRVLPNNLADDQKPLSKSKDHHKPRRNEPSFDLRSQLYRIFGVDLTEVPGVSSLTAHALLTEVGPDLRRFPNAAAFASWLGLCPDNRISGGRVLSVVTRKVKNRLTMALRMAAQSLHRSQSHLGQYFRRMRVRLGTPAAITAAAHKLARILYHLITTRQPYQESTFAAMEERSRHRQLLRLKKQAASFGFQLVPGSSVP

SEQ ID NO: 344665 - protein, 465 aa, unidentified
MRSKTRKSQKQKKKIVIDPAWELINPDAAGIDIGSREHWACVPARSAEKNVRSFGTFTADLEALAAWFQQCGVKTVAMEATGVYWIPVFQILERRGFQVVLVNARQTKNVAGRKSDVQDCQWIQRLHTYGLLQGSFRPKDPYCVVRTYLRYRDELVGARTTQCQHLQKALQQMNVPLHHVLSDVTGVSGLTIIEAILNGQRDPVKLAAMVDRRVRASQGVIQKALVGDYRPEHLFVLKCAFELYHTYEAKINACDEQIVLEVAKLPDQVDVKVKPLPARKEGRRCCDDQMLHQDMRAVLYPKLGVDLTAIEGIGVLTSLVILTEVGPDLSLFHSEKHFASWLGLCPDQRISGGKVLSSRTRRVINRVSDALRMGAVSLERSQSALGAFYRRMKAKLGAAEAVTATAHKLARLIYRLLKHGEAYVRQGMENYENQYQNRKLSALKKSATAMGFELVAKQPITEGVS

SEQ ID NO: 344666 - protein, 354 aa, unidentified
MSQTFKTAIAVVGIDIGKNSFHVVGLDTRGAIVLRQKCSRGQVEVRLANMPPCLIGMEACVGAHHLSRKLKELGHDARLMPARYVRPYSKGQKNDFRDAEAIAEAVQRPTMKFVATKTADQLDLQALHRVRERLVSQRTGIINQIRAFLLERGVAVRQGLRFLRAELPRILAAPPNVLSPRMVRVIEDLAGDWRRLDERIESLSGEIEAVARQDAGCERLMSVPGIGPIISSAMVAAIGTGDMFSKGRDFAAWLGLVPKQISTGDRTILGKISKRGNRYLRVLFVQAAWVVLIKPKSWERHGLKPWIEAAKKRLHRNVLAIALANKLARIAWSVLARGRAFEVRKVGEAAARSA

SEQ ID NO: 344667 - protein, 398 aa, unidentified
MVTARADMTHAYWGFSRAHKTYEITFSPMPYVPGEVPDIPSSTRKRLGSLFIGVDVHKDTHTAVGVSALGERLFEVKIGNDDRAFKKLTETVSEKRGVLSPFYGLEDCHGYGERLAEYLSLAGHRVIHVPSILVDRARQNATHPEKSDSLDALGVAEVMIRKIDTLPVYTLSEDSKRAKQIKEISLDREYLVTERTRLKNHLHVLLHRVWNTGYREKFKDPFSMKALKYWGQSRISCDDFLRRMLRRKVRRLLAINAEVRDLEKELTTLLDESGYTIQTASGCGPVVAAVIVGEVGDIARFHSPGALAKYAGCAPRELSSGKHQRHVKTRARNRRLNSAFHQMAVSQISRMGNDKAREYFRKKVSEGKSKSQALVCLRRHLVNVIWCMMSRREVYRTA

SEQ ID NO: 344668 - protein, 424 aa, unidentified
MATITPVTATVKSEDLMQVCCDVSKEKIDVYSRVGHEGALFEMMDTIRNCGSVLQRQLKAWQELAQAHGHAGVLVVCEPTGGHERKLLALARQAGSRTAYVSGEAVGKARVIESNDTGKTDRKDARIIATLAGMGKTLKVRQLPDEYERLRELNTTYDLECTTVATIRNHVHDQVRQLFPDLDGEDGFVFSATGRAIRQLFGLNPARIRECSWREFVAKVKTFVKAARLERLEKVWAAAASSLLHQCPATVRAMREERLGELFEDLDRHLGRKLQLRTRILDAYGETEESRKLADIPDASSFQLARVIAESGPLADFRHASQLLRYFGMNIRERQSGKWTGKNRISKKGRALGRKVLYQLVFSSLIGEGKLFADPYRRKKADCACGMKAIVCLMRKALKMILGVFRSREEFSRDRVFASLPAAA

SEQ ID NO: 344669 - protein, 409 aa, unidentified
MRYYVGVDWADQTHAVWVVDESGTKITGRTVPHTAAGFSEWGRELDEWHAQGIERWAAIERPDGRVVDFLLDHGVVVYPVNPKALDRARDRFRQSGAKSDPFDARVLADFLRTDHPHLQALQPSSDAAQELKLLTEDCQRHIRQQTRLVNQLTTTLKAYYPRALEVAELTTALAREFLQAYPTPETLTALTQRQWQRWARGRRMSAARIGALWTVLQPPQLPVPAHVVRAKARLMQSLVEQLTPVVIAVAQYRTAIDDFFARMPAAQWARTLPIGKHGITAPTLWARLGDAPGRWESFRHLQAQAGAVPVTKRSGKQRVVHFRFACDKSLRHVVDQVAFLSLLSSDWARAYYDQQRARGHAHHQALRALGAKWLKIIFVMWYRQVPYDEQYHLATMRRQQLRQHQTTIA

SEQ ID NO: 344670 - protein, 408 aa, unidentified
MKRYYMGVDWGDRLHQVYVGDEDGKKVREMKLQESPEGLAEIGRWLDEKRAEGFELWAAIEKPQGRIVDFLLDHGVEVYPVNPKAVDRVRDRYRMSGSKSDAFDAYVLAEFLRTDQAHLRALRPSSEKAQELKMLSRDQRRVVRHKTRFLNQLTTTLKEYYARPLEVFEDLETEIALDFLQRYPTPAHLSALTRKQFNRFATKQHHLSKQRCEELWEKLNKPQLAVPEHVVRAKAQLVEVLIEQLRASIKAVKIYNHRVESFFASSPAAQFAKTLPGGKSGTLVAAVWAELGDAQGRWESSRHLQAEAGAVPVTKASGKSRVVHFRFACNKHLRYTMYWFSFVSLNHSEWAKLYYRGQRDNGHSHHQALRALGAKWLKIIFVMWRDHKPYDENYHLANIARQMMRQAA

SEQ ID NO: 344671 - protein, 340 aa, unidentified
MKYVGVDLHKHVIVLCVVTRRGRRTKVVCRRRFACRDTDGIRQFFVQLGRFEVVVEATAAYEWFFLLIEDLADRLVLAHPKKLRVIAESTRKTDKIDAEVLAVFLALDMIPEAYRPCPRVRQYRVLVRHRCGLQRRITGIKSKLRNILAHYNADVKELFTQRGEIYLAEVAVSAADRFSITALKEQLGLFQRQLGEANRQLREFAKRGPLAEQEARAVLDSIPLVGPVTIDVVLSELGDWRRFRSQKAVVAFAGLDPGIRSSAKKRLELHISKEGSRLLRWTMIQAAWRLVIKSPRWHARWERLWSNTGSKKKAIVGIARRLLCVMFAMLHSGQPYRLAA

SEQ ID NO: 344672 - protein, 355 aa, unidentified
MSQEKYIGMDVHQATLSVAVMDAEGKLIMECLLETKAATIVEFIQGLHGTLSLTFEEGTSSAWLHDLLKPYVSRLVVCDPRKAALLKEGNKNDRIDARKLAEMLRTNQLKPVYHGEHGIRALKELGRSYLTITKDVTRSMNRIKALYRSWGIPCSGAGVYAPRHRAEWLDKLVEPGVRVRAEHVYQQLDSLQPLRLQARGELLRESSQHPAVKLLRQIPSIGPIRAALLVALLQTPQRFRTKRQLWAYSGFAVETHDSGEYRWVRGKLQRNRERITVRGLNDNHNKDVKNLFKSAAISASTRPGPLRDFYVARVDKGMRPTMARLTLARKIAAITLTMWKKGVSFDPKQLHRQAA

SEQ ID NO: 344673 - protein, 352 aa, unidentified
MNSIDYIGFDIHKKTISFCAKAQDGRILDEGTIPARRTDLSAWAKQRSRPWWGAMEATLFTGWVYDHLKPLAQELKVAHPAMLKAIAASKKKNDKVDARKIADLLRCNLLPECYMAPSAVRELRRVLRYRNLVVRQATRMKNRIAGLLMETGTLYNKERLHGKAYFSELLGSLREIPASVIELLKLSRSQLEFFATIQKRLVKGLRADAGLRERVQRLQSIRGVGEILALTWALEIGEVKRFPSIAEAVSYCGLTSAQHNSAGQEHRGPISKQRNKHLQTILIEAAKLAPRYNPQLAAVHEGELKRGHRNQATLAVARKLVAYLMVVDKSGKPFQVRANAGEEVSKDEQPVG

SEQ ID NO: 344674 - protein, 351 aa, unidentified
MIVLGADTHKRSHTIAGVGAATGELVGERTVQVGHAGFGALLAWARALGGERVWALEDCRHVSGSLERFLIERGERVLRIPTNLMAETRKSARQRGKSDAIDAVNVARAALREGLATFPAAHLDGPELDLRLLVDHRERLVIHRVELNNTLQWHLHDLWPELELPGGALFSKKWSTRIARRLSRAEQTMRVRIARDELRRLRELTETVKALAREITQLIEQIAPRLLAEPGFGPLIAAKLVGEIAGAQRFATDAKLARAAGAAPIPASSGNTRRQRLDRGGNRQINAALHRVIVTRARCHQPTRDYIERRRREGKTTRDAIRCLKRYLARQVWNLLRASPPNTTLTTPSIS

SEQ ID NO: 344675 - protein, 318 aa, unidentified
MNSYYKVESTEPVRYVSLDISKARLDYTIAGQKCRQVPNTAAGIATLITLVQPLSGVRVVCEATGGYERRLLEQLHQASVPVCRLQPGRVRNFARAEGTLAKTDKIDVGLIYRYACAMHPRVEKPPLPEVTALRELLDYRRQLVEQGTQTTNRLETAGPTLQALLQAQHEQQAAALAKADELVAQQVRAHPALRAKAERMQQLQGVGPVLATTLLAYLPELGEEDDKRIAALVGVAPHAHDSGETSRSRHARGGRIEVRNVLYMAAVSASQHNPVLSVFYQRLKAAGKPPNVCLLAVMRKMIVVLNRMLKDPHFTLVG

SEQ ID NO: 344676 - protein, 399 aa, unidentified
MARVFIGVDPHKLSATIEVVDHRERVLATGRFGTGKAGYAAMRKQVASYRERVWAVEGSNGAGRPLAQRLLADGEQVVDVPAKLSARARLLDTGHNRKTDAHDAHAVAVVAVRNRSLRVLEYDADLEVLRILVDRRDELSRTKVQCINRLHRLLSELLPGQSKKDLTALQAKTILASARPREPVHKTLKRLALEQLAELVAVEKKIKASSTELKTLVVARGSHLMDLTGVGPVVAARILADVGDVARFTDRNRFASWTGTAPLDASSGEQIRHRLSRAGNRKANHVIHIAAVNQIRVDGPGRDYYRRKLAAGKTPLEAMRCLKRRISDALYRQLRADAAAGMDAGPGGHCGASLISSAAGSHPPTGTSDQPLPGPAPTTLRPTATARKTKSGWPLEPAS

SEQ ID NO: 344677 - protein, 345 aa, unidentified
MLYLGLDVHGKWTTVHGFDPATGEYVRIDRMPNERNAIRENLGGLDGPLQGVMEAGTNSWAMYREFLPFFETLIVADPAKLWDRKTDRGAKTDRRDALAMAEKLYAGKIDPIYIPDERTQDLRVLVRGKIRASRWVTRLTNEIGSLLKSWGYVGERSLLSKAGKAILDEAEMPSRSARVLQLWREMLEKAQEIESELQTAIEEEAAEDADCEILQSIPSVGAFTALLVRAEIGDISRFAKAESLASYAGLSPRTFQSGDRCYYGRLGHWGNRWLRYGLGLLAQRVARSRRDNSLHRLYWRVCLRSHRNSAKIAVARKAAEIVYHLLRNGELWEDSVREERAAVSV

SEQ ID NO: 344678 - protein, 455 aa, unidentified
MAKQKIHKTPAIETVNVGAAAVDIGSREHMAAVNPEVTDAPVRAFGTFTHDLHDLANWFKSHGVTSIAMESTGVYWIPAYEILEQQGFEVILVNARYAKNVPGRKTDVSDASWLRQLHSYGLLRGSFRPTAEIATLRAYLRQRERLVEYAAAHIQHMQKALMEMNLQLHHVVSDITGVTGMKIIRAMVAGERDLDVLASHRDVRCRVSTETIKAALNGNDRAEHIFALTQSLELYDFYQSKMLECDRRLEATLAALGADTAHDPSELPRPRTKTKQVSTPSFDVRAALYGVLGVDLTQIHGMGPSLSLKLVGECGTDLRAWPSAKHFTSWLSLAPGNKISGGKVLSSRTRRSSSRAAALLRLAAVTIGRSDTALGAFYRRLAARAGKAKAVTATARKIAVLFYNALRHGMTYQDPGASHYEERYRDRVLGNLKRRAKSFGYDLRELPPEEEMTVS

SEQ ID NO: 344679 - protein, 341 aa, unidentified
MGQATTIGLDIAKHVFQAHGADAAGAVMFRKRLSRAKLLEFFAAQPPCVVAMEACAGSHHWAREIGKLGHTVRLIPPAYVKPFVKRQKNDVADAEAICEAAQRPSMRFVPVKDEAQQANGVVFRARDLLVRQRTQCINALRGHLAEYGHVVPQGTAHVDTLIALVEDPASSVPESARTILKVLISALEVLGTQIEELDAEIARRAKADPVARRLMTIPGIGPIAATAITALVPAPEGFRAGRDFAAWLGLTPLQRSTGGKQKLGAISRMGERTLRRLLILGASAVVRWASQRGAAAGSWLARMLARKPRMLVTVALANKTARIVWALLVKGGTYKAPAVAA

SEQ ID NO: 344680 - protein, 450 aa, unidentified
MTREPQEIEDEEHEQVVERVAAVDVAKASGMVCTRVPHPSRPGRRLSRVWEVAATTGAIIGLAEQLVGQGIEKVTVESTSDYWRPFLYLLQAGGLSVQLVNARDVKNVPGRPKTDRLDAVWLAKLTERGMLRPSFVPPAEIRQLRDYTRLRVDLTHERARYWQRLEKLLEDALIKVSSVASTLDTASTRDMVEALIQGQRDPRVLAGLARGKLKAKHGALVEALTGRFDDHHAELARMLLDQIDALGAQITKLTARIQQLLGAIPAAQGVDADGTTGPGAGSGTDAAVLPAAARLDEITGIGPGAAQVVIAELGLDMGVFPTPGHLVSWAKLCPRTIQSGAKTRAGATGKGNPYLKGVLGEAAAAAAKTDTFLGERYRRLVKRRGKLKALVAVARSILVIVWHLLADPAARYHDLGAGYWADRIDKGKKARNHIRQLEALGFTVTLAPAA

SEQ ID NO: 344681 - protein, 412 aa, unidentified
MDTLYPCCAGLDVHKQVVVACVRKLSTGGRVRSEVRTFRTETNALLEMADWLTDEQVTHVAMESTGVYWKPIWNLLEGAVELVLVNAEHIKAVPGRKTDVKDSEWIAQLLQHGLLKPSFVPEKPVRQLRDLTRQRTQLTRQKVQVANRIQKTLEDANVKLGSVASDVLGASGRDMLRAMIAGETDPVVLADLARQRLREKIPQLREALCGQVEDHHRFLLGMLMDQVEFLEAQIARLSARIAEVMPAPFAEAIQRLDTIPGIDLRAAENVIVEVGSDMSQFPSAAHLASWVGVCPGNNESAGKRKSGRTTKGNKWLRVVLVQCAWAASKAVGSHLRQLYGRLVGRRGKKRALVAVAHRLLLIIYNVLKKNQAYQEPVQAAPDRHKDRERLKQRLLRRLEKLGVKVQQTQAVA

SEQ ID NO: 344682 - protein, 419 aa, unidentified
MREITQEELFVERVAALDLGKAGLEACVRTPHPDRPDRRVQEIRSFATTTARLLELADWLRCEQVTVVVMESTSDYWKGVYYLLEAEGFDCQLANAREVKNVPGRAKTDKADAVWLAKVAERGMFRPSLVHPEPIRRLRDFTRYRRSLIRDRTRERQRVEKLLEDAQIKLSSVISDLFGVSGRAMLDALTAGQRNPAVLADMARASMRGKIAVLREALTGFFTDHHAMLLQMMLGNIDRLTAQIAVLEQHIEELVAPFCRQVEQLTTIPCVGRFTAAELIAELGVDITRFPTAGHLVSWARFCPNTHESAGKTKPKGRTKGNPWLAASIGNTIGALTRTPTFLGARYRRVARRRGKGKAMVAAGNSLLTSVYHLLADPTATYHDLGPHHHDTLINRDRQARTILIRDGKVQIHDTPQAA

SEQ ID NO: 344683 - protein, 412 aa, unidentified
MEVVSPIIAGLDVHERTVVVCLRVQKEKRVQRSLRTFGTTTPALLELQRWLVENQCPCAVIESTGVYWKPVFNILEGSVEVILANAHQVKTLPGRKTDMRDAEWLAELGAHGLVKASFIPPEPIRELRELTRYRKSLIRQRTAEVNRIQKILETANIKLGSVASDVLGASGRAMLRALIAGERDAVVLAGLAKGTLRKKIDQLIPSLTGRFLQRHAFLLRQMLDHVEFIDGQIATIDGEVERACAPFEIPLQLLQSTPGVGSRTAQVIVAEIGCDMNQFPTEHHLASWAAICPGNNESAGKRRTGKTRNGNPWLRAALVEAAWAASRARGTYLQSQFRHLAYARGKGTRKAIVAVAHSILIAAWHILKKNVPYNDLGPEHLRRTNPEKIKRHLVRKLEALGYRVSLEEGTAA

SEQ ID NO: 344684 - protein, 427 aa, unidentified
MKNSTARKLRQIPAGYLIVGIDAHKKKHAAVVKTQDAFTRAKFKVSNSRDGFVELLERTKAQMVKTDSRGTIFAIEAGGRYWRTLAYFLEERGIPFQLISPFTLKRRREGEDINRRKNDYRDADMAAELLRTGKFTETKLPQGIYADLRAAYHTYYGLGRERSRATNLLSALLDSLFPEFYTVFKDISTKTALAVLAAYPSPYVIAEMSMEKFMDTMMTKYKGQYLIRKKVSAIYQAAHNSVGIHAGTGVICFEISLLVERIRLLTEHRRKVEDLIVTLVEWIPESKYLLSIPGLAHITIAGILGELGPLNHYRSGKQLVKMAGINPMQSESANKQASKTPMSKKGRPLLRYCLWEVSLNILKHNQEFKAWTKRLQERPLHQNPLQKREARGAVCKRLLYLVFALFNKHSFYEKNYKVETERELVVA

SEQ ID NO: 344685 - protein, 341 aa, unidentified
MKQFIRIGVDLAKNYFQVHALACEGSPAVTRKLKRSKMLEFFSQTEPCRVGMEACASAHYWARELKALGHEALLMPPTYIKPYVKRGKNDAADAEAICEAMSRPGMRFVPVKSVEQQALLMLHTTRELLVKQRTMSVNALRSHLAECGIIVAKGVGRVDELLELADKDARLPDTARAAVKVLAQTLEGFDASIDAMESEIAKAHARSDVSRLLVEIPGIGKLIATAIVSTIPDPGVFESGRNFAAWLGLTPRQYSSGGKQTLGTITKQGNRYIRKLLVLGATSLLNVVGKRKGALRDWIVALLAKKPARLVTVALANKLARIVWAMMKTGEGFRTEMFSKA

SEQ ID NO: 344686 - protein, 343 aa, unidentified
MQMITTIGLDIAKSVFQVHGVDAAGEVVIRRQLKRRYVLAFFQKLSPCLVGIEACASSHYWSRELQALGHTVRLMPPAYVKPYVKRQKNDMADAEAICEAVTRANMRFVPTKTPEQQSCLMLHRTRHLFIRQQTAVINSIRAHLAEFGIIAPVGRKGVTELLHVVADPGDKRVPEVARACLAALGTQLLHLKQQILEFDRLIMAWHRSNQTSTRLHYIPGVGPMLATALVASVADPRTFRSGRNFSAWIGLVPKQHSSGGKDRLGSISKQGDRYLRSLFVAGALAVIRYAKIHGTKHRPWLAALLARRPTKVAAIALANKIARMAWAMMAKGERYKQPVALAA

SEQ ID NO: 344687 - protein, 365 aa, unidentified
MLHRLNSAATLIQRTTTEAPRGHMYYIGLDVHKKTISYCVKDVSGRIQQEGKVGSTRRELDCWMKTLPQPWTVAMEATIFSGWIYDHLLPHATEIKMAHPLMLRAIAAAKKKNDQIDASKIADCLRCDFLPECHMMPAEIRDRRRILRYRHLLVRQMVQMKNRVSGLLMETGVEYNKQRLHKVSYFRELLSANEEVPPSIRPLLKLSRETIERCQKTEYALVSSLQRDPMLADRIKRLRTVPGVGPITALTWALEIGDVSRFRTIKQAISYCGLCGDERSSADKAMRMPLSKQRNKHIQRTLVEAAKLAPRQSHELAVIYDREKQKGNGNRATLAVARKMVAYLLAVDRQQRDFTPAEERRTAAA

SEQ ID NO: 344688 - protein, 428 aa, unidentified
MNELDRIRLEEFRQLREEIGGSKDCLIVGIDVAKQKHTAFFGTATGKTLFRRLVFENSREGFERLLTQVEAMMVQHGLDKVVFGLEPTGNYHKPLGEYLIGCGYGVVLVSGKSVKKNRALLDGRWDKHDAKDSANVADLISQGKCLYYEYPAMSLRQLRSLLSLKRRLKKQEHGQKVRIRNHLVAQYFPEFDPYFSPSEPQSLAIVKWCSAPSVIAGLEYDEFVRLVAPGKKSTAQQSRLRAIWQKASLSIGCEAGQAVAFEAKLMVEGLKQIRGALADTEAKIKEISLGFPEYPYLLTIPGFGPDISSKVLGAIGDPFRFNRANQVLKTAGLDLTANRSGNRCDGVVPVISKNGKSDLRYALYQAALIASIRNRDFVVWFTNKLRGRQREKGIKTKMRVKLCAKLLVIAWSLMKKKEPFNPDYLKTE

SEQ ID NO: 344689 - protein, 323 aa, unidentified
MITDQEDQQLFQRRLPNQLPVVLESLEPYRPRLKVVVVESTYNWYWLVDGLLDRKYPVVLANPGAIDQYDGIKEADDLTDAAFLARLARLGILPTGYLYPKEDRPVRDLLRRRSLVVRQRTSMILSLQNMALRQTGQNFGWRALRRLSDQERAEVLGDHDCLAFVTTEQLDLIELLSEKIKRFEAKVLEHAQLRPAYECLLTLPGVGVILALTIMLETGDIGRFATVGDYTSYRRCVRATHTSNGKSKGKNNGKNGNAYLAWAFVEAVHHALRTCPPARSFYDTKVAKRNGALATKALAAKWSKAAYYMIKRQEPFDLARVFG

SEQ ID NO: 344690 - protein, 391 aa, unidentified
MIYVGIDVAKDKHDCFITNSDGEVLFKAFTITNNLDGFNDLYQKIETVMKDITKVKVGLEATGHYSYNLLGYLIDKGLPTYVINPLHTNLYRKSLSLRQTKTDKVDARTIASILMSDVNLKSYSDISYHNEELKSLTRYRFDKVKERAKLKTSVSRLVCILFPELEKLVPTLHMASVYALLSEFPSAKHVATAHLTRLTNLLSESSKGRYGKDTAITFRDSARASIGSNMPAKSLELKHTIKLIQELDSEIDEIENEIKIIMDEINSPILSIPGINYRMGSMIIAEIGDFNRFDSPDKILAYAGFSPSTYQSGQLDGAYAHMEKRGSRYLRYALYNATKYVCHWDPTFAAYLAKKRAEGKHYNVAISHAVKKLVRVIYHLEKTKQQYIKAA

SEQ ID NO: 344691 - protein, 381 aa, unidentified
MEIFVGIDWAEAHHDICVLNEMGMVLAKRRIAEGLDGVGQLHALLADHAAEPNQVVIGIETDRGLLVGALLAAGYQVFAINPLAASRYRDRHSTSGAKSDPGDAKMLADLVRTDRHNHRPVAGDSELAASLQVLARAHQNLIWSRQRLVNQLRSNLREYFPAALAAFGTDLAHPLALGVLDAAPTPAMGRTLSQSKLAAILRRAGRERGVEEKAAAIQAQLRAPQLAAPALIGEAYGKSVAATVRILRELNAQLASLAAELTQSFEGHPDAELYRSLPGLGVVLGARVLSEFGDDRTRFAHPKARKNYAGNSPITKASGTRRVVLARMARNRRLADACHLWAFCALRALANRLVGILHGCLDHGQVYREDIAWPQSPTVAA

SEQ ID NO: 344692 - protein, 377 aa, unidentified
MSKLRFVGLDVHAETIAVAVAEAGGEVRSLGVIPNRLESVRKMIGKLAPIGTLKCCYEAGPTGYVVYWQLAQMGVACEVIAPSLIPTKAGDRVKTDRRDAEKLARCYRAGELTPVWVPDADHEALRDLVRAREAAKKDQLRHRHRLGKFLLRHGKRPTDAGKAWTQKYLNWIRIHVHFDQPALEATVQYYREEVEHIAERITKLEQAIDEAVQQEPSEIRAVIEALQALRGVAQTTAATVVSELGSLSRFPNPSQLMGYSGLVSSEYTSGNRVQRGRITKSGNAHLRRVLLEAAWTYQHRPNVQGRVLRRQKSLALSEEARQIAWKAQQRLHKRFAALTARGKERNVAATAIARELLGFMWAIAVHTEAQQKQAKAA

SEQ ID NO: 344693 - protein, 421 aa, unidentified
MNMTSKSAQFAALIGIDWASQRHALCLYDCATAKRESSILEHTPEAIAQWARGLQERFKGKKIALCLEQSKGPLIYALLEYPFFVLYPINPATAARYRMAFKTSRAKDDPSDAQVCLELVLHHREKLNPWLPHDAPTRELSCLLQHRRAAVDLRTLLTNMLRDALKSYYPQALELAAQDLFAPLGCQFLLKWPSLQELHKARKESVRKFYYAHNCRRMDVIEKRLDAIAQMTPLCRDLALLEPAMVQVRMLARQLLQLGGALKEYDSKIEQLFAQHSDALIWESFPGAGPTLAPRLACAFGTQRSRYQSAVAIQQYSGTAPVTEKSGKNQHWVHRRWARPHFTHQSFFEYASQSVLHCSWAKLYLKEQMARGKAYPTAIRALAFKWQRIMFVCWRDRVPYDETIYRQSLQRRGSHLARKLN

SEQ ID NO: 344694 - protein, 393 aa, unidentified
MLKIVYPICCGLDVHKTWIYACMGITDTNGRTEYKQARFSSFTKGLQELADWLAKYDCNDVCMESTGKFWIPVFNILEKTCWVTLAYPKYTKPQKGNKTDHKDAKWICDLYMCDMVNPSFIPPPDIRQLRDLMRYRSKLTNIMTSEKNRALNCLTVSNLKLDDVFSDVFGKSSRSVIRYILEHPGETFQVAPFIDRRCKHPVEEIQAVIDGTISHQQAVKLRECLQHLDELEVHKTNVEKEILCLVQQYPYQLELLQTVLGFSGNIMTAIALISEIGADMSVFPSAKHLVSWAGCCPRNDQSSKKVKSTRISRAGVYLKPLLVQVAIQPFTANADKLSAAGALEIRCQICDGRFLSMWAALFIFLGCPLSPCPKNLHVHNGRLVILASVAWIF

SEQ ID NO: 344695 - protein, 427 aa, unidentified
MNYTQNHKISQITPSTLIVGIDIAKDKHVARAQDDRGIEFGKRLIFENRMHGFQKLVNWAEALRKENAKDHVILGVEPTGHYWFSLAYFLVAKGYDFVVVNPMHVKKSKELDDNSPTKNDTKDARVIAQLIKDGRYSVPNLLDGVYAELREGVKLRDQLTKQLMTTEGRIQNHIQRYFPEFFDVFGDWEGKAAFCTLRLFPFPSQIKELSPEEVLMKWKPYVQRGVGIKRATKLVEAARKSIGIQIGIQFAKRELDYLLDQYKLYKQQVEQLDTELEALVETLPGAKQMMEISGLGSTTIALFFSEVGDITKYSHPQQLVNLAGLSLREHSSGKFKGQTRITKRGRSRLRRALYLAIRPLVAHNPTFKALHQYYTTRSEKPLKKQQSLIALCCKLLRVLFVIGQKQCEFDGSKLVSGLPKKHLLQAA

SEQ ID NO: 344696 - protein, 344 aa, unidentified
MITIGIDPHKRSVTAVALDAHSQPLGSLRVAMTSRAVVQLLAWAVPWSARRWAVEGATGLGHTVAQQLVGAGELVVDVPAKLAAQARLLGTGSGRKTDRTDAASVAAVALHHRRLRQVTAEDHTMALRLLTDRRDDLVAERTRTLSRLHVLLRDLHPGGAERNLTAQRAAALLGRLRPVARVDRERKRIARELLADVRRLDQRITAATKAIGEAVTSSGTTLMEVFGLGPVLAAKILGHAGDLTRFPDRDHFASYTGTAPIEASSGDVRRHRLNRGGNRQLNTALHIIAVCQIRDPSPGQVYYQRKLRQAKTPQEARRALKRKLSNVVYRHLVADHRRRHAPPS

SEQ ID NO: 344697 - protein, 402 aa, unidentified
MNCVGIDVSKGKSMIAVMRPFGEVVVSPFEVRHTANELSELAGLLKSLDGETRVVMESTGNYHAPVAWLLHDAGLYVSVVNAMLVHDYGNNSLRRAKTDKKDAVKLANYGLDHWLTLPRYIPEEDTRLMLKICYRQYQQYSKVQTMLKNNLISLLDTTFPDANRLFTSPPRADGSEKWVDFVATFWHCECVCGRSEKAFTTQYQKWCRKHGYNFSEDKALDIYASACRHFGVIPKTDTAKLLVEQAISQLQTTSAALAALKQEMQSLAASLPEYPIVMGMFGVGPTLGPQLLAEIGDVRRFHSKKALVAFAGIDAPPYQSGQIDVRSRSISKRGSASLRRTLFLVMSVILQCAPIDEPVYQFMDKKRSEGKPYRVYMMASANKFLRIYYASVKAYLESLEHD

SEQ ID NO: 344698 - protein, 392 aa, unidentified
MVVSVGIDVSKDKHDCFIVSAEGEVLADVFTVPNNMDGFHCLLQRIRDCTAPQDKIKVGLEATGHYSYNLLGFLLDNGLTTCVLNPLRTNLYRKSLSLRKTKTDRVDARTIATMLLSDVGLKPYTSTAYHNEELKSLTRYRFDKVKERAKLKSSVSRLVCILFPELEKLVPTLHMVSVYALLEEFPSARKVAAAHLTRLKALLETASKGRYKRDMALEIRDTARNSIGSWMPAKSLELQHTIRLIRELDNEIAEIEGQIQAIMEELHSPITTIPGLGFRMAAMILAEVGDFSRFDSPDKLLAYAGMSPSTYQSGQLKNCYPHMEKRGSRYLRYALYNATKYVCHWDPTFTAYLAKKRAEGKHYNVAISHAAKKLVRLIFAMERSQKPYLPTS

SEQ ID NO: 344699 - protein, 344 aa, unidentified
MLIIGCDYHPRFQQIAMMDTDGGDYTQLRLEHIKEAEEFYRSVACRPVRVGMEASGHARWFQRLLAGLGIELWIGDPSAIRAAAPRQQKTDKRDAEHLLQLLCDGRFEQMRVWVPTVEGRDVRQLVLHRHRLVQMRTRVQNQLQAVALNEGVGRKPGLWSRRGREQFEQLPLPAWTARRRQENWELLDELERRIEPLDQAVAQEAQRRPEVVRLMTHPGVGPVTGLAFTLTLGDPRRFASGKQVASYLGLIPAENSSGGRQRLGHLTKQGTALVRWLLVEAAHRAVQREPELGRWYRRLAMKKHRSIAAVAVARKLAVRLWWMWSRGLSYEQLRESGSHAGATR

SEQ ID NO: 344700 - protein, 307 aa, unidentified
MNSKNYIAIDIAKDSLAVTSDSFSGSFDYDNKGLKTLLEQLRRIESALVVCEATGGYERKLMELLFSHEIPVALVNPARVRAFARSEGTKAKTDPIDALMILRFAQSKDLSPTPVPSEQQRTLQALMDRRGQLTESLAREKNRLQKSPKCVIKSVEKMIRIIERELKALEQKMEELIDEDESMCRQDSIMQQVCGVGATTSWRILAYLGEITALKRNQLVALAGVAPYNRDSGKFKGKRRIEGGRAKVRKCLYMAAQSAAVHNPHIKEYVDGLRSRGKPYKCAIVAAMRKLLIHLQSLLKKQQLELA

SEQ ID NO: 344701 - protein, 343 aa, unidentified
MDHFAGLDVSVKETSLCIVDDAGRIVREVRVVSEPEALLAVLTNPACHFKRIGLEAGPLSQWLFNALAEAGLPVICVETRHMRAVLKAQINKTDRNDARGIAQMMRAGLYRPVHVKTLRSQKLRMLLTHRKLLQSKAIAIENDLRATLRNFGLKVGVVGTVKFEARIKELVENLPDLVILVEPLLVVRRVLREQIGVLHRRLLAIVRDDDVCRRLMTVPGVGPVVALTYRTTVDVPSRFRNSKAVGAAFGLTPSKHQSGESNRTGGISRCGDEMMRTMLYEAAQIMLVRSAKWSWLKAWAMKIARCRGLKKAIVALARRLAVIMHRLWVDGTEFRWTREVAAA

SEQ ID NO: 344702 - protein, 345 aa, unidentified
MELHTIGIDLGKTVFHLVGLNPCGEVVVRKKFSRKQLLHFTANLKVKLIGMEACGGSHFLGRALREQGHEVRLMPAQYVKPYVKTNKSDYIDAEAIAEAVGRPKMRFVPIKSDEQLDLQSLHRVRERWVMRRTAVINQIRGLLLERGITVRQGRGHIDAALPGILEDASAQLSGALRVLLAQLKLELDHLQMRIDEADAMINKAAGDSEACRRLVAIPGIGPVTATAIIAAIGNGAAFKKGRGFSAWLGIVPGEYTTGGKQKLLGISKRGNSYLRRLLVQGARAVLQQSAKQSSGLSAWLTQLTARTHSNVAAVALANKLARMAWAVLAKNEPYRPPMLADAATT

SEQ ID NO: 344703 - protein, 449 aa, unidentified
MEGKMELDVVNPRCAGIDVGSRSHFVAIGQDISDVREFGVYAEDLTAICVWLKENGITSVAMESTGSYWQNLYVELSKYGFDLVLANGKFTKNAKGKKTDVKDSRWIQKLHALGLLTSSFLPDETTEQLRTYCRQRTNWLHLAAEASSKMQKYLKLLNFRLDVVVKDVCGLTGLAIIEDICKGNLDPVQLAEHRHYNCKKSKEEISKALKGNNREDYLFGLKQEHECYLFYQSKISDCDKQIDEFMKSQIGADPIKKKLQTTVKKHKRNNKNAPGIDLNQLAFQYFGGIDFMAIEGVSHSTVLTIISEVGPDGFSKFPTAKHFTSWVRLAPNNKISGGKVLSHRIPKGSNRLKIALRQSANAIGNLKDTHMSDFFKRVAFRKGRQAAVSATARKLAVIIWNMAYKKMPYLPEKEYLFLDQKRQMKIVTRIRKQITKFDLKPEQLGFATN

SEQ ID NO: 344704 - protein, 342 aa, unidentified
MEHYAGIDVSLERSSVCVVDGTGKIVREAKVASEPEALVAFFGQLGLSLTRVGLEAGPLSQWLHAGLAGAGFEAVLLETRHVKAALSAMVVKTDRKDARGIAQLLRMGWYRPVHRKSPPAQEIRALLVGRKLLQAKLRDVELSIRGILRGFGLKVGEVSKGRFAARIKELIAGHEMLEAVIGAMLQAREGLRAEFVRLHRRMLAIVRGDAVCRRLMTAPGVGALVAVTFKTAVDDPGRFRTAKAVGAHFGLTPKRYQSGETDVSGGISKVGDAMVRTALYEAANAMLTRTSRVSALKRWALEVARRRGAKRAKVALARKLAGVLQRMWANAADFRWGEEAIV

SEQ ID NO: 344705 - protein, 347 aa, unidentified
MSFIGVDLHQNSFTVCRREGDGGEAFETFTLSAADLARFCLTLSADDELAIEATGNSAWFRDTVLPCVGRVVVVNPAQFKVIRKSVKKTDRNDAAALALFLAKDMLPETRAKTQDENELASLAHTRDLLVKQRSRLLHKIHALHVRKGIKLKKESLGSKRGLAAIDMDLFSAAEVVEIEVLREQALSLTASLARLDREIETIASGFAGYEGLTSIKGVGPRSAAVLLSAIGNVRDFESADKLAAYFGMVPRVSQSNETDHRGRITKRGNKLARTTLVQCSLIAMRYSPYLKRFHERIRQRRGTGKAIVATARKLLTIIYDTLKNGWVFSDFTQFSRTDQLIPAGQSS

SEQ ID NO: 344706 - protein, 315 aa, unidentified
MATALFVGVDVSKDALDVAYSGAPQVTRYTNDARGIGRLVARLAGQSPELIVLEATGGYEMALACALADAALPVVIVNPRQVRDFAKSTGRLAKTDALDAVMLALFAERVKPAVRALPDADLVQLRARLTRRVQLQEMLQMERNRLPLTTQAMQQSIRRVIRHLEHQLQALDDELNDFMRRSPLWQEKLELLQSAPGVGPRLACTLIAFLPELGHVNRKEAAALVGVAPLNCDSGQFRGRRRVWGGRAHVRRVLYMAALSAMQHNPAIHAFAQRLRAKGRPGKVIVVACMRKLLVMLNTMLANAQPYQRPTPTTP

SEQ ID NO: 344707 - protein, 399 aa, unidentified
MNDGYGVYLGLDVGKGDHHAVGLAPDGRRLHDAALPNTEARLRQLFDKLARHGRVLVVAGQPASIGALPVAVARACGHQVAYLPGLAMRRIADLHPGSAKTDARDAYVIADAARTLPHTLRRVDTGDEALAELEVLVGFDDDLAGEATRVSNRIRGLLTQIHPTLERVLGPKVHHKAVLELLSRCGGPAGLRKAGRRKLLSIAVAHAPRMGQRLVAQIMTALDEQTVTVPGTQAAETILPRLADSLRDVLRQRDQVATQVEGMLDAHPLAPVLTSIPGIGVRTAARILLEVGDGTAFATPGHLAAYAGLAPVTRRSGSSIRGEHPPRGGNKRLKRAFFLAAFAALTDPVSRAYYDRKRAEGKRHNAALICLARRRCDVLFAMLRDKIPYQPRPTSPIPA

SEQ ID NO: 344708 - protein, 397 aa, unidentified
MIAVGVDVSKSKSMVAILSSDGEIVAEPFEVYHVNDSLDNLITNLLSLNDDIKIVMEATGHYHLPILKKFLEANLFVSVMNPYLMKKYGDNQIRKAKTDRKDAMRMATYALEKAYTLIPYTSLEQKYLDLKFLSRQYNQRISTKVKNRVYLGNLLDETMPGIENILMAKTTKPENNMLYNFINKYQSFDTIKKMGEKKFLNSYTKLAEKNGCRNYQMKALKIYELATNSITTRGTDTYTNIAIKQCLNVLIQAEIAANEILVQMQSLAQTLPEYPIVRGMCGVGDRLTPRLIAEIGDVRRFTSGKALNAFAGNDAPPFQSGQFESQNRHISKRGAPSLRKACYEVMQCLKMHKPQDDPVYLFMIKKEEEGKPLNVAKMAAINKFLRIYYARVMELYK

SEQ ID NO: 344709 - protein, 337 aa, unidentified
MKYCGIDLHSNNSVVVITDETDRVGYSKRLPNDLTQVLRALEMHRTELCGVVVESTYNSYWLVDGLQEVGHRVHLANTAAIKQYDGLKHRGDEADARQLAQLLRLGLLPEGHIMPKEARAVRDLARKRMQLVQQRTAQILSIESSLSRYTGGRISSNSIKRLQEADVAKMSVSEMQALGIKANVAVMRSLEAQIDSLEKVLAKYCRTEPGYRLLKTVEGIGEVLATVILLETGDIERFPDVGNYASYCRCVGSQHESNGKKKGEGNTKNGNRYLAWAFVEAANFAVRYCEPARRFYQKKKAKRNGTLAIKAVAHKLARACYHMLKKKEAFSVERCFA

SEQ ID NO: 344710 - protein, 342 aa, unidentified
MRMIGCDFHAAQQTIAMLDCESGEVVERILRHEGNVVREFYAALPRPVVVGIEATGSMGWFLRLLADLDISCRVGHPAAIRRAETRRQKHDRRDAALLLELLTQDRFPAIWMPSPELWDLRVLLLHRHQWVRLRTRVMNALQGLALAQGIRRRAALWSRAGQATIAALALPPHAAYRRSELQALYGHLTAQIDELDQRVRTHAEQRPQAARLMTHPGVGPVTALATEVFLGDPSRFADGKAVASYVGLIPSEYSSGDRQRLGHITKQGNPLLRLLWCEAAIHAVQRDLVLRRFYRRKLVQKGFGKARVAAARKLGIRLWILLRDQIDYEEFCRRAPAQATER

SEQ ID NO: 344711 - protein, 453 aa, unidentified
MEKSSTDDQLMNLEVLHPNAAGIDIGNAAHYVAVPPDRDTEPVRRFACFTQDVRALADWLKQCGIVTVAMQSTGVYWLPVYEVLVERGFEVFLVNARHTKNLPGRKSDVQECQWLMKLHTYGLLNNSFRPTEEICVLRTYWRQRDEHVKAASAVIQRMQKVLTEMNVQIANVISDISGVTGMAILDAILKGERDRYQLADLANPRIQASKEEIARSLEGNWRPELLFVLRQQRDLYHEYQKRIGECDEVIQLHLRTLEDKAQPENKPENPKRGKRAGGNAPRFDLRGELYRITGVDLTRIDGIHVMIAQTILSEVGLDMSRWPTEAHFASWLGLCPDNKITGGKIYHRGSRHVENRAATALRMAATSLWRSKTYLGAKFKRLRTKLGAPKAITAMAHHLARLVYRMLKYGQEYIDKGMEYYQQRYQNQQIKWLEKKAKDLGLTITLAPASVAR

SEQ ID NO: 344712 - protein, 364 aa, unidentified
MDPALPAGSNVGRELQRGRIIMQVVRIGLDLAKYVFEVHGVDEHGNVVMRKTLRRGSMSTFFANLPHCLVGMEASNGAHYWARVLTDLGHKVRLISPQFVAPYVKSNKNDRNDAEAICEAVGRPTMRFVPPKSPEQLAIQALRRIRQRLVQSRTRLVNQTRGILSEHGIVIARDIWRLRRALAEITGNATDDLNTLVRVLIMEAQTELIELDRRIASCDRRIRELYRTSEVCQRLGEIEGIGPVTATALVAAVGDRSCFKNGRQFSAWLGLVPKQRSSGGRNRLFGISKRGDRYLRTLMVHGARAALGKVEGKKDPRSRWLANLRQRRHPNVAAVALANKNARIAWAMLAGNVSYEPARFIQAA

SEQ ID NO: 344713 - protein, 378 aa, unidentified
MSKLRYVGLDVHAETIAVAVAEPTGEVRSVGEIPNQPDSIRRLVKKLGGPDELRACYEAGPTGYVLYWQLTALGVACEVVAPTLVPVKAGDRVKTDRRDAVKLARSYRAGDLTAVWVPEPAHEALRDLVRAREAAKQDQLRARHRLGKFLLRQGRRPPETMKAWTQAYLHWVRTAVQFPEPAQEATLLDYLQEVDHAAARLARLEQALDQAVARAPAPLRAVIAALQALRGVAQVSAATVACEVGTFARFQTARQFMGYVGLVAREASSGTRTWRGGITKTGNAHVRRIVGEVAWAYRHRPAVGAALKRRQVGVSAAVKEIAWKAQHRLHARYRHLLGRGKRKQQAVTAVARELLGFIWAIGVTVEQELLGASERRAA

SEQ ID NO: 344714 - protein, 343 aa, unidentified
MQIRSVGIDLGKTTFHLVALGAAGKLLLRKKFTQKQLITFTANMQTSLIGMEACSGAHFLGRALRSQGHDVKLIPAQFVKPFVKSNKNDFLDAEAIAEAVDRQNMRFVPIKTDDQLDLQAMHRVRDRLVARRTSVINQLRAFLLERGMVFAKTPFKLKQAMPEILENADANLTPRMRNLVSLLWSEWKDLEQQIVAMNLEVEQIASSDPACRRLRQIPGIGPLVATAIVAAIGNGAAFRKGREFSSWLGLVPRQHSTGGKARLFGISKRGNCYLRKLLVHGARSAVLRVKRERSPFGPWLDALERRSPVKVVITAAANKLARVAWAVLSSGEEYRPPTALMPS

SEQ ID NO: 344715 - protein, 357 aa, unidentified
MSKPTILKQSIGIDVSKDKIAVCFAVEQTDKKFRILATRKFDNNASGFAQLHGWIKKHQKADLPVNVLMEATGVYYESLAYFLREINVRVSVVLPNKTKAFAKSLDYKTKTDGIDAKILAQMSLEREVSEWAPAGKNMLKLKRLCRERIELLMDKTSVNNRLHAKKHSYKGEGSSMKRAEKILAFLKKQIEEVEQEITKLIASDPEIKGKVEKICSIKGIGIITAATIIGETNGFALIKNKAQLVSYAGYDVVENQSGTSINGKTKISKRGNSFIRRALHFPALTTIKHNPSLKALYDRVFESTRIKMKAAVAVQRKLLVLVYTLYRKDECFDPQGLIYNKSNLPNKNRQEQQSVPA

SEQ ID NO: 344716 - protein, 345 aa, unidentified
MYATQRREPSYDDYQNWSGYRLFQVHGVDENEQTVVRRQLRRSEIAKFFNRLPPTRIGLEACGASHYWARLLRGLGHEVVLLPPQYIKPYLKRGKNDANDAEAICEAMSRPGMRFVPIKSAERQAELMPLGVRDLLIKQRTAVINAIRGYAAEFGVIAAKGPVKVAELLQQAHAEEASVPAVALDMLRLLAAQLDALDVKLKQIETRLVAVHRENPLSQCLASQPGIGPIGAVSFALKVTDPKSFRSGRHFAAWLGLTPKDNSSGGRRRQGRISRQGNETLRKLLVLGATAVIRFARPGHASPWLLNLLARKPRKLAAIALANKMARTLWAMMVSGEVYRRPLPA

SEQ ID NO: 344717 - protein, 443 aa, unidentified
MARKNQKRFEIIHHHCAGIDVGSREHWVAINPDQCEVPVRQFSTFTDDLIALADWLQSLSINVVAMEATGVYWIPLFEVLDARGFEVYLVNSRATRQTSGRKSDVLDCQWIWQLMTHGLLSGAFRPADDICSMRSLVRQRANKVCDQAKSINRLQKALSQMNIQLAQVISDVTGVTGLKILRAIVHGERNPEQLAALRDGRIKADQATIARSLHGNWRAEHLHALSQELACHDFLENQIAECDQAIIRALERLPVLQPETAPPGKPLRSPHRSAEEQQALHRALNRIMGVDLTAIPTIGIDTALVLASELGPDLSRFPTSQHFCSWLGVAPPTRISGGKPLPGKTPKIINRAAQALKQAASNARQDKSFIGASHRARLTRMDTRCAIKATAHQLARLIYAMLTQGQPYVEKGIEEFEERSRNRQLRALDRKARKLGMQLVKAS

SEQ ID NO: 344718 - protein, 344 aa, unidentified
MPTITVGIDLAKAVFAVHGIDEAGKATLVKPKVARDQLVPLIAQLPPCLIGMEACSGAHHWARVFAEHGHTVKLMAPKLVSPYRMSGKRGKNDAADAAAICEAVTRPSMRFVPVKDEHQQATLCLHRTRQGFIEERTSTYNRLRGLLSEFGVVLPQSPERLRKEIGPCLDTLPGWARRCMSELLEHTSHIEDRLVELDRAINQIAREDDRSRRLLQLRGVGSTTASALVASIGDGHDFRNGRQVAAWLGLTPGQYSSGGKQRLGSITKAGDAYLRSLLVLGARSVMANLGDKQDPLSRWIRNLIERRGYWRAAVAIAAKNARMAWAVLHYGDTFKPEQAEPTGA

SEQ ID NO: 344719 - protein, 348 aa, unidentified
MTAGLDLGDKYSYLCLIDTQSGEVIEEGRLRTTPEAFERRFASERALRIAIEAGTHSPWASRVLEECGHEVLVANARKLRLIYANKQKTDEIDAENLARLARVDPKLLYPLKHRGEDSQAHMALIRSRQALIGCRTQLVNHVRGAVKSFGARLPKCPAKSFHNRAPEHIPEALCAALGPILEQIGSLTERIRQYDRKLETIAKERYPETELLRQVEGIGPLTALTFVLTLEDPHRFEKSRSVGAYLGLVPATSQSGERDPQKRISKEGDEMLRRLLVGSAHYILGPFGGDSDLRRHGEKIASRGGKNAKKRAAVAVARKLSVLLHRLWVSGEVYEPLYNANRCGDVAA

SEQ ID NO: 344720 - protein, 342 aa, unidentified
MEDVSIVGLDLAKRVFQVHGAALDGRVLCRKKLSRGQLRPFFAQLPPCVVAMEACATAHFWAREISALGHEVRLVPPAYVKPFVKRQKNDAADAEAIAEAASRPTMRFVEPKTPKQQARAMVFRTRDLFVRQRTQSINALRAHLAEHGIVAPQGVWNLPSIQRLIDEPGHDVEPLVIEMSRLYLAQITTLSAQIASLEAVLKKEAAQSDASSRMMTMPGLGPITAMAIEAFAPALTVFQKSRDFAAWLGLVPRQHSSGGKQILGRTSKMGQRDIRRLLIMGAMSVICWASRKGAAPGSWLHAMLLRKPRMVVAIALANKMARILWAMETRKEAYRDPQLANI

SEQ ID NO: 344721 - protein, 421 aa, unidentified
MSSIENEITKTRNHSRQRGNMMRTVFGIDVSKASSEVAIVINGEKIHGYTMPNDAIGFTRLLDDLKTVQKPEIIFEATGVYSHRLQAFLEENGYAYTQLNPLEAKKQLDSLRVRKTDKIDAETLAISQFVLNRKPTYIQEEVYQELRDLSRFYQNLTEDIVRTKNRLHKVLQVTFPEMENILSTPTREQYWNLVMTFPYKDFVLELSKDELLEGIRQSTSKRISDKRVAYLAQKLAALANQSYCAVKKNSPILEEVRYYAKELLRLSEQRQAVLEQMVELAQPLPEYEILLSIPGIAETTATSMIGELEDIRRFQSANQINAFIGIDLRHYESGNFLVKEHITKRGNPYARKILFKCIHNIAAASHTNHCHIEDFYEKRKRQSQTTSTKPHTIASIHRLIRTMYYLITHNKLYDYTSTQNR

SEQ ID NO: 344722 - protein, 449 aa, unidentified
MSKGNGLTRGDVRRNERRAGLRALVPASGAVIGLDLGEKKQALAVTGADNQVLARRSPRVGVHGLGGELDWGMEKALAAGYETVTVACEPTGSRWMVVQELCRARRVPLVCVQPLVSHIAREQQDLTGDKTDEGDCVLIARLARELHCYVPEELDGRWAELRAAGRDRAAQVTRATAAKQLIRDQLGLVLPGLLEAHSEPLESATWLACLETVLEHAAGGDLGAAAAAGCERFAAGAAGRLAAWGGKRLGPSAARVLAALEGPAGVPRMVRAARRRMAGAMEDLKHARNRRARAEAEMIAMLGELGIDVARVCEIPGLSPASLAAILAESGDPHQYASSSSLVKHAGMSPARNESGGFQGKSAISRRGRPALRLAAWRAAWAVLRHCGVLAARFAALTGRDRARLHDAQARVACAASLLRWIWSLIVHGGSWDPAIAAGQAGRTPAMAA

SEQ ID NO: 344723 - protein, 465 aa, unidentified
MKKIKNLFSRNKSKKMLVKTEGRAVEVRGKADLNKLNEHAAGVDIGSERHYIAVPPGSTEHPVREFGVFTKDLYAMADWLKECGVVTVAMESTGVYWVPLYEVLEERGFQVKLVDARKVKNVSGRKSDVLDCQWLQQLESYGLLQAAYRPPDEIVVLRSYVRQREMLVKSAATHIQHMQKALQQMNLRLDNVVSDITGQTGMRIIKAVLGGERDVKKLGEMRNYRCHATAEEIAASLVGNYRQEHLFALKQAVELFEYYQEKIAECEKEMEKYLSSLPHVAEEEPPPLPRGEKPSSLSFNVREHAYKLAGTDLFRIRGLNSETVLRIVSEVGVDLSKFPTEKHFASWLCLSPNRRESGGRVLSSSTKPSGNRAAAAFRQAAVSVERSESELGAFYRRKRAQKGPASAATATAHKIARLYYSLVKKGGEYEEQGARAYEERERERMVTALRKRAKAFGYELVGQAA

SEQ ID NO: 344724 - protein, 465 aa, unidentified
MKSKTSKPKKRKQKISIEQGWATLNPHAAGIDIGAREHFVCVPPGAAPNPVRSFGTFTADLEALADWLRECGVTTVAMEATGVYWIPVFQILERRGLQPLLANARQTKHVAGRKTDVQDCQWIQRLHTYGLLQGSFRPADVCCVVRTYLRYRDELVSARSTQCQHMQKALQQMNLPLTQVLSNVTGTSGLAIIGAILQGQRDPVKLSQLVDPRVRATPAAIQKALVGDYRPEHLFVLQQAFDLYHTYEEKILACDQAIVRAVAQLPDRVDLSLQPLPARKEGRKPHSDRMAGQDMRECLYRKTAVDLTAIEGIGALTSLVLFTEVGPDVSRFPTEKHFCSWLGLCPDNRISGGKVLSSRTRRVVNRVSDALRMAATTLERSQSALGGFYRRMKARLGAAEAVTATAHKLARIIYRLIKHGEAYVRQGMQAYEEQFRARKLQALQKTAKIMGFQLVPKQSLPAGVS

SEQ ID NO: 344725 - protein, 344 aa, unidentified
MDHFGGLDVSVKETSICIVDDTGRIVREVKVASEPQALLKVLGNQAYRFKRIGLEAGPLSQWLFSALAEAELPVVCVETRHMQAVLKAQINKTDRNDARGIAQMIRVGLYRPVHVKTLRSQKLRMLLTHRKLLQSKAIAIENDLRGTLRNFGLKVGMVGKVRFEARIQELVENIPDLALLVEPLLIVRRALREQIVILHRRLLAIVREDEVCRRLMTTPGVGPVVALTYRATVDVPARFRKSKSVGAVFGLTCAKYQSGEIDWSGKISRCGDEMMRTMLYEAAQSMMHSKKWSWLKAWAMQIARRRGMKKAIVALARRLAVIMHRIWVDGTEFRWTREKTAAAA

SEQ ID NO: 344726 - protein, 319 aa, unidentified
MFQIVVGVDIAKHKFDVARLETHKYKHKKFDNTPDGFAAFIDWLATFGDNKILICMEATGAYSIPLAEFLVQSDYPVAVVNPAKIKGFAKSELSRVKTDKADAKLIARYALEKQPSLWTPPPANIRELQALLRRVEDLLEMRQMEKNRLDTADASVAESIKTVLTQLEKELKATRKRIQRLIDQDPDLKRRRDLLETIPGIAEVSSAHLLVALSEHYRFTNAKQAVAFAGLNPALNESGTWKGRTRISKMGDPLLRAKLYMPAVVAGQHNPVIRAFRLRLETNRKNGMAIVCASMRKLVHIAFAILKSGKPFDPHFSLA

SEQ ID NO: 344727 - protein, 360 aa, unidentified
MVIKKIKGKVMKKIAVGIDFAKEKFDMTAINVEKGTSIHGQFKNSPMGAKEMLHAIRKFARGTDPGDWLFCGEDTGYYSQTVTRYLLEKKCFMWLQNAYSIKMSEGIIRRGKDDKADSLCIAEYAHRFEDKAIRYKLPPKELEDLKMLLSQRDLYVSAKTKLQNSTSEIPERKVQGSAVSLIKSANKRVCRVIDDEIKKLEDKMDEIIDSVEAIKENYDILCSFTGVARINTLAFIVYTENFTKFDFDARKIATYWGVAPFHRESGTSVHTSPHVSGFCNRKLKTLISNAATVAIRYNPVIKAYYNRLLERGKCPMLAKNNVKNKIIHILTAMVRNKQKFDKDYFFTFGTSVKNVKTLAS

SEQ ID NO: 344728 - protein, 397 aa, unidentified
MSMLFVGIDVSKDCSSVQGLDREGKKVFYLEFAMNGEGFSQFLKLLKAHCEDLSGVTVGMESTGCYHINLFAFLCSEGMVCVVINPLLISNFARLSLRKTKTDKKDALTIAQFLLAHRSELSQVSYTQSSQDLKDLARERESLAVMMAGLKNDVRRLLQMMFPELEHRCKLFTETMLRFLVKFPSARAVRIAKPKEISKALIHAEGKRKRVFISAAEIIGLAKASVASESVAKELILSEKIETLLYLEEKKGRITEALVGACRSMRVDELDIITSVDGISKITGSTFLAELGDIETFRSYKHVIAFAGLDPSVHRSGQYEGISRLSKRGNRHLRRVIFLMTLCAVRSHNIFREYFLRRKQEGLPPKKAILATAHKLLRVLFAMLTSKSYFRKEVVEV

SEQ ID NO: 344729 - protein, 343 aa, unidentified
MQAITTIGLDIAKSVFQVHGIDAEGNVLIRRQLKRRYVLAFFQKLPPCLVGIEACATSHHWSRQLKALGHTVRLMPPAYVKPYVKRQKNDATDAEAICEAVTRANMRFVETKTPEQQSCLMLHRTRHLFIRQQTSVINAIRAHLAEFGIVAPVGRHGVEALLEVVADVSDNRVPEVARACLAALGAQLRRFKEQILEFDRRIMAWHRSNETSRRLDAIPGIGPVLATALVASVADPKAFRSGRNFSAWIGLVPKQHSSGGKDKLGSISKQGDRYLRSLFTAGALAVIRYAKLHGTKHRPWLTALLARRPTKVAAIALANKIARMAWAMMAKGERYKEPAALAA

SEQ ID NO: 344730 - protein, 416 aa, unidentified
MQGRDGAHWAGVDWGQRVHDVCVLDAHGEVLDERRFDNSSKGLGELSGFLSGFADVQVAIETPRGPVVEALLDRDLAVFAINPKQLDRFRDRFYPSGAKDDRRDAYVLAHSLKTDAHAFKAVSAEHPVIVELREWSRMHRELSEERVRLTNRLQAQLRRYYPQLDGFGVPLWSPWILDLFTAAPTPERARSLRRQTLVRLLRRNRVRKWTLEEVREALREPGFTVAAGTVAAASAHAETPVERIRVVSDQHQRAAKRLGELTERYRSTELGEVDSDEDSSQQHDVDILRSLPGVGKLVLAVLLAEALELLQRRDYHGLRAFSGVAPVTRRSGRKLVVLRRHACHQRLAWAVFQWARAAMSNDPEWHARYAALRARGHTHGRALRTLGDRLLRIACAMLEQGTMYDADRLAPVQRAA

SEQ ID NO: 344731 - protein, 344 aa, unidentified
MTTEAVPTLFAGLDLHKSNVFCGIKDLEGKPIYRQRLPAELPAILQALDPYRPHLQAVAVESTFNWYWLVDGLQAAGYPVRLANPAGMEAYSGLKQTNDQTDALWLAEMLRLGILPEGYIYPKAERPVRDMLRRRMLIVHQATQTVLSLQSMVTRQTGQAVSAAKLQQWTRKEVNERFADTYSQQTAVAMLELLREQRRIHHSLEKKVLAVVKLHGPFRRLLTLPGIGNILGITITLETGPIARFGSAGQYASYCRTVGSRCESDGKKKGENNRKNGNKYLAWAFVEAANFVQRYSARAQAWFASKTARAGRVVAVKALACKLAKAAYYVVRDDVAFDEKKMFG

SEQ ID NO: 344732 - protein, 417 aa, unidentified
MSLTPEPVVPVIAGRVCAGIDWASIDHAVCILDGQGAVLERFFVVHDAAGLKTLVRRLLKAGVEEVGIERSDGPVVDALLQAELAVLVIAPGQLKNLRSRYGSAGNKDDRFDAYVLADVARTDRARLRPLVRDSAATTAMRTTVRARRDLVEHRVAAANQLRAHLQLVFPAAAGLFAAIDSAINLTFLERFTTQTQADWLSPTRLASWLSKSAYSGRTSAAVLHTRLLAAPRGTTGTDAEVHALTTKAYIALLRTLNTQIGALEDNLATQLTSHPDTHIFASLPRVKTLRTARLLAEIGDARGRFPTADSLAALAGVAPSTRQSGKVKTVTFRWGANKQLRDALCDFAGDSRHDNPWAAHLYTRAIARGHDHPHAVRILGRAWAHIIWACWHNNLSYDPSQHRALQNILANTTAQAA

SEQ ID NO: 344733 - protein, 346 aa, unidentified
MLYAGLDLSRKRLDVHVLREDGTTALVTAVSPDTDALRTLARRVAAEGEPVRATIESMNGARFVHDSLEFAGWEVLIADAQRVRGLAPLAAKTDKIDARVLAELTRRALVPEIWLPTPEVRQERERARFRLHLVQHRSALKNRIHAILIAFGHPRPMADLFGVAGRELLDSLALPEPWQTNLVESLALVDDLSTRIDALELELRNLGADHPSMRLLMTVPGVGWVLAYTIASEIGDISRFASPKKLAGYTGLCPLVRQSGGKDRRGPLAKNGPTYLRWALIEAATHAARDRRYRDRYERTKARLGRQRGAKVARVDLARQLAEAIWYVLTKNEPFHPAGPAMGLVA

SEQ ID NO: 344734 - protein, 315 aa, unidentified
MAMPVSISKPIVGVDVAKNELVIYNAELDLLEEIPNTKAAITKWLKALPGAVVIAIESTNIYHLEFADLAHAAGCVIYMIGGYELHHYREGVKVRAKTDALDARLLARYLKNEQQELRPWTPPSPLYRQLLSLFRRRAALVQARVGLQQSWANEPLLKTAFAEQMKSMQQLETLVEKTINDQLKEAGLVGQLKRCLKVEGIGFLTGARLIAAFQRGDFRNADAFVAFLGMDLRVSKSGQKDGRRSLTKRGDPEARRLLHNAAMSASRTKAWKGFYESQRARGFSTTQALVMLARKLARVVFALLKGQGEYRPKVS

SEQ ID NO: 344735 - protein, 414 aa, unidentified
MKSTENARDIQRYIALDIHKEYVMVGAMNAAQEWVIRPRRVEMMRFRGWAENNLCAGDAVVIETTTNVWDIYDIVAPLVTRAVVAHAGAVRQIAEARVKTDTEDIKRLLRLLIADIVPEVWVPPAHVRELRGLISYRNRLVKTATMIRNRLHSLLHRHNLPLPEDGLANQDWWEQQSISALEKLQIRQELALLAEIEKHKAELDNELGKMSVSGSWGAPATRLMQLPGIGVVIAMTALGAIGDITRFESAGKLVGYAGLGAGVHDSGKEHREKKITKSGRKELRWALVEAAWRAVRMSPYWKDQFENFKRRMRPNQAIVAIARKLLVAAWHVLAKETTDCRASEEDLAYKMLLWSWSLDDEARLGLTHKQFAKYGLLRLGVQTDLTRFVRGKVARRIAPTDEVLARMAELGLSG

SEQ ID NO: 344736 - protein, 350 aa, unidentified
MWLLVSWIAIGLFIGPGWLLEHEGSHHKEGTTKMEESTTHAAGIDTAKEVLSVAVHGGDQSFEVENLLSGWRRLAASLAAAGVTRVGIEASGGYEGGVVRHLRAVGFTVMVLQPVQVKAYARLHLRRAKNDTLDAQMIAACTAVMEPPQAAPDERLAELAENLTFIEQVEEDIARLKVRLEHVHDTRLRHVVVADIARLKRRRTAEMIRIVKALRHHHDLAGRLDLVRSVPGIGERTALALIIRMPELGRLSREEAAALAGLAPFDADSGRHKGQRHIAGGRARLRCALYAASLPAAFRWNPALVSLYRRLVDAGKPHKLALTACARKLLIYANAVVQRGSPWSPTTAPP

SEQ ID NO: 344737 - protein, 338 aa, unidentified
MNYVGVDHHRQYSHMTLMDQEGQVLRSGRVPNLRAEIEKFLEGGEAMEAVIETGRSSYTMVDVLEEIGIAVKIAHPNEVKAIARAKIKTDKRDSEVLAHLLRMNMIPEVYRRSAENRQSQRVLRQRAFYVSAMTVLKNRVYAFLAQQKEAVRETVARETNIFSVKGQKALLELDLARGEKRLLEALLKTCRHLETRIEESTALVGKLYEESREAQLIRTIPGFGKYLSVLVAVEIADLNRFSDAAHLHAYAGVIPSTHSSGDKTYHGKIIRAGNRWLRWAAVEAVWPAIRADFDLRCFYERLARGKGANKAKVATARRLLTIIYKVWKEQRNYIPYRR

SEQ ID NO: 344738 - protein, 421 aa, unidentified
MPHLPHEPFAAFVGIDWADAKHALCLQAADSTTREASSLDHTPEAIDAWGCPLRQRFGGHPVAICLELNKGPIVSALCKYEFLVLFPVNPLTLARYREAFTPSRAKDDPTDAELQLERLLKPRDKLQPLQPQSPQMRALAQLVEARRRLVGDKVRITNRLTSALKHYFPHVLRWFEDKDTVIFCDFLSRWPTLKAVQLAHRATLETFFRDHHVRSAEVITQRLQAIKAATPLTTDEGILTPNVLLGQALVAQLRVTVQAIADFDHALAQHAQQHPDFPLFQALPGAGPVFAPRLLVAFGEQRERYTSAAELQKYAGIAPVTERSGKQAWGHWRLQCPTFLRQTFVEWAAESIRHSFWAQVYYQQQRAKGQRHQAAVRALAFQGLRILYRCWQDRTPYDESIYLQALTRRGSSLLHNLAKSC

SEQ ID NO: 344739 - protein, 340 aa, unidentified
MRPKLLMENDYILRQCVGIDVSKETLVVTMCMFSFAEEAHNSDVKTFKNNKTGFNQLVKWSRKEAYTDKPLRYVMEATGVYHEELANHLVKIGCTVIIMMPNKAREFAIWEGMISKNDTIDSRVLALVGCVKRSMRPWQPSKEIYHELRAMTRFAQDTKKLRLALKNHLEALEHSHQAEKSVVKHYEAMVSYLDKRLKMNLKNMKEKVASDEALNKKVENIITAPSLGFTSVITVIAETNGFALIQNRKQLTSYAGFDVKDNQSGNVEGTSRISKKGNSRIRAILYMPAVQAQLRSKHLKEAYDRIVQKHPDKKMIAVTAMERRLLLLRYLKSGVFTCRV

SEQ ID NO: 344740 - protein, 412 aa, unidentified
MDVYCGIDWAEDHHDVALAGRDGQLLARRRISDDAAGLAALLDLLAEHGDSPDDPVPVAIETPRGLLVACLRATGRPVYPVNPMAVARYRDRHSVSGRKSDHGDSVVLAHVLRTDMDMHRPLPADSELAQAIAVLARAQQDAVWDRTTAHNRLRSHLREYYPAFLAAFASLKGGIMRPEARAFLAAAPTQADAARLTLAQLRALLSRAGRRRGIDTEAARLLGAFRTEQMRQLPLVEQAMGRQALALLGQLDAACAAAADLEHAVTESFNLHPDAGIITSFPGLGALTGARVLAEIGDDRSRFQDAKGLKAYAGAAPVTRASGKTRSVTHRKVKNNRLAAAGYNWAFSALTASPGARAHYDRRRDTGDRHAAAQRNLFGRLLGCLHHCLTTGQHYHETTAFPAATKQSRRAA

SEQ ID NO: 344741 - protein, 348 aa, unidentified
MNIITVGIDLAKHIFAVHGVSETGQAALIKPRIPRDQLAALIAQLPPCTIGMEACTGAHHWARLFSQYGHTVKLMAPKFVTPYRMAGKKGKNDANDAAAICEAVTRPHMRFVPIKDEQQQSILSLHRIRQGFIEERTASYNRLRGLIAEFGIVLPQSVERLRHGLSEHLDQLPTLIKSCVMDLLQHTDTLSTQIEAYDKRIQISAKQDVRSKQLMQLPGIGPTTASALVASIGSGHDFKNGRQLAAWLGLVPGQYSSGGKTRLGKITKAGDSYLRSLLVLGARSVMNSRQDKQDGFSCWARNLHERRGYWKAVIAIAAKNARLIWAVLHYGETFTAPSMKVTKDMTPT

SEQ ID NO: 344742 - protein, 425 aa, unidentified
MHVDGTDEPGFAAFVAIDWGDRKHAWSLQPADSDLRERGEIEHSPEAVAEWATMLSARFANQPVAIAVEQSRGSLVFMLGKYEQLHIYPIHPRASAQFRAALVPSGAKDDPSDAELLLDLLVHHRARLRRLRPDSEQTRLIQHLVEGRRKLVNERTRQTNRLTAQLKLYFPQLLDWFGAVDSPLVGALLQRWPTLEALQRARPDTVRSFFTAHNCRSQELIQRRLEKIHQAVSAVSDKALIEASQAMTKVLVGLIATLREGIDDFDRQIAQAVATHPDFVIFDSFPGAGTALAPRLLAAFGSQRDRYQSAADLQTFSGIAPVTERSGKSKWVHVRWACPRFLRQTFHEWAAHSIGFCDWARAYYQMQRDRGKDHHAAVRALAFKWIRIAFHCWKDAVPYDDARYMESLRRRGSPLIAALAKSVLP

SEQ ID NO: 344743 - protein, 405 aa, unidentified
MDAGRFAGVDWASEEHAVCVVDEHGRILVGRRYRHDESGIRALCARLVRLGVALVALERPDGLLIERLLDAGLRVVAVHPNQVKAMRPRFRVAGGKSDSFDSFVLAELARTDSHRFRVLVPDGDRTKALRAMTRARESLVRTRIGLASQLRDQLQCFWPGAAKVFWSVDSQIALAFLKRYPTPADARGLGEQRLDAFLKRHGYTGRKPARELLARLRAGAEGRAGELEIQARRQLVLALVSALEPVVARISELTIEIRHALQAHPDGRTFRSLFIAQDSWLCAATMLVEIGDCRERYPTYRALAADAGQCPVAVESGKSKHAKFRWACDHRLRAAFDTLADSSRHHNPWATDIYTRARARGATHPHAARILGRAWSQVIWRLWHDHDTYKPEQHTALQHIIATRG

SEQ ID NO: 344744 - protein, 416 aa, unidentified
MNALSPPTVERFLAVDLHKAYVMVGGVNARQEVVLAPRRIELATWPRWSQAHLKKTDALVVESTSNAWDFYDQVAPLVGRAVVANPRLVKLIASARVKTDKVDTLALAKLLAANLIPEVWVPPLEVREARGLLAHRRRLVKTHTMAANRLQSVLQRHNLPGPTGEPFSATNRAWWTALKLSPIETLRVRQDLATLDHLDQQIAELEVEINRLSTSTPWAEQVPYVMQLSGFSVLLTMTILTAIGDIKRFPHAKPLVGYAGLGASVHSSGETHKTGHITKTGRRELRWALVEAAWSAVRYHPYWKAEFERLARRMPDNQAIVAIARKLLVVIWHVLTEQVADKHADEKMVATKLMRWSWELTDEQRGGLSTRQFVRLQLVRLKLGENLTHFTYGGMPRRIASVEEVLALKPELRAHD

SEQ ID NO: 344745 - protein, 320 aa, unidentified
MNSIIVGIDVSKETFDAAVLINNKVQTRKFNNNSEGFNKLVTWLKSRGTGHVCMEATGIYWKNLAKYLYDYGYKVSVVNPARIKGFAMSKLRRTKTDKADSVLIADFCKAMKPEAWYPQPLYIQELQQLVNRLNVLIKHKTQETNRLEGASKAIANNIQMHIEFLETQIKEIEQLINDHIKNNKDLHNKAMLLESIPGIGAKTQAVVLAFLADIEKFSSAKQVVAFVGLNPKHRQSGSSVRGASRISRTGNSDLRKSFYMPAMSALRHNCIIKQFSQRLSDTGKPKMLILIAAMRKLLHIIYGVLKHNSPFNPNVLINQK

SEQ ID NO: 344746 - protein, 332 aa, unidentified
MGRIPVFVGLDDHKDSVRICVEDRHGRVLGNRGWANDARRVLTYAEGFGCVQGAAIESCEGAADFAEELIDKGSWKVHLAHPGYVRRLRQNPNKTDHSDARLLADLQRVGYVPRVWLAPQSVRELRRVVRYRRQLVNERRAIKLRIRSLLREHRRQCEAPRWGKAWFTWMQNVALPESSRWILDRHLGRLKQLNADIVEVHLESKTQDDCVVQKLLTLKGVGPVTAWVLRAEVGRFDRFDSGKQLARFCGLTPRNVSSGARQADAGLIQTCNRDLRSVLIEAAHRLKRYDERWSALADRLRKAGKPGSVIAAAVANRWMRWLYHEMKAPAVA

SEQ ID NO: 344747 - protein, 388 aa, unidentified
MRQTDDLSKSLTPFVQGNTLVAIIELSLSSWLVAGVVPGIARQPLKKLEPDEAELLRLLQRWRDEAVKSGCAIERLVVAYEAGRDGFWLARWLRAHEIEVHVIHSTSVAVSREHRRAKTDRLDTAMLLRVFMGWLRGERGHCGMVAVPTIEEEDAKRPHRERENLVGEKTRIVNRMKAALIRLGIRGFKPELRRAPLKLDGLRTPEGLPIPPNTLDEIRRDLARLAMVREQIDLIEQARLERITQGPKTGPNAMVRLVASIVGVGVETADMLVREVLSRDLRDRRAVARYAGLTGSPDESGSKRREKGLARAGNARVRRGLIQLAWRFLGFQKDSALTQWYRARTDGVKGASKTKMIVALARKLLIALWRMVTTGEVPEGVRLRPVEA

SEQ ID NO: 344748 - protein, 342 aa, unidentified
MKFYCGIDLSARDCHVCVIDEQLKIVIEQKLRNELTKICQLLEPYKAKLKIVVESTFNWYWLIDGLQAEGFDVVLAHTLGLYLITGAKVKTDRRDAYSLAKLLLVGAVPAAYIYPVETRPVRDLLRRRMHLVQVRAGEYGSLRRLLLRQGILSSKQQEIKTATEAELEQWFEHPLVRLHASQELRRIELYSEQIAELEKTILALAQTAPSYELLLKLPGVGQVIALTIMYEVGELTRFANVKVFSSYCRVVPGIAQSGKVSGRGRASKQGNHYLKAAFSQAAVHAVRCYPKVRRCYERQLKRHRGRGRQMICYNIIAHKLAQAAFHVLKEQTEYREELLFGR

SEQ ID NO: 344749 - protein, 348 aa, unidentified
MILVGCDLHSRTQQVAVLDTRTGELVEQELAHDGDAVERFYRALPSPVTIGIETTGYTQWFHALMHQLGHTVVVGEAAKIRAMVVRKTKTDRRDARHLLDLLQHDRFPTVWIPDPDTRDRRALIAHRVRLVRMRTMVKNGLQAIALNQRLALRSALWTQRGLTQLKALALPPHTTRRREDSLALLAWLTTRIDQLDAHIAAVASADPRVQLLLTHPGVGPLTALTTVLVLGPLARFPDSKHVVSYVGLAPAVHASADKQRLGKITKQGNALLRWVLGQAAPLAARKDDDLRRRYFSVMHRRGRPKAKVALARKLLVRLYIMLRDQIDYEEFRRRGRAPRPQQLPVAVM

SEQ ID NO: 344750 - protein, 362 aa, unidentified
MNEKQATLEKELPTKFPVLYVAFELGNSTWKLACSDGRKVRQVTVTARDLEQVQRVFLRAQAHFGMGEAAAMVSCYEAGRDGFWLHRYLQGRGIDNVVVDSASLEVDRRLRRAKTDRIDAGKLLRMLIRYHGGEKQLWRVVRVPSREDEDARHLHRELESLKRERTRHRNRIHGILMQQGLRLPNPSKKRFLKDLEALRTWDGQKLPVGMKVRLVRVYQQLRLVEDQISILATEKREQLQQVDNAKMHQVSQLLKLPGIGPVSSWAFVMEFFGWRRFRNRREVAALAGLTPTPYDSGRKLREQGISKAGNQRIRTLAIEIAWAWLPVVGPACGASVSWPWLGVCSSICGVFWSMAWSLKEPC

SEQ ID NO: 344751 - protein, 309 aa, unidentified
MSSWVGIDVSKNTLAVWVRPPGVNFIVCNSSEGHQALLLNLADIQVERVLLEATGGYERAVMGCLVQAGHSVVRINPRRARAFAQAMGKLVKTDPVDAGVLAHLAQVIEPSACQTVSLARDELQELVRRREQVVKLRDDERRRLTLARSGVVQESLQTNISQLNEQIARLNSAIEAAAQRTDNQLVKQLGAIAGIGPVTVASLLAYLPELGQLSRRQIAALAGLAPYNNDSGQHSGKRCIKGGRASIRRVLYMATWSVIRCHSSFGARYASLRARGKCAKVALVACMRVLLIRLNAMVRDHSSWRAEAV

SEQ ID NO: 344752 - protein, 336 aa, unidentified
METVCAVVGIDVSKKKLDIALLVNGKTKAKVVENSADGYKSLLEWLSKAKVAKETLHVCMEATGIYYEPVALALHDAGVSVSVVNPACIKGFGHSENIRNKNDIADAGLIARYCAAMKPAPWMPPPLEQRQLRAWSLRVQALKDIRQQEQNRLEANTFTGMTDVADHVNQHIAWLSTEIKKLEEDINDHIDRHPGLKRDAELITSIPGIGTTTVARILGQLGDIRRFGSGKAFAAFLGVTPKQRSSGTSIKGRTMISRAGSKSMRAALYMPSLVACRHNPLLRCFAERLLATGMAKKAVIGAVMHKMTHLIYGVVRTGKPFDPNYLTNGLAIQDGI

SEQ ID NO: 344753 - protein, 319 aa, unidentified
MSNNILGIDVSKRKLDVALCFDGKTLNKKFDNSPSGCSLLVAWLETLHRESVHVCLESTGVYGDLVAHVIHDAGHVGSVVNPLRIKAYGVSSLSRNKTDKVDARLIADFCLTQKPKQWLPPSPQVAKIQALSRRIDSLEEMLQAERNRLDVSPKDTRSSINRIIKTLEKEIESLGKQIKDHIDQNPKLKNQNDLLKTIPGIGEKTSQLLLAEIEFERFDSARAVAAYAGVTPKQRKSGTSLNFTRLSKMGNSRLRKRLYFPAIVAGQHNQVIKEFAKRLANNGKSGKQIVCASIRKLLHIAFGVLKNQTPFDPNVAFQG

SEQ ID NO: 344754 - protein, 430 aa, unidentified
MKSNTQNAKIEAITEKTLVLGIDVGSEMHYARAFDYRGIEYSKKPFKFSNTEAGFVTFKEWILNLKERHEKDKVVPGMEPTGHYWFNLGKFLQDNEMKPVLVNPHHVKKSKELDDNNPTKNDRKDPKVIAGLVREGRYMIPYLPDGVYADLRTASNIRFQLQAELTRIQNRISRWFNIYFPEYKTVYGKPDAKSGMLILKAAPLPEDILTLGIDGVNQIWRDAKLRAVGKARAKTLIEAAEHSVGSKEGAVSARMEIRMLLEDYESRNTRLQEVMVLIEELIRKIPMAEKLLEIKGVGIRTVSGFLAEVGDISRFNNPKELQKLAGLALVENSLGKHKGETTISRRGRKRLRYLLFEVAMSLVSKNQEFRELHNYYTTRRLNPLKKMQSLMAIAAKLIRVFYAMLTKGVDYDPKKMVSDIKRPAVYLQAA

SEQ ID NO: 344755 - protein, 328 aa, unidentified
MSKERLSVGVDVGKDEVMVAVVGRKPMAFGTSKPDMKRLMKWVKSQAGLRAIHIGMEATGVYSSRIALALWAYPDVTVSIINPAQIKAYGRAVLRRTKTDSVDAQLICDFVRSQTPIAWTPPSATHQELKALVTHADAIRDEIRRWANRRHAHKHMTHLPAVIATSTAEVVATLTEELATIEAAIMQVCQSDTTLAEDMAIAVSIPGIGNCSAAQLLAYGGHALTQHTRRQLDAHAGLAPSERQSGTSVRGKSPIAKAGNARLRRALYMPTLVAVRYNPILKRCYDRYVERGKPKKVALTACMRKLLNILRAMLITRKPFNPAYQPLT

SEQ ID NO: 344756 - protein, 439 aa, unidentified
MILIREVADAPVIMGISKPAGLKSPCGEVKIMNPLFVGIDVSSRNNVAYLMKPDGSKHSSFSVQNNLGGAKILSERIVSALESVPLSDLVIGLEATSIYGDSLVYALREDGSLGRFQRKIHVLNPKQVRKFKEAYPDLPKNDWVDAFVIADHLRFGRIAKEVYMDDYRYQALRTLTRSRFDIIQNLTREKQRFANYLFLKCSGIAQAKDIQNTSATTIALMERFETVDDLANADLDELTAFIAETGRGRFADPDAAAKAVQAAARGSYRLPKTVNDTVNQAMAVSIASMRALKEQVKVLDKAIEQQFEIIPNTLTSIPGIGKVYSAGIIAEIGDIHRFDSQASVAKFAGLVWHRNQSGVFEAEHSQMIKSGNRYLRYYLLEAANSVRRCDSEFRRYYDLKFKEVNKYQHKRALALTARKLVRLVFRLLKDNRLYIPPED

SEQ ID NO: 344757 - protein, 346 aa, unidentified
MLYAGLDLSRKRLDFHLLDAEGATVDVGAEPPDVDGLRGLTQRLGAHGAPIRAAIESMNGARFVHDQLELAGWQVEIADAQKVKGLAPLACKTDRIDAWVLAELARRDLVPAIWLPDPLVRAERERARWRLHLVRHRSSLKQRVHAVLLTHGKPCPVSDLFGVRGRQLLARLGLPEPWQGTIEASLRLIDELDREISECERELRRLGAEHRYVPLLLTVPGISWVLAYTIAAELGDIRRFPSPRKLAGYSGLCPRVYQSGERDLRGPLSKQGPRYLRWALVEAATHACTHPIYRERYQQTKARIGKQRGAKVAQVDLARRLAEAIWHMLTRDQPFAPKGATDPLAA

SEQ ID NO: 344758 - protein, 414 aa, unidentified
MNFCPVAGIDVSKRFSDMCVLSPDNKIFAQEKIYHDETSINRANALLQEAEQLFSSKPVIVMESTSHYHLILFQFFSDRGYDVIVVNPLQSNSMKDFSIRKRKTDRVDAFKLAMMYRTKTLRPSQIPQTAMRALRQLCRERVEFLNDITRYKNRLTALLDQSFPGYDRVFSDVGGITSCAVLVHFPTPAILLTVEEAELVEVIAAASKSGYGFAKKKAELLISAAQKAQILGVHSCADETLIVCAIQMLRTLSESILQIDKAIENLLAQTKEIRNNVSLLQSIPGIGNHSAALLLGEIGDFTLFKKPKQLAAYFGLDPSERQSGTFRGTKNKLSKRGSPYARAALHMGVVNSICKHGKKPAPNPVLLSYYEKKCKNKPAKVVQASGWTSSVNAQVGLYYLCCFARPEALRAENA

SEQ ID NO: 344759 - protein, 362 aa, unidentified
MVNIAHIDAVRVVVGVDTHKDEHVAVAIDKLGAYLGEYRLPTTPAGYASVERWAIGLGDVAAFGVEGTGSFGAGLTRFLSGRGRTVVEVIRPDRSTRRRLGKSDSIDAEAAARSVLAGTSHGSPKSGTHSVEMIRMLKVVKDSAMKARTQATNQVKSLVLTAPAELRLALDGLSASGLIRRCAGFRPGDVATPTAAARLALRSLARRHRQLTAELKVVNAELARITAEVAPALLQAFCVGPDSAAALLITAGDNPERLKSESAFAALCGVSPIPASSGKTNRHRLNRGGDRRANSALHRVVIVRLRHDERTRMYMARRTAEGMTKTQVIRCLKRYLAREAETWTCLPSLVPHIHENEQRQRA

SEQ ID NO: 344760 - protein, 398 aa, unidentified
MTESSDYESVQVFIAVDVGKDTHHAVAINRSGKRLFDKALPNDENKLRSLISDLKQHGQILLVVDQPATIGALPVAVARSEGVLVGYLPGLAMRRIADLHAGEAKTDARDAAIIAEAARTLPHALRTLKLADEQIAELSMLCGFDDDLAAQTTQASNRIRGLLTQIHPALERVLGPRLEHPAVLDLLQRYPSPEKLASLGEKKLAAQLCKLAPRLGKRLAADIAQALAEQTVVVPGTNAAAVVLPRLALQLITLRKQRDEVALEVEQRVLAHPLYPVLTSMPGVGVRTAARLLTEVACRAFASAAHLAAYAGLAPVTRRSGSSIRGEHPSRRGNKALKRALFLSAFAALRDPLSRAYYTRKMSQGKRHNQALIALARRRCDVLFAMMHDGTFYTPQGS

SEQ ID NO: 344761 - protein, 387 aa, unidentified
METVADRAKPTAIRTDLRAIFVSLELSRSRWLITSLSPGNRDRMSKHSVQAGDIAGMLARFSELRHKTQARTGQSFPIVVIQEAGLDGFWIHRVLRKEEIESHVVDPASIATSRRRRRAKTDRIDGEALIRVLLAFKRGEPRVCMMVRAPTPAEEDRRRLCRERKVLTAERVQHVNRIKGLLFAQGVSEYEPLRRDRRDRLARLVTGDGRLLPNYLKAQIGRELDRLELLLEQIKAVEAERDSLLASTEANKSALPAMLLDLKGIGPEFAAILWSDGLCRHFDNRRQVAAYAGLAPTPWQSGSVDREQGISKAGNPRLRETMIQLAWLWRRHQPRSVLTLWFEERVRHNADRLKKRTIVALARKLLVALWKYVSAGIVIEGAASKTA

SEQ ID NO: 344762 - protein, 455 aa, unidentified
MRRNEPGDNKIRHALPTVHPNAAAIDVGARMHVAAVAADRTAEPVRSFGTFTTDLHRLADWFAECGVDTVVMESTSVYWIPVFELLEARGFEVFLVNARDAKHVPGRKTDVSDAQWLQRLHSHGLLRASFRPKGEIVELRAYLRQRERLLEYAASHIQHMQKALTEMNLQLHHVVTDITGATGLRIIRAILAGERDPAVLALLRDTRCHASVETITKALTGYYRAEHLFALEQALALYDAYQQKASACDGIEAVLRQLSFRRGREVGPLPSPRRNMRRQPNGPEFDVRAALFALLGKDLTQINGLGPYLALKLIAECGDDLSAWPSAKHFTSWLCLAPSNKISGGKVLSSRTRRSGSRAAALLRLAAVTVGRTDTALGAFYRRLSARIGKLKAITATARKIAVLFYNALRHGMDYVDPGASAYETRYRARVIDNLHRRAKVFGFVLQAMAPVAVS

SEQ ID NO: 344763 - protein, 320 aa, unidentified
MDAQGRVVVQRRLKRGQVERFFAALPPALVGMEACSSAHHWARMLGGLGHEVRLMPPAYVKPYVKRNKTDARDAEAICEAVTRPTMRFVPVKSAETQAARGLHRVRDLLVRQRSQIGNCLRGLAAEFGLVAREGQAGLASLRERVVAAEGPIPGPLREVLAGLARQWAELDASVAELDRRIAREAQAHETARRLMAVPGVGPINAHALVAGVPDARAFRSGRDFAAWLGLTPRQASSGQRQRSGPISRAGDRTLRRLLVLGAASLVRQSRAKPQARPWLTGLLGRRPVKVAIVAQAAKTARIVWALMARGDTYRARPAAA

SEQ ID NO: 344764 - protein, 424 aa, unidentified
MNLTQNDRLKQVTCDTLIVGVDVGSQTHFCRAFDWRGFELSHRVFKFSNTGMGFLTFLRWTEEIMNKTGMKKVIVGCEPTGCYWLTFQKFLQDHGVQLVTVNPFTVNRSMELDDNSPEKSDMKDPKTIALLVKDGRFSTSYLPSGVYAEIREASVCRDQIMKQHVRLSNQIQGWLQKFFPEYLECYADWDAASGLMLLKEAPLPQDILKIGAGGINQIWRDAKVRAAGIKRAQTLVEAAQNSVGLEAGEAARLEIWILVNDYISKAEQLRRLEEYLEEKVKEVPNVEKLLAIKGVGLSTVIGFVAEVGDIGRFTDPKKIQKLAGLEIVKKSSGKKKGQPRISKRGRRKLRRTMYESARALINWNPAFQDVFFYYRDRERNPLGGMQAKIAVACKAIRVFYVVLRTGCEFDEEKFRRDIIRPEAA

SEQ ID NO: 344765 - protein, 323 aa, unidentified
MSQPNLQCMGIDVAKLSLDIAPTDTIEPFTVGNDEDGFAVITDKLKHTKINLILMEATGGLEAAIACKLQSEGYDVVVINPRQARDFARSMGYLAKTDKLDAAMLAQLALVIDRHPDRSRYIRHLPDEARAVLAAMVVRRRQLNHMLVAERNRLYPSHPQSRKSIDNIIDALQNELDRINEQMKQHMTAFFQEQARLIGSVKGVGDITVASLIAELPEQGKLNRREISALTGVAPLNRDSGKMRGKRTTFGGRAGVRATLNMAALVATQFNPAIKLFYQRLLAAGKPKKLALVACMRKLITILNTMLRKGEEWNASFQSQVIS

SEQ ID NO: 344766 - protein, 407 aa, unidentified
MNAVGIDISKGKSMVAALRPMGEVAFLPQEFLHTEVGLEQMACAIIALGEDTRVIMEATGRYHEPVAEALHEYGIYVSVLNPLLIKQSGGGSIRKVKTDKADAIKIAKYGLDNWADLREYTPMDTIRQQLKLCSRQYNLYMKTVVSLQNNLISLTDKVFPGVNELFSSPERADGHQKWVDFVMTFWHCDCICRVSEKAFTARYQKWCKRKGYHFSAEKALDIYAASCGHFTTLPKNENTKLLIVTAAQQLLAGKITLATLRTEMMWLASQLPEHETVRAMYGVGETTAAQLMAEIGDVRRFPRRSAIVGFAGVDPGVDESGKHSAKSVPTTKRGSPHLRKTLYQIVCTYLKKSPADEPVYQFLDKKRAEGKPYFVYMTATQNKFLRIYYARVKECLEAFDALTAKQT

SEQ ID NO: 344767 - protein, 316 aa, unidentified
MNTQVFVGLDVSKQKLDVAVRPQNRHFVTPNDDRGIKQLVKRLAALKPQLIVLEASGGYEFLVTAALAEAQLPVALVNPQSVRKFAGATGKLAKTDKIDAQVLAHFAEALRPEPRPLPDQAQQMLKAALQRRLQVVKMIGQEKNRLEKTFIPAVRQDIQAHLTWLSQRLEQLDRDLSDQIRQSPLWRDRDRLLRTIPGIGPIVSRAVIAQLPEVGTLPGKKAVALVGVAPYNRDSGRFRGKRMIRGGRSYLRRMLYMAAVVASRWNPVIRAFYQRLLAAGKPKKLALTACMRKLVLILNAMVKNNQPWNQFITQVP

SEQ ID NO: 344768 - protein, 345 aa, unidentified
MSMVRNVVGGVDTHADTHVAAVIDSNGGLLGVEAFPADAAGYEGLLGWLAGFGAVAQVGVEGTGSWGVGLSRFLTETGIEVVEVDRPNRQVRRKVGKSDATDAVAAARAVLSGAAAVTPKSRNGPVEQMRVLLVARRSARAQRIQSLNQLRHLVFTAPEPIRVRFKDRYKTGLVTEAANMRPRKGSDPVTYTTNTVIRDLARRIQSLTAEMRNIDRTLVELLEQAAPSLLALYGLGPDTAATLLVTAGDNPDRLHTERGWARLCGVAPIPAGSGKTSGRWRLNRSGDRNANAALYRIVLTRMSSHPETRAYVTRRRTEGMSTAEIMRCLKRYVARQTFKHLPTEA

SEQ ID NO: 344769 - protein, 320 aa, unidentified
MSQNTTALMTDKPSPVQAGMDIAKASLQFHLQSKSFDLPNTPSGHAQLLKRLAAIPGVHVICEATGGYERAVVAALHAARIPVSVLNPARVRQFARASGELAKTDPIDAAMLTAFGQAFMPAPTEPRTAVEIKLAALVTRRLQLIELRVAEEQRAATCADPALRKLFTPWLAQMEKQIAKVEALIEELLKEHAPRAGQVQRLDDIMGVGRLTAVMVMATMPELGTLNRRQAAALAGLCPYNRDSGQWAGKRCISGGRAEVRRALYMAALSASRSNHLLKAFYDRLIAAGKPAKVALTAVMRKLIVLMNHLLKNLNFSLAT

SEQ ID NO: 344770 - protein, 409 aa, unidentified
MDAILERCAGLDVHQETIVACVMYGPLDKRAKKEIRTFGTTTKELLQLQDWLTEYNCSDVAMESTGVYWKPIWNILEGSFHLWLANPQRIKNVPGRKTDMKDAVWIAQLLRCGLIEASFVPPEDIRDLRDLTRYRRKLLGDATAEKNRVHRILQDANIKLTTYVSDVFGISRRALLDSLVNGEVLDPQQVEQMVKTSLKKKVPQLIEALNGRIRLHHRKMIQKHLNHLAYLEKEIEVLESDIAQLLSPYQEAVDLLVTIPGIQKDAAAGILAEIGCDMSMFPSEGHLASWAGVSPGNNESAGKKKSTRTRSGNKGLKSILCQAAWAAAKAKGSRLSSFYHRLVKRRGPKKANMAVSHLLLRIIYQMLLRNEPYNELGWDYLPQKEKSVDYWVQRIKNLGYSVNLQIETA

SEQ ID NO: 344771 - protein, 425 aa, unidentified
MNSTQNKKIEQVKETTMIVGIEKHYFRAFNWRGIELTRKPVAFSNSMEGFNSFYNTIVELIQKSELEEVLVGIEPTGHYWFDLGQFMGEKNIKFVMVNPHHVHKTKELDDNSPSKNDRKDPRVIAGLVRDGRYFYSYMPTGVYAELRNASNRRFVLVEEQTRAKNRLQKWIAVYFPEYKGIYTHIDAKGGLLVLKQAPTPEEIVKLGEEGIIKIWKDAKLRGNGNKRALKILNAAMRSIGLRTGLTEARMEIQDLIEDYELQTKRLERVNDLIKELCQQIRYADKLLEIKGIGITTVAGFIAEVGDITRFDSTKELQKLAGLELVADSSGKHNGKTKISKRGRKRLRYLLFEAAISVVGKNEEFKEIHRHYTTREKNPLKKMQSLIAVACKLIRVFHVILTKGVSYDASKMLEDIRHPGEQLKAA

SEQ ID NO: 344772 - protein, 342 aa, unidentified
MGEVGIIGLDLAKRAFQTHGACADGSVAYRKKLTREKLLVFLAEQPRCVVAMEACGSAHHWGRAIRDLGHEVRLIPPIYVKPFVKRHKNDAADAEAIAEAASRPTMRFVAVKTEDQQARAMLFRTRDLLVRQRTQLINALRGHLSEHGAVAPQGLPNVKMLAQVVEEPETSLPLLVVELARVYLDHIESLSRKIAELEKVTSREAERGPATRRLQTMPGVGPITAMAIETFAPPMEVFKRGRDFAAWLGLVPRQHSTGGKQILGKTSKMGQRDIRRLLIVGAMTVVRWATRKGALKGTWLHRMLERKPRMLVAIALANKMARSIWAMLTKGEDYWAPVAATA

SEQ ID NO: 344773 - protein, 333 aa, unidentified
MNVTTVGIDLAKNVFSLHGVDGRGAVVLRKTVSRARLMPLIAQLPACVIGMEACSGAHEWARRFAELGHTAKLMAPKFVAPYRKSGKNDGNDAEAICEAVSRPSMRFVPVKSVEQQAMLTLHRVRLGFVEERTATINRIRGLLAEFGVVLAQRTVEVRRGAAAALDALPSHAARALRDLLEHVRVLDERVREYERELAQHARSDERAKRIQALSGIGPISASAMIASVADAREFHNGRQFAAWLGLTPKQFSTGGKTRLGRITAHGDPYLRTLLIMGARSMLQTAARRTDKLARWAQAIRARRGYHRACVAIAAKHARIVWAMLARNEPLRLA

SEQ ID NO: 344774 - protein, 427 aa, unidentified
MKYTQNEKILQVTEDTLIAGVDIAKESHYARAFDYRGVEYGKYLRFENNREGMTKFFKWAKDLMERHKKNKLIVGIEPTGQYWLCFAQYLKDNNIKVVLVNPFHVKRSKELDDNSPTKSDRKDPKTIAMLVKDGRYVEPIIPEGVYAELRVAMDIKDRLNKQIGMTKNQITRWLDIYFPEFNTVFSDWEGKAALITLREFPTPEKIAKKSAEEILSIWKKEVQRGVGEKRAIKLIETAKESIGKKQGIKMAEYEIKTLIEQYEFLKKQIEEVEKKIEELIVEIPGVKELLEIKGIGINTVAGFIAEVGDIEKYEHPKQIQKLGGLNLVENSSGKHKGETTISKRGRKRLRRVLFNAVMALVAKNEEFRELHKYYTTRAQNPLKKKQSLIVLCNKLIRVFYVILKKGVKYDPIKMMKDIKRPALQEAA

SEQ ID NO: 344775 - protein, 409 aa, unidentified
METVIERCCGLDVHQSSVVACIIITDRRRKPRREIRTFGTMTKDLETLRQWLKIEGITHVAMESTGVYWRPVYNLLHGAFTLIVANAHHIKNVPGRKTDVKDAEWIANLLRHGLINASYVPTPEIAELRDLTRYRRKLVGTASAERNRTLKLLETANIKLASVAADVFGVSGLAMLRALASGATAAEEMADLARGRMRRKLAPLAAALDGRVTDHHRFLLTVALGRLDALERDIALLDERIAAKVAPYNRQISLLMQIPGVDRLSAIAIIAEVGVDLSHWATAGKLAAWAGLCPGNYESAGRAKGSGIRRGNVHLKAALYVAASAAARQRGSYLRDKYHRLRARRGARRAGVAIAHKIIVSAWYILTQEVPYQDLGDTYLDRLAEHRVRRNLVRRLKGLGYEVTLSKTA

SEQ ID NO: 344776 - protein, 387 aa, unidentified
MPQPNDLSRSLVALDQDSTIIAVVEMSQSSWLVAGMLPGIERQPRKKLEPNPERLLALLHRWRDEAVEAGRKITRIALAFEAGRDGFWLARWLRARGVEAHVIHPSSVAVSREHRRAKTDRLDTELLKRGFLGWLRGERGHCTMARIPTIAEEDAKRPNRERECLVRERTRIVNRMKGTLARLGIRNFKPTLRKAAERLATLHTPEGSVLPPNVSAELQRDMARLGFVVSQIKEIEGARQKRLEQEPETEPHAMVRHLARVVGVGVETADILVNEVLSRPMRDRKAVARYAGLTGSPDESGAKRREQGLAKAGNARVRRGMIQLAWRFLRFQQNSALARWYQARTADHRAATRKTMIVALARKLLIALWRFVTTGETLEGVVLRPAG

SEQ ID NO: 344777 - protein, 411 aa, unidentified
MQVIHERCAGLDVHKKSVSACVLRWEAGGKKVRELRVFGTMTRDLLQLADWLKAQEVTHVAMEATGVYWRPIWSVLEGQFSLLLVNPQHIKVVPGRKTDTKDCEWIADLLQHGLLQGSFVPPTPIQDLRDLTRYRAELTQAQNRVANRIQKLLEQANIKLASVASNALGVSGRQILEALVQGEQDPERLAQRAQRRLRSKIPELRLALEGKVRDHHRFLLREYLDEWEAIGQRIARVEEEVERQLGPFEWAVTLCQTMPGVEWVTAANLVAEIGVNMEQFPTASHLASWAGLCPGNHESAGKRISGKMREGNRWLRRTLCQAAWAVSRKDCYLSSQFRRLASRRGIKRAVMAVAHTMLIITYHMLKNTRSYTELGGTYLEQINKDQLQRYFVKKLHKLGLKVTVEPLTQPA

SEQ ID NO: 344778 - protein, 451 aa, unidentified
MSASKKPRRKRDISPTHPNAAAIDIGATMHVPAVGPDQDPDPVRSFGTFTGDLHRLADWFEQCGVRTVAMESTGVYWIPVFEILDQRGFEVILVNARDAKHVPGRKTDISDAQWLQRLHEYGLLRASFRLKGEVATMRAYLRQRERLLDYAASHIQHMQKALTQMNLQLHHVVTDITGATGMAIIRAIVAGERDPAVLAAHRDPRCHASAETISQALVGNDREEHIFALTQALELYDVYQAKVALCDVRIEAVLKRLRKASSVPVGKPPPVRTIKKQANDPAFDVRTALHGLLGCDVTQIHGLGPHLALKLVGECGTDLSAWPNAKHFTSWLCLSPSNKISGSKVLSSRTRRSGSRAAALLRLAAVAVGRTETALGAFYRRLSARVGKAKAVTATARKIAVLFYNTLRHGMEYSDPGASHYEERYRRRVITNLERRAKSLGYVLQAVPAPG

SEQ ID NO: 344779 - protein, 332 aa, unidentified
MDNFYFIGVDVSKKKLDFCVLFEGKVLREEQVSNHQQAVARLIGELKNDLEMDNEQFLICAEHTGQYTFPLVCACKSVECKLWLENPSQIKYSSGMQRGKNDKVDAKRIAIYASRFGDEVKYYDRPSEEIERLKQLERERALYVTDLAKYKGQMYDQKDFMPAALYRKKTKRMKGLIQELQAAIDAITAEMEKIIGSTEVLARQMELLMSIDGVGKVVALNVIIETEAFSRFDNPRKFCCHAGVAPFSYTSGSSQHSKNKVSHRANKNIKKLLHMAAVSVTHRKEGELKAYYMRKVEEGKNKMSVINALRAKIVARMFAVIKRNEVYTPIYS

SEQ ID NO: 344780 - protein, 389 aa, unidentified
MPSVSERPEAPTAIRTHLAASFVSLELSRSIWLITSLSPGSGEKMSKHSVRAGDVAALLARFSELKRKASERTGKSFPIVVIQEAGLDGFWLHRVLQSEGVESHVVDPSSIATSRRRRRAKTDRIDGEALLRALLAYKRGEPRVCAMVKAPTPEEEDRRRLCRERKALIAERVKHVNRVKGLLFSQGISGYEPLRRDRRQRLDELTTGDGRPLPVHLKTQIRRELDRLELLLDQIKEAEAERDALLAAPEPAAPAPAGRMLLEFKGIGAELAAVLWLEALFRHFDNRRQLASYAGLAPTPWQSGSVDHEQGVSKAGNPRLRTSLIQLAWLWLRHQPQSALTLWFKERVSGNGGHFKKSTIVALARKLLVALWKYVTAGVVIDGAVMKDA

SEQ ID NO: 344781 - protein, 436 aa, unidentified
MAKLVTFEQVNAHAAAIDIGAQKIFVSPDGETVLAYQTFTADYRLCVEDLKRRGVRHVCMEATGVYWIALYELLEKAQMEVCLVNPKEVKQVKGRKTDPKDCRWIQKVFSAGLVRQSYVPAGKLKELRMLVREREDIISMGSAYVNKMQKCLELMNIKLTSVISQIHGASGIKMIEAIIAGERDPEQLLMLCSKSIINKKADQVIKALEGNYNESWLFLLEQNYYLWRMHQQQISIIDKKIEEILSELQFNKPVVKAEATAKPIRHHAPQIKDLHQALLNIYGVDANTLSGVNDYTLLRLLGEVGTDMSRFPTVKHFVSWCQLAPVLNKSGKMNRRIKVRNGSKAGQIFRGVAQGLLNSRHIAIGAFMRRIKARHDSKIAIKAGARKLAEAFYRLLTKGAAYVEQGTTNYLKQIEEKEKSFLQKLALKHNLRLVSP

SEQ ID NO: 344782 - protein, 315 aa, unidentified
MSEIIVEKFVGIDVSKDTLDIYIDPAAEAVHVAYDDKGVAHVVNRLLKVGPTLIVMEATGGLEIRLASELAAKGLPVAVINPRQARDFAKATGQLAKTDLVDAAVLAAFARAIRPVVRPIKDADTRELDDLVTRRRQLIDMRVQEILRLGTASKVQRKSITTHIAWLEKRITKLDDDLTKQLRASDAWRTKDDLLQGIPGVGAVTTLTMLAKCPELGTMNRRQIAALVGVAPLANDSGQHRGKRRIWGGRADVRAVLYMAAISAMRSNADIKAFAARLQKAGKLPKVVIVACMRKLLTIMNTMVKNNAQWTPKTA

SEQ ID NO: 344783 - protein, 413 aa, unidentified
MANEVIKVIAGIDTHADTHHVAVINEHGKPLADREFLAVGSGYRKIVDFITSYGIVTAVGVEGTGSYGAELARTLRAAGLTVLEVNRPNRAARRLRGKSDPLDAYEAAKSVLDGRTTSIPKAKDGPVECLRILRAGRASALKARTAAINQIKGLLVSAPDKLRAKYRAMATSALIPALQRTRPSGHTADPEYVTLLTLKALATRCQSLAAEIAAADAALQEIIDAYAPMLCDLPGVGTDVASQLLVTVGDNPDRLGNEAQFASLVGVAPVPASSGKTTRHRLSRGGDRHANHALYQVVLVRMASCQRTKDYVAKRTAEGKSKREIMRCLKRYAAREIYRQITNPQPAPDNSDLRQTRTTLGITISTAARELGQWPSKISLLERGLLRNDILATNYRRWLREQQPESAIQNAIL

SEQ ID NO: 344784 - protein, 368 aa, unidentified
MEEVRAFVGLDVHKATISIAVADDGRGGEVRHVGTIENTPVAIGKLARKLARRHGTIEFVYEAGSCGYNVQRQLAEMGMACRVCAPSLTPRKPGERVKNDRRDAIALARLHRAGELTYVWVPDELHEALRDLVRARHAACEDVRRDRIRLQAFLLRYDLRFEGKPWSTRHRKWLWNRQFAHPAQQIAFQAHLNALDHDEARKRELEEQIRELLSESPWAKQMRALQALKGVGPVVAATIIAEVGDFSRFAHPRQLVAYFGLAPGEHSSGGTTRPRGITKAGSSLARSVLCEAAWNYRTTPKVGQWMNERCPPVSQDIKALAWKAQLRLHKTYRRLTSRGKRSVVATTAVARELLGFIWSIGQRVPLGA

SEQ ID NO: 344785 - protein, 421 aa, unidentified
MRFYTKQHRYYCGIDLHARRMYIRVLDADGQIRVHRNGPATPEHFLSTIAAYREDLVVAVECIFTWYWLADLCAQEGIAFVLGHALYMKAIHGGKAKNDKIDAHKIAVLVRGGMLPMAYVYPREMRATRDLLRRRCHFTRKRAELLTHIQNTASQYLLPTLGKIAYHGNRAGVAEQFRDPEVRKSIETNLALVDEYDRLLSELELHLTQTAKVHDVNAFYRLRSVPGIGKILALVLLYEIHDIHRFPRVQDFVSYCRLVKCAKQSDGKHYGYSGTKIGNAHLKWAFSEAAVLCLRKNPPAQRYVARLAHKHGKGKALTILAHKLARAVYYMLHRGQAFEVTKFFSGTAGGDRPPRAENGRGAGGDSHDASRSRLTRHDLDGGRYLDPPEIKRRGSRRRGHERDGVTTERVVDAAARVAEER

SEQ ID NO: 344786 - protein, 331 aa, unidentified
MKGFKAVVGVDVAKDSVSVTVLYGKKEQSFTSENEGKVFESELSKTLKGLERQRILVVMESTGIYHVKLACHLHGMGYAVSVVNPFVTKKYSEMQMKRTKTDAVDSKIIAEYGRSANDLKLFTPKNEVQQAMEIKLKTIEDFYTQINALQNQLAALEHLPACTNKLKRPYEKAIKLLYEEIGKIEKDLIKLSKKHYPEEIRILNSVPGVGDRLSCIIVSMLRNFDSFERGKQITSYLGICPSPYESGTSVKRRGRIMKKGNPYIRKILYLCALSASRYNKTCKLLFERLVLKGKSKRLALIAVANKLIRQAFAVLKTKTLYNEDYLLMKGA

SEQ ID NO: 344787 - protein, 381 aa, unidentified
MATRKYDRPRVLARRRPSGHIEQKVTLVIAGIDTHKDTLAVAVVDDSGRLVAGGDVPNTERGFAQLVDMFTAHHVQRVGIEGSGSFGRAVAVHLALWWQSGQPVTVVEVPTLMTSRERHGQLGKGKTDPVDALAIARITTREQQLPPVRLTVGAAADLRALLDYREDLVRERGALVNRAHAELGGLRPGYQQQIPILTTRARVRAAVDLLGDDSSIRATLCRRRLERVIAIDTETAELKRQITRLVAAADTTLTDLYGVGPLVAARFLAEVVDIRRYPNRNAFAAANGTAPLPASSGRTVRHRFNPGGNRQLNRSLYTIALTQIRGDTEGRAYYERKRAAGKSKREALRCLIGEVSVMRPGIGLDRGFSVVSGDGLVAEPL

SEQ ID NO: 344788 - protein, 501 aa, unidentified
MMAKRKQKQTPRTQVNALEQINLNAAGIDIGAEEVYVAVPPDRDAQSVRSFPTFTADLHRLADWLEQCGIDTVAMEATGVYWIPLFEILEGRGFQVYLVNARHLKNVSGRKTDILDCQWIQQLLTYGLLSPSFRPPEEIVAIRSLVRHREMLVQYRSAHIQHMQKALTQMNLRLTNVLSDITGVTGLNILRAIIAAERNPQVLAQFREPGCKKSQAEIAKSLEGHYKREHLFALKQALELYDFYDRQLQACDAELEAMYQQFEPPEDPGTPPPAPRQGKRRKNQAHFDLALALYRMTGVDLTQIDGLEALTVQKVLSEIGTDMSKWPTVKHFASWLRLCPNNKVTGGKVKQRGVQPTTNRASTALRVAAASLKHSDSALGAYYRRMRARHGTPSAITATAHKLARIIYFMLKERKPYHDFGADYYEPLCDYNDETTPTQNLVSRAQEAGSCLNNGMASELNQYPTRKWSQKPSAGNFQRNTNGVFSRSMRLAPNLVKRVPY

SEQ ID NO: 344789 - protein, 412 aa, unidentified
MQTLIERGCGLDVHQATVVACLLIVRKDGKVQKQMRTFGTTTRELVGLREWLLSEGCTHVAMESTGVYWKPIYAILEGALEIVVANAQHIKKVPGRKTDVKDAEWIADLLCHGLLRSSFVPPKPIRALRDLMRYRRKLVESQAAERNRLLKVLETANIKLANVATDVFGMSGRLMLRALIAGKATPQEMAELAKGLLRKKIPELELALEGKLEEHHRFLLELQLQRLEAAEKDLAVLEQRIRQMLEPYAAQLALLDEIPGVDWTLAAVIIAELGVDMRVFGSVSQLASWAGVCPGNNESAGKRKSSRIPSGNVYLKSGLVEAANAAARAKGTYLRDKFFRLKARRGYKRAVVAIAHKILVAIYHMLSQQVSYNDLGDLYLDKLNQNHLTRNLVHRLERLGYAVTLTLQQEAA

SEQ ID NO: 344790 - protein, 355 aa, unidentified
MPRARVGARAAALPPLKPEQLLESYLEFTSRGMVEVLSLPIVLRSEAMSIFVGIDVGKATLDVACHPRGPGGRFDNSPRGHRALLEALAPQAVQHIAIEATGGYERGILDALAQAGYCVTRLASHRATAYARALGHFAKSDALDARILARMAAHVPPQPYQSPSPERAELAELLRCRLQLVGQRDDNRRRLAQTRLAAARHALQAMIDAAKVQIADLDKRIATATTAAAPASRLREVPGVGPVTAATLLAYLPELGRLSRQQIAALVGVAPYVDQSGRRDGPRRVRAGRWIVRRALYMATWSAIHAKGSALGERYRALRARGKVAKVALVACMRSFITAINAMVRDQVGWRSTAP

SEQ ID NO: 344791 - protein, 319 aa, unidentified
METLGIDVGKRELHAVLLQGDRTASKSVPNSPTGIAQLQTWLKNRKVVRVHACLEATGGWSEDVAVALHENGHVVSLVNPNRVKAFAQSEMLRTKTDRVDAASIARFCRMHVPQPWTPPAVEIRTLQGLVRRYSSLVEMRTEEQNRLGAPIVATPVKASITATIEHLERELERVDREIVQLFDQHPPLRRQRDLLVSIPGIGETTAARILGEMPNITEFRSVKAVGAFAGLSPQHYESGSIRRPSRLAKSGNADLRQALYWPAISAMRHNPILRSFANRLRERGKANMTIIAAVMRKLLTLAYGVLKSNRAFDPTYAAA

SEQ ID NO: 344792 - protein, 417 aa, unidentified
MTTKAQKSKRVNKESMIVSLDIGKQSHFGYFRTPDGQDVKPFSFGNNRAGFERFYNKLCRFRKVHGLRQVLVGFESSGPYAEPLMHFLRAKPVQLVQINPMHTKRLKELTGNSPNKTDAKDPRVIADVMMLGHFLTVVVPEGAAAELRRLTQARERAIKQRTAMINQLQHLIFILFPEFLQVIKKISSKTGLYLAVHCPTPQAVLVLGLESLSRAMRRISCGKMGNARAMQLFEAARGSVGVREASQSMLTEIDYLVEQIQQANRFVRRLEVQMLYYLQQVPYSAHLLSMRGIGPVTVAGLIGEVGDFRQFRSLAQITKLAGLDLYEISSGKHKGQRRISKRGRPLMRKLLYFAAINTVRTNGVMHEPYRRMLARGMPKMKALVAIARKLLAVMFALARDESTYKESFSHHQYQLAA

SEQ ID NO: 344793 - protein, 345 aa, unidentified
MKYVGIDLHKKTITIWVVNQERQKLDSKQFACSAPETIVAYFRKLGKFQAVVEATASYEWLVRLLEPLAERIVLAHPKKLRVIAESTRKSDKIDAKLLAEFLALDMIPSAYRPTPRQREHRVLVRQRCYLQRRITSSRTKIRRILSDYNADRKDLFTEDGLVYLAQVKLAPIDRFVVEQLLKEFEFQHRQLRELETRLTKFGAEAPVAEAEARKVLRSIPGVGPVTTEVVLSELADRNRFRSGKCAVAYAGMAPGQRESAGKRKELHIERNGSARLRWILVEAAWQLVRRTGRWRVTFEHLSGRIGRKKAIVAIARRLLMVMMALLKSGQPYQHAYAAPAGVGKT

SEQ ID NO: 344794 - protein, 416 aa, unidentified
MDTMYERCCGLDIHKKTIEACFRSGKKKAHMSFGTTSAELRKLTMWLVENGCQSVAMESTGSYWKPIFNILELSGTDMEIIVVNARHMKNVPGRKTDVNDAEWIAELLQHGLLRPSFIPDREQRELRELSRYRKSLVGERAREINRLQKMLEGGNIKLTSVVSEVTGYSSRRLLDRLLRSDEPMTEEVISELVHTSLVGKSKELEIALDGLLSELQKGLLIKVLDHIDDMNKRIADLDDFCRKQMKKYEDALDKLDEIPGIARRTAETILIETGLDMSRFPTAKHFARWAGLAPGNNESAGKRSSGRTTKGNPTLKSTLIQSAKVAARKKNSFFKARYQKIAAKRGANRASVAVAHSMLIAIYHILKSGERFKDLGEDYYNQFNREKKKNYYLKKLTKLGVNLKEATLLISIQAAT

SEQ ID NO: 344795 - protein, 417 aa, unidentified
MSEYAALVAIDWADQKHAVCLLDPRTGKREHSFVKHTPEALQEWALSLRQRFAGQPIAVGLEQSRGPLIYALLQYDFFVLYPINPATLAKYRQAFSTAHGKDDPSDAAYLLDLLEHHRARLRSWKPDDEKTRTLRLLVEQRRRLVSDRTRFSNRLTALLKGYFPQVLGWFEDIRTVLVCDFLERWPELAALQRARPDTLNKFWRSHHSTSNSTNQRRLAEIKTAIPLTNDAAVMTSSVLNVKALVAQMKTVIAAIAEYDRHIEALCRTHDDYHLFAALPAAGAVHAARLTAALGSDRSRWTSADELVRFSGIAPIIERSGKQFRIRWRYFCPKFFRQTFHEYAAQSIQDSFWARAYYSSQRLKGKDHHAAVRALAFKWMRVIWKCWQTRTPYNEVIYLESLRKKGSSLLKFAAEHQA

SEQ ID NO: 344796 - protein, 338 aa, unidentified
MKLYGGMDLHSTNVVTQLINEEDKVIYRKKQSCDLDLILQGLEPFKDCIEGIAVESTYNWYWLVDGLMEAGYRIHLVNTSAVKQYEGLKYTDDDSDAFWLAHLLRLGVLPTGYIYPKQSRAVRDLLRKRGQLVRQRSAHIVSIENLYTRNTGSRLSCNATKCLTQAQIQQQFDDPNVALAIDSNRAIMNALDQQIKVLEQAILKQAKLDDRYRCLLSIGGVGEILALTIMLETGDIKRFAQVGNFTSYCRCVGSEKLSNGKKKGQGNTKNGNKYLAWAFVEAANFAIRFNEQAKRFYQRKAAKRSRVIALKAVAHKLARASYYVMRDQVPFDSAKLFV

SEQ ID NO: 344797 - protein, 288 aa, unidentified
MVHYVGLDVSLKQTSICVVNQLGSIVREGVVDSEPEAIAAFVRLNAPGAVRIGLETGPTATWLWTELKQLGLPVICIDARHAKAVLKMQINKSDRNDAAGIARIMQTGWFKEVRVKDLDSHSVRALLASRALLVKIKRDLENQIRGLLKNVGLVIGRAKFNVFTVRAEELIEDRPELMAVVRPLLKARQAIEQQTDDLDRKVLKLARYDAQVRRFMTVPGVGPITALCFKATIDDPTRFKRSRSVGAYVGLTTRRHASGEVDWTGRISKCGDAMLRSYLFEAAGVLLT

SEQ ID NO: 344798 - protein, 367 aa, unidentified
MPGVTSAAGPVHLGMDTSKNSIVAGILMPGEEVPVLDRIWNEEGSVRHLTGRLGEVSALRACYEAGACGFGLHRLLASMGVACDVVAPSLIPRRPGDRGKTGKRDASRLARLLRAGGLTPIRVPAGAEEAVRDLVRARAALLADRNRAQQRVTAMLMRHGRIWRSGSSWTQAHERWIAGQRFDEPALAATFAHYRAAPDTRLAELDAVEAGLAPWAGREPLGLLVARPGCYRGIAELTGLTLAAEVAGWRRFPSARAFTGFTGLVPAGYSSGERVRRGSITRTGSGPARTALIEASWAYRHKPAIGVALRRRQAGASPGTLARSWQAQRRLHARYQALTARGKPPGMALTAVARELAGFVWAEMTSS

SEQ ID NO: 344799 - protein, 377 aa, unidentified
MNELTTFVGLDVHKKTISVAVAYDRGEPFSRGVIRNEPAEVAKLVEKLGASNTVYAYEAGPCGYALYRQLHELGARCVVAAPSKMERAPGDRVKTDRRDALQLARQLQVGSLPTVWVPEPEDEALRDLTRARQTAQQDLQRLRNRLTKLVLRLGLQPPSGVQAWTVPYRAWLKDLKMPHPYQQIVFEDALHAIAEAEARVDRLRKHVEAAAQSAPRAPLVQALMAMRGIGVITATTLVGELGDISRFDDPRHLMGYSGLTPIEDSTGERVHRGHITHTGNAHLRHVLGEMAWNHPRPLKVGKKLQRQRKGQPQEIVQVAERADTRLHRRYHRLVRKGKAPQEAATAIAREALGFIWAIARLAAGLPVPAPRPRPAAA

SEQ ID NO: 344800 - protein, 324 aa, unidentified
MQGWAREAGHSTTNVAGVDVSKRELAVAIGGIAALRRYSNDTPGRCRFCRDLAGSGVLRVGLEASGGYERKVASALRKAGFEVIVFQPIQVRAYAQYRGQRAKTDPIDARVIALATAAYNGTVRHSDDRLAPLAEHLTFIEQIEEDIVRLKTRLDGFTVSALKAKLKAQIKRLTARRNAEIRSLLKSLRQYQDLAFRLELLASIEGIGERTALTLIIRMPELGALSREEAASLAGLAPFDDQSGKIDRIRHIKGGRAKVRRSLYAAALPAAFKWNQALVDLYHRLITKGATHKKALIACARKFLIFANAILARGTPWIKSATTP

SEQ ID NO: 344801 - protein, 444 aa, unidentified
MAVRKKVLVELAHPNAAGIDIGSASHYVAVPPERDDEPVREFKSFTEDMERLADWLAACGVDTVAMESTGVYWIPLFELLESRGFTVFLVNARHVKNVSGRKSDVLDCQWLQQLMSFGLLSGAFRPKDEICALRAVSRQRDMLLSYQARHVQHMQKALTQMNVQLANVISDIVGETGQKIVRAIIGGERDGETLAKMKNVRIRASEADIAKSLRGNWREEHLFALKQAVALFDAYAERLAECDRQLEAMLGALQRDDVGAPGKAKRRSRAKNAPKFDVRTHLFGVCGVDLTRIDGIDTTTALKVISEIGPDLSRFKSAKHFASWLGLCPGTKISGGKLLSGATKRTANRAAQALKLAAAALRSSHSALGAYFRRMASRLDRAKAITATAHKLARLIYTMLTKGTEYTDKGQDYYEERYRERVMHHLTKRAKQLGFQLTPIAETV

SEQ ID NO: 344802 - protein, 307 aa, unidentified
MRISVGIDVAKATLMVCIRPSGEVFEVANDAWAHRALIQRFRGMKDDLHRIVMEATGGYETPVLHALQKAELPVARVSAHRAHAFARATGLLAKTDAVDARTLAHFADVLEPPVRAMPTKEQLVLQEIVQRRQQLVSQRDDERRRLHQSSHPMARRSIERHIKSLQREITVFDALMHKHAQTQPRFAQLAGIKGVGPVTVATLLADLPELGTLDRRQIAALVGLAPFNSDSGKKQGRRRISGGRSSVRRTLYMATWSVIRTQPRFKAKYQALRKAGKLAKVALVACMRTLLVSLNAMLRDGTNWRYA

SEQ ID NO: 344803 - protein, 423 aa, unidentified
MTKLSSTSAGAVLVAIDMAKNRQEVLIERPEGGRRRRMTVLATKADYDALAEQLAAIGRPIVVGFEATGNYHRTLAHRLLTAGFELRLISSVAMARTREALHNGWDKNDPKDAQVILHMLRIGATQRYVDPLAAGINDLQELSKTHEVVSKMKTQTWHRILTHYLPLYFPEIARFAGNSRSDWFLAMIERFPTPASITSLDREAFSAEVWPLIGRKVSKARLINDVYETACASTALPVPEDSAAITMFRMVIAQGRSLIQQRDEIERLAHLRLADHVDYQLLRKIPGIGPINALTILAEAGDLRRFNHHRQFLKFCGLDLATCQSGTFRGRTKLSKYGNARLRRTFWMAAQVAARQRDNSFRDKLGRYIAGHADNADHRRKAMTALTAKMARVAHAVVKTGTEYRPFVERPDARWKDPSLQVP

SEQ ID NO: 344804 - protein, 370 aa, unidentified
MGNRSMFVGLDVHKETIDVSIAEGARHGEVRHYGVIASDLEPLDKVVRALRAPDRELHFVYEAGPCGFGIYRHLTKRGEDCVVVSPSMIPKRSGDRVKTDRRDSQMLARLHRAGELRAIYIPDATDEAMRDLVRAREDAVGVGTQAKYRLKAFLLRQGRRYPGREGWTLPYRRWLTDLSFPSAAQHIALQEYRDAIAETEQRLDRLTEQLRQLAPTWRWAPVVAALQALRGISFITAVGVVAELGDLTRFRHPRELMAYLGLVPSEHTSGPTVRRGAITKAGNPHVRHLLAEAAWAYQGMPRIGRQHAYRQEALPKVVCDIAWKAQLRLTTRFRRLVARGKAKPKVATAIARELTGFIWAIAQEVSPASR

SEQ ID NO: 344805 - protein, 331 aa, unidentified
MVYAGIDVHRKRSQVSLIDVDGRELLNRNVDNGSEAMLDILEDLEPGTPVAFEAAYGWGWLADLLEERELEAHLVHPSACKAIASARLKNDMVDARMLAHLLRTELLPEAWIAPKEVRDLRVLLRHRASLVRVRTSLKNRIHAVLADEGLEVEGEKLWSDEGQQWLAGASVRDMHRLVIDDCCGMLDALAIPIGRLETDIRKQAKTDPRVEALCVLPGVGLITAMTLVSEIGDINRFPTARKLCAWAGLTPSVRNSDNKVRHGHITKAGPAAVRWVLTEAGYHARRFPPFNSTFEAMTKRRGKHIAGVALSRKLLARSFHILKSLEAAKTQ

SEQ ID NO: 344806 - protein, 326 aa, unidentified
MRVERVVGIDVSKKTLDVAIGSRGAIDQMPNTEAGCATVAARLRRLGQAQRPELVIVEATGGLEHGLVAALDAIGLAVAVVNPRQARDFARCLNRLAKTDRIDAQMLAEYGEAVGPEPRPRPDAATREAQGLVARRRQLVEMLTMEKNRLPQAPARTRPSLRRHLEFLEGELAEVERQLADEIAANPAWQEIATRLQTVKGIGPVTATLLVLELPELGHLDRKEIAALVGVAPFNRDSGTLRGKRFCSGGRASVRTGLYMATRAAIRSNPPIRALYARLTDAGKLDKVALIACLRKLLSILNVMLRDRTDWDPAGRPTAATTPAPA

SEQ ID NO: 344807 - protein, 347 aa, unidentified
MSYIGVDLHQNSITVCRREADGTEAFETLTLSPGDMDRFCGSLDADDEVAIEATGNSAWFRDQILPCVGRVVVVNPSQFKVIRKSVKKTDKNDAAALALFLEKDMLPETRVKTSAETELASLAHTRDLLVKQRTRLLNKIHALHVGKGLKLKKESLGSKRGLAAIDMALFSPCEQVEITVLRETALSLTASLKQLDTEIEKHASALTGYEGIVSIKGVGPRSAAVLLAAIGNVHDFESADKLAAYFGMVPRVAQSNETDHRGRITKRGNKLARTTLVQCSLVATRYSPYLKSFHERIRQRRGTGKAIIATARKLLSIIYDTLKNGWVFSDFTTFSRSEPSLAAGQSS

SEQ ID NO: 344808 - protein, 338 aa, unidentified
MKQIVRIGLDIAKSVFQLHGVDSHGKPVCKKTLSRGEVLTFFASLPSCLVGIEACAGSHYWARELIKRGHDARLMAAQFVSPYRKSGKNDANDAEAICEAVGRPNMRFGPVKSEEAQAVLAVHRARALTVSERTALINQVRGLLGEFGIVTGAGTAQARKLLAEIGVGGRQLPLLARETIGELHDRLRALDERILAYDRKIAALARQSEAAQRLMAIEGIGPITATALVASVGNAQAFKNGRQFAAWLGLTPRQHSSGGKTRLGAISKRGDVVLRTLLIHGTRSILRLTAGKEDKKSRWAEALKSRACNNVAAVALAAKNARIIWAMLARGTEYRVAA

SEQ ID NO: 344809 - protein, 410 aa, unidentified
MEVIVSRGCGLDVHQSLIVACLMTGRPGRRVRKQIKSFNAMKCDLEALRDWLKAEDCTHVAMESTGVYWKPVYNILEGHFEITVANARHIKAVPGRKTDVKDAEWIADLLRHGLLRPSYVPAQEFRHLRDLMRYRRKLVSARSAERNRLIKLLESANIKLSSVATDVFGVSGRLMLNALQRGESSPEEMAELAKGQLRKKLPELQQALDGRLEAHHRQLLAMQLDRIERLARDLAQLDARLEVKLKPYAHQLELLDSIVGIDWVVAATIIAELGIKMSQWPTVGHLASWAGLCPGQNESAGKRRNSRIRPGNPHLRAALVEAALAATHQKDCYFREKFYRLKARRGHKRAVIAVARKVLVAVYYVLSKDTPFQELGAEYLDRLEPERIKLNLIRRLERLGYQVKLDPKRD

SEQ ID NO: 344810 - protein, 344 aa, unidentified
MNEVITIGVDLAKNVFQVHGVDAEGTVIVGRQLRRFQVLPFFKKLAPCLVGMEACATSHHWARQLIGLGHEVKLMPPHYVKPYVKRSKNDAADAAAICEAVTRPTMRFVSVKSMEQQSVLMLHRTRELLVRQRTMLINAIRAHMAEFGIVAPVGVPQVKKLLGIIADTDDARLPPLARTCLESLVRQFLSLHEEIALAEKQIHAWHRSSAVSQRLETIPGIGPIIASALAASITDPEVFRSGRELAAWIGLVPRQNSTGGRERLGRISKQGDQYLRWLLVAGAMSVILHAKRRGTTNLPWLAKLIASKPTKVAAVALANKTARIVWALIRHGGTYQKPAAAPAT

SEQ ID NO: 344811 - protein, 318 aa, unidentified
MLIHYIDIAKRNFVIAVSSLSKTKTETNNPKGIAHTIEYLKKHKVALVVTESTGGLEIPAAKAIRRAGIAVIIANPRQTHQFAQSQPLTKTDAKDAKMPAFFAQMTAQKEDSQTMPYQPPTEAEEVLEALVNRRNQPADMRTAEKNRLHQVHETQVGSVKQLIAHFDRLIDELDKQIDDHTHTHFDGKAQVAEQIKGIGSITTATLMAMLPELGRLSHKRIASLAGIAPHPRESGETKFKSRCFGGRSAVLKALYMATVAATRFEPLIRDFYQRLLSEGKPYKVAVTACMRKLLTISNARMRDYFAENDTAENGIRTA

SEQ ID NO: 344812 - protein, 350 aa, unidentified
MDRYIGIDAHSQSCTLAVVGPSGRRLKSQLVETNGKALVEALKSIPGRKHLCLEEGTQSEWLHEILAPHVEEIVVTVPPKRSGQKDDLGDAFARAEELRVGALESIVFKAPRQFSGLRNAVRAYGMVSQDIARTKNRLKAVYRSRGISTEDDVYKSKAAGRYLAKLPESHRQLAESLSQQLEALVPLQEQAETWLHQEAKKHTIVRKLQSAPGVGPIRAAQVAAIVVTPHRFRTKRQFWSYCGLGIVMRSSSDWVRKDGHWVRAETKQTRGLNRNCQPLLKAIFKGAATTVIGQIPDHPLHQHYQRMVNGGIKPNLAKLTVARRIAAAVLAMWKNGEVYDRKRIELNKKA

SEQ ID NO: 344813 - protein, 388 aa, unidentified
MRFYNTQHPFYCGIDLHARAMYVCILNQAGETLLHRHMQTTPEAFLTVIAPYRPDIVVAVECMFTWYWLADLCADEAIPFVLGHALSMKAIHGGKAKNDQIDSQKIAVLLRGGLLPQAYVYPAEMRATRDLLRRRMHLAHKRGALLAHVQNTNSQYNLPAIGKNIAYKANRDGVAERFADPAVQKSIEVDLALISSYDALLRDVELTIVKTARQHDANTLYLLQTVPGIGKILSLVLLYAIQHIDRFPRVQEFASYCRLIKCAKESNGKRSGTSGAKIGNAHLKWAFSEAAVLFLRENPAGQKFLARLEKKHDKGKALTILAHKLARAVYYMFKRKVAFDMKRFLNDEGRGVGERDVSLDNHGMNLILATLSNASMTASLNAYDLNVS

SEQ ID NO: 344814 - protein, 371 aa, unidentified
MKKSSMFIGLDVHKDSIEIAIAEAGCDGEVRSYGGIDGTLDALDKVIRKLVSKGFNLHFVYEAGPCGYDVYRHLTAQGFDCVVVAPSKIPRQSGNRIKNDRRDAQMLARLHRAGELTAVYVPFAEDEAMRDLTRAREDAKAVEKKAKQRILAFLLRHGHRYSGKSSWSRAHFRWISILKMPHPAQQIVLQESLDALAECTRRVDRLTEQIQTLSPQWRLFPVTQALQSMRGVSLIVATTTIAEIGDLTRFGRPAELMSYLGLVPSEHSSGQKTRRGSITKTGNGHVRRVLVEAAWAYRLPARVSRKLLIRQEGLSQEVCAISWKAQLRLCARYKRFTANGKSHQLVVTAIARELCAFMWAIAHEVQGPVKM

SEQ ID NO: 344815 - protein, 407 aa, unidentified
MDLLKTVFGIDVSSRKSNVCIMVNGQKVDDYAISNDMVGFNQLLDDLKQVTKPQIIFEATGVYSRRLQAFLDMHKLRYVMMNPLEAKRKTKDDLHQNKTDKLDALYLAKLQSEHPQRLAYVQSKEYQELMANNRIYEQASHDLITNRNRLHKAIQLTFPEIEHLMVNPRGKNYWSIVLRFPHPDIVLETKEADIIDFLKGLSGIGKKRANDIMQSLIRLAKVACPAVKKDSAHIRGLEMAINNILSAEEACQTALKEMTKLAPKRDLEILTSIPGIGENTALRIISELEDIRRFNNPSQLNAFVGVDPQVYESGNLTAHLSISKRGTAIGRKVLYLAINQIQSAKKAGNPSHIADYYEKRKRSSETASHKKAAIASIHKLLRTIFALIKNDQLYSYDVAKHNQRLLS

SEQ ID NO: 344816 - protein, 402 aa, unidentified
MNSVGIDISKGRSTIAVMRPFGEIVISPFEVRHTDSELSELARRLKSLNGETRVVMEATGNYHAPVAKLLHDAGLYVSVINAKLVHGYGNNDLRRVKTDRKDAVKLANYGLDRWLTLPRYVPEENTRLLLKNCYRQYRQYSKVQTVLKNNLISLLDMTFPNANRLFNSPARADGSEKWVDFVAEFWHCECVSERSLKSFVNKYWRWCRKHGYNFSEEKAHAIYDEASGHIGVMPKSETTKLLVEQAVSQLSATSAALAALKQEMQSLSSQLPEYPVVMGMFGVGPILGPQLIAEIGDVRRFYSKKALVAYAGLDAPPNDSGDVTGRHKSMSKIGASSLRRTLFLVMSVYLQTAPLDEPVYQFMDRKRSEGKPYRVYMMASANKFLRIYYATVKAYLETLEQF

SEQ ID NO: 344817 - protein, 420 aa, unidentified
MDVVVERCAGIDVHKDMVAVCARVPGPDGERTEVLAEFSTFTEELLVLRDWLVAHGVTRVGMEATGVYWKPVFWVLEDAVECWLLNARHMRNVPGRKTDVADAQWICRLMEHGLVRASFVPPPEIRELRDLTRFRKTRIEERTREAQRLDKILQDAGVKLSSVASDVLGRSGRDMLDALVAGSRDPQVLAELARGQLRRKLPQLQAALAGRFGPHHALLVSEVLSLLDYLDESIGRLSVEIDRVIAPFAEHRDRLTSAPGIDTRMAEAIIGEIGVDMTKFPTAAHLASWAGMCPGQHESAGKARHGTARHGNSWLQRHLTMASMSASRTKGTYLSAQYHRLAGRRGKLRARKAVGHSLLVGIWHILAENVEWDELGNDYFDRRQTPEHRARRKLAELRTLGWQVTTNDDGTTTLTPPIAA

SEQ ID NO: 344818 - protein, 507 aa, unidentified
MNGISSQTVNQEAREGSAKKTRAQCRREAKERNKTAKSKLKAVGVPMSDEEFERRRQFLLNDLKSKTWRDLETKGKFKKDDKISFIDDGTLIIGCDIGSDKHYIRAIDTRGREIGKKAFGFNNDREGFEKAKEWAVKIAVTNKKKQIVMGLEPTGHYWLDLATWMVDNGISVVQVNPYAVKQTKEVEDNSQEKNDEKDPKTIANLVKDGNYGMPYLPEGVYADLRRLSMFRDQLGEDRTRTLNRLHREMKIYFPEYKDAFGKIDGSFTLALLETAPFPKDLVELGEEGILEIWHNRHLRGRGYGKASGIVEYARKSVGLKDGAEASKDKVAWFTRQLQETTEKLSDVERQLKEKFEEVPYAKNALEIPGIGGNILSGIIAEMGDAARFDEAKEIQKLSGLGLVACSSGKHKGETKISHRGRKRLRYWLFQGAKSVVVHDARFKELHEYYTTRKDNPLKKMQSLIVIACKLLRVIYTMLKKGVKYDPDKMMKDIIRPSEEASGIALAA

SEQ ID NO: 344819 - protein, 355 aa, unidentified
MGFQTPLSKQTSRYQVKACDARPLLQLIERVRTRVTREVGRPVEVTSCYEAGYDGFWLHRVLEAHGIHNHVLDPASLQVSRRARRPKTDRIDADRMVRALIRHLRGEPEACSVVRVPSPEQEDARRLHRERRRLITERVGHVNRIKGLCATQGIYNYEPLRSDRLERLDKLRTGDGRALPARLKTEIVREIKRLEVVLEMISTVEAERDAILKDKKSTHLNADKIKMLAKLKAIGAEFSTTLVGEVFYREFANRRQLGSYVGLASSPFCSGSLDRDQGISKAGNSKARAMMIELAWTWLRYQPDSALSRWFQARVGNLKGRPRRIAIVAMARKLLVALWRYLQTGVIPTGAELKA

SEQ ID NO: 344820 - protein, 349 aa, unidentified
MEVMHPRCAGIDVSKRDAKVCIRIQGNGNRRTSSTVTTWGSMTNQILGLRDHLAAQQVTVVVMEATGDYWRPFYYLLETDFEVLLVNAGSVKNVPGRKSDVSDAAWLADLGAHGLVRASFVPPEPIRQLRDLTRVRTHITQGRTREIQRLEKLLESAGIKLSSVATDITGVSGRLMLQALIDSNGTADPAVMADLAKRRMRSKIPVLTEALNGRFTAHHAFMVRLFLDRIDGHTKDIATLSARIDGLMKPFLPARVLLESIPGFSQTIAEVFIAETGGDMAQFPAPGHLASWAGACPGSNESAGRVKSAKTRPGNRYLKGALGVAALSQARSTKTYFSAKYRRLARRAR

SEQ ID NO: 344821 - protein, 363 aa, unidentified
MTSMTTNSTIVTGGVDTHGQTHHGAALDSVGRQLGDREFPTTPAGYRALVSWLQAFGHLERVGVEGTGAYGAGLTRQLRAAGVTMVEVNRPDREARRAQGKSDPLDAYSAARAALAGKATGVPKTRDGRVEAIRMLRVARSSAVKARSQSTNQLKALLVTAPAELREQLRTLSNTTLIATCARLRPTGDIADPEHATKTALRRLALRHNYLSEEISAADTELRTLVTAAAPRLIALPGVGTEVAGQILITAGDNPDRLHSEAAFAHLCGVAPIPASSGRTHRHRLNRGGDRRANNALYIVVIGRLRYDSRTRAYAARRTTEGLSKPEIIRCLKRYVAREIFTVLTARAADDHSSQAHTMSTAA

SEQ ID NO: 344822 - protein, 342 aa, unidentified
MAQTISVLGIDIAKLVFHVVGMDDSGRVVLRKRLARSALVTFVANVPPLRIGMEACGSAHYWARCFREHGHDVRLIAPQFVKAYVKSPKNDARDAEAICEAVTRPTMRFVPIKRVEQQDLQALHRIRERLITARTALVNEIRGLLNEYGIVLPQSIAKFRALIVDKLEADQAKLTALSTEVFWHLYDEFLAVEKRLAYYDEKLAAIGQAHPECQRLQTIPGIGPVTATALIAAIGDVTQFKNGRQLAAWLGLVPREHSTGGKPRLLGISKRGDVYLRKLLVHGARATLRWIDTKHDERSQWLKALIARRGKNRAAVALANKNARIVWALLAHHQEYRSRTAV

SEQ ID NO: 344823 - protein, 345 aa, unidentified
MPVAEVDTFAGIDVSAHELSVALRRGQGHDKPAMAKFPNHPSGHKALVAYLLRGGGRVRVCLEASGNYSLDLALTLQAHRQLEISVINPRRARRFAESLGERNKTDPVDARVLCEYAARMPWVRWQPPSPVALHLRALTRAIADLGAIHTQQNNRAYAAAASQALPVLVVKEMQRHKKYLEQRMTRLRREAVRLIACDPELGRRFRLMLTTIGIAETSALQILGELAVLPDMLDARQWVAFSGLDPRLFKSGKSVEKRPRISRSGSRHLRRALYMPALVALRRDPYLRVFYQNLLARGKARLQAVVAVMRKLLHAVFAMFRSNQPYDGSKLCAVDLAVHAIAACA

SEQ ID NO: 344824 - protein, 423 aa, unidentified
MKVIKIKPQKGKIVNKKTLLATVDISQTKHMGYARCPNGKELTPFKFFNNGWGFNKFWERIMQFMKANDLSEIVVGIESTGSYGEPFIHYLNKRDVKIVQVNPVHTKRLKELNGNSPQKTDEKDPKVIADIIQLGHCLTVIIPEGEAAELRRLTQARERSMQRRTALFNQLHSLIAIIFPEFLKVMKNVKTKTNQYLLKQYPTPLDIVKCGHDSLILILKKVSRGKLGKDRADKLFKFAMGSVGVTEGSTSIVHEIRAILTQIEGENNFIDELEKEMVLNLEKISYSHNILSLKGIGTITAAGIIGEVADFKKFRTISEIEKLAGLDLYEISSGKHKGQRRISKRGRSLLRKLLFFAAINMVRSKGIMHERYQKMVERNMLRKKALVAISRDILALIFALVRDNSFYIKNYNQIHTLKNKIAA

SEQ ID NO: 344825 - protein, 324 aa, unidentified
MKVVFPTCCGVDVHKSFVVATIITTPTDSLQPHYQKKRFSTFNSDLNRFATWLLEHNCLDVCMESTGKYWVPVFNILEKRGIRVVIANPKWVKAVKGNKDDTKDSKWIGDLFRIGLVKSSFIPDLNIRILREFTRYRYKLISMKSSEKNRFQNAFTVCNVALDSVVSDMFGKSATAITDYLTSDESFDPEHCVSLLQRSLKKKAEKVLESIEGYSISDEQKARIKIIREHYDFIEKLIAKVDTCVNEMVEKYEGEINLLCTIPGIDRNSAITIISEIGTDMSQFGSSKRLCCWAGLTPGNNESAGKKKSVRISRAGVYLKPALV

SEQ ID NO: 344826 - protein, 415 aa, unidentified
MMFEASSSKPAPMALAYVVGIDIGMESCLMCCLTMEKRQVIKPSQFSNNAQGFGWLFDHLERLGSSPGQILVGLEATSRYGENLYHALLKRGYHVCLLHPGQIHAFAQQRGLRAKTDRLDATTIARALLSGEARFGYVPDEQVSTYRELVRLQQQLSDDVVRYKNELHALLVVLFPEFSQVFADPSRPTALGVLKAYPGAQAMREADPVTLGQLLHQLCPGHYGRQTAEELIELAKGSVSNALAVAARQSSLRILCDQLDHTQRNLKHLQQEIEHLLEDDPSAKGLLAVAEFGVMTVAVLRAELGELDRFARMDQVVAYAGMDLQIKESGKWKGETKLSKRGSGRLRRILYLAALRSIRLPTSPFGLYYHRLVDRGMKKGMAVVAVMRKLLIVAAHLIQTQEDYDAGKVGVQAVS

SEQ ID NO: 344827 - protein, 343 aa, unidentified
MQTITAIGLDIAKSVFQVHGVDVTGQVVIRRQLKRRYVLAFFQKLSPCLVGIEACASSHHWSRELQALGHKVRLIPPAYVKPYVKRQKNDATDAEAICEAVTRTNMRFVPTKTPEQQSGLVLHRTRHLFIRQQTAVINAIRAHLAEFGIVAPVGRHGVEELLNVVADPNDKRVPEIARACLSAFGNQLRRIKEQILEFDRLIRAWHRSNEMSMRLDEAPGVGPVLATAVVAAVADPKSFRSGRNFSAWIGIVPKQHSSGGKNRLGNISKQGDRYLRGLFVAGALAVIRYAKIHGTKHRPWLTALLARRPTKVAAIALANKIARMVWAMMVKGERYKEPVALAA

SEQ ID NO: 344828 - protein, 307 aa, unidentified
MFYAGIDVSKDTLDLFLNGKFFRHTNDSRGIAALKRRLRVDCTAVVESTGGYERKCAEALRAAGIPVAVVNPFRVAHYRKALGLHAKTDVIDAELLARFGQDRELADTGAEQHPELNDVTDRRHQLVGILAAEKNRLEHARGEARASVLRHIGQLEAEIDAMEQVIASLVAADDLLRRKSEVLRTIKGFGPAITPVLLATMPELGGLNRREIASLAGLAPFAHDSGRWRGKRSIRGGRELARRMLYMAAMTARSWNPEIKLMYARLRAAGKAPKVALIACARKLLTIANARLRDTFGSPKAKLAIQP

SEQ ID NO: 344829 - protein, 427 aa, unidentified
MKNREVLSTLFVGIDVSSKFNEVCAIDFDETPYLQTSVPNNNPGATALAERLASIMQDNSTLSRIVIALESTSCYSTHIATFLSSTQILMPHKPYVYCLNPKTVAQYKKSYISVGKTDTIDAFMIADFARVGRIKSEPWRGSQFLALQRLTRHRLHLAEAVTREKTYMLTNIFLKFSELAAPTTTEKPFSSNYGATAAAVLTEFLSPEDIVATPSSELVDFICRKSKNAFADPAKVASILKKAANDSYRLDKCLYEPITISIASSFNCINAFEAEIKKINKAIEKAILGFNPNEYQSLISIPGIGPIFASAILAEIGSVKSFTSHAALAKYAGLVWNLNQSGNFQAEDTILSKAGNRYLRYYLIEAANSVRIHSPAYYEFYNKKFDEVKTHQHKRALALTSRKLIRLIFGLLDKNLLYSSIVEQTTS

SEQ ID NO: 344830 - protein, 346 aa, unidentified
MEQISRIGMDTSKHFFQLHGVNAAEKVVLRKKLRRKEMVAFFEALAPTVIGIEACGASHYWARLLRSFGHEVKLIAPQLVKPYVKRGKNDGADAEALCEAMSRPTMRFVPVKTAEQQAALMLVGLRDRLISNRTQLSNAIRGYAAEFGLTAAKGMAHLDPLLERIQADESLPVAARELFAVQAKEYAQLQAQIDEVEAKLKTWHKTDECSQRLVKIPGVGPIGAALLTMKTPAPKLFRSGRQFAAWLGLTPKDHSTAGKVRLGGITRAGDEALRAVLVSGATAVIQQAVRYGGRASSWLVDLLKRKPPKLAAVALANKMARVAWKLMVTGEAYIPKSAPAVQASAA

SEQ ID NO: 344831 - protein, 389 aa, unidentified
MTQVDDLSRSLAAFDQNSTLTIAVEMSAASWLVAGVIPGIDRLPVKKLEPDPDGLLRLVERWRAEAVKAGRTIARIVLAYEAGRDGFWLARWLRTRGVEAHVIHSTSVAVSREHRRAKTDRLDTGMLMRVFLGWLRGERGHCGMVAIPTLADEDAKRPSRERENLVAERTRISNRLKSALARLGIRGFKPMLRKAPQRLAALRTLEGVPIPPNTLAEMQRDMARLAVVREQIDEIERARLQALQQPAKSGPHAMVRLLARIVGVGIETADMLVNEVLTRNLRDRRAVARYAGLTGTPDESGSKRREKGLARSGNSRVRRGLIQLAWRFLRFQKNSALTRWYRARTEGPKGARKTTMIVALARKLLIALWRMARTGVVPVGVELRQLASA

SEQ ID NO: 344832 - protein, 344 aa, unidentified
MKQYAGIDVSLEYSSVCVIDADGRIVREAKVLSEPNALIVWFGEHGVAMERIGLEAGPLSQWLYTGMAKAGLAVELIETRHVRAAFKTMPVKTDKKDARGIAQLMRLGWFRPVHCKSLPAQEVRALLTARKLIQGKLHDIEMSIRGILRGFGLKVGPTTRRTYAARIRELIAGHPTLEAISASLLKVRDALADEFAGFERRLRAMARLDDNARRLMTTPGVGVLVALTFMAAVDAPERFRSSRAVGPHFGLTPKKYQSGETDYSGRISKTGDVGVRTALYEAANVILTRPVRGSDMKSWALAIARRAGPRKARVALARKLAVVLHRMLRDGTNFISHRAAATTA

SEQ ID NO: 344833 - protein, 452 aa, unidentified
MPPHRASSEEAVTEYSPETLPAVPPGGVRCGIDRADDDHAVCVVDLAGKVVQRFIAGHTGEGLAALVRRLRRAGAGEVAIERPDGKVVDTLLEAGLTVVVISPGQLKNLRGRYGSAGNKDDRFDAFVLAGTLRTDRARLRPLLPDSPATVTLRQACRARKDLAGHRVAVCNQLRARLKIAFPGAVGLFRDLDSPISLAFLARFDCQDRADRLSPRRLAAWLKSQGYSGRKDPAERHARLAAAPRGATGDDGAAKAHITRALPAVLASLVAQVKALQAQIAGQLALHADAHIFTSLPKAGTVRAARLLAETGDCRARFPTPEALICLAGVAPSTRKPGKVTHVDFRWAAGKQLRDAVCDFAGDSRHASPWAAQLYTTPSPAAKTTPTPPGSSPAPGSTSSGTAGNTTPLTTQPGTKPSSASSPKKNRRRLDTGLLMTGSVRTGLTEMVGTQTG

SEQ ID NO: 344834 - protein, 413 aa, unidentified
MVLGIDVGSETHYARAFDYSGIEYSKKPFKFSNTETGFVTLKEWILDLKERHEKDKVVPGMEPIGHYWFNLGKFLQDNEMKLVLVNPHHVKKSKELDDNNPTKNDRKDPKVIAGLVREGRYMIPYLPDGVYADLRTASNIRFQLQAELTRIQNRISRWFNIYFPEYKTVYGNPDAKSGMLILKAAPLPEDILTLGIDGVNQIWRDAKLRAVGKARAKTLIEAAEHSVGSKEGAVSARMEIRMLLEDYESRNIRLQEVMTLIEGLAKQIPMAEKLLEIKGVGIKTVSGFLAEVGDISRFNTPKELQKLAGLALVESSSGKHKGETTISRRGRKRLRYLLFEVAMSLVAKNPEFRELHNYYTTRRLNPLKKMQSLMAIAAKLIRVFYAMLTKGVDYDPKKMVSDIKRPAVYLQAA

SEQ ID NO: 344835 - protein, 400 aa, unidentified
MLSIGIDVSKGKSTVCGMKPGGEIVYTPFEIQHTREGMSELVSLLRSSGEEVRAVLESTGSYHCPVVAALLENGIFVSVVNSLRMKRFCSQSIRKVKTDRIDAMQIALYGLAYWQELQPARLPEDTYRELQLLARQYYQMTSMLIKAKVDFNAICDQVLPGMQELMNDHAGRHKLSDFVLRYRHTTHILEMGETRFRKDYCKWAEKKGYRNCERMAALIFATAQNGIPVLPNAPSTQIVITEAIRVLHTVEASRDAILTQMQALAKTLPEYSLVREMPCIGDTLAPRLIAEIGDVRRFHSKRALIAYAGIDAPPYQSGKFCANNRHISKRGNRYLRKTGYEVMQSYVMHKPANDPIFTFIEKKRGEGKSGKLAMVAGLNKFLRVYYGKVTELYRSLPAIE

SEQ ID NO: 344836 - protein, 390 aa, unidentified
MIYVGIDIAKLNHFASAISSDGTELMKPFKFTNDGDGFQLLDSRLTELSFEDDSIIIGLESTAHYGDNLVRYLVACNYNVCVLNPIKTSVMRKDNIRKTKTDKVDTFIIAKTLMMQDSYRFVSFYDLDLMDLKQLGRFRQKTIKQRTRLKIQLTSYVDQVFPELQYFFKSGLHQKAVYALLKEAPSPQDIASMHLTHLSHLLVTASHGHFKKEQAKELRVLAQKSVGASDSSLSIQITHTIAQIELLDSQLNSVEAEMTEIMKFNDPVIMTIPGIGYINGGMILGEIGDIHRFKSPSKLLAFAGLDPSVYQSGNYSAKRTRMSKRGSRVLRYALVNAAHNVVKNNATFKAYYDAKMAQGRTHYNALGHCAGKLVRVIWKMLTDEIEFNLD

SEQ ID NO: 344837 - protein, 339 aa, unidentified
MSHYCGIDLHSNNHVVVVIDEEDKRVFQKRLNNDLSLTLEALRLFRETLQGIAVESTFNWYWLVDGLQEAGYPVQLVNTAAVSQYDGLKYSGDQRDAFHLAHLMRLGILPTGYIYPKEQRGLRDLARQRMRLVQHRSSHIVSVQNQVWRSSAVRLDAGTIRGKRPSIEWPTLSDRYVTQSVEATRAVIDTLGEQIEQLERTLLSLMKPTPMYRLLNTVVGIGPVLAFVIALEIGDISRFPSAGDFASYCRLVDSQKTSNNKKKGEGNRKNGNPYLAWAFMEAAQFALRYLPEAKRFYERKRRQRHRVLAKKALAHKIARACYRMLREEVAFERERLFAA

SEQ ID NO: 344838 - protein, 366 aa, unidentified
MASVSHLAPIHLGLDVHRDTISVGVLTPDQQVPEVDRIPHDEPSVRRLVGRLGDPHRLRACYEAGPTGFELARLLHSMGVRCEVIAPSLIPKAPGDKVKTDKRDCRRLARLHRAGELVCIRIPTIGEEAVRDLCRARADMVCDRTRARHRLSKFLLRHGRVWRGGATAWTQAHERWLLAQQFDQPALRATYGHYRVVLESRDAHLDAIEADLAGWYDRPPFAEQVARLSAYRGVTRLGAFTLAAEVCDWRRFAHASQFMGFCGLVPSEYSSGQRTVRGHLTKAGNAHLRAQLIESAWSYQHRPGVGLQIAGRQQGLDPQVIARAWAAQLRLCGRFRRLATRKTSKNVVVAAIARELAGFLWAEMTA

SEQ ID NO: 344839 - protein, 341 aa, unidentified
MHQATIIGIDLAKRTFQAHGATSDGKVAFRKKLSRSQLLAFLTQQPRCVVAMEACATAHEWGRAARELGHEVRLIPPAYVKPFVKRQKNDAADAEAIAEAASRPTMRFVAVKSEAQQARAMVFRTRDLLIRQRTQLINALRGHLAEHGIVAPQGPANLKLLADAISDTKISLLPIVRDLGLLYLEQIKGLGEKIAALDRTLRRESKSATTACLQTMPGVGPITAVAIEAFAPAMTTFKRGRDFAAWVGLVPIQHSTGGKQRLGRTSKMGQRDIRRLLITGAMTIVRWASRKGAREGSWLARMMASKPRMLVAMALANKMARAVWAMLTKQENYRDPAAALA

SEQ ID NO: 344840 - protein, 479 aa, unidentified
MTPSKDAFPEPCPPVPTVPEPLVLRPSSSLPLYNPHAAGIDIGEAEHWVAVPPDRSPEPVRRFGTFTADLDVLADWLLDCGVTTVAMESTGVYWIPLFELLEARGVQVFLIDPRQAKRAPGRPKTDRLDGQWLQRLHAYGLLAAAFRPADQVCVLRSYLRHRQMLLTYGAHHIQHMHKALQQMHLKLSQVVSDLTGVTGMAILRAIIAGERDPLTLAQLRHPHCQHSEDEIAKALQGPWRAEHLFALQQAIELSHFYHQQLTVCDQLLQAHLGTCADQSDGQPLPPKPRRHKKANEPRFDARTPLYRLAGVDLTTIEGIEEGTALVILSEIGTDMSRWPSVKHFCSWLGLSPQHKISGGKVLSRHVRPGAHRVAVAMRLAARTVQQARTALGAFYRRMRSRLGAPKAITATAHKLARLVYSLLKHGSAYVKQGLEAYESQYRERTVKAVARQAKALGYTLVELAVPATPGNDAVAPATP

SEQ ID NO: 344841 - protein, 416 aa, unidentified
MNAVGIDVSSRKSTVAVLRPLGEVVCLPFDVSHDADGLASLAEKLKALDGETRVVMEHTGRYYEAVEKALHEAGLFVCAVNPLLIKEYGANSLRRVKTDKADAVKIARYALDNWADLRDFTPMDAIRYDLKTLNRQFQLASKQRTASANNLIALLEQSFPGIRKCFDSPVRSDGTQKWVDFAHSFWHVDCVRKQPFPAFCERYRKWCKRHAYLFKQSNAEEVYALAKRAVVLTPKSKVVKVLVQEAANQLISISRSVEVYRAEMDRLAAMLPEYPVVMAMYGVGKSYGPQLMAEIGDVRRFERKQALVAFAGIDPMPNQSGDKNVRSNKSSKRGSPYLRKTLFNVIRTYLQCAPQDEPVFQFLNRKRAEGKPFYVYMLAAANKFLRRYYAKLRDYFASLDTLQPVAPIPTILKATL

SEQ ID NO: 344842 - protein, 346 aa, unidentified
MSEEYDGPQVVGLDLHRRRSVIVRSTADGRVLETVRFVNDARILAGQIAKAGVQPQVVLEATYGWYWAVDVLQAAGAQVHLAHPLGVKGFAYRRVKNDVRDAGDLADLLRMGRLPEAWIAPVPVRERRELVRHRQNLVQHASGVQAQVYAVLAKCGIAVPMDDLFGPSGMRLLERAALPVVFRDRVDSQLRVIDALETEVARFDTKIKALMYAHPAYAVLQQIPGVGPVFAAVFIAEIGDISRFADAGRLCSWAGLTPRHRESDTTVHRGAITKQGSRLVRWAAVEAVQRSPKNSAMGRTYQRIVERRGTTAKSVAKVAAARKLLTLVYYGMRDGYIRCLAPRAAA

SEQ ID NO: 344843 - protein, 418 aa, unidentified
MQTELSGFTAIVGMDWADRKHDVCVQSMESGRRETYQVPHKVEKIDEWARSLYRRYGGPIAVALELSKGPIVSALQKYDFIVIFPIDPTTLANYRKTFTLSGAKDDPTDAQFALKLLLSHAEHFKALKPQSVEMRTLMILVEHRRRLMNDRVRITNRLRNALKQYYPQALEWFDHIDTLMFCDFIKRWPSLAQARRARKATLEKFFHEHHMYRKALLERRMSAIKSAVPLTTDEAVIVPYRLQALTLVAQLELALESIRTYDDEIAALAPQHPDYSLFNTLPGAGPSLAPRLLVAFGEQRDRFTSAAELQKYAGIAPVTRRSGQTTWIHWRWQCPTFLRQTFVEWAAQTINKSYWAGLYYYQQRAKGCSYQAAVRALAFKWIRILYRCWITRTPYDEARYLKALKDRGSTLLMTAQTA

SEQ ID NO: 344844 - protein, 394 aa, unidentified
MKLVGIDVGKNSHHFCVMDKETGEFNVTPTSFSNNKEGFDFLINSLKPYSKKSILIGMEDTGHYHVALLKFLLSNGYTVALINPKTTDLTRKMEGGITKNDKLDTITICDVLDTPERKKQYRITKVDRFDLYEQRQLTRHHHNLKEELNVYCNRLQKSIDLVFPEFNTLFSSKYSIVYMNLLKTFGSSEAIASTDIRTIRKCFEIKGRGNRISLTPEKLKECAKNSIGISSEVETIQIKHLVSQITLIKEQIAEIDKKIEEFSITNNSPILSIPGISHFSGTSILAELGDIGNYSKPSQIIKFAGVAPYHYESSQYNAQHTGITKKGSKYLRKTLYQIILPIINNNPVFKKYYRLKISQGKGHRCAQGHCIRKLLRIIYHLLETGQSFDPALLR

SEQ ID NO: 344845 - protein, 315 aa, unidentified
MTNLKKSKSEINVGVDVGKFSLDVYLYEKAIHFADENSTAGITRILKRLSHYNVKRLVVEATGRYEFNLAQAAFDKQITVCIVKPSSVRQYARAINLTAKTDKLDAELIAEYAAIVQPAATPRRSKNLIAIKDLIARRRQVMGMRTQELNRLKIMGKGFEISCKRIIRHLDEEITRLEKKLAKHVEAQADWTEKQRILKSAPGVGDTLVYTLLADLPEIGELSRQEVSALVGVAPMNRDSGKQRGKRRIKGGRYAVRSVLYMATLSATQCNPVIKAFYNQLVAQGKHKKVALTACMRKFIIMLNAMVRDRCEWAY

SEQ ID NO: 344846 - protein, 339 aa, unidentified
MNSIAVGVDIAKQVFQVHYVDRATGEIVNKPLKRAKFLEHFANRARCLIGMEACGGAHHWARQLTQMGHEVRLMPAEFVKAFNVRNKNDAADARAIWLAVQQPGKPVAVKTEMQQAMLALHRMREQLVKFRTMQSNGLRGLLAEYGEVISKGRAKLDKEIPAALERIAERLPAVLIDTLREQWNGLAKLDTQIAEIERRMREWKKEDRAVNAISEIPGVGLLTATAAVAMMGDPKAFSSGREFAAWAGLVPKQTGSGGKVNLHGISKRGDTYLRTLLIHGARSVLTRATEPAPWVEQMKKRRPTNVVIVALANKMARMIWAVLAHDRPYRKDYVSVKPA

SEQ ID NO: 344847 - protein, 397 aa, unidentified
MYIVGIDIAKRKHEAAVIDGEGAVIIKPFSFTNNCSGYNRLLAMLAKAKLPLDEVSFAMEATGHYWLALFTRLQKEGFRVQVINPVQTNSIRSFYIRQAKTDPRDALLIAEVIRFGHFSESTLHPENIYELRELCRGRHAIVSMQADVKRKVVALLDQVFPEYETAFTNLFGDTSMAILQTCPTPKELSEMRLEELCHLIEVSSHKRFRMAKAQELQELARNSFGFAMAGDVFSTMIRLYAKHLDFLKQQVREMDRKIAEIMDTLDTPITTITGIGPTLGAYILSEIGDISRFSSAAKLAAYAGIDPTMRQSGEYNGVRNRMSKRGSPYLRHAIWLAASSAVLHDPALKLYFQKKRDEGKPYMASVGHACRKMVSIIYAVMRDNKEYVPCIPGEISA

SEQ ID NO: 344848 - protein, 324 aa, unidentified
MNMKTVIGIDIAKKSFDVCISDNSDTFHFENSAKGFDELLNLDSVRKQQISLFVIEATGNYHRALVDVLELNGFAVAVVNPRLIKNFSRAMGIRSKTDIQDARVIREYGVRMEPPIRQKCDSELLRLKAMASRRRQLVASRTMETNRLEAQTDQEIKSDIRRHIHWLTSEIKRIDAVLAERIGKMPMLKEKVKLLREVKGVGPVVMAGLLTQVPELGTLDRRKISALIGLCPYSRDSGNFRGKRTIWGGRSDIRSMLYMAVLSAIRYNPEIKAFYENLIARGKVFKVAITACMRKLITIINAIVRDGEKKTVGQEISIQKSCVH

SEQ ID NO: 344849 - protein, 391 aa, unidentified
MDRAWAGIDAGKEFHWAHLLDASGRKMLSRKVENDEADISELIGEALSLAEEVVWAVDQTGGGAALLLALLWERNQRVVYIPGLTVGRARETYRGESKTDAKDAYVIADQARMRPDLGELEPGEEEVAELRILLGRRRDLVIDQNRTITRLGETLLSLSPALERALDLNRRGPLTLLTHYQSPAQLRRAGHKRIAAYLRNRGVKGFESVAGKALTAAKSQSITLPAESIAARIVSELAAEILALKDHIELIDEEIEERFFDRPEAEVLASLPGMGPLLGAEFLVAVGNLSAFDSADHLAAYSGLVPAANDSGKRIGNNRRMRGGNKNLKRVFYQAAFASLRSSPESRAFYDRKRAEGKRHIQALIALARRRVNVLWAMLRDGTTFEARSAT

SEQ ID NO: 344850 - protein, 373 aa, unidentified
MPRYSTAFGMDVHLRSTTVCALDAETGEAVARRFRGNPWGEVAEWMSGFPGPSLAAYESGYLGFAPQRELSALGVDCVVAAVSKVPRSAADLSSKNDRNDAARMAKAILSHDVTPVWVPSPEIEGLRDLAAAHDAATARLAAAKQRLLAFLARRGHVYGGTTPAGNPRKYWTYGFLRWLDKVRPADDGGIRALAALRNEVEAADEAREALLAEYRAAVAAGPLSAEVEALQSIKGCGFVLAAAFASEVGDFSRFRSGRQVTAYFGLAPSQRSSADSVRLGGISGAGNALVRRLAVEGSWRYAQAGHQPKLMPKGSGVPLEIRMHGRKGSERLLRRREEMLERGMPAAKANAATAAELVRWLWALGMMCREGAE

SEQ ID NO: 344851 - protein, 423 aa, unidentified
MDKNDDSRLEEFRQLRREIRGSSEHLVVGIDVAKERHYAFFGTPAGKTLLRRLVFDNSKEGFEKLCFQAEILKTQHGLTKVVFGVEPTADYHKPLGEYLIRQGHLVVLVSGNAVKNNRELLDSRWDKNDMKDAANLADLITQGKCLFYEFASPPLGELRSLLSLQRRLKKQEQGYRVRTRNHLIAQYFPELDPYFGYSEGPAIVKWCLDPKELMCLPFEEFVRMVSSSTGGQKQRRRLEEIREKAASSIGCEAHPSVAFEGRVLVEEIRRLQDLLRETHANIRAVCHHFPEYFFLLTIPGFGPDISAKVLGAIGNPHRFENHRQVLKTAGLDLSADRSGKRTDVTPVISKKGKADLRYGLYRAALIASTRNRQFMTYFTEKLKGREREKGIGTKMRVKLAAKMLVIAWTIMKKKEKFDPGCIA

SEQ ID NO: 344852 - protein, 321 aa, unidentified
MTYVGIDVSKATFVVAYSSAKGSETKTFKNTVKGIREFIQTISPKENHCVLEATDNYSMLLVYLLSKAGFVVSMKNPLKIKNFARVMLSVVKTDEIDAHLIALYGERMQPAPFKLRNDSILLLKQKRTVLRQLKKQLTANTNLEGSLKVLPFIDSKSKKVLEKTIKFLQKQIKEMEEELTSLAEIEYKKQMDLLTSIKGIGATLAAALIIATGGFTYFDNAKQLTRYLGLSPTYQQSGTSVNVKGHINRNGDAHLRSQLYIGAMASLRCNTECKACFDRLRSNGKPGKVAIIAVANKLIRQAFAVVTQEKPYVDGYKSVKP

SEQ ID NO: 344853 - protein, 387 aa, unidentified
MPQANDLSRCLVALEQDNTLIAVIELSQASWLVAGIVPAIERQPVKKIEADEVALLRLLERWRDEATRAGRRIMRVCVAFEAGRDGFWLARWLRARGIEAHVIHPSSVAVPREHRRAKTDRLDTELLKRAFLGWLRGERGHCTMAAIPTVEEEDAKRPNREHASLVGERTRIVNRMKSALARLGVRGFKSTLRKASERLETLRTPEGMPLPPNTLAELGRDMARLRFVMDQIKEVEAVRLEQLARRPDEGAHAMIRLLARIVGVGIETADMLVREVLSRNLRDRRAVARYAGLTGSPDESGRRRREKGLAKAGNARVRHGMVQLAWRFLLFQKESALARWYRERTADARGSTRKTMIVALARKLLIALWRLVTTGEPPEGVLLRPAA

SEQ ID NO: 344854 - protein, 463 aa, unidentified
MTFVNGEAQARFMARIRGVDPQRCLAIPVDVGKATAVALVADHYGEIIVAPFEFALTEAGFAVLSAAITRAQVERDALIVRIGVEAAGHYHRTLVARLRAAGLEVVELNPRAVKDARGQQLLRTLKSDARDCGAMAELLIRGSGRPPQCRDEALAAQAAWVAHRRRKVAAQVMLSNQIHGQLDLIFPGLIGCFANGLDAASLRVLIRELPDPDRVRRLGVEGVLRFVRRRGVRLSRPKAEQIVQAAQQALRLPGAERPAPLVVLAADWALFEALDQQIQDATTQLAALLPDTPAGVLLGIPGVGVLTASSYGAAIGDPNRYRDAAAAYRASGLVPVTYESAGRARSRTGISREGSVELRRAIVELGRGIGLHHPDFIGYRHQLLSRGKPPLVAMIAVGHRAHRLAFAMLRSQRPYDADRWARAVAGRADEQARHGGTTATGGPPARRDLPAQPTVARQEAPSN

SEQ ID NO: 344855 - protein, 313 aa, unidentified
MSHYCGIDLHSNNHVVVVIDEEDKRVFERRINNDLSLTLKALSPYQESLQGIAVESTFNWYWLVDGLQEHGYDLRLVNTAAIKQYDGLKYSDDHHDAFHLAHLMRLGILPTGYIYPKEQRAIRDLLRRRLSLVRTGSTQLISVQSQIWRSTGLRIKSSDLRKPDFIPPRVDDYTLQAVHAGLAVYQTIQREIDVLEKSAYQAVKLTDAFKILQTVNGIGKILGLTIMLETGTIERFASPGNFASYCRCVDSKRTSNGKKKGEGNAKAGNKYLSWAFSEAAHFAVRFEPLAQRFYERKKAKTNGIIAIRPSPGN

SEQ ID NO: 344856 - protein, 340 aa, unidentified
MNTTQVAVDLAKSVFQVAVSSTPGRVDEQHRLSRARFHRFFAERRPVEVLMEACGSAHHWGRELEALGHTVSLLPPSDVRRYRDGDKTDRADTKAILEAARNEAIDSVPVKTIDQQAITTLHRLRSGYLATRTARINCVRGLLREFGVTIPVGARHLAPRARAAIDDGSVPAYLEPVLLDAITEVEELRRKAKDIEAQLKRLVRHMPDVTLLMSVPGIGVLTATALVAYVGDVGRFPSGRHFAAYLGLTPREHSSGLSRRLGRISKRGNTYLRMLLIHGARSVLRAAKLTEQPDALRAWALSVEGRSGHNVAAVALANKLARITWRVWRDHRSFESRLAA

SEQ ID NO: 344857 - protein, 428 aa, unidentified
MAKSKAQSVIITDDDGLYYERCAGIDVHKKLLVVCLRIGRRTESREFGTTTAEIREIVAWLISNGCQMVAMESTGSFWKPLYNIFEQESLPAMVCNAYHIKNVPGRKTDWNDAFWIAKCLARGLLKPSFVPDRRQRELRDMTRFRKSQIEERSRNINRLQKFLEGANIKLGSWLSDVEGKSATQLLELIIGKPDFTIDDVKSCMHRNLKSSPEELFAALDGYIAPTQREFFSHVMDVIRTQTSQIEKTDALIKSALNEDEIKAVTALDTIVGIGTVSAEQIIAETGTDMRHFRDQHAFSNWIGVAPGNNESAGKRKSGKTIHGNKALKTTLTQCAKSAVKVKNSFFHAQYNRLVSHRGKNRATMAVAHSMAIAIFFVLQGMEFKDLGADYYTQFNREKKINSHLKQLSKLGVNFPDKILADAIERPPD

SEQ ID NO: 344858 - protein, 339 aa, unidentified
MELYSAIDLHSNNSHVAIIDDQQNRVFYRKLANDAKLIANAFAPYREQLKGIVIESTLNWYWLADLLMEKGYSVHLANPCGIQKYSGLKHADDKHDAFWLAQMLALKILPEGYIYPKEDRPLRDLLRKRAHLVRIRTSLVLSLQNIVMRNHGIKIRSNDLKKLTQNPVAELLKDQEELALAGRASKETIDFLTRQIQRIETAVRSKALLKEPFSKLLTLPGVGDILGMTVLLETGPIERFKAVGHYVSYCRKVSSRWSSNEKTKGKGNTKNGNRYLSWAFSEAADHARQTHGPSRNFYNRKLNQTNASVAHNALAHKLARAAYYIMRDHVEFKEAKMFR

SEQ ID NO: 344859 - protein, 438 aa, unidentified
MLKINPLSTLYVGIDVSSKSNYVCALDFFKNKYINSSFANNQPGAEELALKILECLNQHPDLTMVVAALESTSVYSIHIANYLSSCEELMRFKPYVFVLNPKCTANYKKSYIGLGKSDPIDAFVIADYARAGNIESEPWRGSQFLALKRLTRHRIHLVECMTREKTYLISNLYLKFSELQMLEGDDQPFCDIYGATSSSVLMEYLSPEEILASSEENLIAFLAEKSRNRIKDISKTADLLKKAARDSYRLDKALYEPLNVSIASSFNCIETFKREIKVIDNAIEKEIKGLNPNAFIILQSIDGIGPVFAGGIIAEIGDITAFHSSDALAKYAGLTWKSNQSGDFYGEDTPMIKAGNRYLRYYLGEAANSMRKHNVEYGAYYRKKYNEVPKHQHKRALALTSRKFVRLVYGLLARNQLYSGVSLDTSIKDSNWSNLCFA

SEQ ID NO: 344860 - protein, 417 aa, unidentified
MTRTPEHVHTGTAGAGPGASASVFAGVDTHADTHHAAVVDALGHPLADRQFPSTPEGHQDLYDFITSHGRPALVAVEGTGSYGRTLTSHLLSQGLQVREALRPGTPKRPRGKTDTIDAYRAARAAAADDGSLPVPKTGTGSVTAIRAAKNARRQAVRAQGDTMRQLKDLLITAPTSVREDYRGLDDRALLDALAALDQPDPQQDPGQIVRSVLGCLARRWLDLDTEINQHTRLLDTLTLQANPALRATKGVGTVVAAELLSLAGDNPGRIRSQAALAAMTGTCPIPASSGRTDRHRLNRGGDRQANWAIHQIAHNRATHDPTTRAYIQRLISRGKTKREAIRCLKRAITREIYKTLTNPQPLPDHTTLRQRRKTKNITLTQAATALHTWPARISELERGKRPDRDLTTTYDQWLATA

SEQ ID NO: 344861 - protein, 340 aa, unidentified
MEKASMIGIDTAKNVFEVHGRNAAGEVVLRRRLKRAQMEKFFASHPKAVIGMEACGSAHYWGRLLERLGHEVRLMPPAYVKPYVKRNKNDAHDAAACCEAMSRPDMRLVRVKTAEQQASLSLHRSRQLLVRQRTQLGNAFRSLLAEFGVVAGKGREGLALLTTELRAGRLDLPEAACAAALALADQRANLVPAIKDLERRIGEQAKAEPRARLLRTAPGVGPMTAHATLATMPDPAMFKSGRDFAAWIGLTPRESSSGGKQRLGSITKQGDQTLRRLLVLGATAWLRQVEKHPEKASPWLRGMMARRPKKVVAVAQAARTARILWAMLTHNQPYRAPAIG

SEQ ID NO: 344862 - protein, 443 aa, unidentified
MSKKHSSHLRGERGQVFAELIRGVPAEQILCVSIDISKYFHVAMIHNGLGEIVMRPFEVDIYQSGFDQLCQTMEQAQAQTQAQVVLVGMEPTSHYFENLARHLSAHSQPVKLINSFSVKQNREQQLMRREKSDEIDVAAIGDLLRRGEGTPYQPISGIYLRLQQFDRARLGKLKIATMLKNQIIGHLDRIFPGLLLLDEAARKRYTTLFRTDFWQCQTLQDLIRVCPNPNELVKMEPIELVQAFHAQGRRLGPAVAAKIIARAHATLLPDPELAGIRCELLKHDLTLLENTQAYLSQLEGCLVELVAQTPYQIWTKLKGLSAIQVASLAAAIGDPTHYTTAAQVFRRSGLVSGRNDSGKHQRKGKGNHILKTGDVYLRRALMNAVATLFLHQPSLMRYNKHLQITKHPGVARVATARKAIGILWAILRDQSSNTLIPSKGAEM

SEQ ID NO: 344863 - protein, 404 aa, unidentified
MIFVGDDWSEEHHDIEIHDETGRRLVRKRLPEGIAGIAELHAMVAGHASDPAEVVVGIETDRGLWVAALVAVGYQVYAVNPKAVARYRERYGGGSGAKSDAADAKVLADLVRTDRHNHRLVAGDSEAGQGIKVLARAHQRLVWSCQRQVNSLRSLLREYYPAALAAFDDLDHPDALAVLGRAPTPAAGRRLSRSTIAATLRRGGRQRHVDTRAAEIHAALRAPQPQPPTVLSDAYGAAVAAAVGVITEMTRQLASLEAELERAFDAHPDAEIIRSLPGLGTVLGARVLGEFGDDPNRYADARARKNYAGTSPITVASGKRRVVKARYIGNRHLADASYLWAFCALTHSAGARRYYDQLRAKAVEHDGALRALANRLVGILHHCLAKRMTYEEAKAWPTTEATAA

SEQ ID NO: 344864 - protein, 283 aa, unidentified
MSKRRLDAHVEPLGTFASFDNDAAGIAELAIFCRRHGVQLVVMEATGGYERTAFLLLWEAGIACGLTNPRSVRRYAEAMGFLEKTDRLDARIIARFAIAKDLKPNTPPTPGQQRLNALVARLCQITDDLVVQKQLLKRQTRTLEGEIASLIDDDPLWARLDEALRTKGVANRTVARLLAQLPEIGIYSNKAIAKLAGLAPLPDDSGTRIGKRHIRAGRAGVRSILFLVADIARRYDPSLAAFHQKLIKAGKEKMVVRIALARKLLVRLNARAREARESYALAT

SEQ ID NO: 344865 - protein, 409 aa, unidentified
MRYYLGVDWADQTHAVWVMEERGTKITARTVPHTAEGLSEWGRELDEWRAQGIERWAAIERPDGRVVDFLLDHGVVVYPVNPKALDRARDRFRQSGAKDDPFDARVLADFLRTDHARLCALQPSSEAAQELKVLTEDYHRQVRQQTRLVNQLTATLKAYYPRALDVAELTTALAREFLQAYPTPDAVAALTARQWQRWARAHRLSEVRTQELWVILKQPQLPVPAHVVRPKARLMRALVAELTAVVAAVGEYREAIEEFFASMPTAQWVRTLPIGDHGITAPTLWARLGDAPERWESFRHLQAQAGAVPVTKRSGKQRVVQFRFACDKALRYVVDQVAFLSLRSCEWARAYYDQQRARGHSHRQALRALGAKWLKIIFVMWQRQAPYDDQYHLASMTRHQLRHPQKQIA

SEQ ID NO: 344866 - protein, 465 aa, unidentified
MKRKPSGGKAAPRRSSKKGVSPQHSINTQTHPDAAGIDVGAEEFVVAVPPGRCEEPVRTYASFTSGVLALRDWLLECGIKTAAMESTGNYWIMLYDVLTQAGIDVYLVNARHVKGVPGKKTDVCDAQWLQQLHAAGLLRKSFRPALGIVPLRFLMRHRAEMVGDAAKQLHLMQKSLTEMNLKLQHVFSDIDGLSAQSIIDAILAGERDPKKLAALRDKRCRSSAEDIIEALRGDYREEYLFVLGQSQRTYRQLREAIAACDEKLGELAARVECEVSSPLPEAPKRQRKVGKNSPQFAVFETAWRFYGVDLGEVPGISTGLLCALISEVGTREDLLAAFSTPERFASWMGLCPDNRISGGKVLKAKTRKVASRLAGAFRLGVFGLQRSQSQMGGYLRRMKGKLGKAEGTTAAAHKLARIVHGMIKRQKPYDEKEAFKLTPQSEARRRKALEKQAAALGLTLQPAAA

SEQ ID NO: 344867 - protein, 355 aa, unidentified
MSGEKYIGLDVHQATISVAVMDSQGKLVMESILETKASTILEFLAGLRGTLSLTFEEGTWAAWLYDLLKPHEAHLVVCNPRKNALLKHGNKSDKIDARKLADRLRLNDLKPVYHGETGVRMLRELARSYLTVVKDLSRVMNRLKALYRSWAIPCAGRDVYYTRHRSQWLEKIREAGTRRRAEQLYQQLDMLQHLRQQARRELLAESRKHTITAKLRQIPSLGPIRSALAVALIQTPHRFRTKRQLWTYSGLGLETRDSGEYHFVKGQPRRRKKQVWIRGLNKDYNHDLKGLFKAAAIRASVQPGPFQDFYQRSLAKGIKPTMVRLTLARKIAAVTLTLWKKGENFDIEKLKSQAA

SEQ ID NO: 344868 - protein, 365 aa, unidentified
MIVIGTDTHKTSHTAAAVNRATGEVQAERTVRARRRSFEDLLRWARRLGGERVWALEDCRHVSGALERFLLARGERVVRVAPKLTAGAREGARERGKSDAIDAVAIARAAIRHGIETLPVAQLAGIELDIRLLVDHRERLVATRTRLINDLRWQLHDLWPELEIPTGALIAVHWPERLAGRLARAQQTARIRIARDELRRIRELTRTINALEGELAPLVAQAAPQLLAERGCGVLVAGKLVGEIAGIDRFPTDAKLARIAGSAPIPASSGTTIRYRLDRGGNRQINAALHRLALCKGLHDPDTAAYLARKQAEGKTHREAMRCLKRHLARRVWHLLQPTPTPPQRSPQPAITIHCNTPISGFALT

SEQ ID NO: 344869 - protein, 412 aa, unidentified
MPDPLLVGLDVHRKSHAICVMNVMGAIIDDKLTVHNTPAGAEALASYLHALASRGGYDAFQIAAEATGWYWWHLFRALSRDPRLQQSPLALYPLNPRLVAKLKQAYSDEDKTDPGDAFVVADRLRMGRDLPCPFTDDLRYLRLRLLTRHRRHLVRDLVREKSFCLAHLYLKASAYSRLQPFGNTFGATSRTIIRQYSSMEEIATIPLDDLTETIDRLGKRRFADPLQAAQTLQEVARQSYPLPEVLQGPVNLILRQTLQQITTLERLIRQTDAAIAEAMQDFPNTLDTIPGFGPVFAGGIIAEIGDLSHFEHDQAKVAKYAGLKWRRTQSADFEADETPMTQAGNRHLRYYLCEAANSVRMRDAEYQAYYERKYDQVRKHQHKRAIVLTARKLVRLVVRLLTTNQPYQPRRT

SEQ ID NO: 344870 - protein, 387 aa, unidentified
MAAVVIGVDPAKRSNTIEVIDSAETVLLTARIENTRQDYRRMLALVKRWPARKWAVEGATGVGLGLAQRLVSDGERVVDVPSKLSTRVRAIDTGHGRKNDPTDAHAVAVVGLRTAGLREVTIDDETVVMRLLSQRRRDLVRSRTQAVNRLHQALMQLIPAGSRKKLTADKAKALLATVRPRDAAGKARRQLAADLIDDVAVLDRKLDAVDKRIAEAVKASTTTLTDIVGVGPVTAAAIIGEVGDVARFTTADRFASYTGTAPLEVSSGDVVRHRLSRAGNRRLNSALHVVALSNKRYDPRGKAYYERKLAAGKGKKGSLRCLKRRLSDVVFRTLVQDRARANPGGQMGATLTASAVDQIPKVNTSDKPQPGFETEATPTRRPAKVAS

SEQ ID NO: 344871 - protein, 345 aa, unidentified
MKITTVGVDLAKNVFQVHAVDETGEIVVCRALRRRQMIPFFSKLAPCLIGIEACGTSHYWARELSGLGHRVKLMPPAYVQAYVKRGKTDAGDAEAICEAVTRPTMRFVAIKSPEQQSILALHRTRDLLIRQRTQLVNMIRAQLAEFGIVLAKGIQHALRLAGQLVEGAVPEIPPLAVEVIATLAEQLHDLQARIGGLDKGLRTWSRDNEVVKRLQTIPGIGIVTASALAASVTDPHQFTSGRQFAAWLGLTPRANSSGGRERMGRISKMGDRYLRRLLVSGMTSQGQSIRRNPGAHPWVTSLLRRKPAKLVAVAMANKAARIAWVVMTRDEIYRAPKPATEQRAA

SEQ ID NO: 344872 - protein, 347 aa, unidentified
MRKIAYLSMDVHARNCVLGDMDGNGNFRGNRSFTTCEINIIKTLKTVKAKRKYLVMEAGPLSNWAAQVANDHVTEAIICDPRENALIYKSSQKRDKVDTKKLCRLLRLGEYKAVYRPENDQRAIFKAAVQHYIDLRDQLIALKQKIKAMYRQWGVIDVFTDSVYSASGRDKFLNQLTQRPIYLQLKRLYDLMDHTAAVKQDAEKSMIAIGRSYPEIKEFKKMPGMGPIGAHTFDAYIQTPHRFAKTSRLWRYCRLAVTDCSSDGKPLGYKRLDKSGVSELKALSYRAFLSASKGDNEVKRFYLNSLQRTHDRKHARLNTQRKILSVMLSIWKKGTAYRPELFLDPSI

SEQ ID NO: 344873 - protein, 344 aa, unidentified
MVYVGIDLHRKRSQVCAVDEAGCELLSRNVCNESAALLELLSSLQERPIVALEAAYGWEWLADLLDEQGIELHLSHPLRTRAIAAARVKTDAVDARTLAHLLRTGLLPEAYMAPRQLRDLRELLRQRVVLTNARSALKNRVHALLARQGVQHDYSDLFGKAGRSFLSQLELRTPQRERLDTLLRLICAFDSEITALAAKIDAEAKTDPRVQILTTLPGIGRYTALLILAEVGEIKRFANPRRLCSYAGLTPRVRASAGKQRLGRITRQGPPYLRYALVEAAQKAAQSGGPLRQRFERIAKRRGRNIAKVALARHLLSLSYYALRDGEIRCLARASSPQDMVASS

SEQ ID NO: 344874 - protein, 381 aa, unidentified
MYRKESKSKVDRTMPMVHPNAAAIDVGATMHMAAVGPDHALEPVRSFGTFTADLDQLVKWFVECGVETVVMESTSVYWIPIFELLDARGFAVFLVNARDAKHVPGRKTDVSDAQWLQRLHSFGLLRASFRPKGQIAELRAYVRQRERLLEYAASHIQHMQKALTEMNLQLHHVVADITGATGLRIIRAILAGERDPETLACLRHYSCQSSVETIAKALTGSYRAEHLFALDQALALYDAYHEKASACDARIEAVLKELTIHRDHDHGSAPPVSRRRNRTDQANALAFDVRASLFALLGKDVTAIDGLGPYLSLKLIAECGDDLTSWPSAKHFTSWLGLAPSNKVSGGKMLSSRTRRSGGRAAALLRLAAVTVGRTDTALGA

SEQ ID NO: 344875 - protein, 345 aa, unidentified
MKNTTVGVDLAKDVIQVCVYANKKVRSNTEMTHHDFLEWLFKTKKTTIVFEACGTSNHWKQKAIEAGHAAHLISAELVSTIRQNQKTDKNDALAIVQASLLPNISFVKGKTVEQQQLQCMLRLRELAVKQKTASGNQLKALLLEFNIRVSARNGGLGGVIESVLENAENEFSMAFREALSAAWQHHLCIIKSISIYDTSLEESVEQHEGCKRLLKLEGVGVINAVNLYIALGCADLGTFCKGKDASACIGLTPIQHTSGGKVKMGSIGKYVKNSMLRSQLITGAMAAVAQICKRTALTSKELWIQQLVARRGKKIAAVALANKTVRTAFAMLTHGTEYKADPVAV

SEQ ID NO: 344876 - protein, 480 aa, unidentified
MSDSIFKTTGTNLRDVLASHDLGEILYTSIDVAKYNHSAMVVNFFGDVIIPKFDFPYNDHGINFLKKKMQIAQKQTRATKLFLGLESTGHYHENLVASLTASGYDVQVIRPIDSGPAPGCDRGNERDNVHAKTDAIDLAAIAKVIISNKGTRSHMPGPIYYNLQRTSRTHRQLTHQETRTKNIITFVLDKTFTGLWNPKDSVFSDKWGKASLLFVENYSTPQQVTRLGVKRLAAFFRKHDTKLGMDTAKKIIQLAKITPARPLEEMESDIKALKAHIHVLRALMLAISEQKKQMVKFLVQTPGTYLLSVPGIGIVYASDFTAEVGDIHRFAHARQITSLAGTAPRKHQSGEVDKTNLSTSHKGKNYLRVTVNQMALSLNSHCPEYHSYYSKKHFQYKDASGKARTATANKFIKLAFALMRNETLYYPRTGNPLMIEKEYYQGVWDKMKPKLAPYLCDHIPQDNYLTKIQSELEEKYDIKT

SEQ ID NO: 344877 - protein, 322 aa, unidentified
MTKHTTICAGIDTGKRRLDVAIEGRREQLQVENTSKGHEALLAWLRQHRVNRIGIEASGGYEQPVVAELRRKRFVVVVFQPAQVRAYAKFHLRRAKNDKIDAALIAACTAAVRKIHAAPDPRLLPFAEQLTMIDQIGEDIARLKNRIESCRNVTINKFWQEDIARLEQREKTALKDLVASIRKHPDLAKRLMLINSVDGIGLPTAVAILVRLPEIGRITREQAVALAGLAPYDDDSGDQVGARHIEGGRKRLRRALYTASLAASFRWNQQLIKLYQRLTAAGKEHKRALVACARKMLIFANTVVARGAPWCGEPPAQSSSVS

SEQ ID NO: 344878 - protein, 372 aa, unidentified
MDERIKFFVGLDAHKDTTSVAACEASREPARFIGTIGPDVRVLLKLLAKAGDPAQVSVVYEAGPTGYGLYRELRHRGYRCEIVAPSLIPRRPGDRVKNDRRDCARLAELSRAGELKPIWVPDEAHEAMRNLWRAREDAVSMRLKARQQLKAFLLRQARRYPGKTSWTKTHERWIASQRFDHEGDRIALAEYQLAVQSAEQRVQRLTTALTQAVQGWRFEPVVAALRALRGIDTVSAIGLVAEIGDIGRFSSARQLMGYLGLVPSEHSSGNSIHRGSITKTGNAHARRLLTEAAWSYRFPARLSRQLRERSASLPDAVRNHAWKAQQRLCSRFARLSSRGVQVNKVCVAVARELAGFVWAIAHQALPAAEALH

SEQ ID NO: 344879 - protein, 339 aa, unidentified
MPVTIGLDIAKRFFQLHAIDTDSGQIERLKLRRAEVVPFFANRRPCLVAMEACGSSHHWARELRSLGHEVRLIATKFVRPFVKNNKTDAADAQAICEAAQRPEMRFVPVKNEHQQAILCLHSMREGLVKARTAQVHQIRAAFYEFGIELPDGRHWCVKSLPAAFTRLEGKIPGTVVDALQMQLELIRDLTLRVDEIERKLEAYKQSDERCQRLLKVPGVGLLMATAIVAGVGNANQFRSGREFAAWLGLVPRQSGTGGRVRLLGISKRGSSYLRALVIHCARAVVARQKKHSIWLEQLLARRHWNVAVVAQANKIARTIWAVLAHGVSYEQNHRAVQTA

SEQ ID NO: 344880 - protein, 407 aa, unidentified
MKRFAGIDIGSERHVVAVVDEHLAVLVKPTPFGEEAAGYQRLVELLGPPQDCLVAMEATGHYWRNLFAYLVSEGFSVALLNPIRTRRFAEEELERTKTDAVDALGIARFAAQKDPPASRLAEEGLDELREVVRLRERLLQDCGDHVRQLHRAVDLSFPEFTRYVRSLNSELATTLLAHYPTAAALGKVSVKRLASLRYDGRHHVGETLAQELHDAAKISVGRHQSEPYQLRIRYACEDIVRLRQRLHELDAEIARRLERHQVGKLLTTIEGIGPQTAACIIAELGDPARFGSVKALASYVGVIPRLRQSGKRRLSGRRMLPLGNARLRRALWMPTLSAIRVNPWLRAFYLRLRAAGKRPKVALIAAMHKLLAAIFSVARRRRPFVTSPVFPPAAAAVAGGAVLQKSS

SEQ ID NO: 344881 - protein, 428 aa, unidentified
MNCNTQNAKIASITEKTLIVGIDVGSETHYARAFDWRNYEYSKKPLKFSNTEAGFLTFKAWVEGIAEKHGKTAVIPGMEPTGHYWFALGKFLQDSGMKPVHVNPHHVKKSKELDDNNPNKNDRKDPKTIATLINEGRFSYPYIPTGIYAEIRSLSNLRFQTQEELTRIKNRVARWFAIYFPEYKDVYGDFKAVSGRMVLKEAPLPEDIRKLGVEGVNQIWRDAKLRGAGMKRAKTLVSAAEHSVGSKEAPEAARYELRNLLNDMDVYAVRMEELLRSIEEKLKEIPYVDKLMEIRGIGLITVSGFVAEAGDIGRFDNPKQLQKLAGYAIVANDSGKHNGESRISYRGRKRLRYVLYEAAISLVGKNAEFKVIHEYYRTRKENPLKKMQSVVAVACKILRVFYAILTKGVDYDPVKLVRDIRRPQLQAA

SEQ ID NO: 344882 - protein, 336 aa, unidentified
MKEQQIKHNEVQIKKFIKKLKTEWNEIYCCYEAGVTGYPLYRYLKSLGVNCILVAPGKIPRQNTDKIKTDKRDAIKLARLMRSGELESIHVPSEEDEAVRDYLRSRDSLRLDLGRNRQRLMKFLLRKDIKYSTTKYWTVSHYKWLNNLHFNNEILQETFNDYYSRVRVQEENLKAMDKKIQEIAESEPYREKVGILRCFRGVDYLTAMFLLCEVNDFKRFKTAGSFMSFLGLVPGEYSSGSKRKQTGITKTGSPRLRRILTEAAWQHRFPGTGSKIITARRSGQPALVVALAEKASLRLHKKFRNLQLRGKTPQVMITAVSRELSGFLWAAMNLVA

SEQ ID NO: 344883 - protein, 449 aa, unidentified
MGSYAGVDWAADKHDVLVCDEAGEELLSATFAHDEAGLRLLCRQLLRLKVALVAIERPDGLLVERLLDAGLRVLALHPNQVAATRARFRVSGGKSDRFDAFVLCELARTDNHRFRVLEPDSDETKALRALTRAREDLVKTRVAVCNQLRSELERFWPGPIGLFADLDSQISLAFLERYPSPVETRTLGEQRMAAFLARQGYTGGKTAAELLAKLRSAPAGRAAEQETKVRRQIVRGLVGALKTLTAELKTLERELEDAVRAHPDGEIFLSLFKSRNSFVTAAELLAEIGDCRARYPNRDALAGDAGQAAVAIESGKRKSASFRWGCNKRLRSAFCTLADTTRHWHPWAQDLYAAARQRGHDHPRALRTVGRAWCRVVWSCWQTRTPYDPARHRALQQHCTVWITDTSGRRRPDLAATQRMLGAAVTEAARRAEREALDGKPTSANTPGG

SEQ ID NO: 344884 - protein, 403 aa, unidentified
MKEDIAKAIDQQTAAARDSAGGWSRYGAFVGLDVHKETIAVAVALPGRGEPEYRGEIANEPKALKKWLDRLGTEFGGALLLFCYEAGPCGYGLYRQLLEAGHECQVVAPSLIPKKPGERVKTDRRDALKLARLLRAGDLTAVWVPDTEQEAMRDLTRARDDMKGQERKARQQLNAFVLRQGQHWPRGKTRWTKAHYNWLESIRFEQPWLQVVLQEYIDAVKAATQRVADLTGQLLQALPDWSLAPVVDALVALRGIDKLAATVLLAELGDISRFDSPKQLMAYLGLVPSEHTTGRRRSQGAITLTGNGHARRMLVECAWSYRFPARQSMHLKRKAKDASAQAKAIAWRAQKRLCGRYRQLSQAGKNIKLVCVAIARELAGFIWDIVRQEMPRVVGRPTAAATS

SEQ ID NO: 344885 - protein, 367 aa, unidentified
MKKISTAAVRTTKDFSPQKLTIGLDLGDRSSWYCLLDEVGEVLLEQKLSTTPKAMREVFGSLPRCRIALETGMHSPWVSRVLSGLGHEVIVAHARNVRLIGESRKKDDRLDAQTLARLARIDPQLLCPVKHRSAKAQADLTVIRARAGLVRARTALVNTARGLAKSYGERLRGCNVRNMNPEKAEGLSPELQTALEPLLAGIESLSECIREYNERIEELAQESYPQVALLKQVKGVGTLIALTFLLTLEDPHRFRKSRDVGCYLGLQPGRRNSGQSEPQMHISKEGDPYLRTLLVQGAHHILGPFGVDSDLRRWGLKLAERGGRNGKKRAVIATARKLAVLLHRLWISGEAYEPLRNSDQRAMPAAA

SEQ ID NO: 344886 - protein, 430 aa, unidentified
MTELNSTPAPATLVAIDISKHRHEVLIEAPGQARRRRLTILSTKADHDRLVEALAAYGGPVLIGFEATGDYHRGLAYRLLSAGFELRLVSSVALARTREALHNGWDKNDPKDAQVILHMLRIGATQRYVDPLAAGINDLQELSNTHEAIAKAKTETWHRILTHYLPLYFPEIERFAGNSRSDWFLALLERFPTPGSITALDRESFVQEAWPVIGRKVSKARLLNDIYETARASTALPVTEGSAAITMFRMVLAEARSLIRQRDQIEKLAHAMLADHADYQRLCTIPGIGPIHALTILAEAGDLRRFGHHRQFLKFCGLDLATCKSGTFRGRTKLSKYGNARLRRALWMAAQVAMRQRDNSFRDKLGRYTERDRHDADLRRKAATALTAKMARVVHAVIKGGTEYRPFFERPVPGGRTSLCTGREGAQATL

SEQ ID NO: 344887 - protein, 404 aa, unidentified
MTRTPPSPSRYIGLDVHKHYFVAVGLDEDHNRVLGPHKVPNQRLEAWADRHLKPTDQVVFEVTTNAYLFHDLLFEQVRSVTAVHPPNVKAVTTAKVKTDKRAAETLAKLLAAGLLDGIWIPPDDTRDLRGLIAQRDRLVRLATIAKNRLHSLLHRRRLGPPPFKRPFEPQYREWWQALELPKLEQVRMLSDLETLYFAQGQLEIIEEALSEIAAQDERMPLLIQIPGIGVITGLTILAAIGEIERFEKSGDLVGYAGLGASVHISGQKRSTGRITKAGRKDLRSAMVAAAHAAVRNHPHWKAEYERYCRRMVWQKAIVAIARRLLIVVWQVLHERVPDKFGDPEKIAASLFAHVYRVGVKNLPEGMSARQFVRRSLDLLGHTELERFRWGSKWVTLPEEFRESS

SEQ ID NO: 344888 - protein, 411 aa, unidentified
MNNTLLVGIDISKRSNVATFMNCEGKVVGRLTFSNNGSGADRLVAKILSYYEKGDFEAIRIGMENTSVYSKNLVWFLYEHEALNEHKLSIIPLNAIMVANYKKSFLDMDKDDITDSFAIADFIRIRPGLLPFKLDDRQEALKIMTRSRYNYVQALSRMKSQFLTRLFLSFSEMEAGKPFYSIFSKTSLSLLEEEFTLDELAEKPIPELVEFLQEKGGGKFQNPEEIAKVLKKAASSSYRVPAMVRESLNRTMASDMEIMRILENEIHNCDKNIEKLMKSVPAILVSIPGIGPVLAAGIMSEIGDISRFQKQESLGKMAGFKWKRNQSGKKESEDKAAVLSGNKKLRYYLVEAANRVRIHDPVFEAYYRKKYAESKTHAHKRALILTARKLVRVIFYLLKENKLYKPDVGIS

SEQ ID NO: 344889 - protein, 431 aa, unidentified
MKYKQSKKQNQRITRISENTLVVGADIAKDTHVARAIDFRGIELGKDCVFSNTRAGLEQLVQWMKELQQEHAKSDVLFGIEPTGHYWFTLAEYLGRQGIPLVIVNPHHVHKSKELEDNSPTKSDYKDAKVIADLVRNGKYSEPKLPTSVYADLRILMNLREKIMVNFGQVQRRVQNWLDRFFPEYTQVFKDWEGKASRITLSEFPTPGEIVEMGTEAIVQRWKKDVKRAVGAKRALHLMETARRSIGLTEGLPGAKVEIKTLLEQYEMFARQLEEILAEVERLLAQIPGTKEMLTVPGVAVVTLAGFLAEVGDLSGYEHGQQIIRLAGLNLKENSSGKKKGKSSITKRGRARLRALLFRAVMPMVAKNAEFKALHQYFTKRSQNPLKKKQSLVALCGKLIRVLHTLGTKQVPYNANDVLGPVRQAQLQMAA

SEQ ID NO: 344890 - protein, 429 aa, unidentified
MNYTQNEKIEQVTDTTMVVGVDIGSQTHYAGAFDNRGRELTKRVFSFQNDIEGFNSFHLWTEKLKNENKKTAVLIGCEPTGHYWFAFAKYVQDHQKTLVMVNPFSVKKIKELDDNSPKKTDAKDPKTIAKLVVDGRYSIPYMPEGIYAEIRDLVYSRDRIMKQHNISANRIQRWLAIHFPEYLGLYTRFDATSGLAVLEKAPLPKDVITLGVEGIRKIWHDKKMRGRGVTEDRAKTLVEAAHNSVGLDGGIGTKSELYMLLEEHRLWTSQLEAVNKVLEESIRKVQHVEKLLAIKGVGSVTIAGFIAEVGDIRRFKSPKQIQKYAGLELVENSSGKYKGRTRISKRGRRKLRKILYQVMVPLLARNKEFRTIYDYYVTRVKNLLKRRQAMIAVSCKLIRVFYAVLTKGVDYDRFKMMSDIHHEGGLIAA

SEQ ID NO: 344891 - protein, 429 aa, unidentified
MTAHHSTAATVLVAIDISKHRHEVLIGIPGKKRRRRMTIMNTLEDFQRLATALASYELPVRIGFEATGNYHRALAHHLGQAGFDLKLVSSVGLARTREALHNSWDKNDPKDAQVILHMMEIAAVQFFHDPLVTGTADIQELSKTHEIVSRSKTELWHRILTHYLPLYFPEAERFHRSSRTDWFLAFLEKYPSPHMITVLSQEAFIADAWEVVGRKVSKERLLSDIYATAVSSVGLPVHSDSDAIRMFRLVLAEGRSLIRQRDVIEARAVELLSDLPDYQLLTTIPGIGPINAMTILAEAGDLRRFRHHRQFLKFCGMDLATMQSGMFRGQSRISKYGNARLRRTLWMAGQTAVLKRTNSFRDKFERYISKDRHNAHLRRKAYTAIAAKMARTVHAVVKHGEPYRPFFEGVSPGGRTSLCSSRGGSSLTS

SEQ ID NO: 344892 - protein, 322 aa, unidentified
MPEIVTPPTLTRFIGCDVGKATIVVFDSRDGSTRTIANTPEALAAFAASLDATCLVVCEATGGYEDALLAALLVAGIPAHRADARKVKAFIRSFGTLGKSDALDARALARYAQERHARLTRWQAPDPQRERLQTLVLTRADLVAQRTACTNRLKAPGAGPVRPYLEALRACLVDQIEALEAAIAKLMAGADDLVHAEKTLRAIPGIGATTAAALIALMPELGHIDRRQAAALAGVAPHPNQSGAADAYRRTRGGRPEVKRTLFLAAMAASRYHPVLRDAYQRLCKAGKKPIVALTALMRRLIVIANACLRDAFAENRLASAN

SEQ ID NO: 344893 - protein, 341 aa, unidentified
MKKNLFFIGLDIAKADFAASIYQIPGQPIITKEAIPNDRKGFEMLLLWLNDYHIDKKNCRICMEATGVYSQAISYYLLFQGFPVSVEPPLKVKRAFDPVGHKTDPVDSKQIAEYAYRFQDELTSWKPRDEILEKIRQLLSVREQFTKQKVALDNSIQAYSKQRVQVALIKKAQKETLNQLKKQIARIDKELANLIKQDPQIFQRANNLDSIPGCGMLLAAHLLVITENFTKIQNSKRLAAFVGIVPYQHQSGTSVSKRAKIRHFGPGPSRKLLRLAAQSVATHNATFRHYYLRKLDQGKAKPLVLNNIANKLLKIACTIIRNNTRYIKDYRSIHPMYLKSA

SEQ ID NO: 344894 - protein, 461 aa, unidentified
MGSKGSGTTRGDRKRNARRERLRGLLPRDGAVIGIDLAEDKQALAVVDHDARVLARKTVKVKAFRLGELLDWAVAAAKVKGFRHVTVACEPTGPRWMQVQRLCAERGLPLVCIQPLMSHIAREQQDYTTHKTDESDCVMIGRLATELHCYIPEELDETWAHLRHLGRRRAQLITAATASAQRIQDFLSVAWPVVTEVCAQPLLSKTWLAAVQVVADRCGGDPGTVASMGLEAFTDLVRAAVEDWGGKRALMRITGRVFAATTDTEGVVVWSRRGLLRRIADELDDLQRVRAQIRVAEAAMVAVLDELGLSRLDDIPALTAVGAAAILAETGDPRRYDSSSSLVKHAGMSPSDNSSGAFEGQARISRRGRPGLRLTVWRAVWPMLQFNPVMAAKYQAMTQAEDPAADGAGSRRAAAAARARRAKARVACAASLLRWIYSMVVHGTSWDATVASGAAGQPEAA

SEQ ID NO: 344895 - protein, 343 aa, unidentified
MTNFVGLDVSQKITSICVVDDGGRRIWRGQCASRPDDIERIVRKQAGGDARIGIETGPMTPWLVHELRRFGLDPICLDARHARAALRMQLNKTEANDAEGLAHIMRTGWYRSVHVKSYVAHRARALLGARAQLVGMITRLSNHIRGVLKIFGLLPGGMRGLSFATRVETLLADRPDVIPIVSPMLAAWRQLRAQVTAFDKAVHAIVKSNPDCRLLMTVPGIGTLSVLAYVSAVEDPERFRRSRSVGAHLGLTPRQYQSGEVDRSGRISRCGDGLTRTLLYEAAVVILYRVKRSSPLKDWALAIAKRGGAGKARIALARKLSAILHSIWRSGVPFRWAEGSVPA

SEQ ID NO: 344896 - protein, 347 aa, unidentified
MQNNTQHFIGIDVSKPFFDAALMAVINHQKQAMDSAHFENTELGLKSFEKWLKSHKVSFNQNTILVIENTGIYHRLLWAFCNKINLQIHIGNAAHIKWSFGIARGKNDKIDAVRLCKYACKESDELKMSKPLNSKLMQLKDLQTSRTRLLSQKNANETYLKELKAINDRATQKTLEQVYKTTIEGLKKSIAAIEKHIKGLIKTDDALQKSYDLLLSVPGIGHITATYLIICTNNFSGNISGKQLASYAGVVPFGNSSGTSINKPEKVHKMVNKELKKILHMGAMSVIHCNPEMKHYYERKMAEGKHALSVINAVKNKLVLRAVAVIKSQTSYVDNFVKPEQTIKNAA

SEQ ID NO: 344897 - protein, 431 aa, unidentified
MLKINPLSTLYVGIDVRSKSNFVCALDFYKNKYINSSFANNQPGAEELAKKILECLKEHPDLNTIIAALESTSVYSIHIANFLSSCEELMHFKPYVFVLNPKCTANYKKSYIGLGKSDPIDAFVIADYARAGNIETEPWRGSQFLALKRLTRHRLHLVECMTREKTYLVSNLYLKFSELQMLEGDDRPFCDIYGATSSSVLTEYLSPEEIIDSSEEDLISFLAEKSRNRIKDISKTAELLRKAARDSYRLDKALYEPLNVSIASSFNCIETFKKEIKLIDTAIEREIKGLNPNAFIILQSIDGIGPVFAGGIVAEIGDISAFHSSDALAKYAGLTWKSNQSGDFDGEDTPMSKAGNRYLRYYLGEAANSMRKHNATYGAYYRKKYNEVPKHQHKRALALTSRKFVRLVYGLLARNQLYSGVSLDTSMKESE

SEQ ID NO: 344898 - protein, 371 aa, unidentified
MVNLKALQDGSLSQSIGLYIAFELGANKWMVLLGDASGRVSRHQMAAGDMGRLVELLERVRGRFKVAGAARVVSCYEAGRDGFWLHRWLLEHGIENLVVDPASIEVNRRARQRKSDRLDAEKLLAKLRSHFTGEREWSVARVPSPEQEDLRRLERERDRLVKEQGGHRSRITSLLVLHNIRVVPRALGKLKGWLKQLKLGACLKKELQRELERMELLDRQLKELEKQSASLPAEPGKQQRQLQSLRALGTVSATTLVLEMFGWRKFSNRREVAACAGLTPTPYQSGSSHIEQGISKTGNKRLRPALVELSWAWLRYQRQSELSLWYVRRFGSGGKRLRRIGIVALARRLLIALWRFLEHGVVPKGAVLKTT

SEQ ID NO: 344899 - protein, 347 aa, unidentified
MRFYTETHKHYCGIDLHARTMYVCILDREGQVLLHRSLPCDPERFLRTIAPYRQDLVVAVECIFTWYWLADLCAREGIAFVLGHALYMRAIHGAKAKNDKIDSKKTAALLKGGLLPQAYVYPPEMRATRDLLRRRLHFVRHRGQLLAHIQNTHHQYNLVAPGKRIAYRANREGVGEGFEDVSVTKSLEADVALIDHYDTVIRDLELSVLRRARGHDLDSFERLKTTPGIGKVLALTILYEIHDITRFSRVQEFASYSRLVKCQKGSAGKVLGTSGAKIGNAHLKWAFSEAAVLFLAKCPEGKKLLDRLERKHGKGKALSILAHRIGRAVYFMLKRKRAFDLDRFLRM

SEQ ID NO: 344900 - protein, 430 aa, unidentified
MKANRAKNLALITPTTLLVGVDGHQENNTAGFSLANGNEPVRPVKFGNNRRGFLELLEKTNRVMSRNGLDSVVFVLEPNGPYWQLLARFLSARDYVVKVVNPLQVKMNRQTGDPSPDKNDFRDARSAADLGRQGKFNQTALLDQRYEDLRMLAGLRDSLVEERSMHKHRLRCGLVRTFPELRRCTSDLFGKGIRALLRVAPSAEAVVWLGTEAVSEVLKSATRGRLGKKKAIQIVNAAKESVGYAEATCAVRLQVESILSVAELLSEKIEQIELEMERLVSDLDEAALILSIPGIGLVTAAAILGQIGGFSQYENPGQIRKLAGLDLVGSQSGNHQGKLAISKRGRKLLRKVLYQAAVSSLGCNEVSIRFYNGLIEPTRPNRLKKKQALVAVMGKLIEVMFALVRTGKPFEFEHEWTRPGQAPEDLAQAA

SEQ ID NO: 344901 - protein, 436 aa, unidentified
MDKQDVFIGIDVGRHHHQCSFVDGERKPIAKTLRIREDRDGFQALKLELDNIVQKKDEVRFHIGLEATGHYHQNLMAFLQAIDGLDVEVTCINPVQTKRFIQMQMLREQNDKVDARAIAEYMCVQRPAPTPRKRSDMQPLRDLSRLRCQLITQRTAILNQLHAILDHVFPEFEQIFTDVKSEPLAWALLARYPCPQNLITAKTSQLMSVQAKKGGGYLGKERALLLKKFAKQTVGSSRGEVYAFQVKILVQNVKSLQQQIEETDKAIEISMQALELPPWKTIPNVGILTMATLLGDVGDPRLFGSGKKFASFLGLTPRGKQSGSSVNRKGHISKCGPSHARQKLYMCVVSALATKKNPLIIEIYNRLVSKGKPKNVAIVACMNHLARIIYGVFKSNHPFNPEYQGMKRGLGRPQNGNLATMHGVLPPRPLGNITAT

SEQ ID NO: 344902 - protein, 353 aa, unidentified
MDSKKYIGMDVHKESISIAVRNAAGKIVMECVIETKASMVLQFIEGLRGDLQVTFEEGTSAAWLYDLLKPHVTKLVVCDPRKNSRQGNKNDRIDARELSDRLYMNKLSSVYHGGAGVRTLRELARSYLTISKDLARVMSRVKAIYRSWGIPCAGKQVYAPRHRAEWLAKISEVGVLRRAEFYYQQLDALRPLRHQVRRELLAESKKHPATKLLCQIPAIGPIRAALLIALIQTPQRFRSKRPLWKYSGFGIEMHSSADYRKVKGQLERTKKQVSVRGLNRDCNHDLKNLFKSAATIASVKPGPFQEFYAALVAKGMRPEMARLTLARKIATIVLIVWKRGVSFDAQYLKPQTA

SEQ ID NO: 344903 - protein, 401 aa, unidentified
MRSIGMDVHRSFAQVAIHEDGITAKSFRLELEHDTVVAFGKDLRVDDEVVLEATGNTAAIVRLLTPFVARVVIANPMQVKAIAHARVKTDKVDAAILAQLHAAGFLPEVWAADDDTLALRRLVSERVAVVRSIRRAKSRVHAVLHANLIPKYEGHLFGKGGRHWLAKAPLPKTERDLLGRHLDELDWLNDRLAKLDTALIRFSLDDPRMRKLMSVAGISSVIATAVVASIGDISRFSSPEKLASYFGLTPRVRQSGDRGAIHGRITKQGNATARTMLVEAAWSAAGVPGPLRSFFLRIKDRKGANVAAVATARKIATLIWTLLAKEEPYRWARPAFVAMKMRKLELRAGATKQHGNKPGPGRDYWIKEIRHREMELVANAEASYARMVEAWRDKPPKPKPT

SEQ ID NO: 344904 - protein, 351 aa, unidentified
MTIEHYIGFDVHKKSISFCIKRADGSIFDEGRFRATRHEIKGWVGRQTASWHGAMEATLFSGWIYDEMKPYAARLDMGNPSMMKAISAAKKKNDRLDARKIADLVRCDLLPKCYVGPREMREWRRMLRYRNAMVGHAVQIKCRMSGLLMESGAEYNRKQLHGKQYFSELMEGLEEVPASVKELLQMSRGMLEMFEKTQRQLVERLNEAPLLKKRLALLRTIGGVGEITSLTWALEMMDPRRFSSIGDALSYCGLTSALNVSADKAQRGPLSKQRNGHLQTVLIEAAKVAPRWNAQLAEVHEKELSRGHKNQATLEVARKLVAYLLAVDKSGRPFELRKPVQQPAEEVLAVG

SEQ ID NO: 344905 - protein, 482 aa, unidentified
MKKRTIYQNRSQELLSLFERAGNSSKVMCIPIDFAKKDHVVMFCNGFGDILRKPFSVKNSQMGVAYLIDQVMRSCCHHRIKKEHVFFGGEDAQSYTENFVNTLRSEGFLVANVNAHEAKKQRENLQASTDRLDLMGIAVMLLNRKANCAPAQAGTYLNLRTLVRHRKKLVKMKTGVSNRIHTVIDRLFPGFLNEKKSGIDPFSKSSLYLMSDRFSAQQICRRRRSTLTKHLRRFGTKGAENVATKLQAYAKQVLTPLEEHTATLQLSLSYNIKHYRCLQENIDHLEKEIALLLSQTQGAFLTSIKGIGIVLSAGVTAEIGDPFAQKPLNNLVSYAGIIPRVKQSGGSEGQPYMGRVSKRNNHILKDYVVQSAFHIGRHGPKDLLLDYKRREAQGQHADFGMGRRFMRMAMCMMRASQVYLPLRLRGNSVDQRDKAEYYLSIWPLLKEKWKRADALESAFEKDRPLGHWRQIVQHLYDIELDI

SEQ ID NO: 344906 - protein, 343 aa, unidentified
MDQYVALDVSLQKTAVCVLNVSGRVLIEADVPSEPAALIAFIQTHAPGAARVGLESGPTSPWLWHSLKAAGLPVVCMDARHAHAALSVRPSKSDRNDARGLAEMVRMGWYREVQVKSLAAHERMALLGVRRRLVDMRVEIDGQIRGILKTFGLVVGSGNKGAFAQRARMLAQDHPVLSALIDKLIEVREVAVAKVAALDKEIRRFVRNDLTLRRFMTVPGVGPVTALAFRSTIDEPNRFKRARDVGPYLGLTPRRYQSGETDRHGGISKCGDRFTRTCLYEAASVLLTKVQRWSPLKAWGTRLARRIGSKKARVAIARKIAVILRCIWTDGTEFWWTKETATA

SEQ ID NO: 344907 - protein, 389 aa, unidentified
MRSSHRFDTPVADSEHATMYVAFELGKAKWLAGIVSPGSAKLSRHVLPGGDTAAVWHHIARAHGRAVKRLGKPVRIVSCYEAGYDGFWLHRWLEAQGVESRVLDPASIEVNRRARRAKTDRLDLEQLMRVLIRHEGGERRVCSVVRPPSVEQEDTRRPWRERERLVKERTMHVNRIKGLLHGQGVRDLQPRARGFVEQLEGARSGDGHALAPHLVSEIEREHVRLTLVEQQIGAIEAQAEATRQAAVPNGVANKINQLIELKSLGPATSQTLVGEAFFRDFQNRRQVGAYFGLTGTPFDSGNSHHEQGISKAGNPRARTAAIELAWLWRRHQPRSALSRWFEARVGTQKGAIKRIAIVALARKLIVALWRFLEHGVVPEGAVLRSASRA

SEQ ID NO: 344908 - protein, 390 aa, unidentified
MIYVGIDVAKDKHDCCILGPDTEELFQVFTIRNNSDGYGELFHKIESVSKDKSQIKIGLEATGHYSYNILGSLLDHGYHTFVINPLHTNLYRKGQSLRKTKTDKVDARSIAEMLVTDKTLKPYTGTSYHSEELKSLTRYRFELVKERAKLKTSVSRLVNILFPELESLVPTLHMNSVYRLLQELPGAYFIASSNLTHLKALLADASKGHYGREKAIEIRETAKSSIGSLMPAKSMELRQTIRRIDTLTSDIKEVEQSIQKIMDECGSPITTIPGIKYRMGAMILAEIGDFTRFSNADQVLAYAGLSPSTYQSGQLISSYARMEKRGSKYLRYALFNAAIYASVWDERFRLYLSKKRAEGKHYYVAISHVIKKLVRTIFRMEITHTSYQPL

SEQ ID NO: 344909 - protein, 372 aa, unidentified
MKKRSSSRQNPKPAAKAKRAQQSVTIGMDLGDRNSRYCILSSEGEILREGQVATTKAEMIKTFSRLGRARIAIEVGTHSPWVTRLLQSLGHEVIVANPRQVKLITESSRKDDRLDAQTLARLARIDPQLLRPIQHRSEKAQMARMVIRVRAALISARTSLVNAARGLAKSLGERLPKCDADQMGVPQSEALPSTVQGVLEPLLKEVESLTEKIKDSDQKIEQIAREDYPETALLQQVSGVGPLIALTFVLTVEDKGRFQKSRDIGCYLGLRPRRSDSGQSQPQLRITKEGDPYLRTMLVQGAHYIISRRGPDTDLKRWGLRLAERGGKRGKKKAVVAVARKLGILLHRLWVTGEVYEPLRNQNLRKERKQAA

SEQ ID NO: 344910 - protein, 467 aa, unidentified
MKLYLGGDVSKGYTDWVILSDKKQTVLENFQLDDTYEGHCKLYSTIEAYFDKYPGLEMYAAVESTGGYENNWVHTLKSYQKVFNLKVARVNPAGVNYNRRAGMKRNVTDAISALSIAEYMINHPENIIYDQDEKWKTLCRHWNFVEMQKKQRVQTINQLETILYCANPTLLRFKKNKLPNWLLELIIKCPTAGKLAHSKPEKLAKISFLTLKKAQGLVAEATQNIASATDRNSEILVRQIARQIKAFDENIKSQMKLIEKEFICPGIEILKSFQGIDTTSAIGILLEIGTIERFPTVKGCSCFYGLHPKFKQSGDKIIGVRMSKQGSKNMRKILFNIAKGAITSNPLIRDLYQKKLSEGMSKMAAIGVCMHKILRIIYGMLKNNQAFDPSIDKHNNERSKSKQQEKKQQESANIDKSRRYQKFDATAPISRKQIKKRKEHDLSQCEISSQSTGSTCSSNTKILKVKH

SEQ ID NO: 344911 - protein, 395 aa, unidentified
MFIVGIDIAKHTHQASVMNTDGSLVGKSIKIPNTSAGFDAFISKLKEIDPDISHFEFGMESTGHYWLNIYTHLADLGCIVHVINPVQSDALRGLYIRQTKNDIKDSAIIADVIRIGRYCETSVSDDKMLALRDLTRQRFYLVDMVSDLKRKSLTLIDRIFPEYPTLFSNTFGTTSLELLANCNTPEDILAIETDKLVEMLSTASKGRFKQDKAEKIKETARNSFGALLCTDSASFMLKQFVEQIRFLENQIDELDEMISESLAEIDSPITTITGIGDTLGAAILSEIGNIERFESADKLAAFAGIDPSVSQSGNFLGTKNKMSKRGSPYLRRAIWLAAIAAILHDPAIKAFYDRKKAQGKHHYVCVGYICRKLVNIIFSVLKSGQPYQPVFPKNF

SEQ ID NO: 344912 - protein, 343 aa, unidentified
MLTKNVIAIDLAKNVLQACHISIYGEMLSNKPLSRQKMKEFLAKAKPSIVAMEGCCGCHYWGQLAEKFGHEVRIINPKKVKGYLEGHKTEHNDALAIANAAIQIGIKYSRPKSLEQQSMHSLETSRRFLSRSVVSLGLHIRGTILGYGIANPRGEKGLKASVQTVLDGETSIPANVVSVLSMLWEQYKELKAKLIAFEKEKNALTRQIEPCQRLMEIEGVGETTAAMLYTTLGDGKQFKNGRQASAFVGLTPKQHSSGGKVFMVGIDKCGGVKELRSLLYLGAMSYVGRLPEKPKAQKDALLRSIIDRIGFKKACIALANKVVRTAWAMLRYESEYKPVLLTD

SEQ ID NO: 344913 - protein, 475 aa, unidentified
MMQAGFRRAWSDSEGDGPSALQHDLSTTLVLESHTNRSDGRDLIGALPSTVCVLSAVPAGGAIPSTTKVGRYSMAHEPTVVLGGVDTHLNVHVAAVVDDRGRLLESQEFPSSADGYRELLTWMRSFGTLERVGVEGTGAYGAGLARYLAVEDVEVVEVNRPNRQMRRQRGKSDAVDAEAAARAVLNGEAAVVPKSKDGLVESIRVIRVAFTSARNSRTRVTLQIRDLILTAPDQLRAVLSPLPAELRVERCAKLRSGELTDPGEATKYTLRILARRYQRLTTEMTELSAGLDDLTARANPALRGAKGVGPDVAAILLVAAGDNPERLHTEAGFAALCGASPVQASSGKVTRHRLNRAGNRQANHALWTIATVRLTNDPATQAYMDRRTAEGKSRREVLRCLKRYIAREIFQLLTAPELVPVGTDLRVTRTNARVTLETAASALGISATHLSRLERGLQHNVTLAKRYEKWLADAA

SEQ ID NO: 344914 - protein, 294 aa, unidentified
MKYTPVGVDIAKHVIQIHFINEHTGEVVDKQLRRQDFLTFFGNREPCLIGMEACGGSQHWARELTKLGHKVRLLQARFVKAFVMGNKNDVMDARAIWMAVQQPGKEIAVKTEEQQSVLVLHRTRMQLVKFRTAQINALHGTLLEFGETIHKGRAAMEREFPEALERMKERLPPYLIMVLENQYNRLNELDSLIEDIEKQLTSVARQNETCKRLLDIPGVGPLIATAAVATMGEASAFKSGREFAAYVGLVPKQTGSGGKVRLLGISKRGDTYLRTLFIHGARAVALVAKEPARG

SEQ ID NO: 344915 - protein, 408 aa, unidentified
MEVLYERCCGIDVHKKVLVCCFKCGKKQEIRTFGSNNDDIREMAKWLLDGKCQMIAMESTGSYWKPLYNIFELSGLEVIVANARDIKNVPGRKTDIGDAEWIADLLKHGLIRASYIPSREQRELRELSRYRVSLIQERARELNRLQKMLEGGNVKITNVVSDINGRSSRNLLKALLENDEPLTEERVQGMVHGKMAHKVDAILKAMNGFLTPLQKQLIRKVVDHIDDMTKRIGEMDDMLTQYLEPYQEAIEKLDELPGVGKRSAETILIETGLDMERFPTDKHFSSWAGLSPGNNESAAKKKRCRTVKGNKTLKTIMIQCAKSAKRCKSYFRAQYERLVVRRGANRATVAVAHSMLIAIYHILKNGSRFVDLGEDFYARFNREKKISHHLKQLTKLGWLPNAAEAALA

SEQ ID NO: 344916 - protein, 344 aa, unidentified
MAATDPMYHLYVGVDIAADTFMAAWLPTGGAPTAPLPYEQSPAGYGCFQRRLMTTGVAPAETLVVVEATGNYWVALAVALHEAGYQVSVVNPLRAHHFAKAQLRRAKTDALDARDLARLAHALHPAPWTPPPLVYHEVRQRLAARDALLDMRQQARNQRHALLQWPVVVAGVRRHLDELISDLDQRIASLEKEIAGALEGSVWATSLACLTSAPGIGLITAAWLLVGTLNFTLCAGPTALAAYAGLVPMPHESGRSIRGRPSIGHGGNARLRTALYMATLSAAQHNPAIKVFYDRLRAAGKPLKVARCAAARKLLHQAWALGSKLQHFDPDQQQQHAALSAQAA

SEQ ID NO: 344917 - protein, 340 aa, unidentified
MRSSDDRSGRGHAQARALARAIDGLGQVLGALTITTSPRGYGELVGWPRTLGEGVVVGIEGAGSYGAGLCEYLLAEGFDVVEVERPRREDRRRGKSDEIDALLAAKKVLAADGLSTPRAGGTRQALAALLIAQRSCISERTRLVNQLQSLHTTAPVALRERIGPGNGRKLAARLVKMRARTDAPQSEQLIFTVLRDLARRAQALAAQADAYKHQLTELISSLDATLLDEYGVGPISAAKLLVCDPKRLKAEAAFARCNGTAPKPASSGQTIRHRLSRAGDRQANNALHTIARIRGRHNEQTRAYLDRRISEEKTPREAMRALKRHISRSLYRQLITIPLT

SEQ ID NO: 344918 - protein, 349 aa, unidentified
MTIVGCDLHTRKQQVAVLHPDTGEVVEQELLHAGDAVEQFYRTLPRPVIVGIESTGYALWFHELMQRLGHTLLVGEAAKIRAMVVRKTKTDRRDAQHLLDLLKHDRFPAVWIPDPATRDLRALLTHRMRLVRMRTMVKNGLHAIAMNRRLTLGPSLWSQRGLAQLQGLALAPHTTQRRDESLPRLTWLTARIAALDDRVAAAAQADPGARLLLTHPGVGPLTALTTVLVLGPVSRFLDSKHVVSYTGLAPAVHASADTCRLGPITKQGSPLLRFVLGQAGLIAAHSEVDLKRHYRTILRRRGRPKAIVAIARKLLVRLYIMLRDQIDYEEFRRRGRTPRRQEVPPPALA

SEQ ID NO: 344919 - protein, 449 aa, unidentified
MREPQEIEDEDHEQVVERVAAVDVAKASGMVCTRVPHESKVGRRVTKVWQVDATTNAIIELGEHLAALGVERVTVESTSDYWRGFYYLLEAAGLRVQLVNAREVKNVPGRPKTDKLDAVWLAKLTERGMLRPSFVPPAEIRQLRDYTRLRVDLTHERTRYWQRLEKLLEDALIKVSSVASTLETASTRDMLQALIAGQRDPKVLAGLARGKMKAKHAALVEALTGRFDDHHAELARMLLDQIDALTAQIGRLTARIEQLLQAIPAAQGVDADGTTGPGAGSGPDAAVLPAVARLDAVTGIGPGAAQVILAELGLDMGAFPSPAQLVSWAKLCPRTIQSGAKHRSGATGKGNPYLRGVLGEAAAAAAKTDTFLGERYRRLVRRRGKLKALVAVARSILVIVWHLLADPAARYHDLGAGYWADRIDKGRKARNHIRQLEALGFTVTLAPAA

SEQ ID NO: 344920 - protein, 465 aa, unidentified
MPTDKKGTRGRKERKELARQLRSEDPGLEVVHPDAAGIDVGNSAHYVAVRPGRDKEPVQRFECFTADLYRMANWLRSCGVKSVAMQSTGVYWIPLYDILEDSGFEVFLVNARHTKNLPGRKSDVQESQWLLKLHTHGLLNNSFQPASEIRVLRTYWRQRAEHATGMATCVQRMQKALTQMNIQLANVISDLSGRTGQAIIRAILAGERDPRKLAALSDRRIHATKEEIAKSLEGNWRPELLFVVKQQLEMYDIYQQRIAECDQKLQEHLTGFADAVLPEPNERPSLSKKTRQHRYMPQFPLTGELLRIAGVDLTQIDGIDVMTAQTLISEVGLDTSRWKTEAHFASWLGLCPDNRISGDKVLSRGTRRVINRAATALRIAATTLLKSKTYLGAQYRRLRTRLGAPKAITAMAHRLARLVYRMLRYGQQYVDKGAEYYEQKSRRQQMDFLTKRAAQLGFRLTPAQT

SEQ ID NO: 344921 - protein, 405 aa, unidentified
MRYYIGVDWADAEHAIWVEDEAGARVLARAVPHTAEGLAEWGRWLDEQRAGGVELWAAIERPDGRVVDFLLDHGVLVYPVNPKALDRARDRFRMSQAKSDPFDAQVLASFLRTDHAHLHPLQPSSAAAQELKLLTRDYARCVREQTRLVNQLTATLKEYYPRALEVCEDLTTQRARAFLRAYPTPEALAALSPKRWQRFARTQRWSAAQAATLWATLQEPHLPVPAHVVRAKARLAGILVTQLEAAVHAVAEYREAVTGFFGTLPAAEWATTLPAGHGTTVPTLCAELGDAPGRWASWQHLQGHAGTVPVTVRSGKYRSIQFRFACNKPLRTALHQFALSSLQHSEWARAYYDRQRARGHRHHAALRALGAKWLKIIFVLWRRHVPYREEHHLATMARQQLRQAA

SEQ ID NO: 344922 - protein, 305 aa, unidentified
MISWVGIDISKSNLAVWVQPQNQGYEVPNTLEGFAQLVERLSQYTIGRVLLEATGGYERRVMAALQEAGFNVLRINPRRARAFAVAMGKNAKTDPIDAAVLADFAEALHAAREKPISPEREALRELVQLREHFVQQRDDNKRRLQQAQLPVVIEAIKDHIRYLQTQIKQFGKAINQSMRKLDAEKADRLTSVKGIGTVATASLLVYLPELGELDRREIAALAGIAPYNDDSGNHSGKRQIYGGRARVRRALYMSCWVVIRYHADFKARYEALRERGKSAKVALIACMRILLIRLNAMLRDGTEWR

SEQ ID NO: 344923 - protein, 412 aa, unidentified
MDVVVERCAGLDVHRDSVVATVRVPGKSRRRREQRTRSFGTTIGQLETLADWLADFGVTLVGMEATGVYWKPVFYVLERRFECWLLNAQHLHNVPGRKSDVIDSAWCCQLLEHGLVRPSFVPPPEIRRLRDLTRLCIAQVEERTRAIQRLEKVLQDAGIKLTSVASATYSASARAMLEALLGGVTDPDQLAELAKGKLRAKIPQLREALANRFELAHHGVLVAGLLAHIDALDQTVATLDARIEAATEPYAELVELLRTIPGVSVNTARVLIAECGVDMSVFGSAEHLVSWAGICPGINTSGGRRRSGKTRYGNRWLRKTLTESARAAARSKGTYLASHYWQIRGRRGDAKAIGATRHDILIAYYHITRDRVPFRELGADWLARRHSVEHRTRRLVRQLEALGHTVTLEATA

SEQ ID NO: 344924 - protein, 402 aa, unidentified
MKESIAKAIDKQTKAAQVNTADAGSYAAYIGLDVHKDTIAVAIALPGREEPVYRGEIAHEGRKVEKWLNRLSVEFDGQVLQFCYEAGPCGYGLYRRLVGAGHDCQVVAPSLIPRKAGERVKTDRRDALKLARLLRAGELTAVWVPDAEQEAMRDLTRARDDMKSQERKARQQLNAFVLRHGHHWPRGKKRWTQAHFNWLESIQFEQPWLQIVLQEYIDAVKAVTRRVTDLTEQLMQALPGWSLAPVVDALVALRGVDKLAATVLLAELGDISRFDSPKRLMAYLGLVPSEHSSGGRRRQGAITLTGNGHARRMLVECAWSYRFPARQTMHLKRKAKAAPERAKAIAWRAQKRLCGRYRQLTQAGKNVKLVCVAIARELVGFIWDIVRQEMPRLMAKSGSAAG

SEQ ID NO: 344925 - protein, 465 aa, unidentified
MAGTKGRGPAAPGGAAAEVADEPAEVISRSAAVDVAKGSGMVCTRVPHESKAGRRVQRVWQAGAAYAGVMTLMDHLVCQGIQRLVLESTSDYWRIWYYLAEAAGLEVWLVSARDVKHLPGRPKTGKLDCVWLCKLNGRGMLRRSFVPPGAIRDLRALTRLRSRLTRDKARHQNRIEKILEDALLKISSVISGLMGQSGRRFPAALIAGERRPRALAALGDRRLKATPAELQAALTGRFRDIHALETGMLLDLIDGLSAKITQLDQQITGLLVQIPGVAGACTSCGETGGAHAPGCAGAHAPVLSVIGRLDEIPGVGPDAARVIVAELGMDMTQFPAPGHAAARARLTSRTIESGATSKNGRTGKGDPCLRGALGQCVMAAARTGTFLGERCRRIARRRGKQKAIIAIARTITEIAWLIISDPGIRFIELGPDCYARFHAGRQTRNKIRELERLNPGMKVTLTPAA

SEQ ID NO: 344926 - protein, 324 aa, unidentified
MSEMPTSQSVLNHGADVASDHLDIAVHDSKAGVKRIANERRAILQWLKQVPRGSRLAMEATGRYHLLLARLAHEHGLQVYVLNPRDVSHYARGVGQRGKTDRLDAQVIARYVANEHAQLRCWRPAPPQLAELDSLLRRRAALVRHQGALRQSMGDDPLTSKLLPQVMAPIDKVLQALNKAIAKATQRIEGSKQALRSITSVPGLGALNGAALLSLFTRLADARADAVVAFTGLDPRPMDSGNKRGVRKLSKRGPAELRRLLYNAASSASRTAAWRGIYERELAKGLPRTAALVALARKLVRVAFSLFKSQTTFDPNHGQELKIA

SEQ ID NO: 344927 - protein, 312 aa, unidentified
MKKVFIGIDIAKDKIDISILPSGECWTAGITPTALSETIDRLTALKPTNIVMEATGGYETRLAASLATAGLPVAIVNPRQVRDFARALGILAKTDVIDAQVIALFAEKVQPECRPLPTDDERTLKELIVRRHQLVDMRTSESNRRQQVVSQQVYESITTLIESINHQIDDIEREIDNRIKTSPAWRAKDKLLQSVPGIGKTTASLLIVALPELGTLNRRQIASLVGLAPMNRDSGTFRGRRMITGGRASIRAGLYMPILSAVRCNPKIKPFYDRLIAVGKLEKVALTACMRKLLTMLNAIVRENQPWHSIPA

SEQ ID NO: 344928 - protein, 354 aa, unidentified
MIIIGADYHPAFQQIAFVDTETGELQERRLDHPEAAEKFYRELAAQGKKVRVGMEASGHARWFERLLAELNFELWIGDAAEIHRKRERKQKTDRQDAQHILRLLLKDDFPRIWVPSWENRDLRQLLWHRHRMVQARTRMMNQLQAVALNEGLRCKKKLWREVGRKQLEAFRLAPWASRRRQDLLELLDRLNPTIAALSQAIEQEVEKCPEAQRLMTHPGVGPLTALAFVLIIERADRFQCGKQIASYLGLVPLEDSSGNRRRLGHITKQGNSLLRFLLVEAAQVTVRTLPEWRSKYVHLTMRRGRKIAKVAMARKLAVRLYWMMRKGWDYEQVKKFGSHAGQPGHRHGVKSNIE

SEQ ID NO: 344929 - protein, 346 aa, unidentified
MKQITTIGLDLAKQVFQVHAASADGSPIFNRKLRRAEVLRFFEKTPACLVGMEACGSAHYWAREIRALGHDVRLIPPVYVKPFVKRGKTDAADAEAISEAVTRKTMRFVPVKSADQQAAAVVLKTRALLVNQRTQAINALRGHLSEFGIIAAAGTVRIAGLISIVRDKTDERLPKAARLALMEVASQIDALKVQIEKLEQAIVATVRRDDDARRLVTIPGVGAIIAASVRALVPDPGGFKSGRHFAAWLGLTPKPHSSGGKERLGRISKMGNPALRSLLVVGATAVLRHARGNPNASRWIAALLARRPYKIVAVALANKMARIIWALLVKGGTYQDKGARNQIVAA

SEQ ID NO: 344930 - protein, 342 aa, unidentified
MKKYFIGIDVSKETVDVSFVESDFQRQPEYLAQYPNGKKGYRSMVRDLRLALRGTSSGQWLFCCETTGAYDRQMCHWLAEHGMHVWRESALQIRQSLGIRRGKNDKADSMAIADYARRHHDKANLFELPDKELAALKDLFLYRQTLVDRLKGVKNRQKALKSQGDAASAAARFIRRDTNNEIKRLECSIAECEKAMKEVIRSDEQLQRNYEHVKSIKGFGLVVTVALIVFSGNFQAIPTANKMATFCGVASFRNTSGTTVDSRQDVRHLSNLRLKGVLTMAARTAIRHDEAMMQYYQRKIAQGKQHGVAINNVKNKLLHIAYALVRNGQDYQSGHVTNGEAA

SEQ ID NO: 344931 - protein, 320 aa, unidentified
MTSEPIFVGIDVSKGTLDVAIRPAGTHRQVPNTDDGFDQLVALLKPLAPALIVLEATGGYQRRVVAALGLAGLPVAVVNPTRPREFAKALGRLAKTDAVDAAVLAEFAERVRPVARPLPNDQAQKMQELLGRRGQLLGMRTMERNRLGSAQSRTVRRSIESHVTWLDSQIDSTEEELDEAIEQSDVWKAKDELLQTIPGIGPGVSRTLLFELPELGHLSREQIAALAGTAPMNRDSGRWSGKRFIVGGRKAVRNAVYMAALAARQFNPALKAFADRLAATGKPAKVVLIAVARKLLVIANAILRDNKPWRDVTENSVAVA

SEQ ID NO: 344932 - protein, 366 aa, unidentified
MKKTSTVQVNGNMIFKGHKLTIGLDLGDRWSFYCVMDEAGQIIVEQKLATTPEAMKQTFGKIPRSLIALETGTHSPWVSRLLTELGHEVIVAHAQKVQLISKSNRKDDRHDARTLARLARIDPELLGPVRHRSAKAQIHLTVIRARAELVSARTALVNAARGLAKSYGERLRKCGTQQVSRELAAELSVELREVLEPLLQEVESLNERIKEYDARMEKIAKESYPQVELLKQVKGVGTQIALTFVLTLEDPHRFPKSREVGCFLGLRPGRRDSGESQPQMHISKEGDPYLRTMLVQGAHYILGPFGQDSDLRRWGLKLAARGGKNAKKRAVIAVARKLAVLLHRLWVGGEVYEPLRNSQKAMRAVA

SEQ ID NO: 344933 - protein, 317 aa, unidentified
MSQKSHEKKKYISVGIDIAKDKYDVHILPDNEFFILENSPKGHKKLISRLKKLEPDIVLLEATGGLELEVALALQKHKMCPAIINPRQMRDFAKAMNFLAKTDKIDAKVIALYGEKIQPKVRAIPAERSSRLLSIVNRRRQLVDMKKVESQRLSRSPSDIRSVIKEHIAYLSKQIKLLEKEIKEEISKNPLWETKSSILQSTVGVGPVLVSTLLIQLPELGELNRRQIASLVGLAPFNCDSGRTKGVRRIWGGRKVVRNQLYMATLSAIRYNPKIKEFYDRLKEKGKKTKVAHTACMRKLLVILNCKLKSDLCEVMA

SEQ ID NO: 344934 - protein, 313 aa, unidentified
MKLYIGIDVSKDKFDVASEPSSIDQSFANDPQGIKSLVRMLRLMKPQLIVLEASGPYHVALRDALNAAGLPACVANPRHTKHFMQSTGELAKTDRIDAKGLALYAARMRPIVREVPDKHQQQLRELVSRRRDLVGYITMEKNRREGASPWVVRNINKHIRYLQKEVDAIEAKMATLMEADSQRWLEYQLLLTVPGVGKICAFTLLALLPELGRVNGKQIAALAGVAPFNHDSGRYHGVRRCWGGRAEVRNVLYMAALAARRHNPVIKEFYERLIAKGKAPKQALVGCMRKLLTALNAMLRDHVQWQPELSRAA

SEQ ID NO: 344935 - protein, 355 aa, unidentified
MNGLKHQMEKRSMDYFAGLDVSVKETSICIVDDTGRIVREAKVASEPDALLEVLKNPTYSFKRIGLEAGPLSQWLYSAFAEVHLPVICVETRHMRAVLKAQINKTDRNDARGMAQMMRAGLYRPVHVKTLRSQKLRMLLTHRKLLQSKAIAIENDLRGTLRNFGLKVGIVSKLKFEARIRELVKDLPDIAILVEPLLVVRRVLREQIAVLHRRLLGIVRDDAVCRRLMTVPGVGPVVALTFRATIDVPARFRNSKAVGAVLGLTPCKHQSGESERTGAISKCGDEMMRVMLYEAAQILLMRSTRWSWLKAWAMQIARRRGLKKAIVALARRLAVIMHRIWVDGTEFCWTREIAAA

SEQ ID NO: 344936 - protein, 415 aa, unidentified
MPDFLSASVALFHVGIDWAAETHAVCVLDDAGKVKSTFAITHTADGFADLIGRLGKLGDRADVSVGIERPDGRLVDALLEAGHPVVPVSPNAIKAWRDGEVVSGAKSDAGDALVIAEYLRLRHHKLRVAVPFSDQTKALRTTVRTRTDLVEMRVAATNQLAALLDMHWPGAKAIFADVESPIALKFLTRYPTPASAARLGEKRIAAFCAANGYSGRRPAGELLARLRGAPAGTTSPALTDALKHAILAMVTVLTALNTAIKDLDKTVVTHLGEHPDSEIFTSLPRSGQINAAQMLAEWGDCRGAYEGADAVAALAGLTPVTKESGKHRAVSFRWACNTRFRVAMTTFADNSRHASPWAADIYDRARANGKDHPHAIRILARSWTRVIYRCWHDHKPYDVANHGAVQRLGQPPQTA

SEQ ID NO: 344937 - protein, 360 aa, unidentified
MKKVSKQMRKMEVAHKPEMTLGLDLGDRFSHFCLLNGDGVIVEDGRIQSTEAALRRHFEGESPMRIALECGTHSPWVSRLLTALGHQVIVANARKIPAITASESKNDKNDAENLARFAAYDPKLLSPIEHRSPERQLDLNLIHARSTLVRARTMIVNALRGLVKSAGGRLPACSTEALPQRAPAAIPAALATVATPLIEQIALLNAQIGGMDKQVEKLAAKYPEIKLLRTAPGVGPIVAAAYVLTLERPDAASNRSAGAFLGLRPAQSQSGDSDPQRRISKTGDGCLRSLLVQSAQYILGRFGPDSELRRWGLNLAATGGKRGKKRAVVAVARKLAVILHAMWRNGECFQAFPQPVDKAA

SEQ ID NO: 344938 - protein, 346 aa, unidentified
MLYAGLDLSRKRLDFRLLDEAGETVEVGAAPPDADGLRGLGVRIARFQQPVRAAIESMNGARFVHDQLEQAGWQVEIADAFKVKGLAPLACKTDRIDAWVLAELSRRELVPALWLPDPEVRAERERARFRLHLVRHRSALKHRVHALLLAHGKPCPVSDLFGVSGRALLERLALPEPWAGTLRASLRLIDELEQEIAACERELQRLGADHRYVPLLRTVPGIGWVLAYTIAAEIGDIARFRSPRKLAGYTGLCPRVYQSGASDRRGPLVKQGPKYLRWALIEATTQASKHPLYRARYQRTKTRLGKQRGAKVAQVELARRLAEAVWHMLTRNQPFAPAGATNPLAA

SEQ ID NO: 344939 - protein, 343 aa, unidentified
MDHFAGLDVSVKDTSVCIVDGTGKIVREVKVASEPDALLQVLSNPTYRFKRIGLEAGPLSQWLFSALGEANLPVICVETRHMRAVLKAQINKTDRNDARGIAQMMRVGLYRPVHVKTLRSQKLRMLLTHRKLLQAKAIAIENDLRGTLRNFGLKVGIAGRTKFEARIAELVEDLPDLAVLVEPLLVVRRVLREQINILHRRVLATVRDDKVCRRLMTVPGVGPVVALTYRATVDVPARFRKSKSVGAVFGLTPARDQSGERDRPGAISRCGDEMMRTTLYEAAQVMLLRSAKWSWLKAWAMKIARHRGMKKAIVALARRLAVIMHRIWTDGTEFRWTREAAAA

SEQ ID NO: 344940 - protein, 411 aa, unidentified
MEVMYPKSSGLDVHLKFVIACVFATNEKGESKAIKQRFGTTTNQLRELVSWLQGHEIKQVAMESTGVYWKPVYNLLHPHFEVWVVNAQHLSRVPGRKTDESDAEWLTRLMQYGLLNRSFIPAEWQRDLRDLTRYRTRLIQEKSSGVNRLHKILEDANIKLSSVVTDIQGVSARAMLEALIADEMDARQMAELALGTMRPKIPLLVEALTGFVRPHHRYMLEEILQHLDELKQRISSLDRQIHLVGTPYATLLERIRELPGLDRRTTEIILAEVGPTVEKWPTAGHLASWACVCPGNHESGGKRYSGKRRKGQKWLVSALVEAAHAASRSKDTYLSAQFHRLRARRGAKRAAMAVAHSILTIVYHLIHKPEERFSELGGDFFLKKNKEQEERRAVRMLESLGFQVALTPLPA

SEQ ID NO: 344941 - protein, 467 aa, unidentified
MGKRSGGNGMTRGDRRRNARRERLRGLLPRDGAVIGIDLAEDKQALAVVDHDVRVLARKTVKVKAFRLGEALGWAVAQAKVKGFTHVTVACEPTGPRWMQVQRLCAERGLPLVCIQPLVSHIAREQQDYTPHKTDESDCVLIGRLATELHCYIPEELDETWAHLRHLGRRRAQLITAATASVQRIRDFLSVAWPTVTEACADPFASVTWLAALQVVTARCGGDPARLAALGQEEFTAVVRAAVPGWGGKKGWGRICRRVFAALTDTEGVVTWSRRGLLRRCADELGDLARTRAQLRAVEADMVLVLGELGLSRLGDIPGLTAVGAAAILAETGDPRRYDSSSSLVKHAGLSPSENASGAFEGQAHMSRRGRPGLRLTAWRAVWPMLQFNPVMAAKYAALTQAADAAAAADAGSQQARAAAAARARRAKARVACAASLLRWIYSMVVHGTSWDAAVASGDASCQPEAA

SEQ ID NO: 344942 - protein, 417 aa, unidentified
MPPMPAAVLVGIDSSDTFHQVEATSPTGDQVLRLQISNDLPGFQQLEAALTAAFGDLPRRYALENPASLLGCYLLHREQAVYAVNPRSVARLREALNPSGKKDDPVDAHACVVLLRERATECAPILPNSPAGALVAGLVQQRIDVVEEKNRVTNQLTAVLKRFYPRALELFPHLEQPLTLDFLTTFPTPTELQQASQESWQALFAGKRYPHPSRISTTLWERAQAPQVPVSPTEAALGQLEVSRLARLLRVLLDELQQLDQQIEARFAELPAAPIFASAPGAGAVLAPALFALFGDNPAAWRDWREVAQACGSVPVTRRSGGSCSVHKREHCDKRARRTLHLFAGCSRRGCAWAREFYTEQRRQGKKHATALRNLGTKWLRILFRMWKEGTVYDEAVYLRGRAARQAPRDPVPAAPS

SEQ ID NO: 344943 - protein, 343 aa, unidentified
MKYIGLDLHKKSIFATVLGEDGKILSKVKIGPTTRDICYYLKSQGKRDELSVAMEASYNWPYYYRAVEEAADTIVLAHPLKTRIIGEAKIKTDKIDSGVLAYMLKADMLPAAYVPSRDTMENKMILRARISLVRIRTQIKNKIHAIVARNRDSYCGLENLTDIFGRTGKKILRDTKICPTDHKILTGYLDLMDEINKKIKDTESQIDKRSLKDRDIELLKTIPGIGTFTAFLVKSEIDDISRFSSKGKLSSYAGLIPSTHGSGERLYHGRIVKQGNKFLRWALTEATQTSVRCSEYFRYHYSRIRSRKNANSATIAVARRMLEIIYVMLKEGREYIEKPVDIK

SEQ ID NO: 344944 - protein, 388 aa, unidentified
MEAMVETCCGIDVHQKSIVCCILDGPLDTNKPKKFQKSFGTTTRSLQGALDWILDHGVTHVFLESTGQYWIPVFNIFSESSLEFSLAHPQRVKNVPGRKTDMKDAEWLAQLGRCGLIESSYLPTPEVMELRLLTRRYRSYKESLTQIKNEIHNLLQRSNIKLTSFLSDIFSKTGQALLELFINGEVIDEESVRACMHGRVKAQAIDLVEAMNGKLSSEDCFLMSQSLIQYRMIQSLIEDLDKHIKSYINKHFPEEYQLLMTVPGISENAAAVILAEIGPDVDAFPTDGHLASWAGLCPGSYESAGIKKSSRITQGNKYLKHALTISGMIAGHSKDPAFSSLYNRVSQRGSKMKAVIACAHKILRIVYKLLETHQTYEPEKALGMRQHP

SEQ ID NO: 344945 - protein, 437 aa, unidentified
MHVLQPNSAGIDVGATEIYVAVPDDRSSKPVRRFDTFTDDLHETAKWLKECGIESIAMESTGVYWIPIFQILDTYGFDVILVNARHVKNVPGRKTDVQDCQWLQYLHSVGLLRGSFRPDQDICAVRSLLRHRDNMVKDASSHVQHIHKSLTQMNLQIHNVISDITGVTGLAIIDAILAGERNPDILADLKNPRIKADRQTIVKSLTGDYRSEHIFTLKQTLQSYRNYRQMIQDCDAEIERHLKEFDSRIDLDDCPKPPEKKLKRKPRGNEPTFDLKSHMHRLLGTDLTRIDGISDLTAHVFFTEVGPDLSKFINADHFCSWLGLCPNNKISGGKILSSHTRPGSNRVAQALRISANSLWNCKSYLGDYFRRMRARHGAPKAITATAHKLARIIYHLVKEQRAFDETIFSEQEKNHQIRLRKRVISQAKSLGLQLVPA

SEQ ID NO: 344946 - protein, 451 aa, unidentified
MAKKRTKVASLPVIEPNAAGIDVGATEIFVAVPADRDPEPVRCFPTFTVDLERLADWLQQCQIRTVAMESTGVYWIPLFQILEKRKLDVRLVNAHHVKNVPGRKTDVEDCQWIQHLHSVGLLRGSFRPDDEICAIRSLWRHRDNLIQLATLHLQHMQKALDQMNLQIHHVISDLDGTTGLAIMDAILAGERDPHQLAKLRHPRVRASKETIMKSLVGDYREEHLFTLRQSLKAYRYYQELIQEVDLQVKQMMQRLPSKVADGERPPKGDKPRPRKTPWRNEPPQLRHDLYRAFGVDLTEVPGINVLTAQMLLSEIGPNLGRFPTAAAFCSWLRLCPDPRISGGQVLSSRTRPTKNRAALALRMAAQALHRSNTFLGDYFRRMKARMGVPKAMTATAHKLARIVYHMVTTQQEYDATIFQQQEQRRRQQKSARLRAQARELGFHLVPISSVP

SEQ ID NO: 344947 - protein, 342 aa, unidentified
MNEYVGLDVSMKETMVSIRREGRRIWRGRCASDPKLIADLVRKRAPAARRIVFETGPLSVWFYHALRAEGLPAICIDARHAKAALDMAANKTDANDADGLAELAEVGFFREVRVKGFDSMVTRTLVMARTRLVRIMTELSNQIRGVMKTFGLVVPAGRGSVFEKNVRALLVDQNGLAAIVLPMLEAWRSLRIRAAELGRQLIGDARRSPACRILMSIPGVGAITAMSFATAVEEPANFKKSRSVGAWLGLTTRRYQSGQVDYDGHISRRGDSQLRALLYEAASVLLTRVRMESGLRRWGLILWKRLGFKRAATALARKMAVVLHAMWKSGTAFDSKLGVAAA

SEQ ID NO: 344948 - protein, 412 aa, unidentified
MKLFVGIDISSQKLDVCFFDSDKTILEEATLPNDINGARTLKQRILAFHQLYSYRKIVIGMESTSVYSFHPAIFLHEDDGLKALGIVEVVVENPKNIHQYGRIWDEDKTDRIDARHIAEYMALEKYKTSIIREEKYLALQRLTRSRFQLVGQLTEAKLHFLENLYYKCNTLSKELKEENKSALGSAMMDILSDSLSLDEIAGMEVEALVGVLQEKGRGKFSNPEKLAKVIQKAIRGSYRLGKVMQDSVDVVLASYVEIVKALKKQVKLLEKSIAALFEVIPEAECLRSIPGIDAVYAAGIIAEIGQIQRFDDEARLAKYAGLHWKKKQSGNYESQRTPLTYAGNHYLRYYLVEAANSMRMREETYRKFYQKKYAEVPKFAHKRALVLTARKLVRLVDALLRNRQLYTPERSV

SEQ ID NO: 344949 - protein, 347 aa, unidentified
MRFYNRQHQYYCGIDLHVKTMYVCILDATGRVLVHRNVPSTPEAFLAVVAPYREDLVVAAECMFTWYWLADVCAAEDITFVLGHALAMKAIHGGKAKNDKIDSHKIAGLLRGGLLPQAYVYPAAMRATRDLLRRRLHLVRKRGQLLAHIQNTRAQYNLPAFAKRLAYPGNRDGVVEHFPDPSVRKSIEVDVVLIDQYDALVNNLELTIVREAKRHDGDAFHRLRSVPGIGKVLALTILYEIHDIHRFDRVQEFTSYARLVKCQKQSGGRTLGTSGAKMGNVHLKWAFSEAAVLFLRHTKEGKKLLAGIAKKHGKGKALSILAHKIGRAVYYMLSRGTVFSMEKFLAA

SEQ ID NO: 344950 - protein, 323 aa, unidentified
MSQPNLQCMGIDVAKLSLDIATTDTIEPFTVGNDEDGFAVITDKLKHTKINLILMEATGGLEAAIACKLQSEGYDVVVINPRQARDFARSMGYLAKTDKLDAAMLAQLALVIDRHPDRSRYIRHLPDEARAVLAAMVVRRRQLNHMLVAERNRLYPSHPQSRKSIDNIIDALQNELDRINEQMKQHMTAFFQEQARLIGSVKGVGDITVASLIAELPEQGKLNRREISALTGVAPLNRDSGKMRGKRTTFGGRAGVRATLNMAALVATQFNPAIKLFYQRLLAAGKPKKLALVACMRKLITILNTMLRKGKEWNASFQSQVIS

SEQ ID NO: 344951 - protein, 350 aa, unidentified
MNIYFGCDAHKRYSMFASMNERGQTGRPVRVEHTRMMFRRYLESLPPGSPIAIESVGNWYWMIEEMERAGHEPRLANAGKAKLMMGQINKTDKLDATGLATLLRNGTLPSVWIPPRDLRDERELPRMRMSLVSVRTMLKNRIHATLAKYAIEIDEVSDVFGVKGRELLKNRLEELPPYTRQSVETQLELLDEVEAHIDQAEKEIREVVKTTPAMKLLMTIPGVGPILAVVIALEIGDIARFPSPEHLASYAGTVPRVRSSGGKTSFGKVRPDVNRHLKWALIEAANMIVLHQRHWPDAHLTQLYLRLRERKGHAKAVVAVARHLAGAVFWTLTKNEAYKEPQRSISSSQE

SEQ ID NO: 344952 - protein, 334 aa, unidentified
MTGLTIGIDIAKRVFQVHAIDSETGEVTSTKLARRDFLAHFQKLSPSLIGMETCGSAHHWARELSAMGHEVRMMNPMYVKPYVKRGKNDVVDAEAICEALTRPTMRFVAVKSVEQQSVLAVHRTRALLIRQRTMLVNALRGHLAEFGIVAPLGIERIPELVDRVLGREGDELGITPLVRSTVAIYAEQIEKIKEQIRKLERELRLWHRTSEASRRVASVPGVGTITATAIVAAMPDPSMFESGSSFAAWLGLTPKSSSSGGKERNGRITKAGDRHIRVLLVLGATSVLRRVRSGQPTPLYGWVKKLLDRKPPRLATVALANRWREPPGPSWRGK

SEQ ID NO: 344953 - protein, 315 aa, unidentified
MHVLQAFMVGIDVSKAHVNVAVEGKRIVVRFDNDAAGRAALATAVAGAELVVVEATGGYEMPTVRTLMAAGIAVAVVNPRQIRDFARASGRLAKTDQVDARVIRHFARAMRPAQIPHIDDGRIALAALVTRRRQLVDMAVAEKNRLEHAPQAVAVLIGETLAALKAQLARVDAAIALAIEAEPDMAARRDLLLTVPGIGEVGAAVLIAELPELGGIDDKKLAALVGVAPMAHDSGTWRGQRHIAGGRATVRCALYMATLSAIRCSPAIKASYTRLRDAGKPPKVALVAAMRKLIIMINTILKRHTPWNEPQQHGC

SEQ ID NO: 344954 - protein, 302 aa, unidentified
MKVNIYAGFDVHLKDWKVTILSEEMMLKRFTMPPKPEVLSDYLQKNYPGANYHSAYEAGFCGLWAHYQLCELGINNIVVNPADVPGTQKDKLQKEDKRDSRKIALALRSGNLTPIYTPSESTLNDRSLVRSRKTLVNDMIRFKNRIKAFLNFYGIEMPEEFANSRTHWNRRFMLWLESIHMKELSGEMALKHQISEARYMKELLKSILLDIKHLSETDKYRENVKLLRSIPGIALLTAMVLLTEIEDINRFPNSERFASFIGLIPMTKSSGEKQKVGEITFRAHDFLRSIIISGRASCRERV

SEQ ID NO: 344955 - protein, 437 aa, unidentified
MRVLYEHVAGIDVHKDMIKVAIRSPGEKPWTRKTEILEFRTFYGVLQEMARLLRRRGVTHVVMEASGVYTDPVYYALCEQDFAEVAVVNPAHARALRGHKTDAADCRRLAELFECGLLRGSYIPPAELREVRDLTRYRMKTVQARTSEIQRLGKALESAGIKLGSVASDITGKSATAMIDSLIDGERRGAVLADLAIGRMRTAGKLAGLSMALTGRFTEHHALLCRLHRDRIAGLDAAVADLDDQIAGRAGRWQRELDLLKTVPGFGDVVAQTWLAEIGPAPHRHFASHEKLASWVTLCPGNNISARKRKHGRTGDAGTYIKPMLIQAAWNAIRPKGRLQARYSRLVRRFGGEKNPGAKKKAITAIAHTLLKIAYQVLKSEVPYQDLGADFYTRRESPDQQRAYLERRLRKLYPGCAITITISPPEAVLTSTVSNAP

SEQ ID NO: 344956 - protein, 408 aa, unidentified
MRLFAGDDWAEDHHDVELMDVAGRVLAKARLPEGIAGMTRLHAMVAEQLGDAGPDEARVLVGIETDRGPWVAALAAAGYEVFAVNPLQAVQYRKRHAVPGAKSDAGDAHVLAGMVRTDAHQLRPVAADSAQAEAVKVVTRMHKTLIWERTRHTQRLRHALRGYFPAAVEAFGDLDAAGTLELLAKAPGPASAAKLTISQISAALKRARRRGITGKAAAIQAALRAGHLGQPTVVTAAYAASVRALAAILVTLNEQITALQGQVEDHFGQHPAAEIILSQPGLGPVLGARVLAEFGDDPHRYASAKARKNYAGTSPITRASGKKKVALARFVHNDRLIDALMAQAFSALKSSPGARAYYGKQRARGAEYNAALRQLANRLAGILHGCLKTGTLYDEATAWSHHSEKIAA

SEQ ID NO: 344957 - protein, 341 aa, unidentified
MSNLALVGIDLGKQTFHLHGQDKPGRELFRKKLSRQQMMRFFANLPACTVVMEACAGAHFVARELTALGHQAKLISPQFVKPFVKGNKNDFVDAQAICEAASRPTMRFVSPKTEGQQTLSVLHRLRESLIRDRTKAVNRMHGFLLEFGISLPQGLAVMKRLSAVLAEHELPVRLTVLLHRLHDHFVYLDEQIKQLDKELAGQLADDDLGRRLLSMPCIGPITASLLAVEMGDGQQYGCSRDFAASLGLVPRQYSTGGKANLLGISKRGDKNLRSLLVQCARVYMRHLERQKGGLAEWVRSLLTRRHSNVVACALANKLARIAWAISAHHTQYEAGPDVVKA

SEQ ID NO: 344958 - protein, 464 aa, unidentified
MSDVKRGSKKKTATKAGPAALPVLQPMVAGVDVGSTEHWVCGPARADGGPNVRVFGTTTAQLHELAGWLIEQGVRSVAMESTYIYWIPVFELLESRGLEVVLVNARQLHNVPGRKTDFSDCQWIQLLHSCGLLRGSFRPTEAITGLRALQRQMANFVAERSRCVQWMQKALDQMNVQVHRAVTDLTGTTGMAIVRAIVAGERDPARLAVHRDRRCHKSVEAIAQYLTGTWREEHLFNLAAALRLYDTLQDMIASYEAQLLAQLEALQPPDRQQADVPRHPNPTKEKTIRHRGEQPLRTSLWRFAGVDLTRIDGIRATAAQTVLTEVGPDVTAFPSEHHFVSWLRLCPRTPISGGKPLKKRRNGMGANRVAAALRMAALGIQRSKTALGASFRRIARHKGVAVAVFATARQLARLIYRMLRYGQDYVDIGEAAFEAKFQARRIAGISEAARSLGFTLTKNEVAAG

SEQ ID NO: 344959 - protein, 391 aa, unidentified
MLICGIDVGKYHHEASLIDESGKLRTKSLKFTNTTDGGEKLLAYLAAHNPNADNIVVGMESTGHYWLALYCFLFDKGFQVNVINPIQSDAVRNLFLRKIKNDPRDSFLIAETIRIGRYSTCEVASEDLLCLRQLCRHRMDLVDYIADQKRRIIGVMDRVFPEYQALFSDMFGKTSTELLARAVTPEEILALDTQELCSLLNTASRGRFGMAKAEEIQQAARRSFGITIGVSAFTLQLRQLLELIALVEKQLADLETEIEQYLLSMNTCITSCPGVGNVLGATILGEIGDLSRFPEPKKLVAFVGIDPSVKQSGEFLGTQNHISKRGSPHLRRAVWLAATVAAFHDPVLSAFYQKKRSEGKHHGTAIGAVARKLTLIIYAVLRDNKPYVPNC

SEQ ID NO: 344960 - protein, 322 aa, unidentified
MNKNKHFIGIDISKNVFDAWSPKLGYKQFKNNPEGFEKFLLLLDSDCWCIMEYTASYYQQLACFLYENQVPVSVINPLVIKRFIQMKLQHNKTDKSDAKMIVQYAQEQPVSLWTPLPEYIEECKDLQTTTSLYHKQKTALNNKLISLLDKGVKGRVITSLKRQIRQLESEIKLLEKEQEQLVKDHEQVLLSNISSIPGIGKKTAILLIICTNGFRSFENAKQLSAFFGLSPVLTMSGTSVRGKTRISKKGNPLVRNHLFMCSFTACNSNPQCKALFERIVNKGKSKKLALIAVTNKLLAQCLAIAKSGIRYEPNYNAIPVFK

SEQ ID NO: 344961 - protein, 360 aa, unidentified
MSHSHEIVESPRTVIVGVDTHKHVHVAVALNALGARLASCSASADRAGYLELVTWARALGTVEAFGIEGTGSYGVGLASFVRRHAIRVVEVSHCDRRKRRNNGKSDTLDAETAARSVLSGIATAVPKTADGAAEMVRQIKIARDTAVKARSAAMITLKTLIVNASDALRESLEPLTDKKLIDHCVVLVPGDILDPTASAKHSLRALATRWLALAAEIRTHDDVLDAITQTAAPTLREAFGIGADSAAEMMIVAGDNPTRVRSEAAFAKLCGACPIPASSGVTHRHRLFRGGHRQANAALYRIVTVRMRWHQPTLDYVARRTAQGRTKKDIIRCLKRFVAREIYNALIADHRSRAALTSAA

SEQ ID NO: 344962 - protein, 353 aa, unidentified
MRTYYVGLDVHRATIAIVVVNGAGKVVEQLVVETSAPRVRSYLKQLQGRVYVTFEEGTQAQWLYDVVQPLVTAVIVCDPRHNKLLKGGNKSDRIDAQKLAELLRNGSLKAVDHRDHGVRALKELVRNYDSLVSDTTRVMNRLKAMFRGQALACSGHEIYRQDQRERWLAKLTERGAQERARSLYQQLAALQALRHEAKLAMVREARRSAAYRWLMSVPRLGAVSVAQLLAVVGSPHRFRTKRQFWSYVGLAVVTSSTADMEVVAGVLRRSRRPVATRGLNRNHNHLLKRVFKNAARSACQHEPFKQHYERRLQKGMAPALARLTVARQLSAITLRLWKRGEELQAERMKRPAA

SEQ ID NO: 344963 - protein, 362 aa, unidentified
MTTIAPGPTIAQVEVAGGVDTHQDTHTAAAVDPAGRLLGHRQFPATAAGYRELLAWLRGWGQLLVVGIEGTGAYGAGLARHLAAQSVAMVEVDRPDRKTRRFAGKSDPLDAEAAARTALTGRRTGTPKDRSGQVEALRNLRVARRSAIDHRADCQRRIKTLIITAPESLRASLRALPNAKLIATCAGLRPDGSRIGEPEQAAKLALRALARRHTALTTEIDELDTVIGPLVTAINPALIACTGVGADVAGQLLVTAGQNSDRLHSEPAFAMLCGVAPIPASSGKTHRHRLNRGGDRQANAALYRIVLCRMRWDPRTRAYVERRTKEGLSKKDIIRCLKRMIARELYYVLRPAPSAQKMAVAA

SEQ ID NO: 344964 - protein, 421 aa, unidentified
MDNRWYHVNLSDWRSLIMFNAVGIDVSKGKSTVSVLQPGGTVVKKPFNVVHSSRSLNDLSRFILHLDGQTRVVMECTGRYHEPILHALHDAGIFVSAVNPHLIKNFCSNTIRKVRSDPADSRKIVRYALDNRASLRQYSTMDTTRTQLKTLNSQMDFFTKQKVAARTNLISLMDMTYPGVNSLFSSPARDDGSEKWLDYAESFWHVDCVRKIGLKAFTERYQAFCKRNGYNFQPGKPEELYLASKELVAVYPKDKVYKDLIMTGIEQLKSTTRHVEHIRHEMDALASTLPEYETVLSMRGVGKTLGPQLMAEIGDITNYTHREALTAFAGVDPGVNESGSFRSKSNPASKCGSSRLRKTLFLIMTSLLQTSPADDRVYQFLDRKRSEGKPYLVYMTAGANKFLRIYYGKVKACIASQSKAE

SEQ ID NO: 344965 - protein, 438 aa, unidentified
MLNKVFFNLDDLFISVGIDVGADFSWMSIALPNQQFVGKPYKILHNSIDSLTTAVSKIKEAEELYSLESRIFLESTGIYHYPLFCYLRDKGFNCSVINPIITKNSTNINIRKVHNDRFDSKKAALVGLKPDLKVSLMPSDLALNCRNLCREYYDLMDNRSAYVNKLQGELRMAFPQYLGIFSKVTINTSLTLLETYTSPSAFLEADKQEIIDIIKSTARFGLTYAQNKYNAIIQAATDANQFGYIIDSNIKRIRLYISFIRKYDEEINSILESLHELVDANEDADFVKQIHLIETIKGAGFLSAVSIMGEIGDFSAFSKPKQLFAYFGLDPAVKQSGKFEGTKVQMSKRGSAIARRVIHTLTLQSISISRNGETKNPVLREYYLKKCDSKPKLVAMGAVSHKVCNMIFAILRDNKPFEIITPQEHIKQYNASKCDMAA

SEQ ID NO: 344966 - protein, 393 aa, unidentified
MKNVYASVRAVGMDVHSKFSTVTMRDDKGQVVRRERLDHRDRAKLRQVLSQWPKDAPMVMEASFGWGWLADLMKELELKPELSNCYKIEQMRKARGLAKTNKKDADLLSLLPYEQGGWWKVWMAPPEVRDRREWMRHRSSLVAVQTETKNRISALFHRHGIIHEFSDLFGVAGRKFQARLCREGRVGEVVLMPGAWAALKGLVELLDHVRSQLARIAHELRGQLDGSETARRLDGIPGVGLILAHTLMAEIGLIERFANHRALASYSLLAPIANDTGEEDGKKPLGRHLGHRGNRTLKWALLEAAHGAVKTGGKWRRIFDAATDGGGNNRNRGYVKVARELTKIVEVVMRKKVDYTDQPPRRPGSSPRKRMDAFLGNTRSGTGQPSRPMAAVH

SEQ ID NO: 344967 - protein, 395 aa, unidentified
MRHYVGFDVGKGAHWACVLDAEGEVILSREVRATEEALQAVCSEIAALDVSGERVVGIDLRGGPAALLEAVLLERGERVRYIPGTAVNKAREAYAGGEQKSDERDAFVIADQLRLRWRSLSEVRIREENIAELRALVAYRRDLVQEQTRRVTRLRELLIGVFPGLEAALDLTKKGPLLAVSLVARPAAARRLGEARLTRWLEAHGVYSARKLAGRIVAVAKAQHHELPAAETKAALVAEIATEVLRTKERIATLDERLAEMVEADPQGKVLMSLPGMGTIMSAEFLAEVDDLSRFGSPDRFAAAAGIAPVLRSSGSVSYRRRAKRGNRVLKRVFYQSAHCAVLCHEQSKTFYQRKRSEGKCHTQAVIALARRRVNVLWAMLRDGTFYEDRVPLAA

SEQ ID NO: 344968 - protein, 337 aa, unidentified
MKKLCVGVDVSEKELAVAYWGQDKPVSIGTYPNTDDGFQAIRKKIEELLNATQADFVHLVMEPTGGYEQPFAHFAFQQGWRVSLPNPLRPKQWAKATGKRAKTDPQDARNLAHYAFAQDPLPWKPLPAEVQQLEHLLNRQDDLLDMLQQEKNRAHSAFYMVNPHDAVSKDVAESISSLKQRIGVIQEAIKEHLKANPHLCEHKKLLLTVSGIGERNVLYILVALHRWGILTDGKGDAKGLVAYLGLDPAPYESGSSIHKKARISRQGNRPLRSRLYMGALGGVGGNNPLRAFYQRLVGRGKPKKLALVAAARKILVWAWAVFRSNTPFDATRFTHIH

SEQ ID NO: 344969 - protein, 457 aa, unidentified
MSQAKRSRGRQELSPVHPNAAAIDIGATMHVAAVGPDCDEQPVRTFQTFTADLHQLADWFAQCGVKTVVMESTGVYWIPIYEILEQRGFKVMLVNARDAKHVPGRKTDVSDAQWLQRLHEYGLLRPSFQPQAEIAGLRAYLRQRERLLDYAAAHIQHMQKALTQMNLQLHHVVSDITGVTGMRIIRAIVAGERDPAILASYRDVRCHASVETVRQALVGNDREEHIFALTQALELYDVYQAKVAACDGQIEAVLERLKQSAVPPTEKLPAARHKAHSSNAPAFEVRGALHAILGVDLTQIHGLGPYLALKLVGECGTSLSAWPTAKHFTSWLGLAPHNKISGGKVLSSKTRRTSNRAATLLRLAAITVGRTDTALGAFFRRLSGRVGKAKAVTATARKIAVLFYNTLRHGMTYTDPGASYYEDRYRQRVLNNLQRRAKSMGFVLQQAEPAGAQAGVS

SEQ ID NO: 344970 - protein, 391 aa, unidentified
MSMYFIGIDISKYKHDCCIISAADQKVVSKVTIKNNKAGFNELLTIIHSLANPADIRIGFESTAHYALNLELFLENSLLTFMEVNPVLISEYKKSKTLRRTKTDSVDCESIARWLMTVEYKPHSKGFYHAYSLKSLTRLRDKLIRQRSFYLVKITNVLDHTFPEFKPFFNERLSKTALYLLENYGSAEKMARMNSASYEKLRSLSRGKFSPQQFLRLKELAANTVGVNNSIFDVELNSLLSLYKSLVKEIDTIKKEINQLIEEVHPHYMSVPGIGPLSAAVIYSEYGDISNFTNPGQMLAFAGIEPGINESGTESHGGKMVKRGSSQLRYTLINCCLPLIRFDMTFATYYAKKRGEGKPHRVAITHVAKKLIRVIYALESQDIDFNAQELR

SEQ ID NO: 344971 - protein, 453 aa, unidentified
MSRKTKPASVEPLLVVNPNAAGLDVGSEEMWAAVPADRDPQPVRVFGTFTPDLYALADWLEACGIETVVMESTGVYWIPVYEILEARGFQVQVVNARHVKNVPGRKSDDKDCQWLQRLHTYGLLSGSFRPDDEMCALRGYLRHRASLLEHRAAHIQHMQKALLQMNVQLTQVLSDITGETGLAIIRKIVAGDRDPVQLAQMRNPRCQHSEEEIAKALTGNYRPEHVFALKQALALYNSYTEQVRECDRELEQRFSVMKPRHDQADLPPLDVSDKRDSHSKNAPAYDARTLLYRLVGVDLCAIPGMSESTVQQALTETGTDMSKWPTAKHFCSWLRIAPAHDISGGKVLRSRTLKTGNRATQAFRLAAQAASRSTHSAFGAYYRRMRARLGPEKAMTALAHKIARTYYHMLKHRVPFRDVGAEEYEKRVRERELAHLRKKAARLGMRLVDLSAS

SEQ ID NO: 344972 - protein, 411 aa, unidentified
MEVLHERCAGLDVHKEVIFICVLIGLGRRCEKVKKKFGTFPDDLVQLRQWVVELGVTHVLMESTGVYWMPIYDALEGAVEIVVGNAQHIMNVPGRKTDETDAEWLAKLLRFGLVNPSFVPAREFRELRQLTRYRRATVRTRASEQNRIEKHLQIAGIKLSSVASKVFTVSGADMMGQIAKGNTDPKQLANLARTHLRKKIPALEKAFPRAISLHTQQLLGVQLTQMTRLDCTIAETELRIEEKTKPYEKLIAQLDAVPGIDVVTATDLLAEIGTDMSAWETHRQIAAMAGVCPANYISAGKRLKNRSRQGNPYLKTVLVQAASSAINVQGSYYQAKYLRLKQRRGHKRAIVAIAHAILVTIYYMLKRGQAYRELGGHFVVQEEQGRKKISLIKQLENLGYAVTLAESQLTA

SEQ ID NO: 344973 - protein, 399 aa, unidentified
MLETIPLEVRVSVDIGCHQHRVAIGLSSGEVLEEFDIVHQAEGFDHFFARIATYEQQYACSVAVAMEGFNGWARPLDTMIRARDYRLDNINNLKLARFKEIFPGAAKTDALDARKGLELFQLRDHLPLAKDVLQEVAATPEENDILKRLTRRRRHLVREKGRVLNRLQSDLQAVCPGLLEITHDAGNLWFLRFLTSRPELTHLARLRRSSLLKIRGVGATYAGEIQAWQRQAVFSHEVGWVGEMIQADAARILELLDQIKALEAKIDAVAQESSVASILDSIPGFGRVCSAELAGEIGTIERYRSDASLGLYVGMSNLDNSSGKYQGSKAPKHVNTRAKAAMMIAVDRHRKAVPESQRYYEKKRAEGKGHNQAIRALGRHLCRVIYQLLKEERVYKIRD

SEQ ID NO: 344974 - protein, 398 aa, unidentified
MTESSDYESVQVFIGVDVGKDTHHAVAVNRSGNRLFDKALPNDENKLRSLISDLKQHGQILLVVDQPATIGALPVAVARSEGILVGYLPGLAMRRIADLHAGEAKTDARDAAIIAEAARTLPHALRTLKLVDEQIAELSMLCGFDDDLAAQTTQASNRIRGLLTQIHPALERVLGPRLDHPAVLDLLQQYPSPEKLASLGEKKLATQLCKLAPRLGKRLAADITQALTEQTVVVPGTNAAVVVLPRLALQLITLRKQRDEVALEVEQRVLAHPLYPVLTSMPGVGVRTAARLLTEVACRAFASAAHLAAYAGLAPVTRRSGSSIRGEHPSRRGNKTLKRALFLSAFAALRDPISRAYYTRKMSQGKRHNQALIALARRRCDVLFAMMRDGTFYTPTAS

SEQ ID NO: 344975 - protein, 397 aa, unidentified
MHTERFVGLDIHKRHVVVAAVDQQQTVLLSPKKISNQRFATWAQNHLKSSDQVALEATSNSWAFHDHLEPMVKGVFVANSYKLKLITASSAKTDKHDALVLAKLLAANLLPTVWVPPQHVRNLRNITQHRWQLIQERTAAKNRLHGILHQHNIQIPAGSPFLSSSEEWWQNLAISPVEQLQIKHYWLTIHHCNDLIQETEAAIAQLSVSDEWREEMTFLVQLPGIGLYTGMTILAAIGDIKRFPSPRKLSGYAGLGARVRATGNTVRTGKITKQGRKELRTALIASAWVAVRFSDYWRNRFQALAKSIGTNKAITAIARKLLVVIWHVLTKRQADRFADVQAVARSLMGWCSLHHLASSQGLRRIDFVQQRLCQLGLLHTVSSFRANGRTYNLPANP

SEQ ID NO: 344976 - protein, 337 aa, unidentified
MEVYAGLDLHSTNTYVAMIDRENKVLYKQRHRNDVPAILSALDPFKKDIQGVAVESTYNWYWLVDALMGAGYRVHLANVSAIKQYEGLKQVDDKRSSLWLANLLRLNILPTGYIYPKEERPTRDLLRKRLQLVRNRTSHVVSVKNILARNLGTRMKSNDIKKLKASEVKTLFPDREMRLAIMSSVGLIQHCEEEIDEIEKLIAKKVKVRKEFEKLLTVPGVGQILGLTIMLEVGHIERFPAVGDYSSYCRCIRSIRTSNGKVAGYGNSRNGNKYLAWAYLEAANFARRWHEAIRNYYEKKKSKTNKIVAIKTVSHKLARASYYVMRDAVDYDQARFA

SEQ ID NO: 344977 - protein, 349 aa, unidentified
MNTQRLSYIGQNVYVGVDVHKGTYTVTCVCNKQIVKTATVPADPAGLAASLPRWFQGATLSSVYEAGFSAFVLHRALTKAGLTNIVVNPASVAVAANDKVKPDRRDSKKLAMDLADGRLRGIYVPTEAEELARLLPRTRAQIVEHRATIARQIKAKLHQFGLIAPASRRLISNRYLREIEAWTLPPELRVSLTVLAEQWRFATRQLVAMRRLLREQAKAQEVIEKVYRSVPGIGEVVARTFATELGDMTRFANERALFSSTGLTPSEYSSGTSVRRGHISRQGSRRVRRLLVETAWRALSRDEVLQAMFDRIAATRGKKRAIVALARRLIGRIRACFRQGTTYAVGTYA

SEQ ID NO: 344978 - protein, 406 aa, unidentified
MNYLGIDVSKANSRYVFLDNDGEKLVKPFTLDNGHNDFNKLLDRLKELTLLPDNLLIGIEATGIWWENLYSLLTEHKFKVIVLNPHQTNKFREALRIKAKTDDIDAYVIAGLLRSQEYASSYIPEESIQCLREITKLRFQLVKDRQNYERQTNALLGLLFPELAQTAIKNPFAVSSMDILKAYPTAKHLAEAKPKNIEKIVRSIKGNNFNIQEIQSLIECAQKSIYSGRAKHDRGLNLIILLTQVESLQRAIAQLDERTNNILSPSDSNDANSFPGANLLTIPGVGPKTLAAILSAVGSDGQAFPDGKHLIGHIGFFPKIYESGETRHDNTMSNRGPKYLRAALYMSAVACLKHNPEFKALYDRKVSQGKTAKQSLVYVAKKLAHLCLSMLKSGEDYNPSRVFMPA

SEQ ID NO: 344979 - protein, 412 aa, unidentified
MEVLHPRCAGLDVHKETVVACVRIVSGGEVSRAVRTFETTTARLIELAEWLEASGCTQAAMEATGVYWKPVWQVLAGSGFELVLANASHVKNVPGRKTDVNDATWLAELLAHGLIRASFVPGPEIQELRGLLRTRKQLVREKASHVQRLQKTLEEANIKLESVLSDVMGRSGRAMIQALIAGETDPAKLAALAHPKVRAPQARLREALRGRIKRHHRFLLGLHLQQIEALDAGIAAIDREVDAGLASFRDAVKQLSTIPGVSELSAQVILSEIGTDMSRFATAAHLRSWAGLCPRNDESAGKRRSTRLRAGAPWLKAMLVQCAWAAARTKATYLNAQFVRLRTRRGPKKAVCAVAASILTAAYHMLKDGTFYQDLGATYFDRRRPEAQARRLVKRLADLGFSVQLKPVTADS

SEQ ID NO: 344980 - protein, 359 aa, unidentified
MSEITRALIARVGVDLAKNVIQVHAVDGAGRRVAVRAIKREQFLAWCAQLPAGCLVAMEACSGAHAWARRLRAQGLDARLIAANFVSPYRMEGKTGKNDMTDAAAVCEAASRPTMRFVSIKTAEQQGVMALHRVREGLKEERTACINRIRGVLSEFDLVFGKSPKVLRAALADVIEDASNELPGRARLVVQRAFEHWRELDEHMKWCDRQIGVHVRGSVEAQRAAQVTGIGEITASAMTAGVGDFKQFKGGHQLSAWMGLVPGQNSSGGKTVLGRITKRGDDYLRTLLIQGAKSAVMSAAKRDDPISIWLQQLVARVGWQKACVAMANKNARILWAVMTREQGFDARHVSVKPGMPCAA

SEQ ID NO: 344981 - protein, 339 aa, unidentified
MKYIPVGVDIAKHLIQVHFINEHTGEVVDKQLRSRDFLTFFSNRELCLIGMEACGGSQYWARELEKLGHKVRLMQGRFVKAFVMGNKNDVMDARAIWMAVQQPGKEIAVKTEEQQSVLVLHRSRRQLVKFRTAQINALHGTLLEFGETIHKGRAAMDRELPAALERMRVKLPPYLIALLEDQYNRLSELDSLIDGIEKQLISVAKQNETCKRLMEIPGVGPLIATAAVATMGEASAFKSGREFAAYVGLVPKQTGSGGKVRLLGISKRGDTYLRTLFIHGARAAALLTKEPGPWITELKKRRPTSVAIVAMANKLARTVWAIAAHDRKYDKNHVSIRPY

SEQ ID NO: 344982 - protein, 385 aa, unidentified
MSKLNLTDTPAAAEYATIYVAFELSKAKWKLGVMLPGSQRMSRFTIDGGDLTALSAWLAKWRARAEAIGKPVRIISCYEAGYDGHWLHRWLTSQGVINYVMDPASIQVNRRARRAKTDNIDLEQLMRTLLAYLRGEPGVCSMVRVPSPEDEDRRRASRERDRLLKERSSHSNRITGLLHAQGIRDAMPLKRGFLAGLDTVRTGDGRPLPPKLKAEIVREHERLCLVHKQIVELEAKSKAEVRAAARGSVEEKIRGLIDLKGLGVVSAQKLVHEVFYRSFDNRRQVGSYFGLTNCAYDSGDSHRDQGISKAGNRRGRTLAVELAWLWLRFQPGSELSRWFNERVGTMKGRIRRITIVALARKLMIALWRYVTTGVVPTGAVLRQSV

SEQ ID NO: 344983 - protein, 381 aa, unidentified
MKKDTRYVGLDVHAETIAVAVAETGGEVQSLGTIPNRPEPVRRLMKRLGPVQRLRVCYEAGPTGYVLYWQLTRLGVHCDVVAPSLVPVKAGDRVKTDRRDAEKLARSYRRGDLTPVWVPDAAHEALRDLLRAREAAKADQLRARHRLGKFLLRHGRRPAPGIRSWTCKHQEWIKREVHFEMAAQEATLLDYLTEVEHVGLRLERLERAIDEAVSKVPSKMRAVIDALQALRGVRQISAATIVAEVGELSRFPRPRQLMGYSGAVPREHSSGERTRRGGITKTGNAHLRRIVGEASWAYRHRPNLSRQLRQRQEGLREELKEIAWKAQHRLYQRFRKLTARGKTKQQVVTAVGRELLGFIWAIGVTVEQGFDEQAGRRRRVA

SEQ ID NO: 344984 - protein, 361 aa, unidentified
MNATTAAIDLAKNVFQVALADSNGRVVEQHRLSRAQFERFFDNRSVSRMIMEACGSAHHWARVFGARGIEVTLLPAMYVRAYVRRSKTDAADALALLEAARCADIVAVKVKSVEQQSLQALHRTRSLWMGTRTSRINALRGFCRELGLHVPVGARTGLEAIGRAVADEQSPITPLLRPIMLQLLDEIRLLETRVAQLERQLAQLARASHACKLLMSIPGIGLLTATAILAATAGSVAHFKSARHFASWFGLTPRENSSGTMRRLGRISKMGDRYLRMLLTHGARSVLRAAKVAQIKGIELIGLRHWALELQARSNHNKSACALANKMARICYAVLRDQTPFGQPAARLAKKMQRQSFELAY

SEQ ID NO: 344985 - protein, 356 aa, unidentified
MNSTKYIGMDVHKEATTIAVMNAAGKLVMESIVETKAATIVQFLEGLRGELYVTFEEGTWAAWLYDLLKPYVTKVVVCNPRKNALLKVGNKSDRIDARKLAELLRAGLLSAVYHGETGLRTLKELGRSYLAISKDLTRTMNRIKALYRSWSIPCGGISVYAPRHRAEWLSKITEPGVRRRAELFYQQLDGLQKLRQQARCDLLAESRKHGAAKLLERIPYIGPIRSALLIALLQTPHRFRTKRQLWAYSGLALETHSSGEYHYMQGQLQRSKRPIALRGLNQNHNHDLKSIFKGAATKAGSTKGPFHDFYTGLVAKGMKPTMARLTLARKIATITLLVWKKGVCFDAQQLKRQVSV

SEQ ID NO: 344986 - protein, 429 aa, unidentified
MSYRIAGIDVHKKMLAVVVSDVEIDSEYRFERRMFSSSPEQLRSLAAWLVVQEAEEVVMESTAQYWKPVWEALERYWKPAREKREGRRRRSGTLHLAQALSNRGRRGRKNDFRDAERLVKRLVAAELTLSFVPDAEQRLWRTVTRKKYQLRRERVRIHNHLESLLEEAHIKLSSLVSDLLGVSARRMLNALADGETNPAVLAALADQKLRATPEQLCDALGACTELKPVYRRLLRMTLQQLQLLEQQIGQLDQELATLLHPHQDPVQRLAEVPGFGVDSAQQIIAEVGPTAATFPSKKCLSSWVGACPGEEESAGVNYSHRSPKGNRHMRRLLNQAANAAVKVKGSIFEIIYRRCVPRLGHNQAIGVIAHRQCRLIWLILHQGARYEERGPAVNERSRYQRTWRMIRQLRSLGYRIESPNTQPSQAPAQ

SEQ ID NO: 344987 - protein, 318 aa, unidentified
MSKVFVGVDVSKDTLDISFSFDGSKYDSMTIFNNESSVLGFFDYLKNTYKKSSFFFGYEATSNYMHVLQKLLHEHHFSQIMINPYTMHHYLKHLNSRKKNDVIDSLGITKYIQTLNEDDFKTTFNQSQKTLKKYNSSIELIRKLDTQLKNFTHSQKDNNIPYLDNALLSLLSMFKDLKKQLEKEAQKVLIELYPHVETIKNDMKGVGYALLLELIPVFLNSKGYTLKQLQSFVGLSPRIFESGSSVYKKERISKRGSSLVRKLLYMSAMVSLRFNPIIKEKYDRMVLNGKEKMVALVACMAHIFRAVYIKFNKGFVNV

SEQ ID NO: 344988 - protein, 398 aa, unidentified
MTESSDYESVQVFIGVDVGKDTHHAVAINRSGKRLFDKALPNDENKLRSLISDLKQHGQILLVVDQPATIGALPVAVARSEGVLVGYLPGLAMRRIADLHAGEAKTDARDAAIIAEAARTLPHALRTLKLADEQIAELSMLCGFDDDLAAQTTQASNRIRGLLTQIHQALERVLGPRLDHPAVLDLLQRYPSPEKLASLGEKKLAAQLCKLAPRLGKRLAADIAQALAEQTVVVPGTNAAAVVLPRLALQLITLRKQRDEVALEVEQRVLAHPLYPVLTSMPGVGVRTAARLLTEVACRAFASAAHLAAYAGLAPVTRRSGSSIRGEHPSRRGNKALKRALFLSAFAALRDPLSRAYYTRKMSQGKRHNQALIALARRRCDVLFAMMRDGTFYTPQAS

SEQ ID NO: 344989 - protein, 316 aa, unidentified
MTQVYCGVDVSGAALDARIGPSGPELRVARTPEGVAELAAFCRAHGATLVVMEATGGYERAPYVQLWAHGVACALANANAVRQFARAMGFLEKTDRIDAGVIAGFAAARAIGPGPAPDEDQSRLRALVTRLRQLVELKVDQANQRRLVDQPAVLDGIDELTALVRRQIRALEADIAAALDADPLWRRLDHAFRSIKGVAGRTVARPLAELPEIGALGGKAVAKLAGLAPLADDSGRRGGRRHIRGGRGHVRSILFVVAEIVRRHDPDFAAFHRKLKDAGKRPKVVRVALARKLLVRLNAKARDVRAEFAAHTLLAA

SEQ ID NO: 344990 - protein, 379 aa, unidentified
MPTLLKHSVGIDVSKKDLDACFSTINNDLEVKIKSTKKLKNTTSGHKELIAWVEKHRKEKVHVVFILEATGIYYERLAISLYNEGYEVAVTLPSKSKKYMQSLGLKSKNDKIDAKGLSRMGAEQKLDAWIPFSKNIYELRSLTRQNEDLQKQKTAAINRLESQNQGHRPDKFVCRQLNCLIKLIDKQIDQVKEQISKCIDKDPLLKEKVENVMTIKGLGIITVATVVAETNGFLLFKNQKQLVSFSGYDIIENQSGKRVGKTRISKQGNSHIRRAMHMPAFNMVRYKQGNMPHHYERVFERSGMKMKGYVALQRKLLVLIYTLWKKNEPFDPQYHTSSNEEQKLLFSHCSEGIKKVPEQAGTLDGHPCNESQEVLFSQS

SEQ ID NO: 344991 - protein, 374 aa, unidentified
MLSARPAGMSHPPLSGRETAITTIAHAEPIRVTVGVDTHGDVHVACAKDQLGRNLAATRVATTPAGYQGLLDWARGLGEVEAFGVEGTGCYGAGLARFLDSHGQTVLEVNRPDRSARRRRGKSDPVDAEAAARAVQAGEASAVPKAGDGAVEMIRALRVARASAVKARSQAANALRALLVTAPAELREQLRGLPADRLAQAAARLRPGPIVTTTAATKLALRLLGERYRALGAELVAVDADLDRLTAQAAPALRQLYGVGAEIAGALLVAAGDNPGRLRSEAAFSMLCGASPIQASSGKTVRHRLNRGGNRQANTALYRIVVVRLRWHQPTRDYLARRTTQGLSKKEIIRCLKRYVVREVFAALQLGTAQTQAP

SEQ ID NO: 344992 - protein, 350 aa, unidentified
MKRPKDKVIAGLDLHSNNIVIGIINQDGKRIAHRKVDCDLKQVMEFLKPFKAQLQSLAVESTFNWYWLVDGLRAEGYPIDLANPAKIQQYSGLKHGDDQGDAFHLAELQRLHILPKAHVYDPQLRPVRDLLRRRTLLVHQRTALLLSFKSLHARTTGQALTLNETKQLGPKEASKLYAHPANQLVAEVEAEHIQALGKSVQRIEQVVQACAREIPLYEKLLTIPGIGRILAMTITLEVGDIGRFKTDGEFASYCRLVDARRLSNGKCKGDHNQKCGNKYLSWAFVEAANFSRRYDEQCRRWYDRKAAKTLKVVATKALACKLAKAAWHVMAQQCSYEAKHMFPEQAMKTE

SEQ ID NO: 344993 - protein, 357 aa, unidentified
MQTNRQSFLDFTGQTIFIGIDAHYKSWAVTLQSEEFELKTYSQPAITDILFNYLQTNYPGAKYKAVYEAGFCGFTIQRALTLKGIECDVIHPADVPTSDKEKRQKTDKIDSRKLARMCKNNDMKGIYIPSIEQQEERNLLRARQKIVRDQTRVKNRIKSYLRFQGVELEGFEGRHWTKKYLELLRKTSFSTTAGTFAFKAYLDELDYLQQQASKLDEQIKLLSQSDRYKVNFSLLTSVPSLGLISAMTFLTEIGDINRFRRFDDLCSFIGLIPNCYSSGDVEKVGHITRRGNQHLKMILIECAWVAIRKDPALLQCYKELLPRMNGNKAIIRVARRLLRRIQHVLINKELYQKGYKE

SEQ ID NO: 344994 - protein, 360 aa, unidentified
MNNHKYVGLDTDQATIIARVEDAKGNFIMEAAIETSASSIRQFFKGLDGTIHVAFEEGTQAAWFYDVIRPLVADVTVCDGRRNKLIQSGNKGDRIDAAKLTRLLRLGELHAVYHGERSTRGLKELVHGYESLVTDTTRAKNRLKAVFRSQAIRCRGDLVYSHQERKQWLGKLEASALNARASLLYEQYDCLTKLRDKAHKAMTTEARTHPAYKRIKKVSGLGEVRTAQLIAVVGSPHRFRTKRQFWPYCGLAVVTRTSSEYEIVDGQRRRKRNKQAQTRGLNQNYNRTLKAVFKGAAATAIERPPFKQYRQRLIDKGIRPELALLTVARKIAAITLTIWKKGEEFDPERVNQAVPGTGNK

SEQ ID NO: 344995 - protein, 466 aa, unidentified
MGNCAGVDWASEKHDVRVCNAAGDQLLATTFAHNEAGLRSLCGVLVQMKVELVAVERPEGVLVDRLLDAGLRVLALHPNQVAAARARFRASGGKSDHFDAFVICELARTDSHRFRVLEPDSDQTKALKALTRAREDLVAARVALVNQLRAELERFWPGPAGLFSSLDCLISLAFLRRYPSPFDAQKLTAARLLAFLRSQHYSGGKTAAELLEKLRAAAAGCAGEIEARAGREIVLALVATLETLGKQEKQLDRQIASAIRAHPDGAIFLSLFKGADTVLTASVLLAEIGDCRARYPTHESLSGDGGQSPVAVESGKHKVARFRWACNKRLRAAFCTLADSTRQWHPWAQAVYARAIAKGHDHQRAIRTLGRAWSRVVWRCWQDGVPYELARHRAAQQYITVIVPSPDGDSIDVPATRRMAGDALDPSLDVGSGQGSLRAAQPSPQKERSGSGQSRAARQGRAQRAA

SEQ ID NO: 344996 - protein, 346 aa, unidentified
MKKRIEGVSVYGIDIGKNSFHVVGLDESGKPILHSKFRRDRLLVHFANTPTALIGMESCPGSQWLARKLQASGHTVKIIPAQFVKPYVKSNKNDMVDAAAIVEAVTRPTMRFVQVRQPEQSARQALHRVRDRYMSQRTGLINQIRGFLLEFGIPVRQGAGVFRMDVPRVLGDDTNELPPSMRTLIADLWNDFKLLEARIEDLSKQIQRSVQYSDTARRLMTVPGIGPLAASALEASAGNGHQFVNGRFFAAWLGLVPREYSTGGKTTLLGISKRGNAYLRRLLIHGARSCVQTCDRQRHPLGAWITKLEQRMHRNKVIVALANKIARVAWKILIKPEEIYRWAEVL

SEQ ID NO: 344997 - protein, 357 aa, unidentified
MGKFIKNLSSVTSVGLDLAKNVFQVHAVDAHGAVIVAKPVRRGQLLKFFASLPACLVGLEACSSAHHWARALIGLGFSVKLIPPAYVKPFVRRNKNDATDAAAICEALGRPNMRFVAVRSVDNQAQLMRHRARELLVGQRTQALNALRGHLAEIGVVAAQGAQNAYVLKRLAADGCDENGEIVVPDCVRTALAPLIRQIDALDEEIDMIDAEIETLVQADEKARRLMTIPGVGPVTASAVVATVQDVSAFASGREFAAYLGLTPRQHSSGGKEKLGRISKMGDRYLRKLLVVGACAVLCHRKGHHDALRVWADRLLERKDVKYKFKLTAVALANKLARIVFALLTRGGVYAGQPVGA

SEQ ID NO: 344998 - protein, 324 aa, unidentified
MIALGIDVGKADFHCALVDESGKPRFNSFPNSRTGFERLTKWLQNRSIDRVHACMESTGGWSEELGAYLHDLGHLVSIVNPLAIRAFGQSELSRTKTDKADAALIGRYCLAMRPAQWEPPSPAQRRLQRLVRRRSALVEMRVQEDNRLQAPGSDDVRSSIEGTIAFLEAQIVAIDEEIRSLIDGDPTLRGKRELLQSIPGIGERVSTGLLGEIPKLEEFRSGKALAAFVGLCPREYRSGSSVSASWLSKVGNSHVRKLLFLPAITACRFNPVLMIFARRLRERGKRPKQIIAAVMRRLLVIAYGVLKSGRPFDPTLALDGQHGI

SEQ ID NO: 344999 - protein, 363 aa, unidentified
MNGGEQRMAVYVGIDVHKKYCQAAVIINNGNVVRELRFDNTSEGATSLVNLARSVDPHVKAVVEPSANFWIRIYDRLEDEGVEVKLSNPLRTKAIAEARIKTDRIDAKTLATLLRGDLVAESYVPTRKNRERRALIRHRASLIQMRVDIKNRIHALLDKHEHTNNYSDLFGKQALEWLRNLQLPTPDHEILQSNLQIIETLNQQIRIMDIQIAKDAVTEDQAKLLMTMPGVDYYAAMVLLSEIGDVKRFSSDEKLVSWIGLAPQVHQSGETSWTGHITRKGSKRARWILGQCAQSARQHDPRMREFYERIEHKHGPSKAIVAVARKMLAIMYVMLIRNEPYHGENRKLTEQKHKRLNNIANTA

SEQ ID NO: 345000 - protein, 376 aa, unidentified
MCSLRAYDAWVWYVGLDVHLDTTAVSIRNHRGAVTKRVVVPTNRVALRAALRNARGRTRVVCESGPLATWIRDCFETRFREVVVCDRRRTRLTSGAKTDRIDADKLSELSRRGEIHVVHVPRGEAALLRRYALHYARMRRERSRIIQRLRSLFFECAVRVESPRSKPQRVPLIRLAAGARYVARAYIQQLETATKLVSEARATLLALAARAPGFDVLQTVPYIGEVRAAQIIAIAGEPSRFRSLRAFWAYGGLGVVQRVSSEHRVENGRAVRDARTRGLRLRVGQPLLKQVLRDIALHASIGRGSFHDVFERHVTRGKTAAVARVALARKIAAVILAVWRSGEAYMEPSAAKSEFGASIDAESSVSGVRAPRRSKN

SEQ ID NO: 345001 - protein, 414 aa, unidentified
MEVKYERCCGIDVHKKTVVACVIVPGAKRGEVEKETQTYVTMADDLGALGRWLQSKGVTHIAMESTGVYWKPVFNLLEGQFAIVVVNAERIKALRGRKTDVADAEWIADLLRHGLLPGSFIPSAQQRALRDVTRFRTSVVNDRVRAVNRLQKTLEDANLKLASVVADVTGVSARAILDALLAGQTDPQALAALARGKLRKKTEELQKALVGTLRSHHRILVVELLCQIDYLDEAIARLDSEIATMVQPFQVELAQLDSIPGVSQRVAEVLIAEIGVDMAPFASAQRLASWAGMCPGNHESAGKRKSGKTRQGSPWLRRALTEAAHGAARTKKTYLSAHYRRLAARRGNKRAIVAVGHTILTMSYYLLTRHTTYQDLGPNYFDERDREGVKRRAVRRLEQLGYQVALSPSVSTPI

SEQ ID NO: 345002 - protein, 342 aa, unidentified
MKDAVIGVDLAKRVFQLHGASTDGQVIFRKKLSREQFRAFMAQHPACLVVLEACGSASYWAREMQTLGHEVKLIAPQYVRPFVKRQKNDAADAEAIVIAARQPEMRFVAPKTIEQQAKAVLFRSRERLVHQRTELVNVLRAMLYECGHVYPVGITHLKRMEALVEDSDCDLPTLILAECQDLLAQIAEKSARIDAKSKKMKALATETDTARCLQTMPGVGPLTALAVEAFAPDMAQFKCGRDFAAWLGLVPRQYSSGGKERLGRVSKAGQRDIRRLLIVGAMSRLNWLGRRTISKGSWLAKMLARKPRMLVAIALANKMARQLWAMLTKNEDYRDPALAAAA

SEQ ID NO: 345003 - protein, 288 aa, unidentified
MNQTQNTRGYKRYLAFDIHREYLLVGGQDENQEWVLRPRRVSVEHFQAWAEKNLQKGDIVVLETTTNIWETYDVVAPLVSRVLVANAAAVGEIVGARVKTDKEDIKRLLRLLFGGIVPEVWVPPAHVRELRSFISYRNRLVKMSTMIRNRLNSLLHKHNLIVPKGGLLDQAWWDEQSSISSLEKLQVRQELSLLAEITEQKAAVDEELGRQSTGPVWRKQAILLLQLPGVGVIVAMTVLSAIGDVSRFEHAKKLVGYAGLGAGVHASGKTYKKTDHKKGAQGVTLGDG

SEQ ID NO: 345004 - protein, 343 aa, unidentified
MTLIGCDLHARMQQVAVLDTGTGEIQEHQFPHHGDAVERFYAALPRPVTVAVESTGYSLWFHTLIRQLGHTLIVGDAAKIRAMVVRKTKTDRRDALHLLELLRHDRLPTIWVPDPATRDRRALLAHRMRLVRIRTTVKNGLHAIALSHRLVEGSKRLTKPRLAVLQGLPLAPYTARRRDESLELLHWLDEHIRQLDDEVAEAAAGDLAARRLLTHPGVGPVTALATVVVLGPVGRFPGSKEVASYVGLAPALHASADTHHLGQITKQGNPFLRLVLVQAASIAIRYDEDLHRLYTTLHRRRGHAKAKVAVARKLLIRLFIMLRDGIDYDEFRRRGRATQPMPT

SEQ ID NO: 345005 - protein, 364 aa, unidentified
MEGKMGKTETRFVGIDLGKRTCEIAIVSRGGKVTMGNGSTTAAGRQKLYQKLRLGDKVALEAGNMAFIMAKEIKATIGCLVYVLNPSRLALIYGSMKKTDKEDALKLAHILEDCKEERLPLVPMPSEQEMKRRKILAGYRRAHQSRNREINRLHAFFVAQGITNKVKKELAEHNLRKEAIMELSDIERKEAEYLVNSLEETDRWIEELEKQMTEESAGDELIERLQTVPGVGPKTSFAFVAHIAADRFANASQVSNYLGFVPRVYMSGDTVRYGGITKRGNGYLRALLVQASWGLIRAKEGGKLKERYEYMTKEKSIGKKQAIVAIARRLSELLYVLMRDGTNYESKAFMGCNTGELAQLALSA

SEQ ID NO: 345006 - protein, 348 aa, unidentified
MKIVGCDLHARQQSIAMLDTETGELTEKVIRHEGNAVREFYAALGNSVVVGIEATGSMQWFLELLEELGIESRVGDPAKIRAAETRKQKHDRRDARLILDLLERDRFPAIWMPTSGQRDLRSFLRDRHQWVQMRARLQHTLQAMALNHALRKGPALWSGRGQEALRKLPLPPYASQRRNELMSLYAQLQRRIQELDKQVEEQAQQRPQARRLLTHPGVGPVTALATDVFLGDPSRFTTANQVASYIGMIPSEHSSGKRQRLGKMSKQGNSLLRYLWTEAGMHATGKDPELKRFYRRKLIQKGMGKARVAAARKLGIRLWIMMRDEIDYEEFCRRGKLRQIGESPCGNA

SEQ ID NO: 345007 - protein, 390 aa, unidentified
MAKKRISDDSAGFTVLTEMLAAAGDSFDDAIPIAIETPRGLLVAALRAAGRPVFAINPLAVARYRERHSVAGAKSDHADAMTLANILRVDSHLHRRMPADSELVQAIAVLARAQQDAVWRRSKASNELRSMLREYYPAFLDTFAGKSATNLAKPEARAVLAIAPTPAHAAKLIKTRVAAALRRAGRKRGIDGLAVNILEHLQAPQLRQPELVEKAMGRQALALLAMLDAACTGADELAQTAAEEFRKHPDYAVITSFPGLADLTGARVLAEIGDDRDRFADDRALKAYAGSAPITRASGKVTSITHRRIKNDRLAAVGWVWATYAYINPGPAQDHYRRRRDHGDRHAAALRHLFNKMLGQLHHCLQTRQTFDPIKAFGQPRTAPREPAAA

SEQ ID NO: 345008 - protein, 345 aa, unidentified
MADQSCFAALDVSLEKTTICVMSLDGSILREAVVTTEPDAIATWLAAESERLERIGLEAGPLSEWLVRGLADHGITAVLMETRQVRAALSAMIVKTDRKDARGMAHLLRMGWFRPVHVKTIDAREQRTMLSARTTLMARLKDIENSVRGLLRGFGLRLPLLLRGRWDAGVREAVAGHPSLLQILDPLLTARRVLREQLILLDKRVRDAARVDSVCRRLMTTPGVGAIVAMTFRAAVDQPDRFRSSKKVGACFGLTPRKYQSGETDRDGAISRAGDASVRVALFEAAHVIMTRVASWSTLKAWAMNVARRRGSKRAKVALARKLGVVLHAMWVKQTDFRFTRSVSI

SEQ ID NO: 345009 - protein, 344 aa, unidentified
MSGVIIIGLDIAKHVFHAHGADERGRAVFRKRISRGKLLDFFAAQPSCTVALEACGGAHHWARQLTQLGHEVRLIPPAYVRPFVKRQKNDANDAEAICEAAQRPSMRFVAVKSEQQQAAGLVFRTRDLLVRQRTQLINAIRGHLTEYGWVAPKGPSHVAMLADLLEEEKMASSLPEAARAMFRLMLDLLAGLDGKIAGLDKEIARRAREDEISRRLMTVPGIGPISATAIAALAPPAETFAKGRDFAAWLGLTPLQRSTGGKQKLGATSKMGERTLRRLLIIGSSAVVLQASKRGAPKGSWLEQMLARKPRMLVTVALANKTARIIWALLVKKENYRAPVAAKA

SEQ ID NO: 345010 - protein, 391 aa, unidentified
MIYVGIDVAKDKHDCFITNSNGEVLFKSFTISNNQDGFNVLYQRIESVMEDVTKVKVGLEATGHYNYNLLGYLIDKGLTTYVINPLHTNLYRKSLSLRLTKTDKVDARTIAYMLMSDVNLKSYSNTSYHNEELKSLTRYRFDKVKERAKLKTSVSRLVCILFPELEKLVPTLHMTSVYALLSEFPGAKYVAGAHLTRLTNLLSDASKGRYGKDTAITFREAARASIGSNMPAKSLELKHTIKLILELGSEIDEIENEIKFIMDEINSPILSIPGINYRMGAMIIAEIGDFSRFDSPDKILAYSGFSPSTYQSGQLDSAYSHMEKRGSKYLRYALYNAAKYVCHWDATFAEYLAKKRAEGKHYNVAISHAVKKLVRVIYHLVKSNQQYMKVA

SEQ ID NO: 345011 - protein, 439 aa, unidentified
MQVELPQYVRLIPQEMESAMRKTGIHANSLLEVHRMYNAVGIDVSKAKSTVAILQPGGTVLRKPFDVSHTSQSLHELSDYLGSLDGNTKIVMECTGRYHEPVVKALSEAGLFVSVVNPHLIKNFGNNSLRKVKSDPADAKKIARYTLDNWAELRQYSGMDNIRTQLKTLNSQFSFFMKQKVAAKANLIALLDNTYPSVNKLFDSPVREDGSEKWVDYAYSFWHVDCVRRIGLKTFTERYRAFCKKHHYIFQPDKPEKLFSASKELVAVFPKEKTYKLLIQQSIQQLNLASEHVERLRKEMDELASTLPEYSTVMGIYGVGKTYGPQLIAEIGDVSRFTHREALTAFAGVDPGVDESGQHKSKSNRASKVGSARLRKTLFQIMTTLLQNAPQDDPVYRFLDKKRSQGKPYYVYMTAGANKFLRIYYGKVKECLRNLEQAE

SEQ ID NO: 345012 - protein, 453 aa, unidentified
MMKTDTGNKPDLKMVNPGAAAVDIGSTMHMAAVNPDSDDMPVRAFGTFTQDLHDLAEWFQSCGVTSVAMESTGVYWIPAFEILEQHGFDVILVNARYAKNVPGRKTDVSDAGWLRQLHSYGLLRGSFRPAAEIATLRAYLRQRERLVEYAAAHIQHMQKALMEMNLQLHHVVSDITGATGMRIIRAIVEGERDPDVLASLRDVRCHSSIETIRASLVGNDRDEHVFALTQSLELYDFYQEKMLECDRKLEAVISDLTTRAEQQLPPLPKARTKTKQVNAPSFDVRAALYGVLGIDLTQIHGLGPSLALKLIGECGADLRAWPSAKHFTSWLCLAPGNKISGGKLLSSRTRRSSSRAAALLRLAAVTIGRSDTALGAFYRRLAGRIGKQKAVTATARKIAVLFYNSLRFGMTYRDPGATSYDERHRGRVIANLQRRARALGYSLAPACDAECVS

SEQ ID NO: 345013 - protein, 343 aa, unidentified
MSEISTIGLDLAKNVFQVHGIDASGGVVLRRQLRRGAVEKFFAQLPPCTVGMEACGSAHHWARVIGGYGHRVRLMPPAYVKPYVKRNKNDGRDAEAICEAVSRPTMRFVPVKSVEQQANLAVHGTRALLVRQRTMAANALRAALSELGIVAAQGLDGLRELMARLEAPGVEIPEMMRGALLVLAKHWQALDADERALERQIAKAARCDRDARRLMEVPGVGPIIASTVLAKVPDAKVFRSGRDFAAWIGLTGRDHGTGGKHRPGRISKQGDRMLRALFISGASAHLRQQKARGVSDPWLRELLARRPYKVAMVAFAAKTARIIWAMLVKGEQYRVRASASAAA

SEQ ID NO: 345014 - protein, 313 aa, unidentified
MHMLAIDLGKQSFHIYGLTDDGEVVSRKVGRAKLVDAVTRLRPQLVAMEACASSHHWGRTFESLGHGVRLIHPRFAKPFVKGSKNDAVDAEAIFEAAARPTMRFVPLKSVEQQDLQSLHRTRDRLVVQRTALINHTRGLLAEYGIVMPAGASRFRLQIERIIETAELSDLAEPLFRQLVEEYRDLDARVSALDDMLVKICRTDERCKRLTTLPGVGPIVATSLVAAIDDGRHFKSSRSPLCLDRSGTATLHDRRQTKAGRHRKQGQPLSQTATYSRGSISIAKDQQARRPAIKMGAGPANPSWAQQDARRHGE

SEQ ID NO: 345015 - protein, 343 aa, unidentified
MQDVATVGLDIAKQIFQAHGADASGETLFNTKIKRENVLEFFSKLKPCLIGMESCATSYYWARQLLEFGHDVRLIHTSYVKPFVKRGKTDANDAEAINVALTQKTMRFVPVKTLNQQAAITIFRTRSLFVSQRTQLVNALRGHLAEAGLIAAKGIQNYSKLVNLMETAADTVLPTVMKQALTDICDQIHRLNDLVTKLDKEIERRVRHDENACRLLTIPGVGPKTAMCVIATIPDIHRFPSGRHFSSWLGLTPRTHSSGGRSVLRRITKMGNSELRTMLYLGGTVVMMRDSKTPIGRWAARLRARRPYKVAVIAVANRIARIIWALLTNGGVYDPTYGREASA

SEQ ID NO: 345016 - protein, 413 aa, unidentified
MSIDPSAAAPRVTAGVDWAKDDHAVCVAGDQGEALERFTVRHDAAGLRQLAARLLRAGVSQAGIERGDGPVVETLLEAGLTVFVIPPAQVKNLRSRYGSAGNKDDRFDACALADVVRTDARRLRPTERDSEQTTALRSTVRARRDLVGHRVAAASQLRAHLQTVFPAAAALFAGIDSEITLAFPSRFTTQEQAGWLSPLRLAAWLKSAAYSGRADPAALHARLLAAPRGKAGPHAAAHAAATLALVAVLRVLNAQIKALAVSIAAQLAARPDAAIFQSLPRSGTVRAARLLAEIGDARGRFPTRDSLTCLAGVAPSTRQSGKVKAVTFRWGADKQLRDALCDFAGDSRRASPWAADLYDKAIARGCDHPHPVRILARAWAHVIWRCWQDHAPYDPAAHNSLQTILKQRQPIAT

SEQ ID NO: 345017 - protein, 369 aa, unidentified
MPHVTSIGLDVHARSVAAAAFNPFTGEVVHRDFGTDAAEIAEWALGFEDPRACYESGPTGFHMARELRALGLDCAVAAVSRMQRPAADARRKNDRRDAEFIARMLATHNIVEVPLPDAAVEAARDLDRALEDAAADYLRARQRLNMFLIRLGYVWDERNADGTRKGSWTRAHWRWISEIRLEGPQRDVLEHYVTAARCAESDRRQLEKKVLALARTDRWRPAVEALSCIKGIDALTAFRLAAEAGSFTRFRTAPAFASWCGLIPSGRSSGETERRGGITKAGNRLARTALIESAWHYSRCTPRPKAPPPGADVPAAIRARAGDCTARLCRRREALAAAGKSACKANAAVARELACWVWEIGRRAEGTLG

SEQ ID NO: 345018 - protein, 361 aa, unidentified
MQSTTLIAFDQHAATTVAAVLGPGQRTPALQSLPSDTGTIVRFVERLRRQGAVRCCYEAGPCGFELQRALTAHEVPCDVIAPALIPRRAGDRVKTDRRDAAQLAILYRAGALTPIHIPTDQEEAARDLLRCREDIRADLLRARHRLSKFLLRHGRRFTGTKKAWSKRHDAWLRAQTWPLPALEQTYTAYQRTVDEAVARLRTVEDDLRGLLTLAPLQPRVERLRCFRGIDDLTALTIAAELGDPRRFASAPRAMAFVGLVPSEHSSGTKQARGAITKTGNAHLRRVLVEAAWHYRHRPFVGAALRRRQREAPAAIIAQAWTAQQRLHRRYHRLAGRGKVPQQVNTAIARELTGFVWAALIQ

SEQ ID NO: 345019 - protein, 388 aa, unidentified
MFETAYEYYLGIDVGKMSHRACAIDGGGNVLFNIEVKNTDAELHAALKRISKDSLVVVDQKRNIATLPIRCARKEGLEVAYLSGNAMKKASDLFPGMAKTDKREAEVIAQAARAIPSLLLPLAKEDSQSEMLRRLAAQNASLVAERTRLINRLHAVLLESNAAFEALADLNSGWTLKLLACLGGPWNIFQGGRRRFKAWMEKTPYADNETCEKLWGSLKAASPVTEGQIKAEAHTVRSIARRIMDINEETTCLTKIIDSEMCKSVAYQALLTIPGIGVKTASELVLAIDISNFKDHHALASYAGLAPRNRQSGTSLNSVRSTKMGNKRLKNLLIFSCSCLIGSDTYYGHYYGELRKRGKRHTTALKAVARKRLKAIYVIMRDGTTYVE

SEQ ID NO: 345020 - protein, 370 aa, unidentified
MSVRRILAKTIDTDLEYEAIGIDLAKNCVSAALLTTDGEVVCIDRLDYSELEKSAQALSPTTFAMEPCTEMNYLVQKLEAWGHRCLVIGGKNVQNYVENHYSGQKTDLNDAQALAFLAQDKQLRTIKAKDIEQQKYASLTTLREQYIKQYRQTIVSLKGICQAWGLNISKGISGKAQLKDLIENHAAFPEELRESLVDMVTHAQTTQKVLNKITKTLEELAKNDKLCQLIQTIPGLGPICSCRLRATIGDIKRFKNPKDFPAYYGLVPRSIATGHNEKKGKITHRGDRTMRSLMVQGAGCVIRLATCGKLKSKQLTKWILKKQKEKMPWGKLVCAVAAKLLRIVRAILISSKPYNPKIAGVAKCSLSKGS

SEQ ID NO: 345021 - protein, 461 aa, unidentified
MIRRLVGVDLGIASAHTVRVLAEDGREVCRRRCEPTVDSLARVEAAALAGTPAGTVLEVVMEPTGPAWLPVAVFFTARGHLVFRVSSAKAADLRRFLSRHAKSNGIDADTLARLPLVDPAGLHPLELPGAEAAALDRRVRVTDRLTVLAARHKTRIKDLTRQLLPCSPLTGELGVADLAVLERWADPRALLAAGPARLTALIVKASHGKLGAERAQQWRAAAAAAVELYADLPAIAFTDLAAEVGTEVRLLRATQAELAGHAQERETAYRYTDLGGLARSLPGVAEVGGPVLVAGMGRPGRFGSGAAFKSYTGLAPRASETGNTDRKGQPMSKAGSSLLRTTLIRAADNARRQDPQLARIYYTQMVERGAEHLKAVCVVAGALAERAWAVMNRQMPYVICDIDGTPVTPEQAKRIIARDFTVPDEVRRRRRSSKTPGRKPAQQPTTSSKGGRPLSKPHTAA

SEQ ID NO: 345022 - protein, 452 aa, unidentified
MNLLYRCCAGLDVHRDSVSVCVRRRAHEATEVAVEEAVFGTFTQDLERLREWLKEREVRQVVMESTGVYWIPVWNVLEDEGDFTLALVNPATVRALQGRKTDRMDARRLAEYLQYGLLRESFIPAKAIRQLRDLTRLRVHVQQDRNRAINRIAGLLETVNIKLASVASNIVGKSGMAMLRLIASGVTDPEELAEQARRKLRAKIPELILALDGRPNAHFRWMLEALLRKLDWLDEELARVEAQISERALPYADLLHRLSAIPGVDQTTAVALIAEFGVDMSQFPTPGRLASWAGLCPGNAESAGKRLSGRTRKGDRYVRRLLIQSAWAAARTEGCFLAALFFRIAQRRGLKKAAVAVAHRIALIAWHIIAEGAEYHEHGGDYFDRHHPERTARKLTRRLRNIGYEVTLVRHKQPVGLKPTVDPSECRKCARWGLPRCIHLLKHKGRSPAMET

SEQ ID NO: 345023 - protein, 458 aa, unidentified
MGHARARKVPARLVEDEEYQLRHERVAGIDIAKAKADVCTRLPPARDGGRRASRVEEVPALAGAILGLAGRLLADGVELVVMESTSDYWRPWYYLLESAGLQVRLVNSRHARQLAGRPKTDRLDAQWIARLAEMGLLRPSFVPPPEIRALRDLTRTRSQLVRDRSREWQRLEKLLEGALVKLSSVLHSLARTKTARDILDAIAGGQDDPWALAALAAPNAGGGPAAIVQSLQGMQVRGHHRRLIRVHLDHVTFLDRAISAIEDEARAALDAIPAAWGTDASGETGPAAGREQDAAVLPAADRLAQVPGISKELAIAIIAETGLDMSVFPTPAHLASWAGLAPVAASSGTRTAARKGHGNATLKGHCTQAAMGASRTQTFLGERYRRLARRAGGNRACCAVARSILVIIWHLLATPEARYTDLGPDWHQRKNDRDRQITAHIRKLQALGLSVHITEATP

SEQ ID NO: 345024 - protein, 430 aa, unidentified
MKSNTQNAKIEAITEKTLVLGIDVGSETHYARAFDYRGIEYSKKPFKFSNTEAGFVTFKEWILDLKDRHKKDKVVPGMEPTGHYWFNLGKFLQDNEMKPVLVNPHHVKKSKELDDNNPTKNDRKDPKVIAGLVREGRYMIPYLPDGVYADLRTASNIRFQLQAELTRIQNRISRWFNIYFPEYKTVYGKPDAKSGMLILKAAPLPEDILMLGIDGVNQIWRDAKLRAVGKARAKTLIEAAEHSVGSKEGAVSARMEIRMLLEDYESRNTRLQEVMVLIEELVKGIPMAEKLLEIKGVGIRTVSGFLAEVGDISRFNNPKELQKLAGLALVENSSGKHKGETTISRRGRKRLRYLLFEAAMSLVAKNPEFRELHNYYTTRRLNPLKKMQSLMVIAAKLIRVFYAMLTKGADYDPKKMVSDIKRPAVYLQAV

SEQ ID NO: 345025 - protein, 325 aa, unidentified
MKEKQILAIDVSKRSLDICVRPTGVTFKISNDLSGFKELTAAINPDLEPLVVMEHTGLYSFKLEKYLEEQGVPYCKIPALEIKRSNGLVRGKNDKIDSVRIAEYAWLRRTQLVATPKTKEKVTRLNQLLSLRAKLVKDCGGYKTRIKEMLDTELISKSDLIYKTQKAVITALNGNIQKVESEIETLIETDPELKNNFDLIRTIKGVGKIVAARMLAVTSNFKKFSNARKFNCYAGLAPFKHESGTSIRGRSRVSHLANKEIKTVLNLAAFCAIRFNQELKLYYEKRVSEGMKRMSCINIIRAKIVGRIFAVVKRQTPYDAQTLAA

SEQ ID NO: 345026 - protein, 366 aa, unidentified
MFSERTSVGLDVHARSVAAAAIDGVTGELFQARLTPSHEHIRGWIGGLPGPVAATYEAGPTGFGLARALKADGIRCVVAAPSKLQRPSGDRVKTDARDAVHLARLLRLDEVTAVVIPSEDQEAARDLVRAREDCRGDLMRARHRLSKLLLRHGIVYSGGQAWTGTHDVWLRRQHFDAPAVQLAFESDYDTVLATGARRDRLDAAITAMAADSEFTPVVRRLSCLRGVSTLTSFALAVEIGDWHRFTGNTIGSFVGLVPTEYSSGAFRVQGSITKTGNTHARRLLIEAAWHHRARYRAGATMLARWDLASPAARARGDDGNRRLHARWARFDERHKRAVIANVAVARELAGWCWSLAVLQENTAMAH

SEQ ID NO: 345027 - protein, 396 aa, unidentified
MKKRYQGKRFVGLDLHKKYATICGISQRGEVVLREDHLRLDQLSRWAAETLTPNDAVALEATTNTWWAYDCLTAHAGRVVVVNPIKTRLIAEARINTDELSAEVLARLLQSNFICEVWVPDERTRRYRQLISHRIRLAQEGTRLKNRIHAILHRQQIRPAHGNLFSRAGREWLESIDLPEMEKLLVRQNLRLLKCTEEALAEIDQLLARLAQEDGRVPILMQIPGINIFGALAILSELGEVTRFASPKKLSSYAGLVPSLHRSGQKNSSGAITKAGRSRLRWVMVEAAHVAVRYDPQLGRFFRRLRAKKGTNVAVVATARKMLVIVWHLLSGDCVYRGRRVEMVARKFLQWGWKVGDQDRCGSKRQFILERLHQIEINGLTHIKVGRRAYSLSEMN

SEQ ID NO: 345028 - protein, 316 aa, unidentified
MGDVLTFVGIDVSKARLDVASHPAGATQSVANDATGIKTLVEKLRAVKPLLIVLEATGGIERSVVRALVGAELPVAVTNPRQVRDFAKATGQLAKTDVLDAQILARFAEAVRPALRPLPDEMTVEVRALIGRRRQITEMLTAEKNRLSRAPRRVQKRIEAHIRWLQSELERADEDLDQAIRQSPVWREQEDLLKSVPGIGPIVSRTVLAELPELGKLNRKQIAALVGVAPLNWDSGLLRGRRVIWGGRSHVRTALYMAALTASRRNPVIREFYKRLQAAGKAPNVALVACMRKLLVILNAMLRHRVPWRPVVAQIS

SEQ ID NO: 345029 - protein, 409 aa, unidentified
MEILYPRCAGLDVHRDSIVACVRLAERGIERHVETFGTTTTELERLSAWLASHQVTHVAMEATGVYWKPVWAVLVEDFELLLANARHVKTVPGRTTDVNDAVWLADLLAHGLIRPSFVPPPAVQALRDLTRTRKQLTRERAAHVQRIDKVLQGANLKLGSVLSNIMGQSGRAILDALAAGESTPETLAGLLRANVRASRAQVIEALHGRLAEHQRLLLRVHLGQIDAIEAAIVALDRELSERLEPFRKAVTRLSATPGLAALSVASILAEIGLDMSPFPSEAHLISWAGLCPRNDESAGKRRSTRLRPGAPWLKTLLVQAAWCAVRTKGSYFRVLFLRLKARRGPKKAIVAVARAILTAVYVMLKRGVAYHDLGPDHFQRTERIRLATRLARRLDELGFDVTLTERAAA

SEQ ID NO: 345030 - protein, 370 aa, unidentified
MKQRLLYVGLDVHKKTTDVAIASGRPNGKVRSYGRIDSTLDALNKLIKKLQDGDKELRFVYEAGPCGYQIYRHLDAKGIHCSVVAPSMIPRRSGDRIKTDRRDAINLARLFRAGELTSIYVPTPEDEAIRDLIRCRDDMKRFERKARQRLLSFLLRHGYQYSGKRNWTKGFYTWLATVRFSHSAQQVTLQEYIDVTNECSERIKRITQQIQVHVEEWSRAPFVKAYQAMRGVSIIVSTTVAAEIGDMRRFQNPKQLMAYLGLIPSEHSSGKTVRRGPITKTGNSHVRRVLIEAAWTYKMQARVSNILLNRQKGLPKSICDISWKAQTRLCARYRRLYARGKSRQTVVTAIARELSGFIWAIDKEVQLAVL

SEQ ID NO: 345031 - protein, 362 aa, unidentified
MQKHIFAGIDLGDKNSVARIGVDREKDERLGFVNTRGGRARLFKELNRRADQAGGAKIVLAYEASSCGFILRDEAQARGMSCWVLAPTKMEKSVEQKRNKNDDRDAVDVLEKLRGHVLAGNRLPTVWVPDVETRDDREVLRTRLALSEKQTQVKAQIQMLLKRYGLEKPADLGSTRSKQYGQWLEQLSVSASLGWGTRQSLASLLRQLRGIEQEMENLDKLVRQLGSQPRHKPIVEALMKEKGVGLLTALVYRTEIGQARRFRRGRHVGKFVGLTPTSHESGQQQDRKGHISRQGPPRLRKVLCQASWVHVRYDPHSRAVYQRLVAKNPKKKKIALVAVMRRLAVRLWHRMREVELEQQTQP

SEQ ID NO: 345032 - protein, 376 aa, unidentified
MTKLRFVGLDVHAETIAVAVAEPGGEVRSLGTIPNRLESIRKMIGKLGPVNQLRTCYEAGPTGYVLYWQLTTLGVECQVVAPTLVPVKAGDRVKTDRRDAEKLARCHRAGDLTAVWVPDEAHEALRDLVRAREAAKKDQLRARHRLSKFLLRHGRRQPDGMKAWTKKYLEWVKSHVHFEQPALEAALQDYFHEVEHAAARIERLEKFLDEAIGHAPEQIRAVIEALQSLRGVAALTAATIVSEIGNFSRFDPRKLMGYSGLVASEHSSGNRLKRGAITKTGNAHLRRVIVEAAWSYQRRPWMGGYLLRRQRNLTLSDEVKEIAWKAQHRLHKRYTKLTLAGKNKNQTVTAVGRELLGFIWDIAVRTERAWEQAKAA

SEQ ID NO: 345033 - protein, 359 aa, unidentified
MVPIGVDVHKRRCKVVEFSNCKVKVRRPIENTREDWLELLGEVPPDAEIALEVSTAGYFAMSVLEEAGWGERAHWVHTAGIDSPRKQKCDRLDAERLARKLAVHHLDPLPEAWFPPSEIRELRLRSRQRCWLARLRTQAKNRLQSLLEMHGLQPPGSDPFGRRGRDWLDQQKLPAALSESVPQMLRLVEVLGKELETSEGYLEGVESQFPELSLLRTIPGIGPLLAPVIWSEIGCLKRFTSASALVNHTGLVPSLYESAEVSVQGHITRQGPRWLRWALITAANVAIQHRNPLARRYYRLRRNKKKPNVAKTAIACSLARCIYGVLKHRSPFREERWGRKVGALEQEACGSAGSTKTVL

SEQ ID NO: 345034 - protein, 420 aa, unidentified
MEEITEEPAELVERVAALDIGKASLVCCVRVPHESRPGARRQEVRTYDTVTPALLELRDWLICQGVSRVVMEATSAYWKPPFYLLEDDIECWVVNARDVKNVPGRPKTDKLDAVWLCKLAERGMLRPSFIPSRAGRQLRDLTRYRRTLTQERTREKQRAEKLLEDAQVKLSSVISDIFGASGRDMLAALIAGQRNPHALADLARKRMRAKMGVLRQALTGHFTGHHAFLLGMMLDRVDALTAQIDQLTTRIEKAIAPFARQVAQLDEIPGIGVTTAQEILAETGTDMSRFPTPGHLVSWAKFAPKARQSAGRSKAAATGKGNPWLGGTIGEAAIGAARTSTFLAARYKRVVKRRGKKRALVAVGNSILTIVWHLLSDPDAHFTDLGPDWHDRLAPQRRKRQLITELERLSGQKVTLTDAA

SEQ ID NO: 345035 - protein, 366 aa, unidentified
MDYRVYCGVDFHARQQTICSLTTEDGVVSTHELKHQDKAELRAFYAQFSGPVLVGLEASGYSPWFEQLLEELGHEVWLGDAIEISRRARRRQKNDRRDAELILDLLVHDEFPRIHRPKPESREILRMLRYRQKLVKIRTIIKNSLQALALQSGLSRRSQLFTKAGLEQLGTTTMSPVMQYQRDQWLAALAPLNQRIAETVTWLKQQTKDDQRIRRLRSHPGIGLLTALTIVHTLEPVGRFRNQRQVAAYGGFDPREHSSGEKKRYLGISKAGSRLLRFFMVEAAHTAVRYDDDLKRFYQRLHLRRGKPTAKVAVARKLLIRSYILLRDEIDYAEFLRRAVAAGLARAVTRPNVPEVLIGRPASTAH

SEQ ID NO: 345036 - protein, 343 aa, unidentified
MEKISTIGLDIAKNVFQVHAIDETGKIVVQRRLKRRQVLSFFEKHPPCLIGLEACATSHYWAREIEKLGHEVRLMPPRYVKPYVKRNKNDMADAEAICEAVTRPTMRFVAIKTAEQQSVLMLHKTRQLLIRQQTMLINAIRAHLAEFGIVAGIGRRGVEKLEAVIEAGEDDRVPLAALECLMVLRDQLAVVKRHILDADRRIMDAHRSNELSRRLAGIPGVGPLIATALATSVPDPHTFRSGRDLAAWIGLVPRQNSTGGKQRLGHISKAGNRYLRTMLVVGALSVIRRAKQLGYTRRPWLARLLERRSTKVAAVALANKIARIAWAMMAHGTYYQEPETQAV

SEQ ID NO: 345037 - protein, 331 aa, unidentified
MFPVGIDVSKNTLDLCMLYDGIKGRIKTRNIQNNRHSVENILGWLRLQHCGPEDVHVVMEATGVYHERLATELHDAGFRVSLANPHRSREFARGMGIMTKTDKVDAYMLACYAFLKKPHRWEPPTPEIRYLGALLRRRDVLLGDALREENRLEKYLSTDTPADIISSCKRMAQLLREEVSNIERQIKAHIKACPTLRRDYTLLTSIKSVGPQLGMHMLVVLRSHNFASAEQAAAFLGVVPIEKRSGTSVRSRPRMSKIGPPQLRAKLYMSALCGKIYNKRMRNIYDEMCLRGKPKMVAIGALMRKLVHWCYGVLKTGTVFNDESLKQVLST

SEQ ID NO: 345038 - protein, 411 aa, unidentified
MEIVHTRCCGLDVHKKTVVACVLISQADGLIERQVRTFKTMTVDLLALADWLSSLNVTHVALESTGVYWRPVYNVLEDDQRTLLLVNPQHMRAVPGKKTDVKDAEWLADLLRHGLLRASFIPPAPIRVVRELTRYRKTLVQSRADEANRLQKTLEGANLKLASVATDVLGMSGRAMFAALIEGERDPEVLADLARGKLRAKLPQLRQALVGRIQPHHLVLISQVLAHIDFLEEAIAQVQVEIDRCLPPFDEALELVQTIPGIKAVAAAAILAEIGPDMSRFPTAGHLASWAGLCPTNKQSAGKRMKGPANHGNVWLRGIMGEVVWASIRTKASYFYAQYHRLARRRGKEKAAIAVAHSLLVVIYHVLRTRQPYKELGVDYFDRMDSTRVERHHVRRLEQLGFTVTLTPTAA

SEQ ID NO: 345039 - protein, 368 aa, unidentified
MTQTLFYAGIDVDDKSFHVAVLNKQNGELKEFKCSPNSASLRQKLASYDQKSLLICYEASHLGFSLYRSLVEAGFKCDVIAPSLIPELPGKKQKTDRIDSRKLAQYHMNGLLTKVHVPEFDEEMDRDLVRSRRFLAQQYAKQKNKITSFCRTLGWHYKQETGAKSYWNRRHLNWLEKKINSCDNSSLKVNLTILQRQLEQTRENIELFNTEIEHLASSEKYSKKVAALNSYRGLDTVSSMVIATELGDVRRFKNPSHLMSYCGFDLIEYSSGGKERKYSTSKDGNKYVRFAAIEACQFALKPPKASSTLLLRRRGTDRKLTDIADRCMTRLYKKGTRLLYSGKERNKIIVACGREMMGFVWESLRAVS

SEQ ID NO: 345040 - protein, 352 aa, unidentified
MLIIGCDFHPGFQQVAIFDNESGEYQEKRLRHRSEAEQFYRGLRGRAVRVGMEACGHYPWFERLLAELGFELWLGDASKIRAAEVRKQKTDRRDAAHLLQLLIEERFPKIWVPSLEERDVRQLLVHRHKQVQTRTRIKNQLHALALSQGLQRKRKLWTQAGRAELEQLELLPYAAARRRQLLEALDRLEQEVAELNQRVSAEVAQRPAAVKLMTHPGVGPVTALAMVLTLGPAERFGSPRQVASYFGLIPSEHSSGGRQRPGRISKQGSPFLRFLLVEAGQSAARYDSVLGRFYRRLAVRKHRGLAKVAVARKLASRLYLMLREDWTYAQLCRAVVQVSPSHSVDGKQKPSA

SEQ ID NO: 345041 - protein, 332 aa, unidentified
MRRFGAYTADLDARAAWLATCGSTTVALASTGVSWLPLFALLEARGFAVLLVDPPHVQKSKGRPTSDVQDCQGIQRLHTFGLLARAFRPTDQVCVLRSYLRQRAMLLTYAAQHIQHMQKALTQMNIKLQHVVSDITGVTGLAIIRAILAGERAPGTLAQLRNAHCKHDETTIARALQGNWRDEPLFALAQAMALYEVYHQKIAECDRHIEASLQTFADRSEGQPLPPAPRPRKRGRNQPAFAVRDPLYRITGGDLPQIEGIDETTSLVILSEMGLERSRWPTVQHFTSWLGLCPHHRVSGGKVLSRRTKPCANRAATALRLAAACLHHSQSA

SEQ ID NO: 345042 - protein, 401 aa, unidentified
MKRLSGGIDIGKDFHHMIILDEKEQVLYQKSIPQHLKEMKQIMKELTCLEKKEKAQLSFVLEGKNGYSNPLDRLLLLEGFTLYNVDNYKLKRFREAFTGEWRDDNRDALMLSKMLNLKEHINSPKEKVFIEITKPSVITESLKLLSRHQQILIEEKVRLTNRLGKKLLEVSPELLRLGKLKYQKIIAILAKYPDFSRYSKITLKSLLKIPGIGKKQAPHLLAGLHELAYMPEMTSIYKTIISSYSKRISQLQKESKEIDTKMDQIGQQDNSIRHLKSIPGVATKLASRFLGEIGDISRFPSEKNLAIYCGIACVNNASGKTNKTKVVYKANKIAKQTLIMMAGGSIRVNSQCRDYYLKKRTEGKKHNHALRCLSRQMIKVIYRMLTEDRDYQIKREALKVA

SEQ ID NO: 345043 - protein, 349 aa, unidentified
MPILAEQFVHVIGVDTHKLRLTAAALNASGGCLELLEVGADARGYGRLLELGSRFSGPLLWAVEGTGSYGAALTEHLLANGQTVTEVDRPKRPPRRRGKSDEIDAIRAGRDALAMKRLNPPRRRQEREQLRILFTTRQELVSNRTRLANHLMQLVVTASEKLRSRFLDFGSHGAERLVRQCLASRCHPGMSAEDRTRLTTMRELAHMIRSLSADADRYEQEIAVRVEQMAPGLCAQPGVGALTAAQILLSWSHAGRMPNEATFAALAGVCPIPASSGQTVRHRLNRGGDRQLNAALHRVVLTRCRYHQSTRDYLARRTAQGKTLAEVRRCLKRYAARQLFKFLNRLDKA

SEQ ID NO: 345044 - protein, 374 aa, unidentified
MSDHNEAYVAFDTSKLRNAVAIAEAGRSGEVRFLGEIDNTPAATAKLVKKLSGKYDRLTFCYEAGPTGYGLYRQIKSLGHECLVVAPSLILKKPGERVKTNRRDAVSLVKQLRGGDLTAVWVPDPQHEAMRELTRAREVAVEDLRRKRQQVSAFLLRQGLHYPGERAWTKAHRAWLVSQKLEYAEHRIAFEEMLLAMRQAQERIERLEQAIRVAVPDWSLAEVVTALMALRGIDFISATAFLAEIGDLSRFRTPRELMAYLGLVPSEASTGDTVKRGPITKTGNRRARRILVECSWSYQHPPRVGKEKQERVAAAPPAVREIAWKAQCRLSARYRALTRKGKLKTVAVTAVARELSAFIWAINRQVANPGAAAR

SEQ ID NO: 345045 - protein, 383 aa, unidentified
MKKTKGTPRKKDSTTGKVLHVAFELSQNKWKLGFSDGIKMRFKSIAARSLEQLHEEIEKAQVRFKMKGKVKILSCYEAGRDGFWLHRYLLSCGIENVVVDSSSIEVNRRKRRTKTDRIDARKLLRMLMRYHGGERKLWSVVNVPSVEAEDGRNLNRELEVLKKERTMHRNRIRGLLIQQGLEVRNPSGKRFLQELASLCTWDGKQIPEDLKERVVREYERLRMVEEQIKILKKERERRVQSADKPSYRQVAQLRTLYGIGVTSSWDFVMEMFAWRQFRNRREVGAFPGLTPTPYDSGGSQREQGISKAGRGRIRTLSIEIAWAWLRFQPQSKLSRWFWHRFGHGGKRMRRIGIVAVARRLLIDLWRYLEYGLIPEGARTRAVA

SEQ ID NO: 345046 - protein, 385 aa, unidentified
MAPTRMPEAVIGLDVGKSSHWACVATRDGEVLLSAPVANREGDLDSLFVRFPDALVVVDQSRNIGALALARARAAGMSAAYLPGLAAHGAARLFAGDAKTDERDAMVIAKTALGIPDALLPVGDPGPTIAAARALAAQRNFLTCENTRNKNRLRSILLESCPDFEALVDLSDGPQLRLMASLGGAWSVADAGPRRAAALTRGAARGKIEALVRSTASSTRPDAAAVAAEDRAVKLLARRISENSAEIEAITAEISALLEGDDTYRCLLTVPGIGPKTASELAISIDIKDFPSHDRLASYCGLAPRNRQSGTSISSVTASRQGNKRLKNLLIFSCNCLTRTEGRWGDYYTRCRERGMSHGKALKALARKRLKVIYAVMRDRVPYAA

SEQ ID NO: 345047 - protein, 316 aa, unidentified
MSEQQIFVGIDVAKAQLDIALRPTGERWAVPNDDPSITALVARLHAVHPTLIVLEATGGYHRAAVAALAAAGLPVVVVNPRQTRDFAKATGQLATTDALDARALAHFAEAVRPTPRLLPTAQEEELRALLARRRQLVAMRTAEGNRLGSALPSLHADLQAHIAWLDERLAALDDTLDTTLRASPIWRERETLYRSVPGIGPVSARTLLLDLPELGTLSRQRIAALAGVAPCNCDSGTMRGRRAIWGGRAPLRATLYMATLAAVRHNPVLKACYERLLAAGKAKQVALVACMRTLLTILNAMVKHQTPWQPREVAIA

SEQ ID NO: 345048 - protein, 343 aa, unidentified
MKQYVGLDVSMEETKIHVLDEEGGRVWRGKCRSEPSTIAATVHKRAPEAVRIGIETGPLTTWLYTELVADGLPMVCLDARHAKKALDMKINKTDANDADGLAHLVRSGWYREVRVKGREAMRVKALTGARSQLLGMSTELSNQIRGIMKTFGLVVPKGQGGVFEMNVSDLLAGGNAIDCIIMPLLNAWRAVRARTAELDRQLIASARQSTVCRLLMTMPGIGTVTAASYAAAIETPGNFAHSRDVGTWVGLTPRRFQSGEVDYEGHISRRGDRELRALLYEAATTLLTRVHAASTLRDWGLALRKRLGFKRAAVALARKMAVVLHAMWKSETAFAPRLGSAVA

SEQ ID NO: 345049 - protein, 377 aa, unidentified
MKDLLEISCGLDIHKEKIVACILTGPLGKPTHSEIREFTTLIPDMLALRDWIISENCHHIAMESTGIYWIPIYEILEDAFSGDITLLVVNARHMKNVPGKKTDMRDSEWISTLLRAGLLNASFIPEKRIREFRDLNRYRKSIIRDITSQKNRVEKFLQSSGFRLSSFISDIFGASGRNIILHLMEHGQIDKISLDSYLKTKTRKRIDEILMSVNGTLSEHQKSFLKILMCHYDSMKEHLIEIETHLQEDMLPFALQIEQLNTIYGISTTASCAIIAEIGTDMKPFKTAEHICSWAGLCPGNNESAGKRKSTSITKGNPYIKSMLCEIAWVIAGKRNTYLSAWYWRIKQKKGARNFFVPSIFHCWKTLLWLLYNVMLS

SEQ ID NO: 345050 - protein, 342 aa, unidentified
MYYIGLDVHKKTISYCVKDASGQVHREGTIGATRNELDWWLKTLPQPRIMAMEATIFTGWIYDHLLPHAEQVKVAHPLMLRAIALAKKKNDRVDAGKIADCLRCDFLPECHMASTEIRDRRRTLRYRHLLVRQMVQMKNRISGLLLETGVSHNKQRLHKVGYFRELISNNEEVHENIRPLLRLSRETIVRCQKTEYALVSSLERDPLLAERIKRLRTVPGVGPITALTWALEIGDVARFRSVKQAISYCGLCGEEKSSADKVLRTPLSKQRNKHIQHVLVEAAKLAPRQNHELAVVHERETQKGNRNRATLAVARKMVAYLLAVDRREREFVPAEGRSTAAA

SEQ ID NO: 345051 - protein, 453 aa, unidentified
MPRKQKTSGRSSGQWSTINPDAAGLDVGATFHVVAVAPDRDEQPVRTFGTFSGDLHRLADWLQKVGITTVAMESTGVYWIPAFEILEARRIEVVLVNARHVKHVPGRKSDVNDAQWLQQLHQYGLLRGSFRPREDIARLRAYLRHRERLVEYAAAHIQHMQKALMQMNVQVHHVVTDITGVTGMRIIRAIVSGIQAPDTLAEFRDARCTASADTIRAALTGNYRPEHVFALRHALELYDVHQEKIAECDTEIDNVLRTLNAERPTPPAPLPTVRHAKGRNEPNFDARPALYTLLGADLTQIHGFGPYTILRLVAECGDDMSKWPTAKHFTSWLSLAPGNKVSGGRLLNSKTRRSANRAAVLLRLAAVNVGRTQTALGAFYRRLVAGIGKAKAVTATARKLAILFYNALRFGMAYADPGASYYEARYRQRVLDNLRRRAQQMGFTLVASLASDG

SEQ ID NO: 345052 - protein, 402 aa, unidentified
MYNAVGIDVSKGKSTVAVLQPAGVIIRKPFNVNHTSSELDELAKYIGSLEGETRVVLECTGRYHEPVVKTLSEAGLFVSAVNPHLIKNFGNNSIRKVKSDPADAKKIARYTLDNWIELRQYSSMDNTRTQLKTLNSQFSFFMKQKVAAKANLIALLDNTYPGVNKLFDSPVRDDGSEKWVDYAYSFWHVDCVRKIGLKTFTERYQAFCKKHHYNFQPAKPAELFLASKDLIAVFPKEASYKLLIQQSIQQLNLASSHVEELRSKMNELASTLPEYATVMGMYGVGKTFGPQLIAEIGDISNFSHREALTAFAGVDPGVDQSGTHNSKSNKASKCGSNRLRKTLFQIMSTLLQTAPEDDTVYQILVKKRAEEKPYYVYMTAGANKFLRIYYGKVKECIRNLEQ

SEQ ID NO: 345053 - protein, 371 aa, unidentified
MKSIIYIGMDVHKKTYSLCALLKETGEIIGETKIPADVSLIIKFIENAKKSVDSDDVQIKTGYEAGCLGYSLYWQLAAKGIECDILAPSTMHRSAKNKVVKNDRRDAKNIAANLANGTYKSVYVPTDEDVEIKEYIRMMHDFKIELKKVKQHINAFLLRFGHHYPGKSKWIPAHIKWLKELELSDMYREILDEYLSQLEILSEKIERFKHRLEELSQKETYNEKIGQLRCIKGIDTTAAMTMHAETSDFDRFPTANAFASYCGLTPGEDSSGESYHRLGITKQGNSMIRTTMVEAAQVLVRGTIGKKGKKVKSKQKDQNVKVIDYADKAVVRLQKKYHRMVFRGVKRNIAITAVARELACFVWGIETGHIS

SEQ ID NO: 345054 - protein, 338 aa, unidentified
MKLYGAIDLHSNNNVTVLIDEQDKVVYENRLPNDLALIIQQLSAYQDSLEGIVVESTYNWYWLVDGLMDKGHKVHLANTAAIQQYEGLKYTDDHSDARWLAHLLRLGVLPQGYIYPKAERPVRDLLRKRGQLVRQRTANLLSIQNLLTRNTASSINSNRIKTLDAKHVDELLANPDLALAVKANLAVMQCADEQIDRLERTVTDRIKLREEFSLLRTAPGIGLILALTIMLETGDIGRFDSVGNYASYCRCVGSQKISNGKKKGKGNTKNGNKYLSWAYIEAANFAIRYCARVKSFYQRKKAKSHGVVALKAVAHKLCRACYYIIKNRVAFDVTKAFA

SEQ ID NO: 345055 - protein, 412 aa, unidentified
MKDLLEISCGLDVHKEKIVACILTGPLGKPTHSEIREFSTLIPDMIALRHWIVSKNCHHVAMESTGIYWMPIYEILEDAFSGDITLLVVNARHMKNVPGKKTDMRDSEWISTLLRAGLLNGSFIPEKRIREFRDLNRYRKSVIRDITSQKNRIEKFLQSSGFRLSSFISDIFGASGRNIILHLIEHGQIDKTALDSCLKTKTRNRIDEILMSVNGTLSEHQKAFLRILMTHYDSLKKHLVEIETSLEEDMAPFALQIEQLNSIYGISTTASCAIIAEIGIDMKPFKTAEHICSWAGLCPGNNESAGKRKSTSVTKGNPYIKSMLCEIAWVIAGKRNTYLSAWYWRIKQKKGAQKAIVALARKLLVIIYTMLKQGTLFDESCFETRRKHCEQKQLSRYIRELEKHGYHVEAQS

SEQ ID NO: 345056 - protein, 341 aa, unidentified
MYSIGLDISKTTISIHVPLNSLNLEIENSKSGLKSFYSKLKKLYKKDIDKLIFTYEPTGSYSALMTKFCASKNIKAFIINPKQSSNFAKALGYRSKSDKIDAKMLSLSLSIAKESEIKVPIINATAESIKELMSYYMFTIKQRVAVQNHHEALSVKDGNSYALKDLKKRVKEMKNKEGEIIQKIDEIINEDEKLLNSYNNIKTIPGIGTITAIVLLHLFIKYPQANQKQIVSLVGLDPVIKESGTSLNAKPRISKSGSRLYRGVLFMATMVSIKYNEQMKAFYTRLKANGKHSTVAQIAVMRKLIVIAHSLYKNGSQYDAEVYQKACGVTQSKSENKEVIA

SEQ ID NO: 345057 - protein, 539 aa, unidentified
MMETWDTQSLFVEAVLMRSKHSARKSQSRAAEFLQKPRGVLHPRVQEVGPEHFGIISIDCAKARSKWMLTDFYGKVLVPPTEVAHNRVELALAVSTVRAAMGRHELRDSLVAVERTGRYHHPIKNAFAKADFDTRLVHPYTTKQFRQPANPDNKTDDTDLAAIHRAAVNGFALVEATPSEEWRQLQLCIRHRRDLVRKTSALACQIREHLDAALPGYAAAFDKLWESGVAFRFVRHFGSADAMLQQGLTGLSNYLRQEKVRFQQRTLDTVLAWAKNAAAPDQAAELHRHIALAYEQDRQQKTQQIIALERDIAQRLVQTPYVLLLSFPGINVVSAADFAGEMGPITNYANARAITGRAGLFPARYQSDRVDRANGPLVRRCNRALRAAILGIADNLRLCNQRFRVLSGAWKAAGKNPRHSIVKIACRFCRIAFHMVAGRQVFRHPSLRERSYIVDKLLAFHLEHDTPWQATLRDLHHAIAQIPAKEHTAEAQPLADKLRTARKGGKRGPQPLSEILAIVLARLGVGALPSTPSEGKDLP

SEQ ID NO: 345058 - protein, 345 aa, unidentified
MTSMNFIGLDIHKKTISYCVKDISGKVLSEGKIPATRQGLQDWVGRLAKPWTVAMEATMFTGWLYDYLRPHAAAVKVAHPLMLRAIAVAKKKNDRIDAGRIADCLRCDFLPECYMAPMEIRQRRRTLRYRKLLVRQNVQLKNKIAQLLMESGVSYNKEKLHQQGYFHQVLPANPEIDPSLWPLLKLTREMIERTQKTERALLRSLEADPLLAARVERLMTIPAIGHVTALTWVLEVGEVERFHSVKQVISYCGLCSGEKTSADSSRRMPISKQRNRHLQTVLLEAAHLAPRLNPELAVLYEREAAQSNRNQAAIAVARKLAAYLLAIDRGERAFVTHQVHSRDAA

SEQ ID NO: 345059 - protein, 346 aa, unidentified
MRYKGMKNKSFIGIDISKNVIDASIFCERTPIKDFPHDVFNNSRKGFGEMCTWLKKNHVVLSNCLFGMEFTGSYSMELEKFLNARNYQFCMLSTHVVKHYPMGPKDKSDKIDSAKIADFLYRYNGTECVKPYKMPDKTMQRLKALMNERKFLVEQRTCFMNRRQLCTTKEDAQLYDGYIKKLCHDIENIELEEQKLLATDDSLLATYKNLLTIPGVGFVNAINVIVITRNFTAFETARQYASYVGVAPHSHTSGTSVRWRPRPSARCDGQAKADLSMAATVAVQYDAELQSFYNRKLEGKQDSDTKRKALNAVKFKLVLRMFATGKQNRKWEPLDSKSSNEKLAIS

SEQ ID NO: 345060 - protein, 370 aa, unidentified
MSQSSTLLIGMDVHKATIAVAYVAQEHGAEVTSLGTSGTRQGDIDPRVRKMQSKAKHLLFVYEAGPGGYWLSRYLTKKDYDCWGVAPALLPPKPGDRVKTDRRDALQLARLARSGALTVVHVPTVDDEAIRDLTRARDDARSDCQDAKFRRKAFWLRPDIRSTGRANWGPAHLRWLSEVIWPPPAQPIVFQEYVRAVTEHTARLQRLAQELHEHVPAWRLYAVVEALQALRGVQCTVAVIMVAELGDLTRFDTPRELMKCLGLIPAAYSSGERRQQGSITKAGNTHARRALVEGAWAYRSRAKVSRHLQLRLAKQPKSIQDSSGKAQVRLCKRYRQLGARGKHAHSVTVAIARELAGCLWAIAKQLPIAA

SEQ ID NO: 345061 - protein, 401 aa, unidentified
MNCVGIDVSKGKSMIAVMRPFGEVMISPFEVQHTASELSELAKLLKSLDGETRVVMESTGNYHTPVAWLLHDAGLYVSVVNAMLVHDYGNNSLRRAKTDKKDAVKLANYGLDHWLTLPRYVPEEDTRLLLKNCYRQYQQYSKVQTMLKNNLISLLDAVFPEVNRLFNSSPRADGSEKWVDFVSTFWHCQCVSTLPLKSFSARYLKWCRKHGYYFSQEKAFEIHSKAQSCIGVMPRNETTKLLVQQAIAQLKATSAALAALKQEMQSLAASLPEYPVVMEMFGVGSTLGPQLMAEIGDVRRFHSKKALVAFAGIDAPPYQSGQLEVRSRSISKRGSSALRRTLFLVMSVILQRSPADEPVYQFMDRKRAEGKPYRVYMMASANKFLRIYYATVKQYLDSLEV

SEQ ID NO: 345062 - protein, 332 aa, unidentified
MDNFYFIGVDVSKKKLDFCVLFEGKVLREEQVSNHQQAVARLIGELKNDLEMDNEQFLICAEHTGQYTFPLVCACKSVECKLWLENPSQIKYSSGMQRGKNDKVDAKRIAIYASRFGDKVKYYDRPTEEIERLKQLERERALYVTDLAKYKGQMYDQKDFMPAALYRKKTKRMKGLIQELQAAIDAITAEMEKIIGSTEVLARQMELLMSIDGVGKVVALNVIIETEAFSRFDNPRKFCCHAGVAPFSYTSGSSQHSKNKVSHRANKNIKKLLHMAGVSVTHRKEGELKAYYMRKVEEGKNKMSVINALRAKIVARMFAVIKRNEFYTPIYS

SEQ ID NO: 345063 - protein, 366 aa, unidentified
MKRLVLKDGGKQAQRAQPRAPAVGEVVILGVDLSRSKWVYACRWGGHEQRRFGSPGELTHLQAVVREYQQRGCDVHVVYEACGFGYQIAWWVEAHKARVIVVAPSCVEKAPGAQVKTDGLDAGSLALKYERGMLKGIYIPTREQHEYRQLSRTYGQALKDRSRQQVRLRLLLQEHGYTPPAAGSSWGALERWVSAQQFAPPLGLCVTELMGLRTSAGSSARRLANELRAVGRLPQYVELGKALAAQSGVGRFTAIRFVLEVGDIHRFATADSLPNYLGLAPKEYSSGDMVHRGRIRKCGPGSLRAWLVQCAWAAVRADKDGPLVECFKRLEPRVGRKRAIVAVARKLALRLRARWLAFEEEVQQAA

SEQ ID NO: 345064 - protein, 347 aa, unidentified
MAHYAGLDISDKDTAIHVVDDNGKLVWRGKRASEPEVLAAALRRHAPELVRVGLETGQLAPWLYHSLKDLGFPVICLDARHARVATALQRNKTDAHDAETLAQLVRTGWYREARVKGWAAHAMRRLVGARSQLVGISIDLSNQIRSTLKTFGLRATGGAGRVFEAKVRIALEGRPEVAGVVEPLLAAWRAVRDQIAVLDRKLMAAVKADPTCRLLMTCPGVGVVVAASFSATVEAPAHFRHSRSIGAYLGLTPRRNQSGEIDHSAGVSKRGDRLLRSYLFEAAASLLVRVQSSSALKTWGLALVQRLGFKRAAVAVARKIGVVLHAMWKSNQPFEAWHGATPKARAA

SEQ ID NO: 345065 - protein, 404 aa, unidentified
MSVVGWDWASQAHDVTVLDDAGAVLDRWAFPHTEAGWVMALARLRRRGEPGDLPVIIEKTSGLIVDRLLAAGHPVVPVHPNSFHAARPRWGASGAKSDPGDSYKLADYLRTDGHRLRRLEPADPGLRELQALVRLREDQVRARTAATNQLWAMLGNHWPGPRDLFCSLASGIALAFLTAYPTPQSAARLGEARMAAFLRRNSYRGGKSPALLLARLRAAPQAPVALPAATLAAMVGAHVQQLRSLQAAITGIERLIAERVAAYPRTRLLARLPGAGTINLAQLLAEVGPILDRATSAEQAASECGTAPVTRASGKTTGVYFRWAASTRARKAITAFAHNARMQSPWAAKLYADARARGKRNPHATRIVARAWIRVIWACWHTGTPYDPATHRAARQPSPAEDLT

SEQ ID NO: 345066 - protein, 353 aa, unidentified
MEYIAFDAHKHYTLASVARPDGQLVREQRIAHERGALQHFLERCERGSPVAVETVGNWYWIVDEIEAAGCIPRLVHARKAKLMMGQINKTDKLDVRGLNQLQRTGTLPTVWIPPGQLRDQRDLPRTRMVLVRQRTQLKNRIHATLAKYALHDLEVSDLFGARGRALLRQRLELLPPCTAYTTQHLLEQVERLDHQLREFEQRIRTLFTPTPAIQRLLTLPGVGLTLAVLIALEVGDVARFHTAEKLAAYAGTTPRVHASGGKSRFGPSRPDVNRYLKWAFVEAANAICLNRGRAPHRHVTRLYERVAPRKGHQKAIGALARHLAEATYWVLTKQEAYREPHTAAVSSTGDQRG

SEQ ID NO: 345067 - protein, 334 aa, unidentified
MEFAYFVGVDVSKNELDLAVYNDKKLLSHREIANNQGEINQFIKQLKKLEGFDLSNTLFCMEHTGIYNNPLLMYLHKKKGNIWLEPASQIKSSLGNIRGKSDKIDAIRIGEYAYKNREDARLWKPKRKEINKLAELTTLRSRLIVIKKMLTTPVKELEGFVEKSSATQYKKLCQRSLNSIEADIEKIENGISEIIRNDQELSRLFGLITSVQGIGKETAVQVIITTNEFKNINDPKKFACYSGVAPFTKESGLFKGKARVSHMANKKMKTLLHMAALVAIVYNNDLKAYYERKVMEGKNKMSVINAVRNKLIHRIFACVNQNRKYEKKYMTVLV

SEQ ID NO: 345068 - protein, 322 aa, unidentified
MILSMGVDISKKKADIIIYNDVVKKNYVITNSVSSIKRFLKKHSDVDRIVMEATGTYYLKFATIANELGFYVSVVNPYIIKKYGEYKFKRSKTDKIDAELIAKYGYENTPKKYKITDKLRSKLKSLLTTITGLKKQITQNTNRIEALSQFPNNETKYSIKALQKVIKAIKREKSNIEKEIQSIIKNNFKKTYELLDGIKGLGPGCNAAIIAYYGDFSDFDSAKKAVAFAGMDPIKHESGSSVRKKSKISKRGNKVLRALLYMGGMSAIQYNKQCIKLNKRLKDKGKIGKVRIMASAHKLLRLAYGVVTSGVKYDPDYLKKSA

SEQ ID NO: 345069 - protein, 340 aa, unidentified
MRPVRIGLDIAKNVFQVHGVDVDGNIVLRRRLRRAEVIGFFTQLPPCLLGIEACSASHHWARELTQLGHDVRIMPARYVKPYVRRGKSDSLDAEAICEAVSRPGMRFASVKTVQQQSALSLHRSREILVKQETMLANLMRGCLGEFGVIVPVGIRRVAELVAIVRDEADQRVPPEARIAMTIVADQLEDLQRRIRALERAILRWHRQNDASCRLATIPGVGPITASAVVATVGSVDGFRSGRHFAAFLGLTPKEYSTGGKQRLGKISKQGDVYIRRLLILGGTSLVRYSRGPGASTWAAQLLQRRPTRVVTVALANKAARVIWALLARGGVYRALMPPAV

SEQ ID NO: 345070 - protein, 319 aa, unidentified
MTTPTTPYLGIDVAKATLEVALDTDAPSFAVKNASQALPELVARLQARAPALIVVEATGGYETQVVAACIAADLPLVVVNPRQVRDFAKALGKRAKTDRVDARVLARFARAVQPAARTLKSAAAQAVSVLGARRRQLTERLVAAENRRQSPLFTARADEFKEHIAWLQERLADLDRDLHEQVRQTPQWRERDALLQSAKGVGPVLSVTLLTQLPELGQLNRREIALLVGVAPISHDSGKHQGERHIAGGRAAVRSVLYMATLAATRFNPVIKEFYQRLLAKGKLKKVALTACMRKLLTMLNAMVRDNAAWHPPAKQLFA

SEQ ID NO: 345071 - protein, 341 aa, unidentified
MEQATTIGLDIAKHVFQLHGADAAGHVLFRKRITRAKLLSFLAAQTRCVVAMEACAGAHYWAREIAKLGHHVRLIAPAYVKPFIKRQKNDAADAEAICEAAQRPSMRFVPVKTEEQQANGIVFRARDLLVRQRTQCVNALRGHLMEYGYVFPKGITHVETLIALVEDLQSSLPDSVRVILKLLIDTFTALEAQIAVLDAEINQRSKSDPTARRLMTIPGVGPIASTAITALVPAAEGFPAGRDFAAWLGLTPLQKSTGGKQKLGAVSKRGERTIRRLLIIGASAVVQQASRRGAPKGSWLAQMLARKPKMLVTVALANKTARIIWALLVKGGTYRTPAAAA

SEQ ID NO: 345072 - protein, 372 aa, unidentified
MNEASMATVFVGLDVHKKTIAVATVEARASADVRFYGTIANTPLAIRSLLKKLGKGGQRLHLAYEAGLMGYTLYRMSTGLGHRCDVVAPSLIPRRVGDKVKTDRRDAMTLAQTLRAGQLTEVWVPDEAHEAMRDLVRMRALAMKDQRKARQQLHSFLLRHGRSFSGKHWTKMHRRWLGELQFSQPAQHLVLEELLARIERAEELCGRLKQAIVDLVPQWTLAPVVAAVQALRGVSILVAATVVAEVGNFSRFQNPRQLMAYLGLNPSEHSSGATIKRGPITKTGNSLARTCLVEAAWTYRHPARVTQIIRERMKGLPEPIRAIAWKAQVRLAGRYRKLTASGKAPPKAIVAVARELVGFIWAIARLVEPKVA

SEQ ID NO: 345073 - protein, 482 aa, unidentified
MKPRPAEKDKEVIADLSCGHWNQMNRQQRRHMMRKIQSDDLSLEVVHPDAAGVDIGNESHYVAVPPTRDSQPVRRFGCTTAELKAMADWLKQCGIQTVAMQSTGVYWIAVYDILEAAGLDVYLVNARDTKNLPGRKSDVQESQWLMKLHTYGLLRNSFRPSQEIRTMRTYWRQRNDLVKSASRHIHRIQKALTQMNLQLANVLSDVSGLTGQAIINAILAGERNPYKLAAFRDPRVQASEEQIARSLEGNWQEDLLFVLKQEQDGYEFCQKQMAECDRQLEQYFQRREDRSQGASLPEEKRKTRLKKKNGNKPQFGLRADLFRMTGTDLTQIDSIDVMTATTILSEVGWDMSKWETEDHFVSWLRLCPDNRISGNKIIGKGRLPTNNRVSIALRMAASTLRVSNTYLGAQFRRFRAKLDARVAVKAMAAKLARLVYRMMRYGMKYVDQGAKFYETQHRNLQVKHLKWRAAKLGYQLVQAPST

SEQ ID NO: 345074 - protein, 311 aa, unidentified
MDSYTGIDISKYSFDVHVTSPETDRQFEYTEPGIQECLQWLLSLKPPLIVLEATGGYERRLVSELMAADLPVRVANPKRIRDFARAKGKLAKTDQLDARIIAQYAALFQPPPQAPMDEISLKIKDLVARRRQLMTMRTQEENRKEHALDKDIARSVSTVIKAINKELEKIENKMTDLIDQSPNLKQKADLLQTMPGIGRTTALALISLLPELGLLNRRQIAALVDVAPINRDSGIFRGKRITTGGRREVRRRLYMPTLVATQHNPIISAYYQRLLKKGKPPLVAVVACMRKIFVILNAMIAKNQPWTQNYA

SEQ ID NO: 345075 - protein, 350 aa, unidentified
MLIGVDYHPSFQTIAFFVQETGECGEQELNHSDGKAERFYRDLKERGICVRVGMEATGYARWFERLLAELGFELWIGDPAEIKAKRVRKPKTDKEDARLLLKLMLEDRFPKIWVPSLENRDLRQLLWHRHRLVQMRTRIMNQLQALAMNEGRRWKKKLWSEQGRAELEKLGLAPWASRRRKELLELLDRLNPSIEELTAAAEREARKRPDVLRLMTHPGVGALTALAYVLMLGTPERFHRGKQIGTYVGMVPSEDSSARKQRLGHITKEGNCLLRFLLVEAAQAAVRTNPHWRRRYIHLAMRRHKSIAKVAMGRRMATRLYWMWRNRCDYSPSFEFGSYAGQPETSHGVK

SEQ ID NO: 345076 - protein, 424 aa, unidentified
MNNTQNQKIAQVTDKTLIVGVDIGSENHYARAILARGFEVSKKPFPFTNTEEGFESFANWTHNLATAHKLNKIMVAMEPTGHYWFAFVAFLKKYDVQVVLVAPQHVKHSKEMDDNTQEKDDRKDPIVIARLVPEGRYLIPYIPEDVFAELRVAFNRRCELVEEQVRIANRMIRWFDIYFPEYRKIYGRIDAKTGIMILKRAPLPADILDIGVDGICQIWKDAKLRGYGSKKAKQIYSAAEHSVGMKGGASVRWKLWQLLEEYELIESQLHDILQLIEGLLYQIPGADKLLKIPGAGLVTVAGFLSEVGDTKRFSDPKQIQKLAGLAVVENSSGKRKGLPGISKRGRSRLRWVLFQLARSMVMFNPEMKAYHQYYTTRKENPLKKLQSLVAISARIARIFYGILKNGTEYDPEMVMKDFNKAVAA

SEQ ID NO: 345077 - protein, 408 aa, unidentified
MTIVGIDVSKGKSMVAAMKPGGELVAAPYEVRHSDIELSRLALNVLCMEPDTRVVMEATGRYHEPVAALLHSEGIFVSILNPLLIKQSGAGSLRKVKSDPKDALKIAKYGLDNWSTLREYTPMEAIRQQLKLCARQCDLYNKSIVMLTNNLISLSDKTFPGVNELFSSPEKADGHLKWVDFYRTFWHCDCINRMSPDTFGERYKKWCKRKGYHFSADAADALYAASCGLYTTLPRDNNAKLLVTVAADQLIALRENQSKLEAEMLNFCKQLPEYETVMAMYGVGKSTGPHLMAELGDIRRFPHRSSIVAFAGVDPGVVGSGKMQLSSVATSKRGSPQLRKALFQVVSTYVKCKPENEAVYQFYTKKRDEGKPFFVCTTAAANKFLRIYYARVKECLNAAESATQVEEG

SEQ ID NO: 345078 - protein, 376 aa, unidentified
MIEKLRFLGLDVHAETISVAVAEPNGEVRSLGTIANREDSIRKFIRKLGSPEHLRACYEAGPTGFVLYWQLTQLGVKCDVVAPSLVPKKPGDKVKTDRRDALNLARSHRSGDLTAVWVPDEASEAVRDLVRQREAAKQDQLRAKHRLTKFLLRTGQRPPLGVKAWTERYVEWVQQVRYTHPARETTLLDCLNEVQHMEERVKRLEQSIVEVIQLAPVPIQNVVRGLQALRGIAHISAVTIAVELGNITSRFERARDLMGYSGVFPSEDSSGERIRRGGITKSGNAHLRRIVVESAWSYRYRPAIGARLRKRQEGLPAEITEIAWKAQNRLHKRYMTLMARGKEQRKTMTAVARELLGFIWAIGIKAEASCKQQLAA

SEQ ID NO: 345079 - protein, 452 aa, unidentified
MGKGSGMTRGDVRRNARRERLRALLPRDGAVVGIDLGEDKQALAVADHDGRVVARKTVRVKAFRLGEALDWAAGQARAAGFAAVTVACEPTGARWLQVQRLCAERGLALVCIQPLVSHIAREQQDLTGHKTDEADCVLIARLAAELHCYVPEELDQAWADLRHLGRRRAQLITAATASVQRVADFLSVAWPVVTEACAHPLESKTWLAAVQVVTSRCGGDPARLAGLGDQEFTGLVRAAVAGWGGQRPAAAICRRVLAATADAEGVVISCRRGLLRRVAAELGDLARTRAQLRAVEADMVAVLGELGLSRLAGIPGLSAVGAAAILAETGDPRRYASSSSMVKHAGLAPAGNASGAFEGQAHISRRGRPGLRLAAWRAIWPLLRHNPVMAAKYAALTGAAAAAGTGTRQAAAARARVACAASLLRWIYYITVHDATWDAAAASGAARQPEAA

SEQ ID NO: 345080 - protein, 367 aa, unidentified
MKKVSTAAAKATKNFSQPKLTIGLDLGDRSSWYCLLDEVGEVLLEQKLSTTPKAMREVFGSLPRCRIALETGMHSPWVSRLLSELGHEVIVAHARAVRLIGESRQKDDRLDARTLARLARIDPQLLCPVKHRSAKAQADLTLIRGRAGLVRARTALVNTARGLAKSYGERLRGCNVRNMNPEKAEGLSPELQRALEPLLAGIESLSERIGEYNERIETLAQKSYPQVALLKQVKGVGTLIALTFLLTLEDAHRFRKSRDVGCYLGLQPGRRNSGQSEAQMHISKEGDPYLRTLLVQGAQHILGPFGADSDLRRWGLKLAERGGKNGKKRAIIATARKLAVLLHHLWVSGEVYEPLHNSQQSPLAIAA

SEQ ID NO: 345081 - protein, 350 aa, unidentified
MPCSTIRAVATIGIDMGKNTLHMIGLDSRGAIVLREKVSRGRISSRLANLPPCLIGIEAGMATHYVARELAALGHDVKQVPPTYAKPFRQGHKNDFRDAHAVAEAVQRPTTRFVPAKTDEQLDLQALHRVRSRLVSERTAVINQIRGFLLERGIIVRQGLRFLRQALPDILAKRTDVLSPRMMRIVADLASDWRQLDERIEVVTDEIETLAKSDSSCRRVMTVPGIGPIISSAMIAAIGSGAAFARGRDFSAWIGLVPKQMSTGDRTILGRISKRGNGYLRMLFMQAARVILLRPASWPKHGFGVWLARAAQRLHPNVLASALANKLARIAWTVLAQERSYETRLTKAAA

SEQ ID NO: 345082 - protein, 322 aa, unidentified
MAMLSFGGIDVSKDRLDVMVLPEEQCSSVPNDAAGWAKLVEQLRGFSISAIGIEASGGYERGAVRALLAAGMSVRQVNPFKLRQFARASGVLAKNDPLDARMIASFVAVMPTRPAQRQTPAAERLAEMLAVRRQLSAEKVAAENASRLLEDAMLQRLSRRRIARLAADIDMLDGHLVEVVGTDAPLAHRYRLLTSMTGVGTVLACTLIALLPELGGMTRKQVAALVGVAPYAFESGTLKGRRCIWGGRANVRQVLYMAAMSASNWNPGLKAFHDRLKAAGKKPKVTIVAVMRKMITTLNAMLRDEVVWADRLRGRHSVPTVR

SEQ ID NO: 345083 - protein, 395 aa, unidentified
MFIVGIDVAKRSHEVCMITSDGQTVQRPFSIRNNCTGYNLMLEKIRKHTNIKSQIVFAMESTAHYWLALFTRLRKDGYHVILLNPIQTSAMRDMFIRKIKTDAKDSFIIAELIRFGRYAESNVAQDRLLALKELCRNRFYLVDMAGDLKRKLIALIDRVFPEYEAQFDTIFCKSSVALLKKYPTPQRLSNAHLDKLTELLWNSSNGHFGEWKARELRELARNSFGVEDCDGAYSTLILLMLDQIQSLSGKADALEKEIFRLFQSFDTTVTTIPGVGPIIGAVILSEVGDISRFSSADKLAAYIGVDPSVNQSGEFQAAHAHMSKRGSPYLRRCIWMASQVAVQRDPMFRAYYEKKAAEGLKYMTIIGHVTRKMTAVIFAILRDHKVYEPVLPTAA

SEQ ID NO: 345084 - protein, 346 aa, unidentified
MKQVTTIGLDLAKQIFQVHGADADGFPVFNRRLRRAEVLRFFEKQRSCLVGIEACGSSHYWAREIAALGHEVRLIPPAYVKPFVKRGKTDAVDAEAISEAVTRKTMRFVPIKSVEQQTAALVLKTRGLLVRQQTQAINALRAHLSELGIVVGVGTAKVAGLVEIVRDDADARLPKAARFALSAIADQIEALARQIARLEKEIVAAAKRDKDMRRLTTIPGVGAITAASIKALIPDPAGFKSGRHLAAWLGLTPKSHSSGGKERLGKISKMGNAELRSLLVLGATSVLRHARGNNNASKWVTAILARRPYKVVAVALANKMARIIWALLTKGGTYRNMEAATNAISA

SEQ ID NO: 345085 - protein, 331 aa, unidentified
MNYCGIDVSAQELVVKVRRPEGEEAVRRFANTPSGHKALLGYLLGRRGEAIRVCLEASGNYSLDVALALAARAAIELEVVNPKAARHFAQALEQRSKNDPVDSAVLLEYAARMPFTRWQAPREQDLQLRAITRQLSVLIQDRAAWRCRLHAAQVSHSTPACVVRELRQTIAQLQRGLTRLSKAARSLVNRDPVLQRRLQLLDSPKGIGEATALAVLGELVVIGERSARELTKHAGLDVVEFSSGTSVHKKPHISHAGNAYLRKALYMSALTAAHQEPYLSAFYQRLLAAGKEKMQALVAVMRKLLHAIVGMFRHDQPYDGARLCPPVGAAR

SEQ ID NO: 345086 - protein, 323 aa, unidentified
MDCQVGVDVSKKSLAIAILAEDGFVLIEDFSNNKSGFQKIMQKIEKLGYTEPVFGCEATGVYHEVFTRTIFDAGFDIAVINPRHIKHETEAQGIKSSTDHADAKVIAYRLSRGIDRFWHPRDMGNVPLRNLTRRREQLKEQVKSEKNRRDRFNDGPCRRSLERSIEFLEKEKAGIEDEMKKLIRSDEETTVDMSLATSIPGVGFIVATSFLGRIGDATRFRSGDAIASFLGVCARQKISGSSVNRSYMSRRGDAVVRRNLYMGALSACRIDSVYQDYYQGMRERGKSHKEAIVAVMRKMIRALYAVLRDRVPFSNERYGLNIK

SEQ ID NO: 345087 - protein, 397 aa, unidentified
MIAVGIDISKAKSTVAVIDSDGTVLASPFTMAHTQPEMEAFVTYLKGLGEPTTILMEYTGHYHYPVLKKLQDEGFPVCIVNPYQMKKYGDVEIHKAKTDKKDALRIAAYALEKSYKLVPYSSMEQKYEDLKFLSRQYSQRITYVAKLKVQLIALLDQTMPGITRILPLNSRNPEKCALLLFIRRFKSFDEIQRIGKARFLASYDVLAKKASERSASSKGLSIYELAVDSITTRGEDPYIWLSQNQCVDLLSATQNAADEIISQMRNIAETIPEYKVLRAMHGVGDRLGPIILAEIGDVHRFHSGKALNSYAGNDAPPYQSGQFESRNRHISKRGSSTLRKACYEVMQALKLTKPQDDPVYLFMLKKEQEGKPFNVAKMAGVNKFLRIYYARAMELYK

SEQ ID NO: 345088 - protein, 375 aa, unidentified
MKEKLRFLGLDVHAETIAVAIAELDGEVRSLGTIPNRSESIRKLIRKLGPAENLRACYEAGPTGYIVYWQLTELGIQCEVVAPTLVPVKAGDRVKTDRRDAEKLARCYRSGDLTAVWVPDEGSEALRDLVRAREAAKQDQMRARHRLSKFLLRSGQRPPSGVRPWTRPYLIWVAQLRFTQIAQESTRQDYLHEVEHMRERVARLEQAITEAVKLASPALQQVINDLQALRGIADISAVTIAAELGQVSRFDSARQLMGYCGAVPSEDSSGRRTRRGGITKTGNAHLRRIVIEAAWSYRRPPCIWYGLRRRQESISEEAKEIAWKAQHRLHKRYMKLGAAGKDQRKIVTAVARELLGFIWAIGIRAEAISKQRIAA

SEQ ID NO: 345089 - protein, 372 aa, unidentified
MSSNDTTWVGMDADKNSIKVAALVPGQAEPVEWAEDTTAEAVRRLARRLRRQAPGELPCCYEAGPTGYALQRQLRQAGVSCTVIAPSLTPVKPGVRIKTDRRDARKLAELFRAGLLTEVHPPSESDEALRDLCRCRDDVRVDLLRARHRLSKFLLRRHCIYRQTKHHCGTRHWAWLEQLRFDDPMSQATFDSYRLAVQQLEERQRQLDAQLAEYGNREPYREPVAALRCFRGIDTVSAVCLVAELHDFRRFRSPRQLMAYVGLVPSECSSGERERRGSITKAGNRHVRRLLVEAAWHQRFRPTLSLPLRRRREGQPARVLAIADRAQERLAARYRRMSAAGKTSPKIVVALARELTGYLWAVLHPAAGDTRN

SEQ ID NO: 345090 - protein, 339 aa, unidentified
MELYSGIDLHSNNLMAAIMDEAGKRILKKRLINDPEVVLATLEPYRTELVGIVVESTYNWYWLVDALMDHGYQVHLANPSAIQQYSGLKYLDDNHDAFWLANLLRLGTLKEGYIYPKEDRPLRDLLRKRWHLVKLRTSLIISLKNILSRNFGLQMRSSRIKGESLDALVSGLPGEDNILLVVRTSKASIDFLTVQIDEVESTVLKQAKNKPFYAKLLVIPGVGKILALTIQLETGPVDRFPKVGNYASYCRKVESRWVSNEKTKGRGNAKNGNKYLAWAFSEAAAHARCFHPASRKFYNRKLNQGNAPMAHNALAHKLARAAYYIMRDNVPFEEAKMFA

SEQ ID NO: 345091 - protein, 320 aa, unidentified
MMAQNDLVVVGIDVAKDKVDACIRRFTLRQTFPNTAQGHRKLVAWLRKYQVGKAVMEASGGYEREWRNVLHNAGIEVRIVDPRRVRSFAQSAGRLAKNDPIDAEMIAWFAETFSQAPGQIPDAAREELAALAKARKALVDVKIRLQAQDEHAAPEPARKAYARALKSLAAEIDKLEAAISAKVEATPEFAERAEIIESVPGLAQATSAILIAGMPELGQVSDEVAAALIGVAPYDDDSGKRRGERYIKGGRRWVRNAIYMPCLGAATQYNPVLKAFYQRLLAKGKEPKVALVACMRKLIIILNTMLARRQKWNPGRHAMA

SEQ ID NO: 345092 - protein, 416 aa, unidentified
MTGVRVRLFVGDDWAEDHHDIEVMDQAGKVLAKKRLPEGVAGMAQLHELTGRYLGEDGGDAQVAAGIETDRGPWVAALVAAGYVVYPVNPLQASRYRERHGVSGAKSDQGDSHMLADMVRTDSHQLRPAAGDSAEVEAIKVVARAHKTLIWERTRQVQRLRAQLREYFPAALEAFEDLDAPDALELLGKAPDPARAVRLTRAQVSAALKRARRHHIADKTTAIIAALRGEQLAQPPALTAAYAAAARALIAVITTLNEQVKALEGQVGEYFGQHPDAEIYRSQPGMGAILGARVLGEFGDDPHRYTDAKARKNYASTSPITRASGKKKVVAARFIHNDRLIDALMSWAFSALNASPGARAFYDEQRAKGLEHNDTLRRLANRLVGILHGCLKTRTPYDEATAWSHRENLPQSGVAA

SEQ ID NO: 345093 - protein, 344 aa, unidentified
MSKFNLISIDLAKNVFQVGKFFHQKLQSNKAVGRKELLTILTTSPRCKVVMESCGGAHYWARKARSVGHEVVILDPRFVKAFRVGQKTDANDVIAIAAASFSPNVRPCKSLTQAQQSLQSIERMRALAEKQKRQLANQIRGLLLEFGIVIKQSECAFRQAIPEILEDSDNGLTAGLRQCLAQCYELFKAQSTLKETLNELLTGLVKQDEQCERLLALEGVGPITAVGLLISLSDTTHFTSGRNAAANVGVTPRQHSSGGKVRIGHIAKYRGEITLRSHLFLGARAVISQLKHREPKTKKEQWLKALVERRGVKCAAIALANKTVRTAYAMLKKGTSYEPSLLAN

SEQ ID NO: 345094 - protein, 409 aa, unidentified
MNVNATVNCVGIDVSKGKSTIAIMRPLGEIVRSPYEVKHTSSELKMLADILNDLEGETRIVMEYTGKYYLPIARYLYDAGFFVCVVHAKIMHDFANNSIRMIKTDKADAVKIANYGFANWESLKPFSAEDETRMLLKALNRQYNRYIKQSVSSKNSLISLLDQTFPGLNNLFPGGRKPDGRLKWVDVASKFWHCECVSNHSLQYFKKAYNKWCTENNYRGSDDKAEAIYNLAKECIPSLPKNDCTKALIQEAVRDLSNTYLSISATQKEMDRLASMLPEYPVVLGMNGVGTTLGPQIMAEIGDVRRFPKRENLIAFAGVDAPPFQSGKFESKSRHISKRGSSELRRSMFQVIGCLCQRSIESDPVYQFVIRKKIEGKPYYVCMVAGCNKFLRIYYARVKEYLNRLELQP

SEQ ID NO: 345095 - protein, 347 aa, unidentified
MNFYHSTHRHYCGIDLHARSLYVCILDQQGEVLLHKEIKARPEPLLTLLDPFRDDLVVGVECMHCWYWISDLCEEHGIHFILGHALYMKAIHGGKSKNDRIDSFKIAMLMRGGNFPMAYVYPKKMRATRDLLRRRTRIVQHGAMLKAHVVNTVSQYNLPPSKANLNNPGGRSQLTSAFSDPDVQRNVDLDLAIVDSYQHELKKLEWHLEQQAKQHDPASLTVLKTIPGVGRILALTILYEVGDIQRFESVQKFASYARLVKCKAESAGKVYGTQGNKIGNAHLKWAFSEAAVLFIRNSDKAKRYVEKLQKRMSKPKALSALAHKLGRAAYFMLKDKRVFDEERFLKG

SEQ ID NO: 345096 - protein, 369 aa, unidentified
MDKDTAYVALDDSKRTITAGILRPGEREPELRQIPNEPRLLHRLVERLSREGPVRVCYEAGVSGYDLHRQLMALKIPCDVIAPALTPRRPGQRVKTDRRDAAKLVRLYRAGELTPIHVPDEAEEAVRDLLRCRDDIREDVVRWRHRLVKFLFRHGRVYRTGTHWRQSHWTWLRAQRFDLAELQRTFDATLFAVEQAQARLAELDREIDALAERAPYREPVGWLRCFRGIDTLAAMILLAELVDFQRFRTPRELMAYVGLVPSEYSSGDTHRQGRITKTGNAHVRRILVEAAWHYRHGPRLGRAIALRIQHQPHDVVAHAWKAQQRLHRRYRHLVGHGKRAPIAIIAVARELVGFLWAAMTRVDTPGLAA

SEQ ID NO: 345097 - protein, 323 aa, unidentified
MKKTYVGIDVSKDDFVVAYRIENQTINTKTYENNKKGINTFLKTINKGFWCIMEATGVYHLSLAMAISKKDINVSVVNPLQIKRFAQTKLSRTKTDKADAILIAEYGYRMKPKLYTVPEEFVLELKQLRSLVRMLKRNNRAFLNQMHALQRRGNTSKSALKICKSVIKYNNKEIKKIEDEMENIVKEHCYDLYNQLCSIPSISRITATEFIIVSNAFKNFDTAKQFACFIGISPCINESGSSIRGYRGISRIGDAHTRSTLYMCAMMAKVCNKACKETFDRLVERGKPKKLALIAVMNKLIKQAFAIVKSGNMYSENYQPKIV

SEQ ID NO: 345098 - protein, 343 aa, unidentified
MQAVTTIGLDIAKSVFQVHGIDAEGKVLIRRQLKRRYVLAFFQKLPPCLVGIEACATSHHWSRELKALGHTVRLMPPAYVKPYVKRQKNDATDAEAICEAVTRANMRFVETKTPEQQSCLMLHRTRHLFIRQQTSVINAIRAHLAEFGIVAPVGRHGVEALLEVVADVSDNRVPEVARACLAALGAQLRRFKEQILEFDRRIMAWHRSNETSRRLDAIPGVGPALATALVASVANPKAFRSGRNFSAWIGLVPRQHSSGGKDKLGSISKQGDRYLRSLLTAGALAVIRYAKLHGTQHRPWLTALLARKPTKVAAIALANKIARMAWALMAKGERYKEPAALAA

SEQ ID NO: 345099 - protein, 343 aa, unidentified
MSITMIGLDTAKSVFQIHGVNETGKVELRRKLRRSDLIAFFEKQERCTVVMEACGAAHHWARILSGLGHTVKLIAAEAVKPFVKKGKKNDAADAAAICEAASRPDATFVPLKSVAQQGILALHTTRSLLVKQQTMLANAIRGLASEFGLVVPKGLHNLEPLVALVEADEAVPAQARQAIAELYKRFGELATGIQAFETAIVAHARSDATARRLATIPGIGPITASLIAATVVDISRFETARQFAAWLGLVPRQNSTGGKTRLGRITKAGNREIRKLLVLGATSMVGRAEGWHSAVGSWLRDILQRRPVRLVTVALANKMARIAWSVMTRNEVYRPQGGVAAKA

SEQ ID NO: 345100 - protein, 395 aa, unidentified
MSAEGEAIRSNDYRKDTTVKAPSTRPAAVLGLDVGKSSHWACLIDRDGEVLASAPVRNREAELDALFASAPAGTLVVVDQFRNIGSLAVRRARAAGLGVAYLPGLAASRAAGLFAGEAKTDERDAEVIARTALGVPGSLSGVPGRGEALEAARALSSQRDHVVACATRDKNRLRAVLLESCPALEAAVDLSDRRWLELLAGFGGAWGIARSGAEGPRAEAAGEAAAASTAPPPALVEAENRQVRFLAARISEALDEAGALEAETAALLEGDETYACLLTVPGIGPRTAAQLAVSVDIGRFPDHDHLASYCGIAPRVRSSGTSVRSVRASRRGDARLKSLLIFSCNSLVRSSGRYGEYYRACRARGMGHGRALKAVARKRLRAIYAVMRDRVPYRE

SEQ ID NO: 345101 - protein, 330 aa, unidentified
MKAYKQFFGVDILKKTIDVTLLQNNQSLHRQFSNDETGMQQLLSWLQELKIKPADTLFCMEATGLYCFMLTQFLVDNEIDTWIEHAALIKKSTPLARGKNDKVDSLRIATYASKNLECLRLWKPISSALEKIKHLATLRERIVETQKKLVVPIKEFEDVGNTAMAKMLTKTIKKSITALEADLKDIEKQILKIIEEDTTLTKKYNNAISVVGIGFVTAINLMVHTNGFTQMNDVRKLACYCGVAPFEYSSGSSIRGKTKVHFMANKKLKSNLHMASLTAIKLDDDIKRYYERKCAEGKNKMSVLNAVRNKLLARVLACVNNDRTYVNKAA

SEQ ID NO: 345102 - protein, 342 aa, unidentified
MFYIGCDVSEKSSYVYVTDGKGRKVESQEIPTDKDGYRQYFKQWINKSVKVAVEAGGHSRWIHDTLKKLGISVYIVNPNKVKLIAKNKKKTDKVDAVFLAKLLRIDELPERVYVAEGDSRELRDLLRSRHQLVTSATCLMNHLRGMLRQEGIKLKAKAFNDESTFSRLLTNKSVPKHLHPIITSYEKTITELRKQRGALDEVIAEYENKDIELLKSVPGIGEVASKTTYAAISTVKRFKRAKQLTSYCGLVPSVFSSGERADYGHITREGRSEVRHVAVQSVRAILRSTNSESKPLRKWYERIAKRRGSKTAVVALARKLIEIIFYVLRDRRPYNAQLLHVH

SEQ ID NO: 345103 - protein, 414 aa, unidentified
MKKNNNSSTKSEPCSKQPKSRVSVQRDSKEVMAELLGKLTEKLNPKAISASAGKEKQGLRPNLNRLTVGVDLGDQWSVYCILGPEGETLIEGRLPMTKQTVAEFFQGLPAARVVIEVGTHSAWVQEVISSYGHEVLVANPRLMEGSKRRKRKNDRIDANKLARLGRMDPQSLHPIQHRSPEVRQDLVMLRARDALVAVRTELINSTRGLVKSVGARLPTCASPSFSKKVEESLPVEIREALLPLVRLVAAISDSIQEYDEQVEKLGSEKYGHTKLVRQVTGVGPITALAYVLTLENPKRFAKSRDVGPYLGLVPNQEDSGDIQPQLGISKSGDTMLRRLLVGSAQYILGPFGPDTDLRRYGLRLCERGGKNAKKRAAVAVARKLAVLLHHLWVSGEVYEPLRQGLSATPTPAAA

SEQ ID NO: 345104 - protein, 332 aa, unidentified
MLTTKIRIPVKGIAMKHYVGIDVSKSKLDIYLNGKNFSVENNLAGLSILIEKLNEQISQGHEIGLVLCEASGGYEKLLVDRMRAENFPVHLAHANKIRSFAKTKGLLAKTDKIDAELISEYGRVMNLKADIKLLSESAEILGELLKRREQLIDHRQADKNRLDKERLPFVIQSIKSHIKWLEKEIEQIDKQIEDVQIQEEFKQQIELLISVPGIGKLTASYLVSFLPELGKFNHKQIAALVGIAPFNRDSGTLRGKRFIQGGRAIVRRILFMAALASIRCYHSDLRTFYQQLRARGKAGKIAIVAVMRKLLIVLNSIVSRQTPWVVKSAISA

SEQ ID NO: 345105 - protein, 473 aa, unidentified
MGKGSGISRSDRRRNARRGRLRDLVPRDGAVLGIDLGDQKQALALVDHDMRVLWRRSPRCAAHQLGGPIADAVIAAAAAGFSRVTVACEPTGPRWMQVQRLCREAGVALVCVQPLVSHIAREQEDYTGHKRDEPDALLIARLAAELHCYIPEELDETWACLRQLGRRRAQLITTATAAVQRIRDCLSVAWPSAVTAACDPFASMTWLAALEVVTSRCGSDPARLAAGLGEEEFCALVRGASPGWVTTRPDRRIARKVLALAGDPDAVPVMRRALLRRVRDELGDLQRARRQLKETEADMGALLAGLGLSRLGDVPGLTVTGAAAILGEAGDPRRYETSSSMVKHAGLSPSDNASGAFEGLSRISRRGRPSLRLAAWRAVFPMLIHNPVMKAKYEALVAGAEESARAAAGSARPGSARAGQAARTARSARAKARVACAASLLRWIYHMTVHGADWDPVAASGGHLTPQEAQKAA

SEQ ID NO: 345106 - protein, 400 aa, unidentified
MLLFFEVITMIFDGIDVAKDTHYAAVSDDSGAVLVKPFAFQNNAEGFCLLLKKLSEFDRSKLLIGLESTGIYSENLICFLYESGFRLAVINPIQTATLRKTAIRKTKTDKVDTMLIIKSLMVNSYRLYSQRDADSLKLRTLCRFRQNLKKSKARLKIQLAGYVNLVFPEFGKFFKSGIHIAASYALLKKYSSPKEIAALRTSTLCTLLSKASHGRFGKDTAEALKSLALSSVGVKNPYISIQIAQTIAQIELLEQQIKDLNSAIEEAMESINSVLMTVPGIGAVNAACILGEIGDIKRFSKPCKLLAYAGLDPTVRQSGQFTAKSTRMSKRGSALLRFALINSAWQLTLNDTTFKAYYDLKRSQGLNHYGALGHVAHKLTRVIFKLLTSDTPFNPAKLVA

SEQ ID NO: 345107 - protein, 342 aa, unidentified
MQWTVAIGIDTHKHAHVAVALDRLGAQLDAFEGPATSAGYLALYRWAHELGEPAFALEGTGSYGAGLARFLQAAGCSVNECERPKRAERRRGKNDLIDALIAARRLLTGERLGVPRGLSGPREDLRLLLLERRGVVRARTAALNQLQAVVVTAPARLRSRLGDGTSGQLARAVAQLRPREGEQAVVRGVLRRLGRRALSLDAELAELDRELEAIVSALVPELIAECGVGPVCAAQLVVSSGDPARMASEASFAALAGTSPVDASSGQQQRHRLNRGGDRQLNRALHVIALTRVRYHGETAAYHQRLLASGKTTREARRCVKRMLARHFHQKLSSLPALALTT

SEQ ID NO: 345108 - protein, 332 aa, unidentified
MSSFVGIDIGATAFEVVIRKNDKNGAVKSYQQTPKDHEKLAAQLLKLKPACVVMEATGIYYLNLAVVLFNSGLKVSVINPNSFNHFAKLTLTHSKTDGIDAALLAEYAQRMTPRLWTAPDPKLLSLRDIGRQINRLVGRRTEAKNNLHALQAKDSTYQPLIDDELEGIEYLELRIERMRNMALEIITNNENLKQKLENLTAAVGIGTNSAIMIICELELLPEHLKSSQISRFAGLDVRLTQSGTSINKPGRLSKAGNSYLRTALFMPALSAATHDANVRAFYQSLIQRGKKKMQALCAVMRKMLTGIWACLKLNLPFDSSKLFSEEHKKACA

SEQ ID NO: 345109 - protein, 322 aa, unidentified
MAMHSFAGIDVSKDRLDVMVLPEEQCSSVSNDPTGWAKLVEQLRGSSIAAIGLEASGGYERGVMRSLLAAGMSVRQVNPFKLRQFAKASGVLAKNDPLDARMIASFVAIMPTRPAQPRAPALERLVEMLAVRRQLSAEKVAAENASRLLENAMLQRLSRRRIARLAADIDMLDERLVEIVVADAALAHRYRLLTSMPGVGPVLACTLIALLPELGRMSRKQVAALVGVAPYAFESGKLKGKRCVWGGRAPIRHVLFMAAMSASNWNPLLKRFHDRLAATGKLPKVVIVAVMRKMITTLNAMVRDDVVWADRHRGQHTVPTAR

SEQ ID NO: 345110 - protein, 372 aa, unidentified
MRFYTQQHRFYCGIDLHARSMHVCVLDQAGAVLFDRNLPARPEAFLRAIAPFREDLIVGVECMFAWYWVADLCQAEDIPFALGHALYMKAIHGGKAKNDRIDAGKIARLLRGGTFPVAYAYPKGMRETRDLLRRRTYLVRRRAELLTHLQILNAQYNLAPFPKKLSFAANRTAMDIAQRFADPSVQKSAAVNLDLIDRLDELIGELELYLVRTAKVDDVQTYHRLQTIPGVGKVLALILLYEMHDVGRFGDAGPFLSYARLVRCLHESAGKKLGCGGKKIGNAHLRWAFAEAACLFLRASERAKRWKQQQAARRGEGKALAILAAKLGRAVYRMLRKREAFDEGRFWQGGPGRTGTGSSSLSRTEEACHAGD

SEQ ID NO: 345111 - protein, 365 aa, unidentified
MKKVSTMRAGGKDIFKGQLTIGLDLGDRSSAYCVLNETGEIVLEQKVATTPEAMNQVFGSMPRCRIAMETGTHSPWVSRLLAALGHEVIVGHAQKIRLITKSRRKDDRLDARTLARLARIDPALLSPVKHRSAQAQLHLAEIRARAVLVSARTALINAARGLAKSYGERLQRCHTQQVRRETANGLSAGLREALQPLLQEVESLNERIQEYDRRIAKMTNERYPETALLKQVKGVGDLIAATYVLTIEDPHRFRKSRDAGCFVGLQPGRRNSGESEPQLHISKEGDEYLRTLLVQGAHYILGPFGEDSDLRRWGMKLAVRGGKTGKKRAVVAVARKLAVLLHRLWVSGEVYEPLRNTQKALSTAA

SEQ ID NO: 345112 - protein, 324 aa, unidentified
MNVIGIDVSKAKLDCAWLREGNKLKAKTFPNVVVGWKELLEWPLNNTGLAVGQLHFVMEATGVYHERLATWLYGAGAKVSVVNPAQVKFYAQGLGVRTKNDKKDSVVLARYGLEEKPKPWQPETQEIRTLKALIARLDGVEKDLQRERNRQEKALASEAPGEVLHSLAQMIGLLASEQQRLEGLIEEHINKHDKLKANKALLGSIPGVGKAIATRMLMVIGSRQFDSASQCSAYLGLVPVQHESGSSVKGRPRLSKAGNPAIRAKPYMAAVVATRYNPDIKAQYGRLTGNGKSKMSALGAAMRKLVQICFGVLKHQQPYQPQVG

SEQ ID NO: 345113 - protein, 370 aa, unidentified
MRHGSTLYVGLDVPKDSIAVAYATTDGPSDPVHVGAIGTRQCDIDALVRTMQSKSAPLVFIYEAGPCGYWLYRDLTRKALTCVVVAPSLIPRKPGDRVKTDKRDAVTLARLARSGDLTPVYVPDVPDEAIRDLARAREDALRDLNTGRFRLKALLLRNDIRYVGRANWGPEHVRWLARLVLPTPAQQIVFQEYVRTVTERTELLHRLEAELLEQAKPWRLYPVVDALQALRGVQFTVAITTIAELGDLTRFDNPRQLMSYLGLTPSEYSSGDRRRLGGITKAGNGHARRVLIEAAKAYRHRAKVSEPIQARQQHLPAPIRDIAWRAQVRLCGRYRKLLARGKHPNTIAAAVARELAAFMWAIARTQAVSA

SEQ ID NO: 345114 - protein, 326 aa, unidentified
MDVLGIDLAKLTFDATLLTESGQQHYQSFPNTSEGFSQLQTWFTQHGVTQLHACMEATNIYYEALATFLYAAGHIVSVVNPARIKGYAQATMQRNKTDKLDNAVIAFFCRTHRPNAWQPLSDEHRRLRALVRHREDLLQTQLQQQNRLRDTTDSLVVASLQTVLETLGSQLKAVEQAIKEHLAAHAELRANLELLTTIVGIGVITAAKLLAEFGDIETYESAKAAAADAGLTPSHFESGTSVRRRPRLSKMGKAGIRGALYWPAITAMRRCAGCKAYAERLAARGKAKKVIICAVMRILVHIIYGVLKHRTPYDPGKVFGPIATST

SEQ ID NO: 345115 - protein, 348 aa, unidentified
MAMPTLPRRITGGVDTHLDVHVVSALDELGTLLGVESFPTTPAGYRTTLRWLRSFGHVELVGVEGTGSYGAGLTRHLLGEGIPVVEVDRPNRQRRRKRGKSDPQDAITAARAAQSGDALGAAKTRNGSVEAIRVLRLVRMSARRNRNRTLNQMRSIVSTAPDQLREQFRGVTGHQLVKGAAKLRPGGRHDVTSVTKLALRTLARRIIAIDEEMAEVEAILNPMVETAAPELVALVGVGAECASALLVAAGDNPERLRNEATFAHLCGAAPLDASSGKQERHRLNRGGDRQANAALWRIVMTRIVYDPRTKTYINRRMREGLTKTEAMRCLKRYVAREVFAHLPRERLA

SEQ ID NO: 345116 - protein, 340 aa, unidentified
MEHILGIDLHSDNGYYGIIEPDGKRVFKKRLPNDLPTVLSTLEPYKETITSIIVESTYNWYWLVDGLMDNGYNDRVQLANPAGFKPYEGLKHADDKTDTFFLTELKRLGILPVGYIYPKEERPVRDLLRRRMMLVRQRTSHILSFQSLITRQTGTNMSCNTIKGLQEDYIEELLDEDHLILAGETNISVIHFLTEKIRLLERAVLRRIKLKPAHKKLLTAPGIGKILALTIMLETGDIRRFASAGNYTSYCRCVKSKRMSNSKRKGEGNRKNGNKYLEWAYVEAANFAKRFCPEAKRYYQRKMAKTNQIVATKALASKLSKACYFIMRDQEVFKTEKIFG

SEQ ID NO: 345117 - protein, 372 aa, unidentified
MKNYYVGLDVHSRESVFVVQDDAGVILARGAVPTTASGLLQLRDSCGLPAGTSVALETGTSAFFVARELARLELKPVVIDAHEVRRKAQRPEQKSDTRDALELCEGLRRGFYRSVVHVPSPAISDLRTALSRRRHFIRIQTAEVNAVKRLMRGAGRSSGGRGSLRTDTHWQGLLGGDVVPAELKEHVRHHYAVWRQAAERVRALDLSLGDSARERRAAVKRLETVPGVGPIVALTAIAVFAEVSRFESAKHAASYAGLVPSTFQSGERDAHGHITKRGSAELRAMLCEAAHHARRSAHPLHPHFARVCTRRGYKTAVVAVAHRLCRILFAMLRDGTDFSVSRTGVEQGDFKRTTTYSYRLRPKPAGRLPVAG

SEQ ID NO: 345118 - protein, 343 aa, unidentified
MAIKVLGIDIAKNTFQLHGTDDAGKAVLKKRLPRNRLSPYVANLHPCTIVMETCGGANYWARVFQQSGHTVKLISPQFVKPFVKTNKNDANDAEAIVEAASRPSMHFVPIKRPEQQDIQSIHRVRSRIVKNRTALINEIRGLCLEYGVIIAPGAARVKQSLCAIVADSGNGLTPSSRDCMQDLYEELVDVEARLKKLDARNRQLCRQNDSCRRILSIPGVGELTATAIVAAVADAQEFKNGRHMSAWLGLVPRQSSSGDKRVLLGISKRGDRYLRTLLIHGARAALSHYKTTDHDYGLWLARKKATLSFNKAAVALANKNARIIWSLLNSGEEFNYGVQTAAA

SEQ ID NO: 345119 - protein, 361 aa, unidentified
MKRSSKYVGLDVHQATTVSTVRDDAGRVLARTVVPTEAEALREFFRGMRGPIHVALEEGTQAQWLHDLLVPVVHRVVVCDRRGKSRQGNKGDQPDADELSDLLRCGRLRAVYHETGDRAMLKELARTYTNLVEDSTRVMQRLKALFRARGIRTSGRSVYQREQRADWLRQLPDAGVRFRATVLYQELELLQELRPNAKAALLTEARRDSAWRVLRTIPYLGPVRVAMLLATVQTPWRFRTKRNLWAYAGLAVVTHTTAEYELDGQRRVRRRRRAPLTRGLNRNHNRVMKDVFKAAATAAATRVGPLQDWYHGLLTRGMREELARVTLARKLAAITLHLWKRGERFDPTQLTVQAVHAHQAR

SEQ ID NO: 345120 - protein, 355 aa, unidentified
MTSVKYIGLDVHKESISICVRNSVGKVVMESVIETKASTILQFIDGLRGDLRVTFEEGTWAAWLYDLLKPRVSGVEVCNPRKNALLKDGSKSDRIDANKLSEQLYMNNIKSVYHGEHGLRTLKELARSYLTISKDLTRVMNRVKAVYRSWAIPCAGKEVYAPRYRAEWLGKISESGVRRRAEFYYQQLDVLRLLRQEVRRDLLLEVKKHKAWKLLRQIPGIGPIRAAVLMAVMQTPHRFRTKRQLWNYCGLGLETHDSGEYRAVKGQLQRAKKQATVRGLNEDHNHDLKDIFKGAAMRASTAAGPLHDFYENLLAKGRKPTMARLTLARKIAAITLIVWKKEVRFDANYLKPQAA

SEQ ID NO: 345121 - protein, 356 aa, unidentified
MNGNEQTRSGHVVIGVDTHKHVHVAAAMDTIGGILDTLTIPTDTGGFQQLSDWAASFGQILAFGVEGTGSYGATLASFLRRSGHKVVEAGRPDRRLRRMNGKSDTLDAENAARAVLAGFATATPKSADGEAEMIRRLKIAHDQAVEQRTSAMITMKAMLVHAPDTLRRETSGKTHVALARHLVGLRPRGLHDPEDALRHALRTLAKRWQYLNSEAKELTEMIGALVCRAAPQLVESFGIGVDTAAEILVVVGDNPERIKSEAALAKLAGIAPVPTGSGMTGGRHRINHGGHRQLNAAIYRTVIVRMRFHRPTIDYVARRTAEGKTKREIIPCLKRYVIREIWHLLRPAPRTALTAS

SEQ ID NO: 345122 - protein, 376 aa, unidentified
MSSPTHRPESTASVVLYVALELSTKEWVLTMSTAPGAKRQRARIRPGDQATLARVLAEAKSRSGVGPDAPVRSCYEAGRDGFWPHRLLVRLGVRNLVVDSSSIEVSRRARQAKTDRVDGEKLLRMLLRYWGGERDLWHVVHVPTREVEDARHASRALTTLQGERTRYRNRIHSLLALHGVRRLRLDAQFPERLVKATDWAGEPLPPGVQARALATWRLLEAVEAERQRARRAERHQVRASATPSVARQLAQLRAIAARSATILADELFSRTLRNRRQVGALTGLVSAPYDSGTTRIDQGLARSGLPAVRRVAVEIAWAWLRYQPGSALTHWYHQRFGTGGAVTRRIGIVALARRVIIALWRYVEYGIVPEGALLKA

SEQ ID NO: 345123 - protein, 313 aa, unidentified
MKYIGIDMSKDTFHACFDDGKVEVFKNTRDGIQTFERVGKGKEHKKKETIIGIEATGVYHHLFCLTVSKNGWTVMIINPLLVSQMIRDGLRMVKNDVKDARIIREAVMQGKGYRFTDTSEILALKALVSERADLVEMRGDLKRRQHAHEMREVACDTSLHDSYGTTFVTLTKEIKIIEKQMKCMVPETQELLRSIPGIGITASALLVAFVGDIKRFDHPDKLVAYIGIDPRVKQSGTSIHSKGPITKRGNALLRHVLYQSAFIAKRHNLVFGRYYAKKKGEGKHHTSVLCALERKLIHTIWAVWKRGTPFEER

SEQ ID NO: 345124 - protein, 341 aa, unidentified
MFIIGCDYHPSVQQIAWVETETGECGELRLKHIEPAEQFYRELKKKGVSVRVGMEATGHSRWFERLLGELNYELWVGDPAQIRAKRVRKQRNDRFDAQHILKLMLENNFPGIWVPTPENRDVRQLVLHRHRLVGMRTRVMNQLQAIAMNEGIRRKRGLWTEKGRAQLESLQLPPWSNRRRQELLQLLDRFDPSIDQLSQAIEKEAERMPEVQRLQTHPGVGPITALAFVLVLGTPDRFGCGKQVASYLGLIPCEDSSSDSWRLGHISKQGNALLRFLLGQAAQSVARSDEQWRHQYAHIAMRRNKAIAKVAMARKLAVRLYWMWRRGWDYQQCKKFGSHVG

SEQ ID NO: 345125 - protein, 386 aa, unidentified
MQRPNDLSKSLTVLRQDSTLIAVIEMSLSSWLVAGIVPGVERQPLKKLAIDESALLKLLHRWREEAEKAGHEIERIAVAFEAGRDGFWLARWLRTRGIEAHVIHASSVAVSREHRRAKTDRLDTELLKRAFLGWLRGERDHCKMVAIPTMEDEDAKRPNRERESLVGEQTRIVNRMKAALSRLGIRGFNPKIKKAAERLEHLRTPEDKPIPPNTLAELRRDMERRRLVSEQIRQIENARLERIEHAPSHGPHAMVRLLARVIGVGIETADMLVQEVLSRNMRDRRAIARYAGLTGSPDESGTRRREKGLARSGNVRVRRGMIQLAWRFLMFQKDSALAQWFRARTENARGTRKTMIVALARKLLIALWRLVREGVVPDGIVLRPAQ

SEQ ID NO: 345126 - protein, 355 aa, unidentified
MNLKERGMKKILKEVLGVDVAQKELVVSLGRMDTDLATEIYAHKVFKNTQAGMMALLKWVKLLANKDVRVGFVMEAMGVYHERFAYYLDEKGYDVSIVLPNKMSNYFRTLDIKTITDKTCSEGIARFGLERKLDLWSRPKKVYRELKQLTRERDQIVEERVMVKNQLHAEKTEAVPNKRSVGRLNERIKFLNRQEREIKNDIDKTINGEEDLKQAVEKACSIPGVGRLTAVTVLAETNGFELIRNKKQLASYAGLDVKEKMSGTSVKGKAKISKRGNRHLRKALYLPSLSSVKYNSAHKDLYIRIVSQCGIKMKGLVAVQRKMLELIYVIHKNKTTYQDDYEQKRANDTMMADAL

SEQ ID NO: 345127 - protein, 342 aa, unidentified
MKEFIRIGVDLGKRYIQIHALESKDGRAVKRKLPRSKFLELFADVAPCLIGMEACGSAHYWARQLRAMGHDVRLMPPAYVKAYVKRGKNDAVDAAACCEGVSRPDMRFVPVKSEEQQATLTLHRTRELLVRQRTMCVNALRGHLTEFGLVAAKGIGRAGELIDMAGNDAALPEIAKSVVKIFAGQLAAIQASIAALEKEIAGVHAQSPMSQLLAGIPGVGKIIASAIVASVPDPQVFKSARDFAAWLGLVPRQNSTGGKTKLGPITKKGDRYLRKLLVLGATSALRVAGKRKGALRDWLAALLEKKKSARLASVALANKLARIIWAMMTSGETFRKDMFEPA

SEQ ID NO: 345128 - protein, 377 aa, unidentified
MSKLRFVGLDVHAETVAVAVAEADGEVRSLGTIPNRPESVRKLIGKLGPVSKLKCCYEAGPTGYVLYWQLTGMGVACEVIAPSLVPVKAGDRVKTDRRDAEKLARCHRAGELTPVWVPDAAHEALRDLVRAREAAKKDQLRDRHRLGKFLLRHGKRPTDAGQAWTKKYVDWIRIHARFEEPALEATVAHYLQEVDHAAERIVKLDQAIDEAVKQAAPEVRAVIEALQALRGVAQTTAATVVCELGSLSRFENPRQLMAYSGLVPREHSSGGKVQRGAITKTGNAHLRRVLVESAWSYQHRPSAQGRLLRRQKPLDLDDEVKRISWKAQQRLYKRFTALAARGKAKGQIVTALARELLGFLWNIARHTEARFALAKAA

SEQ ID NO: 345129 - protein, 420 aa, unidentified
MAFKILRKNCCGLDIHKTWIFACIGITDSNSRTEYKQARFSSFSKGLQDLADWLAKYSCSDVCMESTGKYWIPVFNVLEKTCWVTLAHPKYTKPQKGNKTDRKDAKWICDLYMCGMVKPSFIPPPDIRQLRDLMRYRMKLTNMLTGEKNRAQNCLTVSNLKLDDVFSDVFGKSSRSIIQHILDHPGQQFDVAPFIDRRCKHPVEEIQAAVDGAVSREQAAKLKECLLHIDQLNEHREHIEAEILRLAEPYPHQLELIRTVPGFSAAPLTAVALISEISVDMPAFPSAKHLVSWAGCCPRNDQSNKKVKSTRISRAGCYLKPLLVQVANAVIKSDKYPECKERYRRIKARRGHKKAIIAVCRMLLTAIWNVLSKLEPYSAKGYLADKITEHSVVISKAQGLELLRKRGYIFTDEVNIPAVT

SEQ ID NO: 345130 - protein, 428 aa, unidentified
MASTTDPISPATWVAIDVAKGVNVALIEHSDGKQQRLRFAHCREDYDRLVDLLGRLPAPCRVAIEPTADYHRTLAFCLLQNGFGVVFVSSVACARMREAAFNSWDKNDPKDAQVILRLLKLGMTQHYCDPLITQIHDLQELSKTYHHIAVARTRLQHILITHYLTLYFPEFERFWATQRNEWFIRFLIRFPTPASVRAVDFASFREVVSDLMGRRVHKQAKIEEIYALAEHSIGLPVPERSAAAATFRMQLERYLELCRARGELEQRAEQLLHDKADYQQIRSIPGIGALTALVILAEAGDLRRFGHHRQFLKFCGLDLAKCQSGASRSRERLSKRGNARLRCALWQAAMTAARMRENPFGEKYRRYVASAPNDADLRRKARTAVAAKMARVIHALVKSNCVYQPRFEFGLPSGSTPLNRAVGAFGTS

SEQ ID NO: 345131 - protein, 389 aa, unidentified
MKKTKHTPTPTSPEQTEAKAEVIKLGIDIHQRQYVVVQQVDGEAPKSPQKFTPEAFLRQAAKLKQGAKRVVSCYEAGCFGYVLHRQLVSMGVENQVVRPRNWDEYGSKVKTDGRDARELCSCLDRWLAGNKHALSIVRVPTEEQERSRSLSRQRDTLAKEQKRLQNVGVSNGRYYGFDLTMSWWKPCRFRKLETELPDWFLDIVRPIQEILVVIASQLKAATAREECKANRKLPVGLGALTASVLDQEFRDYTRFSNRREVASFTGLCPSEQSSGGTRRQGSINKHGNPRVRSKLIELGWRLLQFQKDYEPVRQWREKLAEKPRGKASKKKTVVAIARRFAVDWWRINTERIRPEDVGLRVDYPTAYATRALREGRTVKHHDTPTNATA

SEQ ID NO: 345132 - protein, 336 aa, unidentified
MSILKQIVGIDIAMDTFNVRFGTIDPKHHIVLTPDQSFDNVLSGFKKLLKWTRSADISPDLPLIFVMEATGIYYQQLAYFLVENHCSVAVVLPNKIKNYCKSLTSKSKTDPLDSAAITRFGLERELNLWTPPTETMKAIQALTREYHALKETITQIKNQRHALKYSFQPLRSTLKRKQQTIALLEKQLAQIEQELHELIDTDTILCERVPNICTAKGIGFMTVVSVLAETQCFKLVTKQKQLASYAGYDVVFNDSGLKRGKTSISKKGNKFLRHAVFMPALSAVRHNPQMKALYQRLIAKGKNKKLALIAVARKLLLLIYTLWKNNVPYDPECGVR

SEQ ID NO: 345133 - protein, 408 aa, unidentified
MSEEPDVVYVGLDWAAVVHAVCVMSATGKVLAQFTIEHTADGIASLIRRLAKYGQPEVIQIGIERPNGRLVDLLLEAGHPVIPVSPNAIKTWREGEVISGAKSDAGDALVIAEYLRLRHHRLHPVQPYSSQTKALRTVVRTRDDIVDMRVRATNQLDALLDAYWPGAKAIFADTESPISLAFLRRYPTPTAAAHLGDKRLAAFLTKHGYSGRRPASQLLARLQRAPKGTSDPIVTKAVHDAVLALVTVLEALNTAGKNLDRSVVAHLGEHPDAEVFTSLPRSGQINAAQVLAEWGDSRAAYDGPDSVAALAGVTPVTKASGKQHAVHFRWACNKRFRQAITTFADNSRHQSPWAASIYANARARGHDHPHAIRILARAWIRVIYRCWHEHQPYNPNLHGGAQKVANAA

SEQ ID NO: 345134 - protein, 362 aa, unidentified
MSVYAGIDVHRKRSQVAVIDADGEVLVNRNVPNGVEPILSVIGGLPAGTPAAFEAAFGWGWLVELLEDYGSGPHLVHPLQCKAIASARLKNDKAGAAILAQLLRAGLLPEAWIAPPPVRQLRALLRHRAQLVRLRTLLRNRIHAVLAGHGHDRPQGCWSGPGRDWLASLPLPAVSREVVEDDLALIDARQQPIDRLDWQVHQRAKAEPAVKVLTQLPGVGPFTAMAILAETGDISRFGPARKLAAWAGLTPTVRGPDRTVRHGHISKQGPAWLRWILCEAAQTAKRHPDFAATYQAIARRRGKKIATTAIARKLLARAYHLLTDAQITAPQALTPAVPTDREGVATPRASSQNRMSRPCRAR

SEQ ID NO: 345135 - protein, 319 aa, unidentified
MGKISQPRIVGIDVSRDWLDIHCLPKGKRVRLANNPEGHEQVAQLAIDLGALVCFEATGGQEWRLWSTLDAAGIATRQLPPAQIKAFAASRGTRAKTDRIDAELIARFMAFRPDAGRVLPHEKLRLLRALTSKRGQVVETRKRLLAQMKAHGKLGSADMFGAMDAELKGLLDHQIAELEMRIEQIMASDDNLAATAGILRSVPGIGPVASTMLIAEMPELGQLSGEQAAALAGLAPIAHDSGAMRGKRAIGRGRRQLRHVMFQAALVASHHNPILKPFADRLRAAGKPHKVVVTAVARTLVTIANALCKSRLKRTNQAA

SEQ ID NO: 345136 - protein, 443 aa, unidentified
MSKKRISHIRGERGLAFADLIRGIPSEQILCVSLDISKYFHVVMMHNGLGEIVRPAFDIDFYQSGFDQLCQAIDQAKTETQAQVVLVGMEPTSHYFENLARHLLQQPQPVTLINSFAVKKNRDQQLMHREKTDPIDCGAIGDLLRRGEGTPYKPATGVYLQLQQLDRVRLSKVKIEGMLKNQIIAHLDRIFPGLVILGKGAQERYTPLFQVNFWHCKTLQYLLRVCPNPHQLVQMTPEQLVQAFRAQNYRLGPKSAAKIIARAQIVLLPEPDLVAIRCELLQHDLRLLESVQAHIAELELRLSDLVAQTPFQVWVQLKGLSAVQVASLAAAIGDPNNYTHAGQIFRRSGLVSGRNDSGNRQRKGKGNSITKVGDIYLRRALMNAVTTLLLHQPVLGRYHRKLCRKKHPGVARVATARKLVAILWATLRDQYPVSLISCKGTMM

SEQ ID NO: 345137 - protein, 393 aa, unidentified
MICVGIDVAKDKHDCFILSSEGEVLADVFTISNNAEGFDTLLQTIHRCARPEDKIKVGLEATGHYSYNILGFLLDKGLHTFVINPLHTNLYRKSLSLRKTKTDRVDARTIAAMLMSDVDLKSYTDTAYHNEELKSLTRYRFDKVKERAKLKQSVSRLVTILFPELEKLVPTLHMASVYALLSEFPGAKQIARAHLTHLKALLNDASKGRYGRDMATELRDAARCSVGSVMPAKSLELQHTIRLIRELNTEIEDIESAIQTIMEEMQSPITTIPGIGFRMGAMSLAEIGDFSRFDSPDKILAYAGMSPSTYQSGQLSLSGTYSHMEKRGSKYLRYALYNATKYVCLWDSTFEAYLAKKRAEGKHYNVALSHAAKKLVRLIYAMEKSRQPYNSVA

SEQ ID NO: 345138 - protein, 357 aa, unidentified
MNFIGIDLHKKTISVCVVNQERKVLKRRTLSCAEASKIGAFFREWGEFRAVVEATASYEWLWQLLEPLAQRLVLAHPGKLRVIAESKNKSDKLDAQVLAEFLALDMIPEAYRPTPRQRQHRTLVRQRVFVKKNLTRVRNKIRRVLSNYNADRPDLFTRAGLTYLQEAKKKVSAADQFVLDQLLEEWHYHRRQFQAVGRQLQAFARQAPLKEKEIRAVLRSMPSVGPTTVEVVLSEIGDIERFRSNKRVVAYAGLAPGQRESAGRKKELGITKQGSGLLRWVLVQTAWRTVRCSLRWRSVYENLKKRRGSKKAIVAVARRLLTVMAALWRTGQRYRHAAQDGAPTVPKARRACRAAQA

SEQ ID NO: 345139 - protein, 377 aa, unidentified
MKRIKFVGLDVHAETISVAVAEQDGEIRSLGMIPNREESIRKLVKKLGRVEELRFCYEAGPTGYALYWQLTRMGAKCEVVAPTLVPVKAGDRVKTDRRDALKLARNYRAGELTAVWVPDAAHEALRDLVRAREAAKQDELRARHRLSKFLLRHGQRSPMGVKAWTMKYLEWMKREVHFEQMAQEATLLDYLHEVEHGAARIARLDSAITEAVKSAPPQMRAVIEALQALRGIAHVSAVTVVAELGELSRFARARQLMAYGGIVPSEDSSGERTRRGNITKTGNAHLRRVVVEAAWAYRHRPSVGAKLRKRQAHVSEEVKEISWKAQQRLHQRYRKLLAKGKNKGVVMTAVGRELLGFIWAIGIKAETAQKEPLRRAA

SEQ ID NO: 345140 - protein, 367 aa, unidentified
MENVIMVGCDAHSENLLLMCALGKGAADKVEYSNTKARRKALIAHLKSQATREGATRIVMAYEASSLGFGLYDELKEAGIECHVLAPTKMESSPQQRKTKTDERDAKKILEIIRGHILAGNEMPSVWVPDPETRDDREVVRARLDVADKLSAVKIQIQSLLKRNSLRRPEKLKSAWTQKHVAWLEGLTHNDSGLGFGTVEALKTLLHQKTALEMEVAQLDEALIALSETLRYAEPVRALLKEYGVGLMAALVFLAELGDLSRFSNRREIGAYLGVVPSSYESGENSDKKGHITRQGPGRIRKVLCQSAWAIIRGGNAEERSAYARVVGRNPKHKKIGVVALMRRLGIRMWHIGLEAQKKSRCFKVAA

SEQ ID NO: 345141 - protein, 366 aa, unidentified
MGKSSTVFVGMDVHKESIELATADEGEARHYARIGGEAVSVDRAVRKLRSVHRELVFVYEAGPCGFWIYRRLRAQGLACMVVSPSMTPRRAGDRVKTDRRDCLMLARLARAGELDPIYVPDAKDEAMRDLVRTREDAVCMQRQSRQRLQALLLRNEIRYVGKTAWSAAHRRWIAGLKLPDAAQQIAFEEYVTAVEEAGARLERLAQAIGAQLEHWRWRPRVCALQALRGISVIHAVRIVAELGDFTRFVSPRKLMGYLGMIPSEDSSGSRRRQGSITKAGNSSVRRALVEAAWAYAHPARVSWVIARRQTGLAKSTTDLAWKAQLRLCARFRRLAARGLNRNKIVVAIARELSGFVWAIGQSVKPT

SEQ ID NO: 345142 - protein, 355 aa, unidentified
MSQEKYIGMDVHQATISVAVTDSRGKLIMESILETKAATILEFLQGLHGSLSVTFEEGTSAAWLHDLLKPHVTRLVVCDPRKNALLKDGSKSDRIDARKLAELLRGNQLTSVYHGEHGMRTLKELGRSYVTITKDLARVMSRIKALYRSWAIPCSGTSVYAPRHRAEWLGKIPEPGVRLRAERLYQQLDQLQPVRQQARRDLLTESRKHHAVKLLRQIPSIGPIRAALLVAQLQTPHRFRTKRQLWAYSGFALETHDSGEYRYVRGKLQRNRERMTVRGLSNNHNPDVKNLFKGAAISASTHPGPLYDFYVALLEKGMRPTMARLTLARKIASITLSIWKKGVDFDATQLHRQEA

SEQ ID NO: 345143 - protein, 420 aa, unidentified
MKAKKKAKLDLVDDNTLVVGIDIGKRNHYCRFINVRGYEIGKGFSFSNNRDGMEKAISKIEEAKIQNNLVKAVIGMEPSGHYWKPAAHYLFGSGYKLALVNPYHIKRIKEIEDNSQTKTDPKDSLLIAKLVRDGDFFDPNLADGIYAETRRMYRLRLKVKKSFIREKTKLKALLDEYFPEYEGLFCDILGVTSEYILKNYFLPEIVAREDIISLTGKIKMISKGKIGASKVLKLIERARASIGINTGIDAAVLEKTYILESIFNLKLKLAYLNKKLKYYLDKIECSKYLLSIPGVGVVTAAGFLGEVGDISKYRSAKEIIKLAGLNLVEISSGAKKGKKKISKRGNNRLRCLLYQCAIVAISKNSQLKRYYCYQAETKNKMKMVVAVQCKLARIMFALLKYKKYYDPEEVLKSMVAQEVA

SEQ ID NO: 345144 - protein, 399 aa, unidentified
MQQQQLLVGVDVGYRKHHVAIGGAKGIVDQFEIPHNEDGFKYFFSRIANQARQLKVSNVAVGMEGTNGYARPLDQMIKGKGYKLLNVNNLKLARFKEIFSAPAKTDSIDAKEIVTLMNMVPFMGQAKETLQEVYDVEETQIKLKRISRRRRQLVDEKVTLLNRMQADLQSVCPGFIDVFKDVSADYVLRLLSLKSDLRKTAKVRRTTLQKLPGIGKALSEKIVSWQEIASFGKEVDWVGPMIYDDAKRILELKKKIELMESQMKILLEQSRLATIIESIPGFGIVTSCEIAGEIGTMQRFTSEAGLAIYLGMAPVDNSSGDYQGTKTPRQVNKRAKKAMMAALGIHIRSVDQSKKYYEKKRAEGKKYNQALRSLGRHLTRVIWSMVKNDRMYIQKEIEK

SEQ ID NO: 345145 - protein, 341 aa, unidentified
MQVATIGLDLAKHVFQIHGIDAAEKVVVRKQLRRSQVMGFFEALPPCLIGMEACATAHYWARELTKLGHEVRLMPAKDVKAYVKRNKNDAADAEAICEAVRRPTMRFVRVKSAEQQGQLMQHRTRDLLMRQRTQVINALRAHMAELGIVAAQGREGIKALLAIIADDGDERLPVDARASLIVLAAQLQALQTLIGSMEKRIIALHRSSEASKRLATTPGIGILGASAITTIVTDPKAFRSGRDFAAWVGLVPRQDSTGGKQKLGPISKQGDRYLRRILVIGAHAVLRRARRHPEKYPWLTQLLARRPFKVVAVALANKMARIAWALLAKGESYRVPRLAAA

SEQ ID NO: 345146 - protein, 422 aa, unidentified
MLGVGIDWAEEFHDIALGTVEKGVIEQFRIEHGPAGVDRLIGRCLALEPDPAEVRVVLETRHGLLVEALLDAGFTVVPVNPDLVARRRGPARKKDDAEDARICCLLALDRHAGLKALIPHGELGGELRAIARDDERAARDQRRLLNRLRADLQTTYPAALVLAGTDLGAPTMLRLLERWSTQSELTTATRDELVDFARAGHHGWPEKFADRVAAALATPALPTRDYLVRAKAAGIRLAAVQLLALHEARRGWHQRMGELLLGGRRSGREHTVKDPDPGKAFPGGEIYLSMAGLGDILAARVAGEIGEHIEQFASPSGLQCYAGQAPVTRRSGKSDFVVARRLAHNRYLGTAVHQWAFCSLTQSGWAREFYDHKIAAGKSHHAALRARGNRWLEVLWHCLTKGVLYDEAVHVANRNRAPGRAA

SEQ ID NO: 345147 - protein, 355 aa, unidentified
MIIIGVDFHPEFQQIALLNTTTGEVEEKRLAHPNEAEKYYRALASAGETVRIGMEASGHARWFERLVAELQFELWIGDAAEIRAKRGRKQKTDRQDAQHILKLMLKDDFPKIWVPNWENRDLRQLLWHRHRMVQARTRVMNQLQAVALNEGLHCKKKLWRERGRQQLESFALAPWASRRRRDLLELLDRLNPAIADLTQAIEREVENCPAAQRLKTHPGVGVLTALAFVLILGDAERFRCGKQVASYLGLVPLEDSSGKRRRLGHITKQGSSIVRFLLVEAAQVTVRSLPEWRSKYFHLVLRRGRKIAKVAMARRLAVQLFWMMRKEWDYEQVKRFGPQGRKLCSHTVMTRGSTR

SEQ ID NO: 345148 - protein, 412 aa, unidentified
METVVERPAALDVHKAQVTACVRVPAAEGRGREQHVAEFATTVAGLLTLHDWLGAHRVTQVAMEATGVFWKPVWAILEDEFELLLVNARHVKQVPGRKTDVSDAAWLCQLAEAGLLRASFVPPKPIRALRNLTRYRKTQIQERAREANRLHKALEDTGIKLDCVATDILGKSGRLMLDALIEGTTDPEVLADLAKGRLRAKIPALRDALTGRFDHLHAVWIGAILNHIDFLDEQIMSLTETIGEQITPFAAAVELLCTIQGVQRRTAEVIIAEIGLDMSVFPDPKHLASWAGMCPGNHQSAGRRRSGKTRNGSKWLDWSLEEAAMAAIRTKDVYLAAQYARLKPRRGHKKALGAVKHSILVSCWHMLTTGELYRDLGSDYFRTRDPERQTSRLVKQLEALGHHVTLQEAVPA

SEQ ID NO: 345149 - protein, 410 aa, unidentified
MESSKWRHFVGVDWASAEHEVCALAADGHHIDAKAFKHSGDGLAELCDWLTKLGEPSSTAVAIEVPHGAVVETLLDRGFAVFAINPKQLDRFRDRFTVPGAKDDRRDALVLADSLRTDEHLFRRLATQPATIIELREWSRMHDELQCERNALVNQMRAQFARYFPAFLELAADPGEDWAIQLFDRVRDPQAANTAKPATLRKILKDHRIRRITAEEALTTLRQRPVFSAPGTAVAARQHLQLLGQRVRLVNEQLRTCKHHLEQVLDRLGEEARQGQTSEQRDVAIIQSMPGIGMIVASTLLGEAAEPLGARDYLALRALAGVAPVTRRSGKRHLVVMRTACHPRLRNAVYHWARVAAMHEPQSKARYAALRARGKSHGQALRCVADRLLGVLCAMLRTQSDFRAETPQAA

SEQ ID NO: 345150 - protein, 319 aa, unidentified
MQTILHNCCGLDVHKDSVVACILKTSHISEDNSEKEEVIIEIRKFETFPDSLTELKNWLESKDCHHVAMESTGVYWIPVYLTLEEAFEGDIEILLTNARHMRNIPGKKTDVKDSEWIATLLRAGLLRGSFIPPEDIRELRDLTRYRDNIVGDIGKQKNRIEKSLQMAGIKLSSFLTDIFGVSGRNLIRVLIEKGRIVPTDIDTETRSISSEKKDGLKRIINRKLTPHQRNFLKMQIVHLDKLLEHLNTVETNITELSEKFSEAINRIDTIPGIGTTAATAIVAELGTDVSKFPTSEHLCSWAGLSPGNNESAGKKKTQE

SEQ ID NO: 345151 - protein, 354 aa, unidentified
MNNVKYIGIDVHQATSVFSVIDSKGKFLGEAVLETKPTTIIDYLKGQRGTLWVTFEEGTYANWLYDVIESHVARLIVCDPRKNKLDGNKSDKIDARRLAELLCLNALKAVYHGKDSTKILKELARSYVSLQQDSTRVMNRVKAMFRSRGIDCRGTSVYQPENRKEWIGKLADRGPRHRAERLLKQLELLQELSLEAQKDLVRESRKHKSYKILKGVPGLGPIRVALILAFVMTPYRFQNKRQFWTYAGFSVVRRGSAEYEIDQGELKRTRKKPLPRGLNRNYNRVLKNVFKGAALTAAYRGPFKKAFDQRVADGTAPNIALLTLARKIASITLALWKKGEPFDIKRHRLSEQTT

SEQ ID NO: 345152 - protein, 340 aa, unidentified
MDTMYERCCGLDIHKKTIEACFRSGKKKTHMSFGTTSAELRKLTMWLVENDCQSVAMESTGSYWKPIFNILELSGTDMEIIVVNARHMKNVPGRKTDVHDAEWIAELLQYGLLRPSFIPDREQRELRELSRYRKSLVEERAREINRLQKMLEGGNIKLTSVVSEVTGYSSRRLLDRLLRNDEPMTENVISGLVHTSLVGKSKELETALDGLLSELQKELLIKVLDHIDDMSRRIADLDDFCRKQMDRYEDALDKLDEIPGIARRTAETILIETGLDMSRFPTAKHFARWAGLAPGNNESAGKRSSGRTTKGNPTLKSTLIQSAKVAARKKDSFFKPGIKR

SEQ ID NO: 345153 - protein, 411 aa, unidentified
MNPVVGLDVAKGESQVQMFLDKKMPYKNSVKIEHTVEGLEELHSYLIDIERQTGMKPPVILESTGHYHAPVVQFLEAREYIVIIVNPLVSYRAKSSSLRETKTDVIDAYHLGELYYKEDLEPQKKRGIQLLNLRHLTRQHENMTGIMVQTKLQFQAVLDQVFPEYKGVFGKLYAEISLRTLQSFPTSESVLEAGVEEIAQFIDTHCKARSFNWALERSEKLIGAAERNPFQSTLYQSLLVSLNMYIDLLQVYHQQLSTLEREIDELAAQLEEYELLQSIPGIGEKIAATIISEIGEIDRFNHPKKLVAFAGLDSSVFESGRFKSTKNHITKRGSARLRHMLFTAVRCSIRDSRKKKTTPETIARNKRLRSFYDLKREEGKPYKVAIIACANKLLHWIYAMLKTKTPFQETI

SEQ ID NO: 345154 - protein, 349 aa, unidentified
MKKHNNSGEKSEQPSKRVKSRGPMQRDTKEMLAELVGKLKEKLDPKKVAATSAGEEHPRGELRPNFDRLTVGVDLGDQWSHYCISGLEGEILAEGQVRTTPQGVAEFFQALNAARVVLEVGTHSAWIRDVICSFGHEMLVANPRLMEGSKRRKRKNDRIDANKLARLGRVDPQSLHPMQHRSAEVRQDLVLLRARDALVAARTELINATRGLVKSMGARLPKCSSPSFAQKVEEAVPAQVREALLPLVRMTAALSDCIQGYDEKIEKLASEKYGHTALLRQVKGVGPITSLAYVLTLENPERFVKSRDVGPYLGLVPKQEDSGESQPQLGISKAGDTMVRRLLVGSAHY

SEQ ID NO: 345155 - protein, 397 aa, unidentified
MSKVFVGVDVSKDFSTAQGIDKNGKKIFYLRFAMNAEGFSELLKVVMKCSENIKEIMAAMESTGCYHINLFSFLSSQGVSCAVVNPLLITNFARLSLRKTKTDKKDAHTIAQFLLANEKALSAIAFSQDTQDIKDLSRERESMTVLISGMKNDIKRLLQGTFPELEKLCSPYGETMLHFLKRFPSARLVRAAKQRDIEKALICPDEKRKRVTVSAEDIIAAAKISVASSGAAKELILSEKISTLLYLQEKNKRITEVLIETCEALMIEKLDIIRSIDGVNDITGSTFLAEIGDINNFTSYKHIIAFAGLDPSIHQSGQYVGRSTISKRGNRHLRRIIFLMTLCAVRSKNAFREYFLRRKQEGLPPKKAILATAHKLIRVIFAMLSNKTLFRKGVAAE

SEQ ID NO: 345156 - protein, 348 aa, unidentified
MLADELDYVVGVDTHLDEHVLAVVAAPSGAVLARRAVPANARGYSAALRFAGEAAIGARVWAIEGTGSYGAGLARYLAGRGETVLEISRTPRAERRLRGKDDSLDAARTARAALASETLALPRGGQRREALRLLLITRRSAVDVRREALGQLRGVIVTAPDGLREQLRRLPVGRLLERCSRLRRSGSASPDELATRLVLRSLARRIEAATLEAAQLEHEILGHVRALAPRLLDEPGVGPIVAAQLIVAWSHHGRLRSEAAFARLAGVAPVPASSGQTTRHRLSRGGDRQLNRALQTIVLHRRQHDPTTKDYIAQRIAEGKTRRDATRLLKRYLASHLYRLLQQEPLMT

SEQ ID NO: 345157 - protein, 337 aa, unidentified
MTVRVINPPAAMRVEMAHCLFAIELSKKSWVIGFIRPFSSKISRRILSGGDWKGLLELIEEVQTRASRETGRAVEVMSCYEAGYDGFWLHRLLEAHGIRNYVIDPASLQMDRRARSVKTDRIDTERLLRSLMAYLRGEPKVWSVVRAPSLAEEDARRPHRERDRLISERVRHVNRIKGLCALHGIYDYQPLRPQAMARLEQLRTAQGSSLPPRLKSEIRRELQRLELVVEMIATLEAERDAIVEDEASTHINAKKIRDLHKLKAIGPEFAAVLVGEIFHRHFNNRRQLASYVGFAPSPFQSGNVARDQGISKAGNSKGRTTGIELAWLGCVTSPAAI

SEQ ID NO: 345158 - protein, 437 aa, unidentified
MLNALTTITQIMNTTTNFAATIGLDWADQKHDLWIRPADGSKAEHVRLEQTPETLHEWVAKMRERFGNRPIAIAVETSRGPVISALMAYDFIVLFPVNPKGLKSYRGAFSISGAKDDRTDAQLLEEFVRLHPEKLRALEPDTELTRRLGGLVENRRHLVDERTRLVNQIHATLKTYYPMAEALLHGQMNTPMAADFLVRWPDLAALQMAKPEVVRSFFYKHNSRSAKKTEERLAAIQKAKPLTTDPAIIVPARQLVLALAGMLRPLHQAVARLDKQIQQAMDEHPDAPIFESFPGAGPALAPRLLVAFGTNRDRFDQSDEVAQFYGIAPVVIQSGNSKTVHFRYRCPKFGRQTFHENAGCALKKEPWAKCYYDQQKERNKGKHHQACRALAYKLVRIYFACWKQHKTYEPNRYLTALEKHASPLHRILQNRTATHCE

SEQ ID NO: 345159 - protein, 314 aa, unidentified
MADPCSVGIDVSKATLDVAWSTNPTTPWQTTNDDAGWAALVAHVRALAPTVVVLEATGGYEIGVASALSTAHVPVAIVNPRQVRDFAKALGLLEKTDRIDAAVLAAFAARIQPTPRPLPDDLQADLQALVTRRRQLVDMLTAERNRVPLARGAVRKNVVAHIAWLEKQLGHTDRDLRTQIEASPIWRARDHLLQSVPGIGPATSARLLASLPELGTLSHRQISKLVGLAPLPDDSGRRSGYRRVQGGRGSVRSALYMATVSAITHNPTIRAAYRRWRAAGKLPKVALVAAMHKLLIHLNAMIRHQTPWHPPATA

SEQ ID NO: 345160 - protein, 358 aa, unidentified
MNATAALPVVGVDLAKSVFQLAVADGSWRVIEQQRLTRTQFERFFTNRAVGLVVMEACGSAHHWARWLNNLGIEVRLLPAAYIRAYVKRNKTDAADAAALLEAARCADLHPVRVKSVEQQALQALHRTRSLWQGDRTRRINTLRGYCREFGIAIALGSRLGLEQIARVLAEPRSGIPELLRPTMVLLVEEVRLLEARIGALERELAALVRHSPACTTLLSVPGIGLLTSTAMVAATSGDVTHFQDARHFASWFGLTPKEHSSGQHRQLGRISKQGDTYLRTLLVHGARSALCAAARAHSQGRPLDRLRLWALATEQRRGRNKATVALANKLARIIWATWRYQRPFAGDWPARLEATHG

SEQ ID NO: 345161 - protein, 397 aa, unidentified
MYIVGIDIAKRKHEAAVIDGEGAVIIKPFSFTNNCSGYNRLLAMLAKAKLPLDEVSFAMEATGHYWLALFTRLQKEGFRVQVINPVQTNSIRSFYIRQAKTDPRDALLIAEVIRFGHFSESTLHPENIYELRELCRGRHAIVSMQADVKRKVVALLDQVFPEYETAFTNMFSDTSMAILQTCPTPKELSEMPLEELCYLIEVSSHKRFRMAKARELQELARNSFGFAMAGDVFSTMIRLYAKHLDFLKQQVREMDRKIAEIMETLDTPITTITGIGPTLGAYILSEIGDISRFSSAAKLAAYAGIDPTMRQSGEYNGVRNRMSKRGSPYLRHAIWLAASSAVLHDPALKLYFQKKRDEGKPYMASVGHACRKMVSIIYAVMRDNKAYTPCTPNEISA

SEQ ID NO: 345162 - protein, 336 aa, unidentified
MGSYVGIDLHRRRSVIVVLNGDGERMSWSRIENTPANLAAEVHAAGPAAEVAMEACWGWYWAADVIAECGARLHLAHPLGIAGYENRRVKNDIRDATLLADLLRLGRLPEAWVAPPPLRELREVVRYRAKLGRLRSGLKAQVHQTLGKEGVIPELDDIFRGHGPRWLDDLALGDAYLERVVSLRELIDLYDRQIRHCDAWTHRRLRGHPGYDAIQALRGVGPVLGAVFVAEIGDVHRFHSAGHLCSWAGLTPRHRESDTHVQRGNITKQGSRLLRWAAVEAVSGAVRDPQISSVKARVGARRGRNIGRVAAARHLLTLVYYGLRDGEIRCLASRTA

SEQ ID NO: 345163 - protein, 398 aa, unidentified
MEADISNLRKTGHFYFALTRNIDEPFGVGFECSDLHLQEGAPSMLGTKYIGMDVHTATISVAVLDAAGKLIMDSVMETKARTILQFIHGLRGDLHLTLEEGTWAAWLYDLLKPHVTNIVVCDPRRNALLKEGSKSDRIDARKLAELLRANLLRPVYHGEKGLRTLKELARAYLTIGKDLTRVMNRVKAIYRSWGIPCAGRSVYNPRHREQWLRRITQASVRRRAELYFEQLDALVLLRKQARKELLAEGQKHQAWRLLRSIPALGPIRAAVLMAIIQTPHRFRTKRVLWKYSGFGVVTHTSADHRYVQGHLERSKKPALVRGLDPVHNHDLKDVFKGAASQASTGKGPFRDFYEALVAKGMRPEMARLTVARKIAVITLTVWKKGVAFDAKYLKPQTA

SEQ ID NO: 345164 - protein, 409 aa, unidentified
MEVVHERCCGLDVHKETVVACVVVPGTGKQPHKEIRTFNTMTADLLELADWLTAQGVTHVALESTGVYWKAPWNILESSFTLLLVNAQHIKQVPGRKTDVRDCEWIADLLRHGLLRASFVPDLPQRELRELTRYRTTLIRERAAERNRIQKTLEGAGIKLGSVASDVLGSSGRLMIEALVDGSTDAATMADLAKGNLRAKLPQLERALTGQVRAHQRFLIAHQLAHLDGLDELIEQLSQEIAERLRPFEEKIERLDAISGVGQRTVEVFLAEIGTDVARFPSAAHLASWVGICPGNNESAGKRKSGKTGKGDVWLRTALTEAAQAASHTKDTYLASQYQHLAARRGKKKAIVAVAHSILRIVWHLLDHDCEYVDLGSRFLEERDRQQIERRLVRRLEGFGYTVKLEPAA

SEQ ID NO: 345165 - protein, 341 aa, unidentified
MEEAQISYLFFVGIDLSKSYFDASIVNDSGKKLAYKRFKNQKEAYFMFLKWVVKTTKGQRDILFCMEHTGIYGRLLQHFLQDHQLSLWIESGLQIKRSQGIQRGKNDKVDSFRIAVYAQEKGNKAEITPDYDSNLEQMHDLLTTRNRILSAYNALRTAQEELKPFTKVSYQIVKKVQRQALNGLKASLKEVEKAMDELINQNPAWHKNLNLATSVKGIGKITALWILIYTRNFDKQFNARKLAAFVGVAPYQHSSGSSVDRGTHISNLAHISLKSLLHMAAMSAIRYNPMIKKYYKRKKAEGKKGLLVMNNIKNKLIHTMMAVIRSNNPFDPHFQHQLIAA

SEQ ID NO: 345166 - protein, 391 aa, unidentified
MKKLIKYVIGIDIAKDKCDACLMSMDVELNIKVKSTRKFSNNANGFKELLLWQKKHCKEIVPVQILMEATGVYHEKLAIWLTDQKLQVFVVLPNKARKFMQALGLKSKNDKIDAQGLALMCAQHKFDAWKPISKFFHELRTLTRYYQSTQEAKTMFKNQHHALQHSGYTEKTVSKQLLKTITLFNKQIKESKQSIIALININDEIKRKVYQICKIKGIDVLTVATIIAETNGFELFKNIGQLVSYAGYDVIENQSGKHVGKTKISKKGNSRIRRSLHMPALNVVTYNEPVFVNLYERVFDNTKIKMKGYVAVQKKILVIIYTLWKNDQEYNRDINQEITSRKDESKKTFSLNKKGTTTNSLKVVVLPVSSTTQDEHQYEKSHEVLFPYLQK

SEQ ID NO: 345167 - protein, 338 aa, unidentified
MAILTVGIDLAKNVFALHGVNVSGKPELVQPKVARARLHELVAALGPCTIGMEACSGAHHWARLFVAHGHTVRLMAPKFVTPYRMSGKRGKNDAADAAAICEAVTRPNMRFVPIKSQEQQSRLMVHRARQGFVEQRTATLNRIRGLLSEFGVVLPLKAEVVRREAANRLEDLPGWANTVIGDLLSEVHHLDERIKQYDVHIRTMARQCTAAQQLMRLMGVGQTTATAIVAMVGNASEFDNGRQFSAWLGLVPGQYSSGGKTRLGRITKVGDAYLRSLLVLGARAVLNAAPNKADSLSRWAVKLRERRGYWKAVVAIAAKNARMAWAVLTKGEAFKLPA

SEQ ID NO: 345168 - protein, 375 aa, unidentified
MKEKLRFLGLDVHAETIAVAVAEPEGEVRSLGTIPNRAESIRKLIKKLGPAARLRACYEAGPTGYVLYWQLTELGVECEVVAPTLVPVKAGDRVKTDRRDAEKLARCYRSGDLTAVWVPDEGSEALRDLVRAREAAKQDQTRARHRLSKFLLRSGQRPPTGVRPWTRPYLIWVAQLRFTQIAQESTRQDYLHEVEHMRGRVERLEQAIMEAVKLASPALQQVINDLQALRGIADISAVTIASELGQVSRFESARQLMGYCGVVPSEDSSGKRTRRGAITKTGNAHLRRIVVEAAWSYRRPPGIWYGLRRRQESISEEAKEIAWKAQHRLHKRYVKLGAAGKDQRKIVTAVARELLGFIWAIGTRAETVSRQQVAA

SEQ ID NO: 345169 - protein, 345 aa, unidentified
MTSPTTRPPYQLFVGIDIAATTFTAVTTTEGPPRERARTFSQTPEGFAALIDHLRTTGVAPAHTLIVVEATGSYWVALAVTLHEAQYVVSVVKRAHAHHYAQSLPRRAKTDLLDAPVLAQFAAERKPAPWTPPPQVYHELRQRLIARDGLVEMRQQARNRLHALRQWPVVIESVRKQLEGLIADLEQRLATLEAEIAQVVANGAWAESAALLSSITGIGLITSAWLLVGTLNFQACGSAESASAYVGLVPLAHESGSSVRGRAQIGHGGYARLRTALYLATLSAARYNPIIKAYYERLRAAGKPAKVARCAAARKLLHLAWAVVTKGQPFDPAYHTRDAAEGVAA

SEQ ID NO: 345170 - protein, 343 aa, unidentified
MQAITTIGLDLAKSVFQVHGIDAENRVIIRRQLKRRYVLAFFKKLPPCLVGIEACASSHHWSRELKALGHTVRLMPPAYVKPYVKRQKNDAADAEAICEAVTRANMRFVATKTAEQQSCLTLHRTRHLFIRQQTAVINVIRAHLAEFGIVAPVGRKGVEELLDIVADPSDKRVPEIARACLAALGAQLYRLKEKILEFDRMITAWHRSNEASRRLDDIPGVGPALSTALVASIADPKVFRSGRNFSAWVGLVPKQHSSGGKDRLGSISKQGDRYLRSLFMAGALAVIRYAKIHGTKHRPWLTALLVRRPTKVAAIALANKIARMAWAMMAKGERYKEPIALAA

SEQ ID NO: 345171 - protein, 412 aa, unidentified
MRRVIGIDTHRTFGEVVFWEQGRLRRAGRIDMTRTALEGFGKSLLASDEVVIEATGNCMAVSRVLSPFVKRVVIANPLQVKAIAHAHVKTDKIDAGTLANLYAAGYLPEVWMPDAVTERNRRLNARRYQLVRHRTRIKNEVHAILYAHLIPKCPHADLFGRLGRAWLARQPLPDDERAAIERHIRELDRLNDDLEVLDREIAEGALDDGAINRLLTITGVNLTVAAGLIAAIGNIARFKSPQKLVSYFGLNPRVRQSGLGPAHHGRISKVGRSHARAMLVEAAWAAAKTPGPLHAFFVRIRAKRGHQVAAVAVARKLAVLVWHMLTKETDYLWARPSLVAHKMRGMELQAGKPQKKGNSRGPAYAYNVKELRNREMRVAEQAQKSYEHFIEAWRPRPPKGQARERLNPARKE

SEQ ID NO: 345172 - protein, 391 aa, unidentified
MINIGIDVGKFKHCASAIDDKTGEILIKPFFFNNDQKGFNLFYSKTKQYIHRKHSVGMEDTGHYMINLTDFLLDKKFTVRFINPRSTCLRRKELGMSAKNDRKDSILIAEMLSEKKFWRSVTRITQETDKLREITRLYHQLQEQQNEDMNRLQRALDIVFPEVNKLSWTRYSKTYMQFLAKYPTAASIASEDIRNLRNALKTDGRGRQCKLTAEDIKEAAKCSVGEDNIAVALEVQSIIAIISTRKQQIENLENKIEEFSLKLNSPIISIPGISHITGMTIIAEIGDIHDFSDAAHLISYAGMEPLVHQSGKYDAAHMPISKHGSRYLRKALYQAVFTVCKYCPTFNAYYTKKRNQGKTYRCAQGHCVRKLLRVIYKLLESNIAFDENLVK

SEQ ID NO: 345173 - protein, 370 aa, unidentified
MKKNSTRAQSPKRAAARSTGPITIGLDLGDKTSRYCVVGDNGERVSEGSVATTRKAVAQKFSGMGRCRIAMEVGTHSPWLSRVLSKLGFEVIVANARQVQLISASSRKNDRRDAHMLARLARLDPELLRPIRHRSEQAQADLMTIRIRAALVEARTGLVNAARGFTKAMGERLPACDTDSLGVEKLEALPAALQQRLQPLLEQIEALTAQIKKLEGKLEQIARIEYPETRLLTQVSGVGTLIALTFVLTVEDRERFQKSRDVGCYVGLRPKQSESGQSQPQLRITKEGDRYLRTLLVQGAHLILNRRGPDTDLKRWGLKLAERGGKNAKKRAIVAVARKLAVLLHRLWVCGEVYEPLRNSRPAATSNQAA

SEQ ID NO: 345174 - protein, 343 aa, unidentified
MSYKLYFGVDVSKLWLDIAYYDGVDVDWKHGHIRVDNDEKGFAQLGRWLDRLGAGKGTCIFCMEYTGLYGQEFRQWLERMKIVYGMVSPRKMHRFEPDLGEDERSLDRIKTDEMDSFRIAIYCKEHSMKIRRKPSHLPSDAYFKLKRLLAERRQYVKQSTLYKQQLHDIGKYDTEASRHRKEAELASLTENALQTSKEMEAIIREDADIRKNYGLLCSIKGIGLIVAAETIVLTENFTSITNPRRYACYVGIAPVRKESGVSIQGGDHVGRKGFTQAKADLSMAALHAIRFDKGIRAYWLRRKAEGKHSGVVLNAVKFKIVLRMFAVIRRQKPYVEMEEYGKK

SEQ ID NO: 345175 - protein, 424 aa, unidentified
MKVTYQTCCGVDVHKSFLVATIVKTTGGIEPSYQKKRFSTFNNSILEFKQWLINNNCHDVCMESTGKYWIPVFNLLEDQINVTIANPKWVKAVKGNKDDTKDSKWIGDLFRLGLVKGSYIPCKAIRILREYTRYRYKLVSCRSSEKNRYQNALTVCNVALDSVVSDIFGKSSTSIIDYLLEQSGTTINHEEIASKLLRRLKSKEDAVIESVEGYQMTDAQKYRMRLVRAHMDYITAEINDVDKMIENMISSNPDFENAIQFLCTIPGVKRDSAITIISEIGTDMSQFSSSKRLCCWAGLTPGSNESAGKKKSVRITRAGVYLKPALVQCAHAAVKSDKSPYYKKKYESLVKRRGKKRSIIAIARMILTAIYQMLSSGEQWNPSDLYKIDMPVALVEKQKAKAIKQAKKLLQREGLLPPDEPLAS

SEQ ID NO: 345176 - protein, 375 aa, unidentified
MTKNTVFIGLDTHKESIAVALAEEGRSGEIRYFGQIPNEPAAVLKLVKNLGGKYGKLFFCYEAGPCGYGLQRQIASLGHDCVVIAPSNTPTKKGIRIKTDRRDALELSRLHRAGDLTPIWVPDEAHEAIRDLVRSRITAMLMLMKYRQHLQSFLLRHGRKFPGKTHWTKTHFNWIRSQRFDHPAHHILIEESLAAIRDSNDRLERLEKQIMNLLPEWTLAPVVHAFQAMRGISQLAAVILVSEIGDFQRFSRPGQLVSYLGLSPSEHSSGNRTIRGPITKAGSARGRRMLIEGAWAYRMHARVSNYATKRHVGLSKEVLEIGWKAQIRLCQRYRSMRARGKNHNVVVTAIAREMACFLWAIARTVKLPFPAALAS

SEQ ID NO: 345177 - protein, 347 aa, unidentified
MGKSITDLSSVTTVGLDLAKHVFQVHAIGAFGRVIVAKALRRKDVLFFFAQLPKCLVGMEACGSAHHWARELIKLGHDPRMMPPAYVKPYVRRQKNDAADAAGICEAVTRPSMRFVGVRTLENQAALMHHKAREMLVAQRTQLITALRGHLAEIGVIAAQGPKNARELAGVVMAEGNETIPACVRAALAPLVRQLHVLDQEIACSDRTIAAMARGDERARRLMTIPGLGPVTASAMAASVQDVSAFSGPRAFAAFLGLTPKQNSSGGKERLGRISKMGNRYLRTLLVVGAHAVLYHRKPHDDALRSFAKKLMQSKPFKLVAVALANKMARIAFAIMRGRTSYCAVSA

SEQ ID NO: 345178 - protein, 315 aa, unidentified
MAMRVTLEKPIIGVDVAKNELVIYHDQYDRLEAIPNTKVAITQWLKALASSCAIAIEATNVYHVLFADAAHEAGCDVYIVDGYQLSHYRKGVNIRAKTDAQDARLLARYLKNELDELRPWIPASPLYRQLLSLFRRRAALVQARTGLVQSWTNEPFLRTAFANQVNSMKRFEALVEKKIRDVLQEAGLMRQVNRCMKVEGIGFLTAARLVTSFQRGEFSGANAFIAFLGLDLRVSKSGQSDGPRRLTKRGDPEARRLLHNAAMSGSRTPAWKPFYEEQRKRGFSTTQALVMLSRKLARVVFALLKNQSEYQTKVA

SEQ ID NO: 345179 - protein, 451 aa, unidentified
MSKDRTRSKPSGLPIIHPFAAGIDIGSRFHVVAVSPDLCDEPVQTFQAFTGDLQRMADWLVATGTKTVVMESTGVYWVAAYEVLESRGLEVILANAREARAVPGRKSDVNDAQWLQRLHACGLLRASFRPGRDIAELRAYLRCREKHTDYAAAHIQHMQKALTFMNIQLHHVIATITGVTGLRIIRAIVAGERDPGMLAAMRDVRCKESLETIRNALVGNYQPEHVFALKQALALYDFYQQCIDECDVEIERAVAILNIAHSFPEAPLPKAKHRNKMPSDPNFDVRTAMYQLAGTDLTQIHGIGPFLALRLIGECGTDLSRWSTAKHFTSWLTLSPGCKISGGKVLSSHTRKTSSRITVALRLAAVAVGRSNTALGAFYRRLAGRIGNAKAVTATARKIAVLFYNAMRYGMDYRDPGADHYEQQYRDRVIKQLHRRAAQFGYSLQPQDSPA

SEQ ID NO: 345180 - protein, 341 aa, unidentified
MEYCGIDLHSEYSQICILDEGGEVMETSRVRTSRKALERFFARDRMRVVIEAGGTSPWVSRLLDSLGHEVVVCSPRRVRLIAESSLKNDKVDAEVLARLVRLDPEFLKPIQHRSEQAQLLRANLKVRSAMVEARTKWINTVRGLLRGFGYKVSGKAPHSFVERVNRMKLPDELSAVITPLLEQLDLLTGEIDRRNEHLEEMVKDLPEVEHLREIPGVGPVVATYFVLTIDDPNRFKNSRDVAAFFGLRPSMRESASVTHFGRITKEGDPDMRRLLVQAAHACLLTKADSELKRWALALAERKGKGKAVVALARKLAVLMHRLWVTGEVYQAFPNNRAAHAA

SEQ ID NO: 345181 - protein, 394 aa, unidentified
MNFFVGLDVSKEKFDACGIGEDGKKVFTSTCSMDREGFEQLIGYLPKDKTSFLLGMESTASYHIALFTYLAARDYSVVVINPLLINNFSKRSLRKTKTDKKDALTIAQFLLQEKETLSVKTPDYLVTELKDMARRREKLADHMTSLKGNMKRILSVTFPELEYITGVFTKSTLRLLAQYPSAHAIKEAGHAHVADVFINQSRGNKPRATIKVLMDAATSSVGVTSPAKELTLKQEASLLMHVEEQMKEAKKLLMGLLNERMKEDTDILCSMKGIGENTAMNFLIEMGGDIQIYENDKKLIAASGLDPSTYQSGKYEGKSRISKRGNRHLRRVIWLMATRVIINNDLFKTYFKKRKKDGLPYKKAVLATAHKLIRIIFVMLSRKTCFVEGGIKYS

SEQ ID NO: 345182 - protein, 365 aa, unidentified
MNATAALPVVGIDVANVVFQLAVADEAWRVTGEHRLTRAQFERWFANRAVGLVVMEACGSAHHWGRWFNARGIEVRLLPALYVRAYVKRNKTDAADACALIEAARCADIAPVKVKSLEQQALQGLHRTRSLWMATRTSRINALRGFCREFGIVIAPGARLGVERIARVLADPDSGVPELIRGTMKLLIEEIRLLEARTAQLEREFTVVARASGACTRLLTIPGVGLLTATAMVAATSGSVEHFRDARHFASWFGLTPKERSTGNTRLLGRISKRGDRYLRMLLTHGARSVLHASARAAAAGRNIDSLRRWALTIQTRSNHNKAACALANKLARICYATLRDARPYGEPVRRPNKKLERTSFEIAA

SEQ ID NO: 345183 - protein, 392 aa, unidentified
MLLDPPFDGQTAIHTQFGAIFISLELSRSSWLITSLSPGNGEKMSKHSVVAGDIAGLLARFAEFRGKAELRTGKRYPIIVIQEAGLDGFWIHRVLEGEGIESHVVDAASIATPRRRRRAKTDKIDGEALLRALLAYKRGEPRVCAMVVAPSSEEEDRRRVCRERQTLIGERIAHVNRIKGLLFSQGISGYEPLRRDRRTRLEALRTGDGRALPAHLKAQISRELDRLELLLEQITAVEAERDALLAAVSGDVRNQPEGPQPVAMLLALKGIGAEFAAVIWSEGLCRRFSNRRQVAAYAGVAPTPWRSGAIAHEQGVSKAGNPRLRTTMIQLAWLWLRHQRQSALARSFHEQAQHKGRRKSAIVALARKLLVAFWKYVTSGVIIEGAVMKNSA

SEQ ID NO: 345184 - protein, 348 aa, unidentified
MHETTTVAVDLAKNVFELAISETPGRVSGRKRLKRAELMPFFAQLPKAIVLLEACGSAHYWARTISALGHRVVLLPPHRTAKYRDGAKTDRSDTKAMLEAFRNESVFPVPIKSIEQQSLALLHRLRSGWKQTRTARLNALRGILRELGLTIPVGAACVVPTVWNQLEDADSPLPEALRPFVAELCHEIRDCERRLEDAERQLELLGRQIPAVEHLLSIPGIGPLTATALVAFVGDVRRFASGRKFSSYLGLVPNERSSGETRRLGKISKRGDTYLRTLLVHGARSVLLAAKRKDRPDPLARWALGVEAQRGHNKAAVALANKLARIAWSVWRDGRRYESRFAPTQQAA

SEQ ID NO: 345185 - protein, 316 aa, unidentified
MSKASLAVCYQVEDKFQHTEVSNSKAGFQQLVRRCGVACCYVMEATGVYYLSLAYYLVEHGAQVAVLNPLVVRRFIQMHLGKGKSDRKDAQWLLRYGQQQPLPVWQPEAPVLVECRQMEQVMEQFIRQRTMVSNSLQGLAHQPVVSAVARKRRQQTLKSLDEQIQALEAELLALLEQPYAREMPLLCSIPGIGRKTAAQLLLFAKGFSQVQNYRQLIAKAGLCPREYSSGSSVRGKTRITRMGGGLIRSKLFRCSFAAKQSNAACKALYDRLVATGKNGKVALVAVCNKLLKQAYAIVQSGIPYQAEFNSKFAPNP

SEQ ID NO: 345186 - protein, 340 aa, unidentified
MSRGTRPRFVTYDRTVARLPVASTRQVIVTHVICGVDVSATTLDARIGRDGEHCRFDVSTEGLDDLVAFCHAHQVSLVVMEATGGYERRPAGHLWAAELPTAIVNPRAVRDFAKAMGWLEKTDRIDCGLIAWYAETKRIQPTPPASATQARLTALVRRLRQLTDLRTQQTNQRRLITEPAVLDSFGPILAAIVTQQRQLETLIAQAIGDDPLWTRLDAAFRTIKGVADRTVARLMAEMPEIGTLSNKAVAKLAGLAPIARDSGQHSGKRRVRGGREPVRSILFVIAEVVRRYDPDFVAFHQRLSRAGKPNKLIRIAIARKILVRLNAKAREVRNNTALPA

SEQ ID NO: 345187 - protein, 355 aa, unidentified
MMRDEFEQLEEALMASVGGLDVHRRQITFDVLDTESGQVRRGQVRPACRATLRQFLGRVAGQGEVSFAVEGCTGWRFIIEELQRAGFQAHLADPAAAADARGSKRRAKTDRIDSRQLRQQLVEGRLPESWIPPEHVQEVRAKLECYHDLREEHTAWVQRVHATLFHHGVPVIEGALFTMAGRARLEAGEGLSPAARQVVGVALRVLDALQVELDELGRELGRHARRQPGCRALAAQYGVGPITAVAIWAFMGDTRRFSSSAQAVRHTGLDVTVYSSDGRRAPGHLSRQGPPVLRWALYEAACSAARSTSPDLDYYHDTKERIDHKRAAISVARKIARRSHHILRDLGDTAWQDAA

SEQ ID NO: 345188 - protein, 346 aa, unidentified
MMIIGCDFHPSWQQIAWLDSETGETGEQKLVHASGDVQRFYQQLGAPVLIGMEATGNSQWFVELVEDLGQEIWIGDAAQIRASYVRKQKTDKRDAAHILKLVVEGRFPRLWTPDREQRDLRQLVLHRHKLVEIRSRVKNELQHLAMNKGMQKKRTLWSQAGQKMLRELPLKPWAWCRREDLLGLLGMLNQQISKLDTAVQQAAEENSQAKLLMTQPGVGPNTALGFVLTIGDVTRFRRGKQVASYLGLIPREESSGGRQKLGAITKQGNRMLRSLLVEAAQSAVQHDPGFRKQYLHRCHQKPKAVAKVAAARKLAVRLYWMLRTQKPYPEVVRIESSPWVPLVGAS

SEQ ID NO: 345189 - protein, 345 aa, unidentified
MEPMYYIGLDVHKRIISYCVKDASGNLHAEGSLPATRLDLDRWMKTLPQPWTAAMEATMFTGWIYDHLQPHATALKVAHPLMLRAIAAAKKKNDRIDARKICDCLRCDFLPECYMASTAIRERRRTLRYRNLLVRQMVQMKIKISALLMEAGVSYNKQRLHKAGYFRELLASNPDIDAGLGALLRLCRETVVRLGKTESARVRSLERDALLVERVERLMTIPAVGPITALTWALEVGDVQRFSSIKKAISYCGLCGAEKRSANSVQRTPLSKQRNKHLQTTLIEAAKMAPRNSPALAMLYDKEKQKGNANRATLAVARKLVAYLVAVDRQQKEFLTVASENRTAA

SEQ ID NO: 345190 - protein, 345 aa, unidentified
MQPMYYIGLDVHKRTISYCVKDSSGKVFSEGSLPATRLDLDLWMKTLPQPWSAAMEATMFTGWIYDHLKPHAAALKVAHPLMLRAIAAAKKKNDRIDANKICDCLRCDFLPECYMATTAIRERRRTLRYRNLLVRQMVQMKIKISALLMEAGVSYNKQRLHKAGYFRELLATNPDIDEGLRSLLRLCRETVVRLQKMESALVRTLESDSLLMDRVERLMTIPAVGPITALTWVLEVGEVQRFSSIKKAISYCGLCGAEKSSGSTVQRTPLSKQRNKHLQTTLIEAAKMAPRNSPELAMLYDKEKQKGNANRATLAVARKLVAYLVAVDRRQKEFLTVERENRTAA

SEQ ID NO: 345191 - protein, 326 aa, unidentified
MEHELHYIGIDTAKEKLDVDVLRPDGRHRTKKFANTTKGHDELVSWLKGHKIDHAHICIEATGTYMEPVAESLYDAGYIVSVINPALGKAFAQSEGLRNKTDTVDARMLAEFCRQKRPAAWEAPHPLERALRALVVRHQALTDMHTQELNRTETAREVQRPSIDAHLLWLEAELKRLEKQIKDLTDDDPDMKHRRKLLESIPGIGEKTSAVLLAYIGLKDRFAHARQFAAFAGLTPRRYESGSSVRGASRMSKAGHVSLRRALYMPAMVATSKTEWGRAFRDRLAANGKKGKVILGAMMRKLAQVVYGVLKSGVPFDASRHNPVAA

SEQ ID NO: 345192 - protein, 422 aa, unidentified
MKLKYSICCGLDVHKNVIVATIVTTNKDGISEYKQKSFSTINSDIQRFHNWLIENNCYHVCMESTGKYWIPIFNYLEHDIDVCLTHPKYVKAIKGKKTDKKDSKWIADLYKFDLVRCSFIPPKDFRQLRELSRYRFKLVCMKSSEKNRIQNCMTVSNVGIASVLSDPFGKTATEIMSYLLEHTSDSMDEHAVRKLIKKGAKAKSDEIIEAIKGYNIETDQAKKLELARAHLEYLDNMITQTEVELYVRIKPYYEFVEFVSTMPGMTELSSTIVLAETGVDMSIFDDAKHLCSWCGLSPANNESAGKKKSVRIAKAGDYLKPMMVQCALAAIKSKKQPYFAIKYGRIKKRRGHKKAIIAIARMMIVCIYHMISEKKPFSPTDYEELMDPQNHVERVVLTENNVFAYLESLGYDSSKLVKRNDN

SEQ ID NO: 345193 - protein, 341 aa, unidentified
MGQASTIGLDIAKRVFQAHGADERGRVVFRKRITRTALLRFFAAQPPCTVAMEACAGAHYWARELGKLGHTVRLIPPAYVKPYVKRQKNDMADAEAICEAAQRPSMRFVPVKSETQQANGVVFRARDLLVRQRTQCINALRGHLSEYGYVFPQGITQADTLISCVEDPDTSLPENARAVLTVLVGTYTALEAQVRALDAEIAKRAKADPVARRLMTVPGIGPIAAAAITALVPAPEGFRTGRDFAAWLGLTPLQKSSGGKQKLGAVSKRGERTIRRLLILGASAVVRWASQRGGPEGSWLARMLARKPKMLVTVALANKTARIAWALLVKGGVYRAPVAAA

SEQ ID NO: 345194 - protein, 415 aa, unidentified
MGGRQQWYAGVDWGSQSHHVVLTDGDGRKIGERSFKHGGEGLAEMAAWLMAASCAAEPGQILAAIEVPHGPVVETLIERGFKVHAINPKQMDRFRDRFTMAGAKDDSRDAEVMASALRTDPRCFRSLAAADPIIVELREWSRIAEDLGVERNRLINRLREQLWRYFPALLELEDDLGAEWLLELWEAAPTPNTASRLREATIAKLLKRHRIRRFDAASVVNTLRRPPVRVAAGTVEAASAHVALLVPRSRLLNRQIKDAHSRIDGLTARLMPAEAAEPGQKKQHDAEILASLPGVGRTVLATLLAEASDALQRRDYAALRSLAGVAPVTKRSGKSCVVVRRQACHDRLANAVYHWARVAVQHDPRSRAKYAELRSRGHSHGRALRSVADRLLNVACAMLKSGAAFNPSSAAQKPA

SEQ ID NO: 345195 - protein, 351 aa, unidentified
MVLAKIHSGSFRVLLIFKCKIMKNLYCGIDISKDFLDYAFCWDVDKKILNTSKVENSIKGIKELIKVLAKEADGAALWVCFEHTGNYGLLLAHLLEVHNVKFSMVPSLDIIKSSGLTRGKSDPVDARRIALYIATNAYKLTPTVLPSAEILKIKNLLSIRNHYVKTRTQFKNALKSLQLAGKNCDLKMEIRTYEKEILRFDGLIKKIESQILGIIKSNELVLKNYNKICQIIGVGPLTAASFIVVTNNFTAFENPRKFSCYSGIAPFEYSSGTSVKGRTKTSHYRNKEMKSMLFHAANTAINNDMQLRTYYNRKLAEGKHKMTVINAVACKIIYRVFAVVKRDEPFVKFSI

SEQ ID NO: 345196 - protein, 413 aa, unidentified
MNAVGIDVSKKKSTVTIRQPGDVVLLPPRDYRHTQSSINELIATIKGLDGETKVCMEHTGRYYEPMASWLTNAGIFVSAVNPKLIKDFGDESLRAPKTDKADSKKIARFALDRWTKLRQYSPMDETRNQLKTMNRQFSFYIDQKTAMKNNLIALLDQTFPGANGFFDSPARSDGSQKWVDFIYTYWHVDCVRGKSLSAFTEHYRSWCKRKGYNFSAGKAEEIYRVAVDLIAVFPKNENTKMLIRQAVTLLNTTSQMVESLRIQMDQVASTLPEYSVVMAMNGVGPTLGPQLMAEIGDPTRFTHREALTAFAGVDPGADQSGDHNRKSNRTSKKGSPYLRRTLFLIMDGLIQRSPADSPVYAFMDKKRTQGKPYLVYMTAGANKFLRIYYGTVRDSLKQKGLWPDPESDVVTPA

SEQ ID NO: 345197 - protein, 346 aa, unidentified
MLHAGLDLSRRRVDFHLLDGEGATVEIGSAPPDADGLRGLSERLERHGGPIRAAIESMNGARFVHDRLERAGWQVEIADAQKVKGLAPLACKTDRIDAWVLAELSRRELVPAIWLPDPHVRAERERARWRLHLVRHRSSLKQRVHAVLLAHGKPCPVSDLFGVAGRRLLARLALPEPWYDNVQASLRLIDELDREINDRETELRQLGADHRYVPLLLTVPGIGWVLAYTIAAEIGDIDRFPTPRKLAGYTGLCPRVYQSGESDRRGPLAKQGPRYLRWALVEAATHACTHRAYRERYQRTKARVGKQRGAKVAQVDLARRLAEAIWHMLSRNQPFAPAGATDPLAA

SEQ ID NO: 345198 - protein, 419 aa, unidentified
MSRSVGRAIGLDVHRDFCEVAICEAGRVRSAGRIKTSPDALELFARSLGPQDRVALEVTGGAWEIARILEPHVRRVVVVSPDDTGIRQARAKTDRLDARTLARLLWAGELDAVWMPDERCWVMRRRLARREQLVRSRSRSKNEIHAVLMRRLKGKPPVSDLFGVKGRKWLRELELPVEEAETVGSALRHIEFLDAEIAEVERLIAREALRSPDARRLMTVPGVNVICAASFLAAIGDIRRFRSSRQLVAYLGLDPRVRQSGSEPARSGPISKRGSASARWALVEAAWSVVRQPGPLHAFYDRVRARRGHGKAVVASARKLAVLFWCLLSRGEDYAHQQPSLTAKKLRLLEITAGAPALKGQRTGLWATRERMRLAERELAQQAEASYTRMVRDCQAAKPAKAPAAEPGKVGASVTAGRA

SEQ ID NO: 345199 - protein, 452 aa, unidentified
MPARTKRKAKGAGLPAQLQRVNLNAAAIDLGATAHFVAVPPGRDRESVRSFGAHTADLHALAQWLKHCAITTVAMESTSNYWVPLFQILEQAGFEVLLCNSRHVKNLPGRKTDVLDCQWLQELHTYGLLSGSFRPEDKVCVVRSYLRHRDNLTKAASAHVQHMQKALTEMNIGLHHVLSDLTGVSGLSIIRSILEGERDTLKLASLKHPYVRKPVEEIAQALVGDYREEHLFALRQALQLYEAYQQHIMACDQRIEAALRALKPAAATEAPPAAKPRKTAKAQADFALKAQLEALCGVDLTAVPGMQTLSAQILISEIGLDMSRWATDKHFCAWLRLAPGNRVSGGKRMRSKPHKGHNRAAQILRVCAQAAIQSKSALGAFGRRLRGRLDTPKAIKALAHKLARTVYRMLKTGRPYADAGEHYYEQKYRDHVLKQLHKKAALFGFQLTPTTE

SEQ ID NO: 345200 - protein, 314 aa, unidentified
MNTTNEINVGIDTSKAQLDIYIRPLDEFFSVANTAQGVKAVVKRLKTYCPTRIVIEATGRLELGFVIAAKKARLPVTVANPLHIRRFAGAAGQLAKTDQLDAKTIAHFGEALKPEPTELKPENVRLISDLLARRSQLLDMSTMEKNRLSILPQPLHASLKRHIKHLQSEVKKVEQRLDKLIEQTPQWQEKRDLLMSANGVGTVLTYTLLSDLPELGALNRKAIAALVGIAPMNRESGRYKGKRRIRGGRARVRTVLFMATMSAIQSNPKLKRKYTQLRAAGKPPKVAIVACMRKLLTILNVMMKTGQHWDPELA

SEQ ID NO: 345201 - protein, 345 aa, unidentified
MTSMNFIGLDIHKKTISYCVKDVSGKVLSEGKINATRQGLNEWMATLPKPWTVAMEATMFPGWIYDYLRPHAAAVKVAHPLMLRAIAVAKKKNDRMDASKIADCLRCDFLPECYMAPMEIRQRRRTLRYRKLLVRQNVQLKNKIAQMLMESGVSYNKDKLHQQGYFHQVLPANPEIDPSLWPLLKLSREMIERTQKTERALLRSLEADPLLAARVERLMTSPAIGHVTALTWVLEVGEVDRFHSVKQVISYCGLSSGEKTSADHSRRMPISKQRNRHLQTVLLEAAHLAPRLNPGLAVLYEREAARSNRNQAAITVARKLAAYLLAIDRGERAFATREVQNSVAA

SEQ ID NO: 345202 - protein, 346 aa, unidentified
MNKTEDGQNVYPFIVGIDVSKESMDVCMIELSTQHQYTKCLSNTSEGYAKLKRWLKQHGNDDHEQTLFCMEHMGIYTRNLVKYLMSRGGKVWLESSLHIKRSIGLARGKSDKIDAERIARFAMVHQREAKLIKLTHPTLERLQNLKRLRSRLLKSKMSQEFALNEMDHFDKKGTSELRRLSKSALEGIRKSLKAVEEKMLEVIQIDKEVRALYELITSVKCVGKVLATDLIVYTHGFTRMVDGKKLACYCGVAPFEYSSGTSIKGTPGTSSFANKVLKYDLHMAAMSAIRHCPELKEYYQRKREEGKDKMKILNAIRNKLLHRIVAVVKRGTPYEDRIGQNKVQMT

SEQ ID NO: 345203 - protein, 345 aa, unidentified
MREASVAEVSTIGLDIAKQVFQAHGADASGRVLFRKKLRRDKLLGFFAAQPACVVAMEACGGAHYWAREIARLGHEVKLIAPAYVKPFVKRQKNDAADAEAICEAAQRPTMRFVAVKSEEQQASAMVFRARDLLVRQRTQLINALRGHMMEYGWIAPKGPSHMAKLAELIGDPDVLPEAARAVIRMLLASLEALDRQIAELDKEISRRASGDAVARRLMTIPGVGPITATAIAALAPPVETFAKGRDFAAWLGLTPLQKSTGGKQRLGETSKMGERTLRRLLIIGSSAVVRHASKRGAPKGSWLEQMLARKPRMLVTVALANKMARIVWALLSRQEDYRAPAVAA

SEQ ID NO: 345204 - protein, 343 aa, unidentified
MDHFAGLDVSVNETSVCIVDDTGRIVREVKVASEPEALLAVLTNPACHFKRIGLEAGPLSQWLFSALTEAGLPVICVETRHMRAVLKAHINKTDRNDARGIAQMMRVGLYRPVHVKTLRSQKQRVLLTHRKLMQSKAIAIENDLRATLRNFGLKVGVVGTVKFEARIKELVENLPDLVVLVEPLLIVRRVLREQVSILHRRLLAIVRDDDVCRRLMTVPGVGPVVALTYRATVDVPSRFRNSKAVGAVFGLTPSKHQSGESNRTGGISRCGDEMMRMMLYEAAHIMLVRSAKWSWLKAWAMKIARHRGLKKAIVALARRLAVIMHRIWVDGTEFRWTREVTAA

SEQ ID NO: 345205 - protein, 337 aa, unidentified
MKLYGAIDLHSNNNVLVVIDENDNMLFRKRLPNDLPSVLTALAPFKPDLHGVAVESTFNWYWLVDGLMEHDYNALLVNTVAVQQYSGLKHTDDQSDAFWLAHLMRLGILPTGYIYPKKERAVRDLLRKRLQLVRHRVTHMLSAQNQLWRTTGLNVPNNIIKKADHSVLNLIDDRIIQMAIRSNLKMIDTLNQQIELLENTVKKHMALKPEFQSLLTIDGIGDILGLTIMLETGAISRFEHVGNFASYCRCVESKRLSNGKKKGTNNQKNGNKYLAWAFVEAAHSIIRHSKVAHRFYQRKRAQKNGALATKALAHKLARAAYYVMRDRAPFRRELLFQ

SEQ ID NO: 345206 - protein, 309 aa, unidentified
MNTEEKVYCGVDVSKKYLDAYLGRKTVRFDNSLEGAVELMKKSGEVHLIFESTGGYERVAAWFLLGKGRQVSIVNPGRVRDFAKSMGQLAKTDAIDARIITEYAQVRKPSSNKLPSEAQRKLTVLVDRRQQLIDMRVMESNRLGTAGEKIQQRHIKRHLRFLEKEIDAIEVVVSEILTTDDAMKTKAACITKIIGYGPVCATSLLAHLPELGSLSRKEVAALVGVAPVNRDSGSYRGIRHIHGGRKRLRACLYMAAVCASKSNPILREFYTRLVEENHRPKKVALVAVMRKMLIAANSAVKNADILVAS

SEQ ID NO: 345207 - protein, 402 aa, unidentified
MTYDYVIGMDACKYFHHAYVLDIDGTLVLSKRINQNEQSLRALFSAFSAYDHKVLVVVDQPNNIGRLTVAVAQDIGIDVRYLPGLAMRQLSRIHAGNAKTDIRDAYIIAHAAKNLPESLRSVDRVEEAFLQLKVLNGIDEDLARSYTRLINQIRSALVGCYPQFEQALRGQIIHRKWVLHLLARYGGPTKIKRLGKAKAAAFARRYKARNPEPVLDAIFAAISEQTVTIAGAHYAEMGVAMSAKDALLKLEHRQQIEKEVIELINDIPHTQFLLSMPGIGPKTAAQILMTAGDMSDFPSAGHLASYAGLSPRTNQSGTSIMSNSLNRAGNKKLKNALWQSSFASIRFHERSRQFYERKRREGKRHNAAVVALARRRLNVLYAMMRNHEHYHDPAPSQEDLAA

SEQ ID NO: 345208 - protein, 397 aa, unidentified
MGNEFAVCCGVDVGKWAHHVVAIDTETGEVLFDSKVDQSEREIRAALSPLCAAGKVRVVVDEPGPMSRLLFAVAKDMGMEIGFLTPRAMAKAIEMYGGDIKTDRRDATILAEVASGIPKLVKAVDEKTPERHRLAAIMSHDRELTAEVTRSANRLHALLLAVCPPLEELMAGKKIQGGLALLLLERYGGPCGLRTAGRGRAKRFVRSRKGFGGASGARVDRVFDAISEQTLVLPGAEDLEDLIRMEARRLSSALESRKTVAKKRDAILEAIPEAEILMSMPGVGAVTCATFLAEVGDVTRFPTAARLASYAGLSPKVRQSGRSVNSVTKPRGGNRRLKRVLVLSASKSILFCDESRKYYERKRAEGRCYNSSITALARKRLDVMYAMLRDGNKYKKK

SEQ ID NO: 345209 - protein, 363 aa, unidentified
MDFNAYLGLDVHKNTIAVAIADSGRTGDVRFYGEIDNTPDAVAALLKKLGNRYKRLHCVYESGPCGYGLFRQINDSGHVCEVVSPAHTPRRAGDRIKTDRRDALVLARLSRAGELTAVWVPDAAHEAMRDLIRSREAASKDVRQARQRIQGFLLRHSRRYVGAVWKKRHRVWLGNQTFEHAAQQIAFQTYLNAMDQACERKVAIQGEIVALLPEWSLGPVVEALQALRGVAPVIAAGVVAEVGDMRRFDSPRQLMAYLGLVPGEHSSGETRRLTGITKAGSVVARRLIVEAAWAYRMPAKIGQAMYQRQEELYRLEGTGSALRPISAYARPSKKAPVVITAIARELVGFIWAIAQIAPPRPAH

SEQ ID NO: 345210 - protein, 341 aa, unidentified
MEEYIGLDVSMKETSVSIRRAGERIWRGRCASDPRIIAELIRKRAPAVKRVVFETGPLSIWFYHSLRTEGLPAICIDARHAKAALDMATNKTDANDADGLAQLAEVGFFREVRVKGFDSMLTRTLVAARTRLVRITTELSNQIRGVMKTFGLLVPAGKGSTFEKNVRSLLADQDGLASIVLPMLEAWRGIRIRAAELGRQLVRDARQSQACRILMSIPGIGAITATAFTTAIEKPDNFKKSRSVGAWIGLTTRRYQSGEVDYDGHISRRGDSHLRGLLYEAAAVILTRSSTDSTLRTWGLKLRERIGFKRAAVAVARKLAVIMHTMLKTGELFHPNAGATV

SEQ ID NO: 345211 - protein, 365 aa, unidentified
MVRRFYLADLCMRGLRRRRPTELHTIGIDLGKTVFHLVGLNLGGEVVVRKKFSRTQLLRFTANVHVGLIGMEACGGSHFLGRALREQRHEVRLIPAQYVKPYVKTNKSDYIDAEAIAEAVARPTMRFVPIKTDDQLDLQSLHRVRERWVMRRTAVINQIRGLLLERGITLRKGRHHVHAALPLILEDADAKLSGAVRMLLAQLKLDLDQLAARIDEADAVIRKTAHENEACRRLVAIPGIGPVTATALIAAIGNGGAFHKGREFAAWIGLVPREHSTGGQQKLLGISKRGNSYLRRLFVQGARAVLQQRTKQSCGLSAWLAQLTSRTHRNVVAVALANKLARIAWAVLAKNEPYRHPILADAAAA

SEQ ID NO: 345212 - protein, 370 aa, unidentified
MGSKILFVGVDVDDKSFKAAALEEAGDEYSHFVTAPASVYLIKKLKSFESQGYEVRVCYEATFLGFSLYRDIAMAGIKCDVIAPSLIPDLAGKKVKTDRLDAQKLAKYYRANLLTRVEVPDEEDEAARDFIRARKRIVLQLVETKNYINAQCRRLGWNYKSECTRKALWTDHHERWLDQKVNECERVTVARQVALLMRHYQYLKNLIEEFNQEVETLSEKPKYKARVDALNCFRGLSTLSSLTITVELGDIKRFKHPAHLVGYVGLNVIEYSSGGRERKFGVSCMGNRHVRTTVVEAAQLAMRTPKVNRSLRSRRDGVETEITMIADRCMARLYTKGTRLLMRDKNRNKVKVACAREMIGFIWEALNKVS

SEQ ID NO: 345213 - protein, 425 aa, unidentified
MNTKQNERISQVSSDTLVIGVDIGEEKHYARAFDYRGLEFSRRALSFSNSAAGFNIFYKWLEEIKERTRMKKVIIGCEPTGHYWFTFQKFLHDHKLKLVVVNPYSVNRSKELDDNSPEKDDIKDPKTIAGLVREGRYSTAYIPEGNYAEIREAQVCRDQIMKQHVRLSNQIQAWLQQYFPEYLEVYNKFDAESGFLVLEKVPLPADIIKLGAEGIKQIWKDAKLRGRLGISRAQTLIEAAQESVGLQGGEAARFRIWVLISDYRRKQEQLERVDEILQKKVMLVPNVEKLLAIKGVGFSSVAGFIAEVGDIGRFTDPKQIQKLAGLEITKLSSGKRKGKPGISKRGRRRLRRVMYEAARALMIWDPAFGDLFLYYRNRMCHPLGSMQAKIAVECKAIRVFYAILKHGCDYDPKKLQKDIIRPATA

SEQ ID NO: 345214 - protein, 349 aa, unidentified
MDDESGEMRTSRISPKTAEIVKWAKALPGEVEVAYEAGPTGFGLARALIAAGVQCFVLAPSKMERPSGDRVKTDKRDCEWIARLVRLGELPVVVIPSEGQEAARDLVRAREDVRGDLMRARHRLSKLLLRQGIVYEDTAWTTAHGKWLRSQSFDKPGVQFAFDEAYDTVLTTLARRDRLDTAILAMAAEPTWAPVVARLGCLRGVATLTGFGLAVEIGDWHRFTGNSIGSFLGLAPSEHSSGGSRSVGSITKTGNGHARRLLVESSWHHRKPYRLSAEMIRRRDGQSPLVRARADRANGRLNQRWRTFDARKKRPTVAAVGVARELAGWCWSLAVMDEDNDNSAMKRQR

SEQ ID NO: 345215 - protein, 337 aa, unidentified
MRNIGVDLHSNSLTACYLNPDQSEQLKTVRLAELATFKASLRNDDQVAVEATGNVRWFVEQIRPLVARVVIVNPSQFEVIRKSVKKTERHDARALALFLSKDLLPEARLKEKPAAQMESLCQTRQQLVELRTGLRNKIHALHRARGLESKKSEFNSAKGLQAVLKREWEVLERVELEVIIQQIEALDEGIEKLNKQIAEHGRELAGHRNLTSIKGIGDKSAAILLSVIGNVQDFADAEKLASYFGIVPRVSNSNETVQHGRITKRGSKLGRTTLVQCTLVAIKYNEYLKKYYTRMKAKKGSGKAIIATAHKFLGIIYRTLKNNWVFADFPNFVLAED

SEQ ID NO: 345216 - protein, 407 aa, unidentified
MIFVGVDWAEAHHDVHVEDAEGRRLGEGRLPEGVEGIARFHELVGAHIEDPKEVIVGIETDRGLFVAALVAAGYLVFAVNPMSTSRYRDRHSSSGAKSDPGDAKVLADMVRTDRHNHRPVAGDSEVVTAVKVLARAHQSMIWSRRRQANALRSALREFYPAALSAFDDLASADATEVLKVAPTPSLGAALSLAKIASALRRGGRQRRIDERAREIQAALRAPQLRGSALVASAIGASVQASVAVISMMNVEITKLAQQLEAGFEQHPAAKVVRSLPGLGTVLGARVLGEFGDDPDRYASAKSRKNYAGTPPITRASGTKRVVLARYARNMRLADAIYLWAFASLTASPGARAFYDAHRKAGDTHHAALRALGNRLVGILHGCLVNGSFYDEHTAWGHRSESQLTEAA

SEQ ID NO: 345217 - protein, 387 aa, unidentified
MIAVGIDIAKRTHEACFMGQDGQVVAKPRRFHNTRRGVQALLDDLQQLREPATIGLEATGHYWLALHDALERAGHTVQVLNPLQTHAYRKTTIRKVKSDRKDAWLIADVVRIGRGRAAYVPDETILQLRELTRFRWGLVDQIGDAKRRALSVLDRVFPEYERLFSDVFIKSSRALLQRATTAAEFADADLAELASVLKQTSRNRLGLEKAEAVQAAARDSLGLAKLGGVASFELRALLDHIAFLEQQVVACEQQIEQLLATLEQHVSSINGIGPVLAASLVAEIGDVQRFARFESLVAYSGIDPTVFASGEFSATETHMSKRGSPYLRRALWLAAISASQTNPDLAAYLQRRLEQGKPWGTAMGAVARKLLSRIYVVLKQNRPYEVR

SEQ ID NO: 345218 - protein, 475 aa, unidentified
MAAKGLLTRGPKRSEPPEAHPQSVPVGKRTALKVQEKVAPRRAGIRATCRSRSAAASAVPEGGGPVRYHLGVDWADQTHAVWVVDERGTKITARTVPHTAEGLSEWGRELDEWRAHGIELWAAIERPEGRVVDFLLDHGIVVYPVNPKALDRARDRFRQSGAKDDPFDARVLADFLRTDHAHLRPLRPSSEAAQELKLLTEDYQRQVRQQTRLVNQLTITLKAYYPRALEVAELTTGLAQAFLQAYPTPAAVAALTERQWQRWARAHRLSATRTRELWEVLQRPQLPVPAHVVRAKARLMRSLVAQLTPVVAAVGEYREAIEDFFARMSTAQWIRTLPIGEHGITAPTLWARLGDAPGRWEAFRHLQAQAGAVPVTKRSGKQQRVVHFRVACDKALRYVVDQVAFLSLRSCEWARAYYDQQRGRGHSHRRALRALGAKWLKIIFVMWQRHASYDEQYHLATMARQQLRQPQTKIA

SEQ ID NO: 345219 - protein, 352 aa, unidentified
MPYDYHIGVDFHKAYSHIAVQDDSGKTLRSGRVRNDRRSVESFLAPFSDNAHAVLEACRNWTVMYDWLDEICEDVVLAHPLKVKAIAEAKIKTDKIDATILSHLLRADLVPTAHAPSHRARELRQALRERMFYVRLRTMVKNRIVTLFDRYPEQTAQLKRCTDLFGTTGRKQLAEIEVSELDRIQIDRSLAFIADINRRIKEAEATIKALSQGNTNVKRLKTIPGIGEFFARLIDAEIDDIGRFRSAKKLAAYAGIVPSTYASGGRTYHGRIIKQGNKWLRWAFIEAVAPAVASDPELKELYQRLGAKGSNRAKVAVARRLLTIAFQVLREGRSYECRGPHDERASTSSRLS

SEQ ID NO: 345220 - protein, 318 aa, unidentified
MDVHKESITACIMDRGGNIIRQHTFPYNEESIKAFLFGISNAEIEIAIEACGIWRGVYKLLKELGYKVRLANPNKTHNIACRKKTDKVDSRILADLLRTNYLPEVYIPDEEMLGLRDITRHKSNLTRLRAEIQAKIKGYLLRKGIKYGKIWNEKALSKLAEDDPDIKNLINVYWSLKEEEKEVMRRIRKIAKNMREANLLMSMPGIGEFSSLMILAEIGDIRRFESPKQLISYAGLCPGIYRSGNTERNVRNNAVNKWLKWIIYECSGRATMLDSRFQEYYYKIKQRKGFKTARRAVARKMLTIIWYMLTNEETYRNN

SEQ ID NO: 345221 - protein, 357 aa, unidentified
MKVTTIGIDLAKDVFGLHGVDGEGRVTFKRRLVRSRLLEFLSQLPRCLVGLEACSSAHYWAREIERLGHRVRLMSPRFVKPYRKSDKNDANDAEAICEAVTRASMRFVPIKSEAQHEVQALHRVREQLLKSRTALVNQVRGLLAEHGIVAPQGIARARRLLLEILADPERHGLSGLFRETLQEIAERLRFFDERVGAYDDRIERVFKEDERCRRLAKIEGVGPLVATAVVAAVGNASEFKSGRELSAWVGLVPRQHSSGNRSQLLGISKRGDRYLRTILIHGARAALRRADHKRDQRSRWAMRIKLARGYNKAAVALANKNARIIWALLTRGENYRPPAISVASPTADRISLTQVQA

SEQ ID NO: 345222 - protein, 322 aa, unidentified
MKYIGIDVSKATFVVAYSSDKGGEIRIFNNTTTGIKQFIGALPKDGSIHCVMEATGNYSAMLLYLLNVAGIAVSMENPLKIKNFARAMLSTVKTDKIDARLIALYGEKMNPQPFKIQGEAILRLRQKRTVIRQLTKQITAMSNLRGSLACLPVPDKGATHTVDETIEFLEKRRDRLQSELTDLVEVEFSRQLALLTTIKGIGITLATALIITTGGFTYFQNAKQVSRYLGICPTYEQSGTSVNIRGHINRNGDAYTRGLLYVAAWTASRFNTKCGETYTRLRQNGKPGKLAMIAVANKLVRQAFAVVTHDKEYVDGFVSNRP

SEQ ID NO: 345223 - protein, 406 aa, unidentified
MQGPVITVDVSKGSCHYQPYIEYGKPMRKPKVLHDTIEGFAELNNAIETIKQKSECDIVPVVFEATGVYHRCLQKYLNDNSIPYYIISPLLSAAYRKTKINGNKTDDLDCTHIAKAYYGEDNLLPYERPSDHYELMRSMNRQYELEVGHLRKRKVDFRSTLDIIYPRLDKCFKGNASLYDEVPLELLKRYPHPSLLLKQKEETVIKVVVKKTSHNLKFVSAIVHKMYECASHCYSGADINDYEVITLPDMIEEIQYQMNRCDSMLNQLIEEARKDSNFVCVASIVGIGENLAARIIAELGDISRFKNRKAITAYAGLNPKILQSGDIDGIHLHISKKGNRHLRSLLYLGASCNYRLRKHDPIYEFNQKKRQQSQSPLRHKAANIAAAHKLLVIIYALSRSGELYHL

SEQ ID NO: 345224 - protein, 338 aa, unidentified
MIAVGVDTHKQRHSAAALDELGHVLGEFAFAATAVGYADLQRWAQSHGNPDELVFGIEGAGSWGAGLCQHLQHAGHVVVEVERPRRSERRAGKTDHIDALAAAKHVLVGEVSTPRRRGILSALRALLNVRRSTIAERTRLLNQLQALNVTAPVALRERIGDGTGKQLERRLLSMRSRAASDIEERAVFGVMRDLAARSRTLATDARRYEKQLAELVRSLDDTLLDEPGIGPISAAKLFACDPARFKHEAAFARCNGTAPIPASSGKTIRHRLNRGGDRQVNNAIHTIAIIRAKHQPETRAYLDRRIREGKTKREALRALKRHISRELFKRLAEVPLTS

SEQ ID NO: 345225 - protein, 343 aa, unidentified
MLYAGLDLSRKRLDFCLLDGAGFAVAEGAAPPDRDGLRTLARRVGQHRQPVFAAVESMNGARFVHDELERHGWRVEVADAVRVRGLAPLACKTDRIDARVLAELCRLDLVPAIWLPDQAARGARERARFRLHLVKHRSSLKNRIHQTLLSFGQPCPLSDLFGVRGRRQLELLEPWAGTVDASLRLIDELDREIATLERQLRQLGADHPYVRLLVTVPGIAWVLGYTIAAEIGDINRFSAPAKLSGYTGLCPRVYQSGEHDRRGALTKHGPRYLRWALLEASIHACRHPLYAERYQRTKHRLGRQRGPRVAQVDLARRLAEAIWHMLTRNQPFAPAGAAKVLAA

SEQ ID NO: 345226 - protein, 427 aa, unidentified
MAAREKVGEPEFVAFVGIDWADQKHVWCLQAANSAKRETGELEHKPEVVEAWVSELCQRFGHGPIAVAVEQVKGALVYMLGKYECLHLYPVPSTMSASMRKALYPSGAKDDPRDADLLLDLLLQNRDKLRRLTPDNEVTRRVQNLVEERRKLVEEKTAQLNRLTGYLKVYFPQMLEWFAKLDTKLACEFLERWPSLEELQAAAPAEVRKFFRQHRGRHPELTEWRLQGIGQAMSAIRDGAVIEAKRMVVQVIARVLRTLLEGIAALDGKITEAAEAHPDFFIFQSFPGAGAALAPRLLAALGSQRDRYASAEEVQKYSGIAPVTERSGKKKWVHFRWACPKFLRQSFHEWAGHSIAQSVWARAYYQQQRQRGKDHHAAVRALAFKWIRIVFRCWQDGVAYDENRYLATLAKRGSPLIPVPAVAAPSL

SEQ ID NO: 345227 - protein, 346 aa, unidentified
MRYSTTVGVDLAKNVIQISVVNGRGKELSNRSLSRKKFAEFLGKHKPSLVAFESCATAHYWARAAERHGHEARIIPAKAVAPFRQGHKTDSNDALAVAEAARRPNIKEAPMKTTEQQGLQAIHRSRELLIQESTALSNHLRGLLLEFGVVIPQGFASLLRTLPEVLEDGDNELPDLYRPTLHRMYTRLLELREDIDAMTDEVARLVKEHPVCNKLTALEGIGPIGALLLYATMGSGKAFSGSREFAAYLGLAPRQFSSGGKTNIVGLSKKVGNSRLRSVLILGARAYTYRMKEPKGSKDKWLQAIVARNGVSRAAIALANKNVRTAWAMVTQGTEYQRRPQLEMAA

SEQ ID NO: 345228 - protein, 344 aa, unidentified
MDHFAGLDVSVKETNVCIVDDTGRIVREVKVTSEPEALLQVLAKPAYRFKRIGLEAGPLSQWLYSALTEAGLPVICVETRHMRAVLKAQINKTDRNDARGMAQMIRAGLYRSVHVKTLRSQKLRMLLTHRKLLLSKAIAIDNDLRGTLRNFGLKVGIVGTVTFEARIKELVENLPDLAVLVEPMLVVRRVLREQIGILHRRLLAIVRDDDVCRRLMTVPGVGPVVALTYRATVDVPARFRNSKAVGAVLGLTPAKYQSGEINRTGAISKCGDEMMRVMLYEAAQVMLTRTNKWSWLKAWAMKIARHRGMKKAIVALARRLAVIMHRIWVDGTEFRWTREETAAA

SEQ ID NO: 345229 - protein, 313 aa, unidentified
MSQNNTVILYVGLDVAKLSLQLHLAGSLHSLANDAKGHAQLLKLLRPHPAAHVVCEATGGYEQAIVRFLQAADIPVSIVEAARVRYYAWAQGQRAKTDPIDAAILTGYGRVFKPAATPATSPQRQRLADLSQRRRQLIHTRITETNRAEHYTDELCVKQARQLRKTLEKQIEQCDQAITALIAEDALLAQQAQRLETIPGVGPVVAATVLADLPELGTLNPQTAAALAGLAPYNRDSGAQAGVRHIRGGRRSVRCALYMAALSAVRHDRILKEFYQRLLAAGKKPLVALTACMRKLVVLMNHLLKNNKFQLAG

SEQ ID NO: 345230 - protein, 402 aa, unidentified
MNSVGIDVSKGKSMIAVMRPFGEVVVSPYEVKHTDSELSELAKLLRSLSGETRIVMESTGSYHLPIAWALNDAGFYVSVVNAMLIHDYKNNSLRKVKTDKKDAIKLANYGLDRWLELPRYVPEEDTRLLLKNCYRQYQQYAKVQTMLKNNLISLLDTTFPDANRLFSSPPRADGSEKWVDFIDTFWHCECVCGLSEKTFTTKYQKWCKKHGYNFSQDKALDIYASACGHFTVMPKTDTTKLLVQQAVAQLQATSSALAALKKEMLTLASSLPEYPVVMKMFGVGPTLGPQLMAEIGNIHRFHSKKALVAFAGLDSPPDDSGQVTNHHRRMTKRGSPALRRTLFLVMGVILQKAPPNEPVYQFMDKKRSERKPYRVYMMASANKFLRIYYASVKAHLDALEEA

SEQ ID NO: 345231 - protein, 352 aa, unidentified
MTSTKYIGMDVHKESISIAVRNDAGKIVMECVIETTNIILDFIHGLRGELQVTFEEGTWATWLYDLLKPHVTKLVVCDPRKNSRQGNKNDRIDARELADRLYMNKLNSVYHGGAGVRTLKELARSYSDHQQRSRRVMTRVKAIYRSWGIPCAGKQVYAPRHRAAWLAKITEVGVLRRAEFYYQQLDALRSLRHEVRRALLAESKKHKATKLLCQIPAIGPIRAALLIALIQTPHRFRTKRPLWKYSGFAIETHSSADYRSVQGQLHKSKKQVSVRGLNRDCNHDLKNLFKSAATIASVKPGPFQEFYAALVAKGMRPEMARLTLARKMATIVWIVWKRGVSFDAQYLKPQTA

SEQ ID NO: 345232 - protein, 425 aa, unidentified
MKNNILETLFVGIDVSSKTNVLCALDFSGNKLLNLKALNNQPGAKSLLDSVLGCLDSNSLKYVVIALESTSFYSTHIANFLASNELLLAYKPLVYCLNPKTIHNYRKSFVDMDKTDPLDAYIIADFARCGRITSQPWRGAQFLALQRLTRHRLHLVECITREKTYMVSNIYLKFSELAVLDKKDRPFSNSYGVTSAAVLTDFLSLDDITYSSIDDLVAFVSEKGKNRFSDPVETAKLLQKAARDSYRLDKVLYEPLNVSIASSFNVIKALDDEVKAVDKAIEKTIKGINTTEYQSLISIPGIGPVLAGGILSEIGTITSFKSHDSLAKYAGLTWRVNESGDFKSDETRMTKTGNKYLRYYLIEAANCVKKQAPEYKEYYLKKYSEVTKYSHKRALALTSRKLVRLIFGLLTKNQIYSNDKVGEIQ

SEQ ID NO: 345233 - protein, 441 aa, unidentified
MTKIVNPNAGGIDIASAVHYVAVPEEKCKENVRSFKSFTRDLHKLANWLVECGVDTVAMESTGVYWYHLYTILLDYGIEVYLVNAYHVKNVPGRKSDVSDAQWLQELHTSGYLKPCFQPDNLTRALRNYVRQRKILVCDMSTETLRMQKAMVQMNIKLHDVISDIHGVTGTSILNAILAGERDAEKLAELNNYRIKASKETLIKSLEGNWREEELFNLAMAYKRYKFNKSLLLDCDRECEKIVAQLAKGSVHDKEIKPLPSAKNQPTFNVRKYLYQTYGVDVTMIYGFKQTSALTVLSETGPNIKEKFPTLKQFLSWLNVVPNNKISGDKIISSRVKKKKNNAGQTFREAANTLWNAKNPLGDYLRTKKSKSGSGQAIVATAKKLATIFYKMVTEKVEFDPYILDGNRQNYLQHKAKRLQKALESTNLLIAQCQHVKPTVR

SEQ ID NO: 345234 - protein, 371 aa, unidentified
MEQEHGVGGIDPHKQTATIALVAHRGGLRSCESFPITTDGIDALLTYLLDSEIIIERIGVEGSAFLGRPLVLALTAAGYDVREVQANRTAERRSRRRRAKTDAEDAEAIARETLAEPNLPPAGKHRVPNPVWQQLTAIRGWRQSLVLQRVRLLNEAEAVLVGLPVSIRGALPKTSRVLPQLKALAGDGIDLSGCGAAERINLDRLAATLDDVTALTRRIKDLDAKIRPILTALGCTLPTIPGIGSVTAMDLLCEVGDPLRFTNEAQFARWCGAAPVALSSGEGHGPARRHRLDLGGNRAANSILHTVHVTQIRCHPPAQAYMPRQAENHKPKHAARRSHKRQLANVIIRHMWTDAGRDATTPAAAAEIVAV

SEQ ID NO: 345235 - protein, 391 aa, unidentified
MIFVGIDVAKDKHDCFILNSEGTVLADVFTITNNRIGFETLLSRIQSCSQGESKIKVGLEATGHYSYNLLGFLLDSGLATYVINPLHTNLYRKSLSLRRTKTDRIDARTIAMMLMSDVDLKSYSNTAYHNEELKSLTRYRFDKVKERAKLKSSVARLVNILFPELEKLVSSLHIAVVYALLSNYPGASYIANANTEELAETLCTASKGRYTKSKTAEIQVAAGVSIGSKMPAKSMELKHTIALIRELDKEISEVESAIDKITSQMDSPIFTIPGIGRHMGAMILAEVGDFSNFASADKLLAYAGLSPSTYQSGQLQNCYAHMEKRGSRYLRYALFNAAKYVCLWCPTFSAYLEKKRSEGKHYNVAISHAAKKLVRLIFAMQRSGKAFLADY

SEQ ID NO: 345236 - protein, 434 aa, unidentified
MAALKLEFEVKRLKCAGLDVHKNMIMAAIIDTDPETLEASYKVRKFSAMNDDILNLKDWLLENQCRDVCMESTGKYWIPVFNILEPHMKNTVLTHPKYVRAIKGKKTDKRDARWIANLFRFDIVKQSFIPPADIRAMRELSRYRMKLACVETAEKNRYQNSMTISRIRLDSVLSDPFGKSASAIMGYLLSEDSPDEEKVLSLLDPRVKADPKEILRSVRGFKILNEQKFKMNHAQSHMNLINCSIQEINDELLKIAAPYAGQISCLSTIPGITEKSALYVISEIGTDMSVFESDKHFISWCGVCPACNESNSKKHSTRCGKGGRYLKPLMVQCAYATIKDKKHPYYAIKYNRIAKRRGRKKAIIAIVRMMLTSIYHMLKDGTIWNPCDYEDVVHPKKPEKVVLNITNAIQFLREQGADPETLNLIKVQCATKSA

SEQ ID NO: 345237 - protein, 337 aa, unidentified
MQIHSVGIDLGKTTFHLVALSASGKVLLRKKFTQRQLITFTANMQCSLIGMEACAGSHFLGRVLREQGHDVKLIPAQFVRPFVKSNKNDFLDAEAIAEAVDRQNMRFVPIKTDDQLDLQAIHRVRDRLVARRTSVINQLRAFLLERGLVFAKSPAKLRERIPEILENAEANLTPRMRNLVSLLWSEWKDLEQQIVVMNEEIEQIALSDPACQRLRQIPGIGPLVATAIVAAIGNGAAFRKGREFSSWLGLVPRQHSTGGKARLFGISKRGNRYLRKLLVHGARSAVLRVKRERSPFGPWLDMLETRAPINVVVQRQPTSWLASPGPFYPAARTIAYR

SEQ ID NO: 345238 - protein, 308 aa, unidentified
MIGQNYVGCDISKLWLDFFDEASSRCQRIDNQADAIAAYVAGLDPDRDFVVMEATGVHDRLLRHALAKAGVAFSRHNPAHTHHYAKSTRRRAKTDRLDARMLSDYGRRYQPEAEPAPREDGERLQSLARHRDQLVDMRARLKKLLGEAFEETVVAELEDMIAHFDARIKALESRIAEVIRQAEDTARDHALMVSVPGVSKVGALSLLAHLPELGQRSSKSIAALAGLAPFDNKSGKLNRRSQIQGGRSRVRRALYMAALSAIRTCDRFRKFYTDLAARSGSKKLAIIAVARKLLVVLNAIIRDKKAFA

SEQ ID NO: 345239 - protein, 313 aa, unidentified
MPVSLSKPIVGVDVAKNELVIYQADGDLLEEIPNTKTSIKQWLKALSGTVAIAIEATNIYHLDFADLAYEAGCTIYMVGGYELKHYREGVKIRAKTDALDAKLLARYLKNEAEELRPWTPPSPLYRQLLSLFRRRAALVQARVGLVQSWSNEPLLKAAFAEQVKSMQQLETLIEKTINDQLKEAGLLGQLKRCLKVEGIGFLTGARLITAFQRGDFRNADAFIAFLGMDLRVAKSGQKDARRSLTKRGDPEARRLLHNAAMSASRTKAWKGYYEEQRARGFSTTQALVILARKLARVVFALLKGQSEYQPKAS

SEQ ID NO: 345240 - protein, 360 aa, unidentified
MVVQRTSVGLDVHARSVVACGLDRETGEVTERRLTPDHREILGWIEDLPGPVAVTYEAGPTGFGLARALQTAGIWCEVAAPSKLIRPAGDRVKTDARDAAHLARLLHLGQITAVTVPTADQEAARDLVRAREDCRGDLMTARHRISKLLLRQGIVYYDGNAWTSRHELWLRKQRFTNPALQLTYDAAFDAMTACLDRRQRLETAIEVMAADSEFTPVVRRLGCIRGIATLSAFGLATEIGDWHRLTGRTIGAYLGLVPSEYSSGASRTQGAVTKTGNGHARRLLVEAAWHHRTPYRPGTVMRRRWDLASPAARARGQAANRRLHQRWAHFDERKKRSVVANMAVARELAGWCWSLAVLDE

SEQ ID NO: 345241 - protein, 348 aa, unidentified
MDHMGIDVHKRESQIYILAEDGEIIERRIRTEDERFAAVLGDRPRARILIEASTDSEWVARCLEALGHEVIVADPNFAPMYATRTRKVKTDRRDARALAEACLLGAYRPAHRLSDRQRHVRGRLGVRDALVHTRTRYISVIQALLRQHGYRVPSGSAGSFIDRVRSLPMPGRLRLVVAPLLAVMGHLNQQLAYSDATIEHLAVQDPRVTRLRSVPSIGPVTAAAFLAAIDNVGRFHHAHQLQAYLGLVPREYSSGDTQRRGPITKAGHSRVRWLLIQAALSILRRRPPAAEALWTWALRIAARRGKPVAVVALARRLAGILYALLRDETVYAPRRAAALPDPVAALHV

SEQ ID NO: 345242 - protein, 310 aa, unidentified
MTETKTKYCGADISKEWIDIWSQGRVERIANTARAVRAFLKKLPVGTLVAMEATNDYHLLLADIATELGLTAYVLNPRITHHYQEALALRGTTDALAARTIASFIQHHHPDVRVYVPADPQTKQVRTLLRRRSKLVDVCVQLRQSVSQISSIRKEVEVAIAKLGKAIEKIDTLVDEMMQGNELRERLQTMRGIGPVTSAVIATELEAHDFATSDAFVAFCGLDPRPKESGKHKGKRKLSKRGSRSLRTCLFLAAMSASSTKLWRPYYEKTKAKGLAKLQAILVLARKLARIAWSIQRHNTVFDPARVPTA

SEQ ID NO: 345243 - protein, 338 aa, unidentified
MRLYAGIDLHSNNNFIGVIDEQDRRLFQKRLPNRLEEILQALEPFKESLEDIVIESTYNWYWIVDGLMEEGYKVSLANPSAIQQYEGLKYTDDRWDSFWLANMKRLKILPEGYIYPKEERPVRDALRRRLMLVRQRTSLILSLQGGIARNLGTGISANEVKKLTEIDVEQLFESPFLVLAARSQLSVINYLTTKINEIEKAVKSHVKLKPEFKILLTMPGIGEILGLTIMLEAGDMGRFPGVGDYSSYCRTVRSEKISNKKKKGKGNQKNGNRYLAWAYVEAANHAIWNYPEFKKFYNQKSADRNKIVAIKALSNKLARASYYVMRGQVPYDEKKLFR

SEQ ID NO: 345244 - protein, 301 aa, unidentified
MSSEVKYIGMDVHKEAIVIAVRDSRGHVVMESIVETKASSILQFIRGLQGELHVTWEEGTWAAWLYDLLKPHVHRVLVCNPRRNALLKEGSKNDKVDARKLADLLRTGMLRPVYHGEHGLRTLRELARTYQTLSQDLNRVMNRLKALYRGWGIACGGTQVYAPRYRDEWLGKIEHAGVRRRAELLYQQLDGLQALRRTLRSELLAESRKHKASKLLRQIPCIGPIRAARLVALMQTPHRFRSKRQLWTYSGLGIETQDSAQYRFVRGELQRAKKPQQIRGLNRNHNHEMKDIFHFGSRASS

SEQ ID NO: 345245 - protein, 377 aa, unidentified
MDQVVASTPRIDNLFCALELSKNTWLLGIQFPDREQPSVYPIKGGDSEGLMAKLRMASDRCAKLSGRKPSIILCYEAGYDAFWLARFLKAHGIECLVIDSASMQVNRRSRRAKTDRIDLGKLLRALLAWCRGERHVWSVVRIPSIDEEDLRRSHRERSRLISERTAHVNRIKGLLFTQGIRGINVKTDYKTLRVDKLLTGEGRALPPRLAQEIAREIERLALVQQQIAAAEEERDKDVTCKETEKKRLQLLALKGIGPTGSAVMAREVYYRQFSNRRQVAGFLGLASSPYASGELERCQGISRAGSGPVRATIIQISWLWLKHQPKSAITQWFVQRTEGQSARTKRIMIVAVARKLAIALWRYLELGLVPQGAVLTR

SEQ ID NO: 345246 - protein, 318 aa, unidentified
MNVIGLDISKDTIDVTLITAKGEMDYIKIENSHEGFEKLIDWIKTKRVRKIAISMEATGVYYEQAAEYLSAVYTVYVINPLKIKDYAKSQFSHTKTDKADSKLIADYAKRHLDKLTPFRPSENPMLYKLINLLQQLKQQKHESQNRLHTAKDPFIRSTHETIILLLSKKIDETSKRIDSTIKQQKSLNVEYQNLQTIPAIGKDTAAILLRHLTDKTFRTANQFVSFAGLSPKIEQSGSSVNKKGRLSRYGHRQLKRALFMPALVAYRINAFPQLVKNLEAAKKPKMVVIVAIMRKLAKIAYYIHKTQKPFDKARHQTV

SEQ ID NO: 345247 - protein, 325 aa, unidentified
MIKTMQNQNTVVYAGVDVAKATLQLHLQGQQSEFNNTAKGLHQLCTRVQKVPSVHVICEATGGYERALVKALQQEQIPVSVTNPARVRAAAQAQGQRAKSDPIDARGLTDYGQRYQPEPTPPTSATQDRLVALTQWLKQLIHGLALAKTQAEHHQDPFVRRQHAKLMTHLQSQIEAVEKQIKALLKQDAELQERVNCLDEIEGVGLRTAWMILAHMPELGYMNRQEVAALGGLAPWTRDSGAMKGRRCIGGGRPEVRLALYMAALSAARCNPVLRALYKRLRAKGKLAKVALTAVMRRLLTYMNHRLKALLSKTATAKAQEPKIA

SEQ ID NO: 345248 - protein, 347 aa, unidentified
MTTMPPAITGGVDTHLDVHVAAALDPTGALLGVEKFDTTPAGYTQLLDWLRSFGELERVGVEGTGSYGAGLTRHLHAHDVSVVEVDRPNRQRRRRRGKSDPQDAITAARAAQSGDAHGEAKTRDGNVESMRVLRVARSSARRSRTQCWNQMRSIISTAPEPIRAELRHLNVYRLIERASAYRPGQRRDVASLTKLSLRLLARRAAALEAEVAELDAILEQLVHDTAPELIARPGIGTDCASALLVAAGDNPERLRSEATFAHLCGVAPIQASSGKHDQHRLNPGRRPPSQLGAVAHRHHRHGLRPAHPPLHRAAHQGRPLQEGSLPMPQALHRPRGLQLPTPSRTHP

SEQ ID NO: 345249 - protein, 397 aa, unidentified
MYIVGIDIAKRKHEAAVIDGEGTVIIKPFSFTNNCSGYNRLLAMLTKAKLPLDEVSFAMEATGHYWLALFTRLQKEGFRVQVINPVQTNSIRSFYIRQVKTDPRDALLIAEVIRFGHFSESTLHPENIYELRELCRGRHAIVSMQADVKRKVVALLDQVFPEYETAFTNLFGDTSMAILQTCPTPKELSEMPLEELCHLIEVSSHKRFRMAKAQELQALARNSFGFAMAGDVFSTMIRLYAKHLDFLKQQVREMDRKIAEIMETLDTPITTITGIGPTLGAYILSEIGDISRFSSAAKLAAYAGIDPTMRQSGEYNGVRNRMSKRGSPYLRHAIWLAASSAVLHDPALKLYFQKKRDEGKPYMASVGHACRKMVSIIYAVMRDNKAYTPCIPNEISA

SEQ ID NO: 345250 - protein, 368 aa, unidentified
MTDYIITGCDLHDNSIVLKISRNSDEPESRSFRNTTSGRKGMIAELKKRAKDAGGARIVFAYEASSQGFGLCDELTDAGIDCRVLAPTRIPRSTRQKKSKDDDRDALQILEILRAHLLAGNEMPEVWLPDKQTRDDREVMRARLDAGEKTTAIKAQIQSLLKRNSIRKPEYVGGSWTVRHRAWLASLSRGKSALPFGAGVALGSLLRQLDAMEEETRNLDVMVEYLSQQPRYVPAAGKLMKEKGVGLITAMVFLTEMGDMSRFANRRRVAAFLGLVPACYESGERDDRKGHITHQGPFRMRKVLCQAVWARVRYDKKEKDVYERIVGRNPKHKKIAVVACMRRLSIRMWHIALGCKRLSAAGGQSEAA

SEQ ID NO: 345251 - protein, 368 aa, unidentified
MHLQCPVLKLGHSCWRNIMNSNSSQNNLIVGVDTHLEVHVAVLINLLGQVISTSEFETNLKGYEKLIKWCQSFGHLTQAGVEGTGTYGAGLSRYLLNQGIEVFEVNRPNRARRRLKGKSDSTDAENAARAVLAGEAQAIPKAQNGSVEAMRFLLIARRSAVKARTQAINQIRAMLVTAPDEIRLKYLKSSQTQCIEGCINITISEESTLLKMLSVSLSLLAKRWLNLTEELKIIDKNLNKLTRCTAPSLIDQYGVGPYVAATLLVTAGDNPERLKKESSFAALCGVSPIEASSGKTVRHRLNRGGSRVANNAIWTVTLIRMRSDPCTQQYVTRRTAEGMSLKEIQRCLKRYIARKLFPIILSDLATST

SEQ ID NO: 345252 - protein, 420 aa, unidentified
MLTIYYKNCCGIDVHKKQVTCTIALTDNEAITTYKTKQFSTMTYDLKNLKIWLADNNCNDVCMESTGKYWIPVYNILEDTCKITLCHPKYVRSILGKKTDKKDSIWIADIFKHGLVQGSFMPPKDIRELRDLMRYRFKLVNLKASEKNRFQNSLTVSNVMIFNILSDTFGKTSMSILSLMLENKTLKIEDIKPLIRKHVKASPDEILKSVEGTFSNYQNKKMQVCLNHYGDVIIAIDDIEKSVIELALPYKEQLNLILTVPGIKETSALVILSEIGIDMSEFADAEKLCSWAGLTPQNSESAGKKKSVRVSRAGVYLKPTLIQCANAAIKDKKCPYFKLRYENIKKRRGHKRAIIAIARMLLSSIYSMLKNNKEFDYSIYEELTNKNFKPKDTKLNISNAIKFLESQGYSVSNLETIPSV

SEQ ID NO: 345253 - protein, 350 aa, unidentified
MKRKQFFIGIDVSKPYFDASLLVVIEHQKQEIQSQRFENTRNGLKSFEKWLKSHKVTFDNQSLVVIENTGIYHRLLWMFCSEKGLPLHIGNAAHIKWSFGIARGKSDIIDSKRLCFYAAKEADQLKPSPILNQDILKLKDLMSCRSKLLEQGNSIKHHLKELKTSNDKSTQTLIENAHKQALSGLKASIEKIEEQIKYIVESDEKLLNNYRLLITVPGIGHLTAIYIICCTNNFIAKITGKQLACYAGVVPFEHSSGISIKGRNRVHKMANKELKSMLHLCSLAAIQRYDEFKNYYDRKKQEGKHGLSILNAIKNKIILRAAAVINNQKPYQENKEYESQLFRKNYLQKS

SEQ ID NO: 345254 - protein, 356 aa, unidentified
MNKISKLNFKGQQIYAGMDVHKKSWSISILTNEFEHKTFSQPPEVGTLVNYLKRNFPGASYKSVYEAGYCGFWIHDRLQEQGVQCLVVNPADVPTTDKERTKKTDRVDCRKLARSLRSGEIEGIYVPSRPKVEDRSLIRTRQSMVKKQTRCKNQIKSILHFYGIQIPEELANGNWSKRFINWIEEIRMERASGNFALKVHLEDLNNMRKLIADITRAIRSLANSGEYRQNVRLLKTVPGISTLTAMILLTELYDISRFKNFDKLCSYIGLIPDTDSSGETDLKKGITSRRNAQLRGILIECCWVAVRKDPALLMSFNELSKKMPKNNAIIRIARKLLNRIRYVLKNKQEYVSAVVQ

SEQ ID NO: 345255 - protein, 403 aa, unidentified
MNSVGIDISKGRSTIAVMRPFGEVVISPFEVRHTGSELSELARQLKSLDGETRVVMEATGNYHASVAKLLHDAGLYVSVVNAKLVHDYGNNELRRVKTDRKDAVKLANYGLDRWLTLPRYIPEEDTRLLLKNCYRQYRQYSKVQTVLKNNLISLLDTVFPNVNRLFSSPIRGDGSEKWVDFVAEFWHCRCVSEKSERAFTSKYLRWCRKHGYNFSEAKAHTIYAEASGHIGVMPKSETTKLLVEQAVSQLRATSTALAALKHEMQSLASQLPEYPVVMGMFGVGPTLGPQLIAEIGDVRRFYSKKALVAYAGLDAPPNDSGDVTGRHKSMSKIGASSLRRTLFLVMSVYLQTAPLDEPVYQFMDRKRAEGKPYRVYMMASANKFLRIYYATVKAYLESLEHTA

SEQ ID NO: 345256 - protein, 343 aa, unidentified
MNYYVGIDVSLEASSLCVVDGDGKIIREDKVASEPEALITWLRALKLDLARIGLEAGPLSQWLYAALRQAGFAVELLETRHLHNAIKTMPVKSDRNDARSIAQLLRLGWFRPVHCKSMEAQERRAILTARKLLQSKLQDIEFSVRGILRGFGLKVGKTTPARFAGRVKELVAGHPHLEAIAESLLAARLAMLREFNRLEKQVRDMARTDSRARLLMSIPGVGPIVSLTFASAIDDPGRFTSSKQVEAYFGLTPTKYQSGETDIDGRISKIGDASVRANLYEAAHIILTKPLKGCRALKSWAMRLARRAGTKKAKVALARKLAVIMHRMLVDGICFRGAAARAL

SEQ ID NO: 345257 - protein, 428 aa, unidentified
MNNTLTATLFIGIDVSSKSNYVYGMDFFGNKLLSFQTSNNNPGAEVIGHEILQCLKKNSLTHLNIAMESTSFYSWHIANFLSCHEELLWFKPKVYCLNPKVIANYKKTFIDIDKTDPKDAMVISDFARVGKITTEPWKGSQYIALQRLTRCRLHIMENITREKSYILSNIFLKFSELAVLDKSDRPFLNKFGAASSAVLTEFMSTEEIANTDINQLVNFLIDKSKNRFKDPMATAKILKRAARDSYRLDKSLYNPLNAAIAASFNCIKALEKEVRTLDKAIERAVKVLQTHEFECLCSIYGIGPVFAAGITAEIGDITKFNNQASLAKYSGLTWRKKQSGNFTAEDTYLTKTGNKYLRYYILEAAGSILRFNKEYNDYYHKKYNEALIHKHKRALALTGRKLIRLIFALLSKSQLYTMNNNADKAINS

SEQ ID NO: 345258 - protein, 403 aa, unidentified
MRTIGIDIASEVHVAAGVDDEDQIVLKSTRFDESGEGHEKLVALLGSPEQTLVVLEATGHYWQNVFATLVAGGFAVAVVNPLAVRRFAESTLARAKTDAIDALLLARFGRAHRPKAATLPDPELEELRERVRLRDRWVQDLGDRVRQLHRFVDLGFPEFTRHVKDLSSGLATVLLARCPTAAAFCNVKPSTLGKLKYDGRHSVPEDLAAALIAAAKKSCGKHHGEAYQLGVRTACEDIDVLRRRIKDIDRDIGKRVDDLELGQLLQTIDGIGPTTAARMLAEFGDPALYRSAHALAAHIGLVPRVNHSGKSTPARGGLSDLGDRKLRAKLWMPTLTAVVRNPWLKAFYDRLIAAGKLPKVALVAAMRKLVTAIYSVAKNRKPFVPRLPATPQQNPLFVEGREA

SEQ ID NO: 345259 - protein, 339 aa, unidentified
MQVTTVGLDLAKNIFQVHGVTGTGEVAFNRPLRRAQVLAFFERLSPCLIGIEACASSHHWARELSQLGHTVRLMPPMYVKPYVKRGKSDAVDAEAICEAVTRPTMRFVEIKSEEQQALLSLHRARDFIVRQRTQLINMVRSLAAEFGITIARGVARAIEFARSIIDGKQPELPDLAQDVLRVLSRQLVDLHNRLGWYEITMRIQARLSRQAQLLQTIPGVGPVTASAVAATIGSGRQFRSGREFAAWLGLTPRNHSSGGKERLGKITKMGDRYLRQLIVVGMTSRIRQVATRPERADPWLTKLLQRKPARLATVAMANKTARIMWAVLTRDEPYKPHAV

SEQ ID NO: 345260 - protein, 332 aa, unidentified
MSTFIGIDIGATTFEVVVRKNDKNGAVKSYKQTPKDHEKLAAQLLKLNPACVVMEATGIYYLNLAVVLFNSGLKVSVINPKSFNHFAKLTLTHSKTDGIDAALLAEYAQRMTPRLWTAPNPKYLSLRDIGRQINRLVGRRTEAKNNLHALQAKDSTYQPLIDDELEGIEYLDFRIERIRSMALEIIKTDEALSQKLDNLTAAVGIGTNSAIMIICELELLPEHLKSSQISRFAGLDVRLTQSGTSINKPGRLSKAGNSYLRTALFMPALSAATNDPNAKAFYQSLIQRGKKKMQALCAVMRKMLTGIWACLKLNTPFDSSKLFSEEHKKACA

SEQ ID NO: 345261 - protein, 397 aa, unidentified
MIAVGIDISKAKSTVAVIDSDGTVLASPFTMAHTQPEMEAFVTYLKGLGEPTTILMEYTGHYHYPVLKKLQDEGFPVCIVNPYQMKKYGDVEIHKAKTDKKDALRIAAYALEKSYKLVPYSSMEQKYEDLKFLSRQYSQRITYVAKLKVQLIALLDQTMPGITRILPLNSRNPEKCALLLFIKRFKSFDEIHRIGKARFLASYDVLAKKASERSASSKGLSIYEFAVDSITTRGEDPYIWLSQNQCVDLLSTTQNAADEIISQMRNIAETIPEYKVLRAMRGVGDRLGPIILAEIGDVHRFHSGKALNSYAGNDAPPYQSGQFESRNRHISKRGSSTLRKACYEVMQALKLTKPQDDPVYLFMLKKEQEGKPFNVAKMAGVNKFLRIYYARAMELYK

SEQ ID NO: 345262 - protein, 339 aa, unidentified
MTEFKRIAIDTSKAVFTLHGIDRHDQPILRRDIRRAGLVDFFAKQPPTEVVMEACGGSHHWARLLTAQGHTVKLIPPQYVKPFVKRGKNDRNDAEAICEAAGRPNMSFVPIKSKQCQADLMVLRTRELLIGQRTQLVNALRGHATEFGVIAGKGIERVGKLLELIATDNSIPPVARDTLAMLGTEIARLDTRLDAIDANLLAQHKANPLSLALAKIPGIGPITALTLVTEIDPSRFESGRHLAAWIGLTPKERSTGGRQILGGISRAGNERLRSLLVVGATAVIQHAKPGSKTASAWLLKLLERRPRKVAAVAWANKVVRIAWAMMSTGEAYRGVVQAG

SEQ ID NO: 345263 - protein, 374 aa, unidentified
MADHSVAYVALDTSKLRNAVAIAVAGRDGEIRYLGEIDNAPAATAKLARRLAKQHATLTFAYEAGPTGYGLYRQLKSLGHDCIVVAPSLIPRKPGDRVKTNRRDALSLARQLRAGDLTAVWVPDPHHEAVRDLTRARGAAVREQRAKRQQVAALLLRLGLHYPGKTTWGRAHMAWLAGQKLAHLEQRIALEEMLHAVRQAGDRIARLEQAIRTAVPDWSLAPSVTALMALRGVEFIAATTLLAEIGDLTRFRSPRELMAWLGMVPSEHSTGERIRRGPITKSGNRRARSILVECAWSYRHPPRVGRDKLARLEAAPPAVRDIAWKAQSRLTARYRALRRAGKLDVVAITAVARELAAFIWAVGVAVGSGRTPEV

SEQ ID NO: 345264 - protein, 403 aa, unidentified
MNAVGIDVSKGKSTVAIFQPGEQVVLAPRDFHHTQSDINSLIGIIKGLDGETKVCMEHTGRYYEPMASWLSDAGIFVSAVNPILIKAFGDDSLRAPKTDKADAKKIARYTLDRWSKLRQYGHMDETRNQLKTMNRQFGFYMDQKTAMKNNLNTLIDQTYPSDKTFFDRQARSNDSKKWMDFVYTYGKVDCVRGKSLQAFTEHYKNWCKRKSYNFSSTKAKAVYDASTDLIAVFPKNANTKMLIHQAVEMLNQASKTVESLRTEMDSTAATLPEYPVVMAMNGVGATLGPQLIAEIGDVTRFAKRGSLTAFAGVDPGKNESGQYAQKSVPTSKKGSPHLRKTLFQIMDSLIQRSPADDPVYAFMDKKRAQGKPYYVYMTAGANKFLRIYYGRVNEYLSNLSESE

SEQ ID NO: 345265 - protein, 322 aa, unidentified
MSHKSAPPTVSTIGIDLGKNSFHLVGLDQRGAIVWQLKCSRAQLERRLANIPCCLIGMEACSGAHYIARQLAALGHDVRLIPAQYVKPFLKGHKNDYRDAEAIAEAVQRPTMHFVAIKTPEQMDLLALHRVRSRLVGQRTGVINQIRGFLIERGITVRQGVVPLRKALPDILSSNNDALSPRMVNLIAELAQDWRRLDERIAAVSDEIESLAEQDEACQRVMTVPGVGPIISSAVVAAIGNGAGFTQGRDFGAWLGLVPKQESTGDRTILGKIVVQPRDQSGARALRNGQLQADCLCTATERPGDNRFQGDRWDARAIRERA

SEQ ID NO: 345266 - protein, 479 aa, unidentified
MEERRLLGIDLGIASAHTAVALRTDGSEVARRRCVPTVDSLAAVEQAALRDAPEGTRLEVVIEPSGPAWLPIAVFFGRRGHTVYRVSSAKAADLRRFLSRHAKSNGIDAKTLARLPLVDPENLYPVELPGADRASLDRRVRACDRLTRAVATHKIRIKDLVRQLMPTSPLTGELSRADLAVLERYADPNALLMQGKARLVALIKRASNNHAGPERAEAWLGAAHAAVEVYAGDSAVAFADLAAEVATEVRLLRAVEAELAEHAEARESAYGRVDPEGLARSLPGVAEVGGPVLQAAVGRAQRFGSAAAFKSFTGLTPRASETGETDRKGQPMSKAGPHLLRTQLLRSADTARTIDPQLARIYHTQMVERGANHLKALCVVAAHLAERSWVVLARGEPYVVRDADGRPVGREEARAIIAEHFTVPEEVRRRRRSKKVGKAPHQVLVGQVSTRSKAQYEAAFPAPNRRPPRPRRQPAPRAT

SEQ ID NO: 345267 - protein, 350 aa, unidentified
MNVNHYIGFDVHKKSINYCVKMADGQIVEEGRLRATHDALRRWAGRRQEPWRGAMEATLFSGWIYDTLKPFAAELQMGHPAMMKAIGASKKKNDRIDARKTADLVRCNLLPACYVAPAEMRELRRLLRYRNVVVAQGVRMKNKMSGLLMEVGAEYNKQQLHGKKYFTELLGKLEEVPESVKDLLRLSRGALEMFEATQRQLLDRLRKEPRLVERVAVLESIRGVGEVTALTWALEICDPQRFRSIADAESYCGLTSALDCSADKQHRGPISKQRNGHLQTVLIEAAKLAPRWNPQLAQVHERELQRGNRNRATLAVARKLVAYLLAVDKSGQPFRIRNQPAPTTEVATAA

SEQ ID NO: 345268 - protein, 342 aa, unidentified
MNLPVRIGMDTSKSVFQLHGVDENEVVVVGRQFRRAEMIRYFERLPPVLVAIESCGSSHHWARLLQSFGHEVKLIPPQYVKAYVKRGKNDAADAEALCEAVTRPSMRFVPVKSKERQAACMLMTVRERLVSVKSQLSNAFRSYAAEFGIVGPAGRQNVTALIKRVLEDDSLPEMARDLFRLQAEEYAAVQARLAKIEAKLMKWHREDDVSRRIATIPGVGPIGSSMLSMKAPPPETFRSGRDFAAWLGLTPKDHSTGGRQRHGGITKAGDSVLRSTLIVGATALLRHIRKGRHKPTLWLASLLERKPPKLVAVALANKFARIAWRLMISGGVYNRPVAATPI

SEQ ID NO: 345269 - protein, 412 aa, unidentified
MQVVHPRCAGLDVHPDSVVATVMLTAPDGSVQKHQRSFGAFTLQLLQLRDWLASHQVTHAAMESTGAYWKPGWNLLEDQLSLLLVNAQHLKRVPGRKTDVSDSEWLAELLRHGLLRASFVPARPQRELRELIRHRSGYVDRAAQVKNELQEVLECANIKLARVASQITGVSALEMLGGLLEGSASAEQLAELARGRLRSKKPQLVQALEGRIAPHHRLIISQLLADLAWCEEQIEEVSQEIARRLKAEEQIIQRLDGIPGVNRRIAEVILAEAGKDMSRFPSQEQFVSWSGFCPGNNQSGGRRRGARTRPGDRTFKRAIMEAAHAGSRKKGSFLKARYHRLSAKRGAKRAKVAVGHSILKSVYQMLKEGTEYTDLGQDYYDRRNPEQLARKLAHRIEKLGFSVKIQQLPKAA

SEQ ID NO: 345270 - protein, 418 aa, unidentified
MSRTLTKKLASVKPGTLFIGVDLALDHNVAVVLTERAHRLARFGFPNDRDGYDYFYRRLEALRERQQAPEVLVGMEPTNYFWKLLAADLEQQQVPYRLVNPYTVKKHREGDQLDRSKDDSRDAFTIGDLLRTGKFTETRLLRGGYAELRQYVVLYDRLQRDIRRQKALIHNTAGQVFPELTRVFKDFTGVTALAMLRHHAAAAVVRRMSQEAFITGVRADLQGKRLQLARLRRAHRLATHSVGLKSGVQALQLALRLYIETLEGLQRQLEEVKTALIDTFLALPESRYLLSVHGLGLVTAAIILAEIGDPNNYSNGRQLIKLAGTQPVTNTTGRKTRSKTPMSHKGRSRLRTALFFAVMRLVQVDDAFAQEYLRLQQREKNPLTKMQALGVLMNKLLRILWALMRHRTFYNPGYQHAA

SEQ ID NO: 345271 - protein, 344 aa, unidentified
MQIASIGIDLGKTTFHLVALGERNKLLVRKKFSRTQLLAYTAKLASTLIGLEACAGSHFMGAKLREQGHEVRLIPAQFVKPYRKSNKNDFKDAEAIAEAVSKQNMRFAQIKTQEQLDIHAMHRVRDRLVGRRTALINEIRGFLLDRGITFAADPKQLRKNLPGVIEDAEQNLTPRLRWLLDRMWSEWKQVELDIKGMTEELERISEENELCRRLLRIPGFGPLVSTATVAAIGNGAAFRCGRDFAAWVGIVPRQHSTGGKQKLLGISKRGNRYLRRMLIHGARAVLFRVKYDTGGFGEWFRRLAQRAPRNKVVVAIANKLARMAWAVLSSGKEYQHRPLQATAA

SEQ ID NO: 345272 - protein, 420 aa, unidentified
MARIVEIVYPVCCGMDVHKSFIVACIAVTDERSHTEHHIKRFSTFTGDLRRLADWLASYNCRDVCMESAGKYWIPVFNALEKTCNVCLTHPKYVKAIKGKKTDKKDAKWISELFKCDLVRSSFIPPPDIRQLRDLCRYYVKLTGFVSSEKNRAQNCLTMCNFKLDDVFSDVFGKSATRVLDALLEHGNGDFELDGLLNGRCKASPEDVRAALDGELDPMQTEKLALIRRHMDDLGALKASLENLIYNLGSKYQSQIDLLMTVPGISTKLSAIRILAEIGADMSVFETAKQLASWAGLTPQNQESAGKKKTTRIGRAGAYLKPLLVQIALNCGKSNKCPELKNKFLSLQKRRGGKKAVIAIARKILTAVWHILSKNTAYDAELYKRADKPPAAREFTTAQAVAFLRNKGFVIVDEATGEIA

SEQ ID NO: 345273 - protein, 380 aa, unidentified
MPEAVIGLDVGKSSHWACVATRDGEVLLSAPVANREDGLDSLFGRFPDALVVVDQSRNIGALALARARAAGMSAAYLPGLAAHGAARLFAGDAKTDERDAMVIAKTALGIPDALLPVGGPGPTIAAARALAAQRNFLTCENTRNKNRLRSILLESCPAFEALVDLSDGPQLRLMASLGGAWSAADAGPRRAAALTRGAARGKIEALVRSTTSSTRPDASVVAAEDRAVKLLARRISENSAEIEAITAEISALLEGDDTYRCLLTVPGIGPKTASELAISIDIEDFPSHDRLASYCGLAPRNRQSGTSISSVTASRQGNKRLKNLLIFSCNCLTRTEGRWGDYYTRCRERGMSHGKALKALARKRLKVIYAVMRDRVPYAA

SEQ ID NO: 345274 - protein, 368 aa, unidentified
MNTVKFIGMDVHKNSITIAIADQGRRGPVRTYGAINNDLGALDKFCRKMVSTESELNFVYEAGPCGYSIYRHLTAKGFDCMVAAPSLIPKKSGERIKNDRRDAKKLVRLHRAGELTAVYVPDLEDEAMRDLSRAREDAVAATRKAKQQLKAFLLRHHIVFFGRSKWSTAYFNWLSDIAMAHPAQQVALQEYIDAVHENRHRVDRLTEQIRQLVPNWRLAPVAAALQSARGVSLIVAVTVLAEIGDLSRFESPGQLMAYLGLVPSEHSSGDKTKRGGITKTGNKHARKALIEAAWAYRMSPRVSRLLLKRQQGLSDQIRKTSWKAQLRLCARFRRMAARRKPKPVVVTAIARELSAFLWAIAKQVQPAV

SEQ ID NO: 345275 - protein, 373 aa, unidentified
MNTTTIGIDLAKNTFSACSGDGRGQFGRVLSFKRGEFLAWLKTLPSGTVVAMEACGTAHFWARTMQALGLCPRLIAAEFVKPFRKSRRVKNDARDAEAILTALHAPGMRFVTVKTEAQQQRLLTHRLREGWKAERTALINRIRGLLAELGIVIELGAGKARRTLAELAGDEAYPASVRQMIQSVLGHLHELDTRIDEGDQQIARQSKSDPTVALLRTRPGIGALGADAIVATVGDARQYKNGRQFSAALGLTPSQHGTGGKTHLGAITRRGDAYLRSLFVQGGRCVLNAALRIHASSPEKLNRLQQWMVQLNARIGYPKAAVAIANKHARQVWAMLNRGQAYDSEAYRAWEIAHGMVEVRDAADDESGAMSPA

SEQ ID NO: 345276 - protein, 345 aa, unidentified
MKITTVGIDLAKNVFQVHGIDERGKAVLGKQLRRAQVAVFFANLPPCVIGMEACASAHHWARTLQRFGHTVRLIAPQFVKPYVKTNKNDVADAEAICEAVGRPNMRFVPVKSIEQQAILSVHRVRQGFVKARTARANQIRGLLGEFGLVIPQGIINVAKRVPEILEDASNELPVPFRHLIDRLTTHLKELDRQVKEFEGEIIAWHRSSELSRKLEKIPGIGPLAASALVASIADAHSFDNGRQVSAWLGLVPRQSSSGGKPTLLGMSKRGDTYLRTLLIHGARSAILAAKNKVDNTNGWLTNLLKRRHPNIAAVALANKNVRTVWAILAHDREFKADYVPTRMAA

SEQ ID NO: 345277 - protein, 362 aa, unidentified
MTINAGVDLHKTQFTVFVKQSGNQFEQYSTEEDGYKKFLTRIQRWKKNGMTVRIGVESTGNTRYFKNRMEQAGAEVVVINTLKFKVVNESVKKTDRHDAATIAEFLEKDMLPESRLCSEESEQLRRLLKVRTTLVRTMVTVKNQIHALLTGLGMKDSRATLQSKRGRQKILDALRKADSELVVQPLFETIEQLEKSVKSIESELEKLTEGDRTVELLMTIPGCGKIGAWTIRAFTDDINRFASAKKYSAYAGLVPWVQNSNETVHHGKITKRGPEELRTALVQLVMGMRRCRSTVSWRLMERYTEMKRNKGSGKSIIATARKLSTIIWCMLSTGQEFDPSLMIDRQLIRKADSMRTTASQSA

SEQ ID NO: 345278 - protein, 427 aa, unidentified
MPYRIAGIDVHKTMVAVAVADVEVEGDWQFERRRFGASPTQLRLLTAWLVERQVEEVVMESTAQYWRPVWDALERDWQPTQRTRVDAKPTSGALHLAQAQSNSGRHGRKRDFPDAERLVKRLSAHELTLSFVPDVTQRLWRTATRRKYQLTRNRVQLQNRLECLLEEAHIKLSSLVSDLLGSSARRMLRALASGETDPATIAALGSARLHATAEQLCDALGAATDLHPLYRRLLAMTLAELEVIETHMQQLDEELAGLLRAHQDAVQRLAAVPGLGVDSAQQIIAEVGPTAETFSTAKRLVSWVGACPGHDESAGINHSHRSPNGNRQMRRLLNQAAHAAVKTKGSIFELLYRRFVVRLGHAQAIGAIAHRLCRLVWKILHDGVTYEERGPFVIKARAQRRAAKMIRELRSLGYRVEPVLAPSSNRA

SEQ ID NO: 345279 - protein, 337 aa, unidentified
MNYCGIDLHSNNCVVIVSDDNDRIVYQKRLPNELAQIAAALEPYRHELVGVVVESTYNWYWLVDGLMDSGYRVHLAHPAAIRKYDGLKHSGDFADAAYLAQLLRLGLLPEGYVYPREERGARDLARKRMQLVRYRTAQILSIEGILMRQTGSRMSGETVKRLTAEQVDEFAFTPDVTLAVEANRAVSQALAQQIEALEKRLRERVSLRAEYRLLRTVPGIGDTLATTIMLETGSISRFAQVGNFSSYCRCVDSLRESNGRKKGEGNTKNGNKYLAWAFVEAANFAMRYCPQARSFYDRKKSRTNRVLAIKALAHKLARACYHMLRDQKPFDVHLCFG

SEQ ID NO: 345280 - protein, 403 aa, unidentified
MNNVAGIDVSKGKSMVSVLRPFGEVVAKPFSVGHTGSELKELADYLKSLDGETRVVMEHTGRYYEPVARFLHDEGVFVSAVNPKLIKDYGNNTLRKVKTDKADSRKIARYGIDNWAELRQHTPMDTIRMQLKTLNRQQSLYSKTKTMMKNNLIALLDQTYPGVNALFDSPVREDGSQKWVDFATTFWHVDCVRNMSLTAFAERYRKWCKRHGYNFSQSKAVEVHAGAQDLIAMLPRDALTKTMVRQAIDALNAISASLERLKAEMQALAAQLPEYPVVMTMHGVGDSLGPQLMAELGDVTRFTHRNAITAFAGVDPGADQSGTHEAKSTRVSKSGPPELRRALFLVMDCLLKTQPQDDPVYRFMDKKRAEGKPYLVYMTAGANKFLRIYYGRVKEYLAQLENS

SEQ ID NO: 345281 - protein, 338 aa, unidentified
MTIGIDLAKNIFAVHGVDQNGKAVLIKPKVARDQLAALIAQLAPCLIGLEACSGAHHWARLFRGYGHSVKLMDPKRVTPFRLTGKRGKNDAADAAAICEAVARPNMRFVPIKEEHQQVILTLHRTRQGFVEERTATYNRMRGLMSEFGIVLPQKVACLRRSIGEHLEDLPGYANQCIGDLLSHADRLDGRIADYDKLIAQAAREDARSKRLMQRPGIGPVTASALLASIGNGHDFKNGRQVAAWIGLVPGQYSSGGKARLGRITKAGDAYLRSLLVMGARAILSGLGDKQDGFSRWARSLVERRGYWKAVVAIAAKNARLAWAVLHYGEDFRLNASAV

SEQ ID NO: 345282 - protein, 357 aa, unidentified
MHYLGLDVHAKATVSCLLDAAGNEVDHGSVPTTAPDLQDLVRRSSADDGLVVGQEIGTLSYFVHDVVTAAGAEILSFNAYQLRMIASSRKKTDRRDAFWIAKALQSGMTPHPVFIPSGQVRRLRSLLAQREAIVAERKRWLLRARSYLRAGGYLLPRASRSVTRLRDRTLAKPEGLDLHLCDALDLCERREAALRADLVRLDAMIQAEVRGIDAIERLKTIPAVGDQVAVRIYAAVGDIRRFPNARSLAAYAGLVPSVYQSGDVQRMGRITRMGSPPLRGVLVQAGHVLLFRCDPLKAGPLREIALRIQTSRGRRKIAVVAAARHILRIAYYVLRDGTTYEPQRLRSGNTAQPHAAA

SEQ ID NO: 345283 - protein, 428 aa, unidentified
MDHWFAMDKVLALGVDPHRESLDVIAIRFPEEIMLDETFDNCRTGHHALWSQANALAAELDLALVIGLEDGSNYGYTLGRYLTDQGCPVKEVNPRMTNRQRDFYGQDKTNRLDALATAAIVLRVYHQLPDITPIEEALEATRELSRYREQLVKEQTANINRLHRNLANQYPAYKTFFSKINGVTALHFWATYPTPAHLQNITPDELADFFYDKSNHRLGKDASRKKAEQIFQLLDDSPPQALPLLADAQATVISDLAQRLLQLRHSIAALVAKLGDTLPATGQKLDTFKGISSALAGVLVGETQDTARFNHDKDRFASYNGTAPASRGTGKHIRQVENRWCNRRLKSALHRVAISARRCEPLSAQYFQACLDRGLSPGQAHKRLMRRLSDVIFAMMRDKTPYDPEIHRRKQALHKTKGKSVAPAVAGS

SEQ ID NO: 345284 - protein, 427 aa, unidentified
MRYIGLDVHREFCEVAISEEGTVRSAGRVRTRREELELFAQSLGSDDEVALETTGGAEAIAAILRAQVARVVVVNTKKLRAISEAKAKTDRLDARRLAELLAAGYLAEVWCPDERTRALRRYVARRAQLVRQRSRAKNEIAAALQRNLLDRPGVYDVAGERGRRFLEGVELPADERQTVAGCLRQIDFLDREIAEVDRALAEAAVGSPEIRRLMTVPGVNLHTAATFMARVGEIGRFKDPRKLVSYLGLDPRVRQSGEEPVRYGHISKEGASEARHMLCEAAWIVVRYPSPLSVFSERIKARRGSRIATVAVARKLVVLFWHLLTKEEDYAFARPTLTQRKLRRLELLAGAERRRSGGRPKKGAPSSKAQEAAEVELARQAEVAYRRLVTDWQQAPKKGASATRGRASSKPSSGKQRGKASVPDPAL

SEQ ID NO: 345285 - protein, 407 aa, unidentified
MRPIYGRCCGLDVHKKTVVACRLTPEGSQTRAFGTMTTDLIQLREWLLAGGVTHVAMESTGVYWKPVFNLLENHGMELLVVNARHVKAVPGRKTDVKDAEWLAELLQHGLLKASFIPDRESRERRELVRYRRSLVEQRAHLVQRIQKLLEGANIKLGDVASDVMGVSGRAMLQALAQGVDDPAAIAGMAKTGLRNKIPELERALTGSVGHHQRFLLRSQFRLLESIEAEIVRLDEEVAERMRPFQVALERLDEIPGIGRRAAEQILVETGTDMRRFPTSAHFASWARVCPGNNESAGKRQYASIGGGNRWLRNALLEAAWTVSHSRKQTFFTARYRRIASRRGKKRAAIATAHSLLIAVYHVLRDGVVFQDLGPAHFERRNVDAIVRRSLHRLEVLGYKVTLEAMPA

SEQ ID NO: 345286 - protein, 339 aa, unidentified
MGRFVGVDLHRNSFLVCFFDAEKGEKKFRNYYLCCIRKFLMDLEEDDLVAVEATVNARFFKKEVEKKVGKVIVVDPYKFKVISESVKKTDKRDAELIAFYLSKGMLPEVRMKKEEIAEVESLAHTRDKLVKLRTALKNKVHNILRMYGIETNREFLSSEKGLEQALSYEIGDTAKVELKVCIDQIRSLTKSIEEIEETLVNKGKNMKGFKNITSIKGIGEKSGTILLSVIGDINDFKSRKQLDAYFGIVPRVNNSNETIRHGKITKRGSKLGRTTLVQCTLIAIKYSKYLAKYYNKLKAKKGSGKAIIATARKLLGIIYDTLKYELEFEDFSNFVFKTA

SEQ ID NO: 345287 - protein, 327 aa, unidentified
MTASVASHNQIFIGIDVGGLSFEAAWHRGGSTQYQNRPDAIAAFVARLSVEKQIIRIAVEPTGGHEKALVKALRGAGLPVEMVHTSRFAAYRKLIGAKAKSDTSDARLLAAYAAAPEEVRGRKAGHVVLPQDDVREQLAELAARRDQLKHMIHAETCRLSTVRSPSIRDEITAHLQAMRQADRKTHDAMMQLVRQRDELRNAKRLLQTIKGIGDKTALTSIAAVPELGLISNKAAAALVGVAPFVRQSGTMKAPARIHGGRALVRNAFYMAAVTASRHNPVLAPFYARLIAAGKPVKVALVAVMRRLVVYANAVLRSGQPWKGAEIG

SEQ ID NO: 345288 - protein, 350 aa, unidentified
MVIIGCDFHPSWEQVCWLDTETGETAEQKLVHSAGEAQRFYAQLPAPALVGLEATGNCHWLLDLLKELGHEVWVGDAAAIRASYVRQQKTDKRDAAHILKLLVEGRFPRLWVPDRQQRDLRQLLIHRHKLVRMRAQVKNGLQHLALNQGMQKKARLWSASGQQALCQLPLQPWAAQRRQDLLGLLACLDQQIAPLDRAVQEAAQRDKMALLLQTQAGVGPITALAFVLTIGDVSRFPRAKQVASYLGLIPREHSSAGHQRLGAISKQGNRFLRMLLVEAAQAAVRYDPEFRREYQHRCHSKPKNVAKVAAARKLAVRLYWMLRTHQEHPESVPSRAARGCPWSAQARPTC

SEQ ID NO: 345289 - protein, 349 aa, unidentified
MVWVGVDAHKKVLVATAVNDAGQVVARWNGKNGVPDWQEFSSWLDPLGKPIVVGIEGAYSYGRGLAQSLVARELTVYDINPRWTAGFRRTARRQHKTDALDAHAVALVTCRDAPDLPKVHADDVSSVLQLLVSERDAAQAESVRLRNQLHVRFFELGVDAPTIDSAAALRRVLEKLPAAVTAIDQQRLVAIQHLADRCLLALADVAHFTAEIEALAKEHFAPLTRIHGVGLLTAGVIASHLGPNSRFASEAQVAAYAGVAPLEASSAAHVHHRLNRSGCRKLNAVFYFIALSQMRSPTSLGRAYIDKRRADGRTLREALRALKRFIARAVFRAWKECPTPQSAPVQAPA

SEQ ID NO: 345290 - protein, 346 aa, unidentified
MQIASIGIDLGKTTFHLVALGERNKVLVRKKFSRAQLLAYTANIPSALIGLEACAGAHFMGSKLREQGHEVRLIPAQFIKPYRKSNKNDFLDAEGIAEAVTKDNMRFVQIKTEEQLDVQAMHRVRDRLVQRRTALINEIRGFLLERGITFAVRPIQLRKNLLTVIEDAEQNLSTRLRWLLERLWQEWKQVEVDLKTITDELDRISEENALCRRLRKIPGFGPLVSTATVAAIGNGAAFGCGRDFAAWVGVVPRQYSTGGKQKLLGISKRGNRYLRRMLIHGARAVLFRAKYDTGGFGEWFRRLAERAPHNKVVVAIANKLARMAWAVLSSGKEYRYQPLPAAVAAQ

SEQ ID NO: 345291 - protein, 314 aa, unidentified
MDASQDFMVGIDVSKAYLDVARDGVTSVARWNNDVTGCNELAAAVAGASLVVVEATGGYETPMVRTLAAVGIAVAVVNPRQVRDFARASGRLAKTDRVDARVILHFAKAMRPAQIPHIDDGRIALAALVTRRRQLIDMAIAEKNRLEHASADIAALIHELLASFKAQLIRIDTAIALAIEAEPEMAERRNLLLSVPGIGETTAAILIAELPELGSIDDKKLAALIGVAPIAYDSGMMRGQRHIGGGRTTVRCALYMATLSAIRCSTTIKIFYTRLRDAGKPPKVAIVAAMRKLATILNTILRRRTPWTSQQHGC

SEQ ID NO: 345292 - protein, 326 aa, unidentified
MLNTETGDYSEHRLKHSDGEAERFYRDLKLHTPKIRVGLEATGHRRWFERLLMDLDCELWVGDAARIATMRVRKQKTDRQDAQLLLKLMMEDRFPRVWISSLEDRDLQQLLWHRHRTVQMRTRILNQLQSIAMNEGIQRRGGLRSVQGRKRLEQIPLGPWGARRRNDLLVHLDQMNQRVNELTAAVQQEAEKRPEAQLLMTHPGVGPVTALAFVLIVGYPERFQCGKQIGSYVGLIPAECSSGVHQRLGHISKQGNILLRFLLVEAAQAAARFDPEWHKKFAHLAMRREREIAKVAMARKLAVSLYWMWRRQRSSQMASQVGSYAG

SEQ ID NO: 345293 - protein, 367 aa, unidentified
MPSIALERSDVIVGVDTHKDEHVAFAIDGLGGTLDEPRFFPANPDGYVDMLSWATGLGDLHAFGVEGCGSYGSGLARFLRRSEHTVREVARPPRKGERRLSGKSDAIDAEHAARVLLSGTGSATPKLADGQIEAIRLVKIARDTAVKGHSSAIITLRAVLVTGSDALRAGLEPLTAHKLVVACAGLDTAGDIADPEVAMRATLACLAQRWLTLHEEIKIHTSHLKTLTRAAAPELLDRFGIGFDSAAEMLVTAGDNTDRIRSEAAFAKLCGACPVPAGSGKTSGRHRLNRGGNRQANAALYRIIVVRMRWHPPTIAYVQRRTEQGLTKREIIRCLKRFVAREIYNLLPDPSGPQHPLEAPNNRSSTT

SEQ ID NO: 345294 - protein, 382 aa, unidentified
MSLIRPFGQLTCAVDKAPLFQAPLFRSDGIQGRAMPLIPCTRLPDAERCGVHQQQGGNVPDATLGVDVSKVSLDANCIKGLQKRAKTFANTPEGWKAMVAWLTNMGTKQAHACMEATGRHSLGLALALHDAGHVVSVVNPAQIRDFGRTKLGRNKTDKVDANLIREYAELFTPGPWMPPSRAMRRLSELETIRAGIVGSRTEWSNRIKSGLGDSIATKLATATIEHFAAQLKAIDKAIRQTIEGDAELRGRRDLLLSVTGVGETLAALLLAEMPEPGVLRRSGELVAYAGLNPSHHRSGTSIDRPTRISKIGNAALRSSLYMPALSAMRFNPAVAALAARLKSAGRLKPKQIIVAAMRKLLVLCFGVLKTGRPFDPAIAMRA

SEQ ID NO: 345295 - protein, 367 aa, unidentified
MIEQVTVGVDVGCHRHRVAIAAPDGKFVEEFDIPADSEGFKYFFGRLDFYRKSFDVPVVVAMEGHGGYGRPLDSSVKSQGYTLLNVNNLKLCRFKEIFSSPAKTDAIDARKIALLARMQDVLSPSREVLQEVRDVPQEHQILKRLSRRRRQLVDEKVVVLNRMQVDLQAVSPGLAEMVEYKDGVAFLNLLTCRSNLEDLSRLDKKELLSIGGIGEAFAGRVIKWQKKAYFSREVAYVGPMIIEDARRIIELKKSIKEIEREIENIAEGSPLAEAIGSIPGFGVVCTAELVAEIGTMERFSSERSLALYLGMAPLDKSSGKYQGTKTATQVNKRGKAAMMTAVAHHIRKVDESKRYYQKKRGEGKSHN

SEQ ID NO: 345296 - protein, 367 aa, unidentified
MALYIELDVHGKETVYVARDESGKMTAQGKVATSAEGFCELVETLETPKGTKIGLETGTQAMWVSRLLSGLEMEPVMIDAREVRQKARRIGQKSDRRDAFEICDGIRRGIYTTIVYVPDARVLRLRQILSRRRHFVKICTRQINAAKWLLRSLGLGREAASLTSVGAWETLVGRPAVEGLRDHLAMHADLWRLAQEKVVLLEKQLREALKPFQETVRRLQTVPGVGIITAATYVAVLATPERFPDSSRVASYIGLVPSTYDTGNMQRHGHITKRGSGELRAMLCEAAQHAASKRHPLNPHWVRFCPKQGYKKTVIITAHRLARILFAMWRKGEDFDPSKLNVVPEQGVYRKKYYWIMKRPEEQGVVA

SEQ ID NO: 345297 - protein, 343 aa, unidentified
MDHFAGLDVSVKDTSICIVDEVGKIVREVKVASEPDALLAVLRNATYRFKRIGLEAGPLSQWLFSALAEADLPVICVETRHMRAVLKAQINKTDRNDARGIAQMMRVGLYRPVHVKTLRSQKLRMLLSHRKLLQSKAIAVDNDLRGTLRNFGLKVGVVGAARFEARIRELVEDLPDLTILVEPLLVVRRVLREQITVLHRRLLAVVRDDEVCRRLMTVPGVGPVVALTYRATVDVAARFRKSKSVGAAFGLTCSRDQSGERDRPGAISRCGDEMMRAMLYEAAQSMLVHSTRWSWLKAWAMTIAKRRGMKRAIVALARRLAVIMHRIWVDGTEFRWTRDAAAA

SEQ ID NO: 345298 - protein, 391 aa, unidentified
MEARTVNNLPPAGTHDDAICCVLAIELSKKSWIVAVNTPLSDKISRHTLKPSDGKELLDLCERIRTRVAKETKKRVEMVSCYEAGYDGFWLHRLLQAHDIRNHVIDPASLQVDRRARRAKTDRVDAERLLRSLMAYLRGEPKVWSVVRVPSVAEEDDRRLHRERGRLINERIQHVNRIKGLLAIHGIYDYQPLRRDRIQRLQQLHTADGRTLPPRLEAEILRELQRLEIVIGMIKTIEAERDAIASANTETERGSVKKIQHLAKIKSIGPEFATTLVGEVFYRSFDNRKQLASYVGLTPAHFQSGAMSRDQGISKAGNAKARTVMIELAWLWLRHQPDSDLSVWFRDRVGKLKGRIRRITIVAVARKLLIALWRYLETGLVPKGAALKVCD

SEQ ID NO: 345299 - protein, 357 aa, unidentified
MKITKKKVIGKAYVGIDVHKTSWKVCVLSSGGFKKEFSCNPQVEALVASLENMLPDFEFQCAYEAGFSGFWLADGLNETEGFNCIVVNPADIPTSDKERAQKEDKRDARKIASQLKAESLEGIYIPSAEDIAFRELQRLRSTITKDLVRSKARIKSFLFRSGINITSQEFPDSKQHWSARFIKRLNELPIENSALRFTLTQLVQTLINLREQQKTVLLELRTQIRNSKKEKMHEALCKITGIGEITSATIISEVIDINRFSSYEKYHSFIGLVPSTNSSADIEVVRGITNRANKRLRKVFVESAWIAIRKDAELHHLYHSLKMRMKPNKAIIRVAKKLANRVRFTLLELENEMLITT

SEQ ID NO: 345300 - protein, 351 aa, unidentified
MLALEHDSDVVIGVDTHKDTHTAAAVSSTGAVLAHLTVPADPKGYLRLIAFGRRHQAGLWAIEGTGSFGAGLTTTLLDKDQRVVEVDRPQRAPRRGGVKSDDIDAVRAARQALAGIGLAEPRSRGEREAIRVLLTTRAQAIEFRTRAIAAVHALVVSAPDSLRERLRNLSMGQLLRSCAALRGSSRQSAEEFATVMALRSTARRALACEAEAAELEVQLGILVRRVAPQLLELIGVGPVVAGQVLSSWSHRGRVRSEAAFAKLAGVAPIEASSGMVVRHRLNRSGDRQLNRALHTIVMVRMRQDSATKDYVQRRLAEGRSSREIKRCLKRYVARQLFRQLEALAPAALDVT

SEQ ID NO: 345301 - protein, 370 aa, unidentified
MLDTTTFVGLDVHARSIKAVSLDVMTGEVRCATFGYDAGAVAEWVRSVDPRARCVYESGVTGFDLQKRLSGLGVDCVVGAVSKMIKPSADRRRKNDRNDAEFLARMLSVGNVVEVWVPDDECEAARDLTRALEDARDDLSRAKQRLSKFLLRHGLAFDERTPTGRRKGNWTRAHWSWIESIRFAEGADNDVLAYYVDAVRRAAEEKARLEGLVEAEARKPRWRRRVDSLRCLKGVDTATAADLVFEAGEFSRFGNARSFASWVGLTPSEHSSGESRFRGGITKAGNKHLRKLLVEAAWHYKGASRSPKDLAKGQVVDAATRRHANAGVRRLVDRRRSMDDAGKQSSVANVAVARELACWCWAVGRMAEGA

SEQ ID NO: 345302 - protein, 335 aa, unidentified
MPRLHYVGIDVSARELEVRVQRRASDPIEALSFPNHAQGHRQLDHRLTKRRRKARVVLEATGNYHLDVALALDRAPGIEIMVANPRSVSDFAKAHLKRSKTDAIDAELLLEYARRMVFQPWVPPAPELLELRALARRCHALTKSRTQEKNRLHATESCEALPSSVRNDIGVNIRHLDRRIAQLEKLALELIARVPPLRQAMGHLISVKGIAQSSALRILAELSLLPRDMTARQWVAHCGLDPRHITSGSSVHRPPRVSKVGNKHLRAALYMPALCAAQFEPNVRAFVNKLIDRGKKPMQANLAVMRKLLHSIYGMLKHGQDFEGEKFFALVPAKP

SEQ ID NO: 345303 - protein, 481 aa, unidentified
MAKRKMSTFERLRSGKMNRKERKEWQQRLCAEDAGLEVVHPDAAGIDVGNASHFVAVPPDRDEPPVREFGSWTADLRRMAEWLKRCRIRTVAMQSTGVYWVALQEILEREGFVVYLVNARATKNLPGRKSDVQECQWLMKLHTYGLLRNSFHPPEQIRAVRTIWRQRDRLVKEAGREVQQMQKALTTMNVQLANAISDVSGVTGQAIIRAILRGQRDPQQLAKLRDYRVAASEAEIAHSLEGNWREDVLFELQQVVDAYDFHQKQIAACDVQLERYMSALPIRSGPGPSEQSTADALSEKPNKQRRHKLQKNQPTFDLAAELQRTMGVDVTAIDGVDVMTTQVILSELGPDLSASFPSEGHFASWLELAPRRDVSGGKVLRQKSRKSNNRVATALRMAAQSLWRSDSYLGARYRHLRARLGGQKAVKAMARYLACLIYRLLTKGKAYADRGAAHFQSKRTERELLALRRKAAELGMELVAV

SEQ ID NO: 345304 - protein, 414 aa, unidentified
MDDDIVRWFAAVDWGSEQHQACILDAAGKIMDERVFPHGGAGLAALCDWLVSVAGDPSIVAVAIEVPHGPVVDALLDRGFAVHAINPKQLDRLRDRFSVAGAKDDRRDARIAAAGLRTDPQLFRPVQIGDPAVIKLREWSRLAQELQQERVRLGNRIRQQLWRYYPQLLELTDDVAAEWVLALWTMAPSPVQAARMRETTLARLLKQHRIRRINAETAINILRVPIIKVAEGVTEAAVLHLRSLVARLRLANREFRQAEHKLDELCAALIRPEATKDDVPSDAAILASLPGVGRSILAALLTEAPGPLIRRDYAALRTLSGVAPVTKRSGKTCIVVMRYAAQTRLRQAVFHWARVAVQNDPKCRVRYDALRARGHSYGRALRSVADRLLGVACVLLQRREMFDLDHGTPQAAAS

SEQ ID NO: 345305 - protein, 412 aa, unidentified
MEAAYYVAGIDVHKKMLAVVIANARDRELRFECHRFGTTVNELQNLSTWLGERAVQEVVMESTAQYWKPVWLALEGQFQLWLAQARSNRGPRGRKTDFRDAKRSVSRLLSDDLILSYVPGREQRSWRTLTRTKYQLTRDRVRLQNQLESLLEECQIKLSSVVSDLLGASGRRILRAIADGETDPARLRELGDRRLHATEADLTDALNGQPQPLHRKLLLLYLQRLDVIEGQIAELERMIAEAMKAHEDSVVRLAELPGLGVDSAQQIIAEIGPGAEAFPSAPQLASWVGVCPGRQESAGESTSNRSAKGNRAMRRLLNQLAHAAVRKRDCYLQILFQRLSPRLGYAKAVWAIAHRLCRLIWKVLHEGVHYVERGPAVSALTLKRRKQRLVTQLKKLGYGVQLTPLSGIAMDT

SEQ ID NO: 345306 - protein, 412 aa, unidentified
MVTELGRAIGLDVHRDFCEIAVCEHGKVRSAGRVASTLEALQALAESLLPSDTVAMEVTGGAWAIVRILEPHVKQVIVVSPGDTGITQARAKTDPLDARKLAKLLWAGELEAVWPPDELTRLLRRRLARREQLVRARSRSKNEIHAVLMRCLIGKPSVSDLFGVAGRKWLRGLELPVEEAETVEACMRHIEFLDAEIAEVERVVARYGMSCSEIRRLMSVPGVNVICAATFIAQVGEVRRFKTSRELVGYLGLDPRVRQSGSSPARSGRISKRGSGSVRWALVEAAWSVIHQPGPMRAFYERIRARRGHQVAVVAVARKLAVLFWCMLTREEQYAHQQPSLTAKKMRLLEIQSGTPTLKGKPTGVWATREKMREAEKALALQAEASYVRMVRDWQATAPGRGVGASVTPGRA

SEQ ID NO: 345307 - protein, 370 aa, unidentified
MGNRSMFVGLDVHKETIDVSIAEGDRRGEVRHYGVIKSDLEPLDKVVRALRAPKRRLHFVYEAGPCGFGIHRHLTSHGEDCVVVSPSMIPKRSGERVKTDRRDSQMLARLHRAGELRAIYVPDDTDEAMRDLVRGREDAVVVGTQAKYRLKAFLLRQGRRYPGREGWTLPYRRWLTDLSFPSAAQHIALQEYRDAIDETEQRIDRLTEQLRQLAPAWRWAPVVAALQALRGVSFITAVGLVAELGDLTRFGHPRELMAYLGLVPSEHSSGPSVRRGAITKAGNPHARRLLAEAAWAYQGIPRIGRQHAYRQEALPKVVCDIAWKAQLRLTARFRRLVARGKAKPKVATAIARELTGFIWAIAQEVSPAPR

SEQ ID NO: 345308 - protein, 421 aa, unidentified
MNMTSKSAQFAALIGIDWASQRHALCLYDCATAKRESSILEHTPEAIAQWARGLQERFKGKKIALCLEQSKGPLIYALLEYPFFVLYPINPATAARYRMAFKTSRAKDDPSDAQVCLELVLHHREKLNPWLPNDAPTRELSCLLQHRRAAVDLRTLLTNMLRDALKSYYPQALELASQDLFAPLGCQFLLKWPSLQELQKARKQSVRKFYYAHNCRRRDVIEKRLDAIAQMTPLCRDRALLEPAMVQVKMLARQLLQLGGALKEYDSKIEQLFAQHSDALIWESFPGAGPTLAPRLACAFGTQRSRYQSAVAIQQYSGTAPVTEKSGKNQHWVHRRWARPHFTHQSFFEYASQSVLHCSWAKLYLKEQMARGKAYPTAIRALAFKWQRIMFVCWRDRVPYDETIYRQSLQRRGSHLACKIN

SEQ ID NO: 345309 - protein, 319 aa, unidentified
MSAETIIGIDVSRDWLDGFYLPKKQRFRLPNSPDGYARLLETLQSMPDGLKVGFEATGGQEWALWRVLIRNGINAVQLPPAQIKAFAFSMGKRAKTDQIDAELIARFMVFRPEAGRTLPDEKLQLLRALTVRRAQMVDARKRLSAQISARRKQGVSAELEDMDSSLKAFLENQISELEQRIEELITQGKELSAKAELLRSIPGIGPASVAMLLAEMPELGRMTATEAAAVTGLAPMAHDSGAMRGKRLISGGRRSLRHVLFQAGLAASCHNPVLKVVAKRMKQRGKPHKLVIVAIARRLVTIANAVLKTEQPWRVLPNA

SEQ ID NO: 345310 - protein, 316 aa, unidentified
MNTSIFIGLDVSKQHLDVAVRPQNRHFVNSNDDRGIRQLVKRLAALKPQLIVLEASGGYEFLVTAALAEAQLPVALVNPQAVRKFAGAAGKLAKTDKIDAQVLAHFAEALRPEPRPLPDQAHQVLKAALQRRQQVVKMIGQEENRLEKTFIPTVRRDIQVHLAWLRQRLTALNRDLDDQIRQSPLWQDRDRLYQSVPGIGPVVSLAVIAQLPEIGTLPGKKAAALVGVAPYNRDSGRFRGKRMIRGGRSYLRRMLYMAAVAATRWNPVIRTFYQRLVAAGKPKKLALTACMRKLVLILNAMVKHNQPWNQFINQVP

SEQ ID NO: 345311 - protein, 321 aa, unidentified
MNKYKEIYGIDISKDVFDVYGSQSGHNQFKNDPKGFKSFLKHLPKEALVVMEATGYYHYRLAQFLHQSAVSVSVVNPLSVKRFIQMKLAKVKTDKSDAKAICEYGQMNEVSLYNALTEVQSECLQLFRLLDSYLKHRTATKNKLKGEEALGIPSKFVYRSLKRNLKHLNKEVLELESRLLELVKQDQQHQLTLLKSIPGMGVKTALFLIVITDGFKKFETASQLCSYVGITPTIRESGSSVRGRSRISKVGNKKLRNLLFLCAFSACKHNKACREIYERLVAKGKSKKLALIAVANKLLKQAFAIAKSGLPYDENFVSRLV

SEQ ID NO: 345312 - protein, 392 aa, unidentified
MFYVGIDIAKQNHEASIIDSNGKLLDKSISFSNSQVGCNKLIALLERFEADTSNTVIGMEATGHYWVSLYSYLLDLGFTVYVINPIQSDAFRKMYIRQTKNDSKDSFIIAQIMRFGEFSTTSLADEDIMALRQLSRYRLALVDECSDWKRKCIALLDQVFPEYSKLFSDTFGVTSRELLSKYPTPEDMLSIDTETLSKLLSEASRGRFGISKASEIQESATNTFGVNFAKDAFAFQIKQIIAQINFIEDQLEELETEISTLLHQTNSVITTITGIGDVLGAIIIGEIGDISRFESAPQLVAYAGLDVAVKQSGDFVGTQTKISKRGSPYLRRAIWLAATVAAFKDPALSVYYQSLRAKGKHHLTAIGAVARKMCNIIFAVLRDNKPYEPHVK

SEQ ID NO: 345313 - protein, 430 aa, unidentified
MKSNTQNAKIEAITEKTLVLGIDVGSETHYARAFDYRGIEYSKKPFKFSNTEAGFATFKEWILDLKERHEKDKVVPGMEPTGHYWFNLGKFLQDNEMKPVLVNPHHVKKSKELDDNNPTKNDRKDPKVIAGLVREGRYMIPYLPDGVYADLRTASNIRFQLQAELTRIQNRISRWFNIYFPEYKTVYGKPDAKSGMLILKAAPLPEDILTLGIDGVNQIWRDAKLRAVGRARAKTLIEAAEHSVGSKEGAMSARMEIRMLLEDYESRNTRLQEVMVLIEELVRKIPMAEKLLEIKGVGIRTVSGFLAEVGDISRFNNPKELQKLAGLALVENSSGKHKGETTISRRGRKRLRYLLFEVAMSLVSKNQEFRELHNYYTTRRLNPLKKMQSLMAIAAKLIRVFYAILTKGVDYDPKKMVSDIKRSAVYLQAA

SEQ ID NO: 345314 - protein, 341 aa, unidentified
MTHYAGLDVSLKETAICVVDKAGSVVWEGKVGTTIETIASAVTRHAPKLERAGMETGPIAVWLSHGLRDAGMPVDCIHARRAAAALKLQANKTDRNDARGLAQLVRSGWYEAVPMKSIATHRIRAILVARDQLVRMCTALINKIRGLGKTFGVIIGAGKGASFDRAVRNALPHDPIVRDLLESLLETLTLLRERKRRFDRQLHRIARENATCRQLMGAPGVGPLTAVAFASAIEDPSRFRRASDVGAYLGLTPTRYQSGEVNIGGRISKCGDRLTRRLLFEAANVILYRTGGALGLRTWAERLVARSGSWKARVALARKLATVLFRMMRDGTAFENRPYPA

SEQ ID NO: 345315 - protein, 356 aa, unidentified
MDKVIREGAVRVGVDLAKRVIQVHAVDATGHVLTSRALPRARFIDWCVRLPAGCVVAMEASSSAHHWARKLVALGLDARIISAQLVEPYRMEGASGKNDANDAAAICEAASRPKMRFIPVKSIEQQSMLCVHRLREGFKEGRTACINRIRGLLAEFGLVFPQSPRELQAVLSDVLEDAGNELGTLARLTLQRAQAQWRELDDHLAWCDERIDAHRRSNPEVQHAATLIGIGPVTASAAIATVGDFKQFKNGAQFGAWIGLTPRQRSSGGKNNLGGITKRGDTYLRTLLIQGAKSAVMTAHRRQDKISSWVLALRERSGWQKAVVALANKNARILWAVMTRGDVFDPNHLSVKPTAC

SEQ ID NO: 345316 - protein, 374 aa, unidentified
MLFLGIDQHARQITISLRDETGDVLLARQVSTQPEKIHAFFQQLTRERLQSGEQFVAVLEVCGFNDWLIRMLYDYRCQKVILIQPEERKKQKTDRRDAAALSELLWANRARLLHGKPVRGVRQVDIASTTDQENRRLTTLRKHAGVARTRLVNKVRQILRRHNLQWEMPTKRFPTLAAVAWLEKLVLPEIDRLEMDHLLADLKQVQKRIEDLEKVIGLRCAGSEDAALLATIPGVAAFTATSLACRVGRVERFPRSHSLANYWGLTPGCRNSGEANQRLGRITKAGSSMARWLLAQVTHKVLRKDPRLREWFKRIKRRRGSTIARVAVMRKLATIIWHMLSRRISYTKCRAFSPSDGSRGAPQESEQQSLPMMT

SEQ ID NO: 345317 - protein, 430 aa, unidentified
MKSNTQNAKIEAITEKTLVLGIDVGSETHYARAFDCRGIEYSKKPFKFSNTEAGFVTFKEWILDIKERHEKDKVVLGMEPTGHYWFNLGKFLQDNEMKPVLVNPHHVKKSKELDDNNPTKNDRKDPKVIAGLVREGRYMIPYLPDGVYADLRTASNIRFQLQAELTRIQNRISRWFNIYFPEYKTVYGKPDAKSGILILKAAPLPEDILTLGIDGVNQIWRDAKLRAVGKARAKTLIEAAEHSVGSKEGAVAARMEIRMLLEDYESRSIRLQEVMTLIEGLVKQIPMAEKLLEIKGVGIRTVSGFLAEVGDISRFNNPKELQKLAGLALVENSSGKHKGETTISRRGRKRLRYLLFEVAMSLVAKNPEFRELHNYYTTRRLNPLKKMQSLMAIAAKLIRVFYVMLTKGVNYDPKKMVNDIKRPAVYLQTA

SEQ ID NO: 345318 - protein, 354 aa, unidentified
MSQILNATITVIGIDIGKNSFHVVGLDQRGAIVLRQKWSRGQVEARFADMPPCLIGMEACVGAHHLSRRLKALGHDARLMPARYVRPYSKGQKNDFRDAEAIAEAVQRPTMKFVATKTADQLDLQALHRVRERLVSQRTGIINQIRAFLLERGVAVRQGLRFLRAELPHILARPPDVLSPRMVRVIEDLAGDWRRLDERVEVLSGEIEAIARQDAGCKRLMSVPGIGPLISSATVAAIGRGDVFSRGRDFSAWLGLVPKQISTGDRTILGKISKRGNRYLRVLFVQAAWVVLIKPRSWERYGLKPWIEAAKKRLHRNVLAIALANKLARIAWSVLARGRAFEVRKIDDAAAQSA

SEQ ID NO: 345319 - protein, 433 aa, unidentified
MLEAEDEPLFADRAAGIDIAKAGIEVTIRVPSDTRRGGRQQETRSFRTTRKDLLALADWLRCWQVSKIGMESTGDYWKPVYFLLEAEGLDCVLYHAAQVKALPGRPKTDKLDSVWLAKITERGALPGSFVPPEEIRRLRTHTRYRRHLTQARTAEKQRAEKLLEDAHLKLSSVISDIHGVSGRAMLEAIAAGERNPTTLAQLARGTMRGKIRQLEEALDCSFLTGEHAAVLAMMLAAIDYYTARIEELTAKIGVLCQPYEHQIAQLDAVPGTGVITAQDVIAEIGTDMAVFPTAAHLVSWAKWCPQVAQSGGKRKGASASGRGNRYIGAALGEAAISAGRTQSFPGAKYRRLVKRMPKKKALVATGNSLLTIYHALLSDPQAAYTDLGTDYYERRANIRRQARNHVRGLERLGYKVTIEPIDPATGELQAADS

SEQ ID NO: 345320 - protein, 387 aa, unidentified
MAQVDDLSRSLVTFDQQSTLVVIVEMSQTRWLIAGTVPGLDRRPLKKLEPNAPTLLHLVKRWADEATKAGRTITRIVLAYEAGRDGFWLARWLRARGIEAYIIHSTSVAVSREHRRAKTDRLDTEMLMRVFLGWLRGERRHCSMVAIPTLEEEDAKRPSRERESLVGERTRIINRMKATLARLGIRGFKPDLRQAPQRLDALRTPEGVPIPPNTCDEIRRDMARLAWIREQISAIEVARVKRLEQAPAQGPDAMVRLLARVIGVGIETADMLVREVLLRNLRDRRAIARYAGLTGSPNESGSKRRERGLAKTGNARVRRGLIQLAWRFLRFQKDSALVQWYRARTQAPEGARKTTMITALARKVLIALWRMVITGTVPEGIVLRSAA

SEQ ID NO: 345321 - protein, 421 aa, unidentified
MKIVYPICCGIDVHKSFLVATIVSVTKLRTLTYKKERFSTFNKDLLKLKKWLIENNCYDVCMESTGKYWVPVLNVLEPDLHVVIVNPKWVKAVKGNKDDVKDSKWIGELFCFGLVRSSFIPSKDIRILREYTRYRYKLVNMRSSEKNRFQNGFTVCNIALDSVVSDMFGKSASEITNYLLTDENPNAEHCATMLHRSLKKKAVAVVESIEGFQLTEEQKFRMRQVLHHKEYLDLAIELLDTKLESLTKPYTAAIKLLCTIPGLDSDSATTIISEIGTDMSQFDSSKRLCSWAGLTPGNNQSAGKKKSVKITRAGVYIKPMLVQVAHAAVKCTSQPYYKIKYENITRRRGKKRAIIAIARMILTAIYHMFQTGEVFNPSDLKQIDMPEELKQKQLQKNVSNAITLLKKQGILSDDFSAPSCA

SEQ ID NO: 345322 - protein, 334 aa, unidentified
MKELKSCVGIDISKDSFEVCIKQLKDERSVIKATHSFQNEFSGFESLLKWTLRKVPNPIFVMETTGVYHEDLTHFLYSNGQKVAVVLANKMKHFAKSLNMKTKTDKADAQMIAQYGLERQLEWWEPMMPQMKNLRDLCRERLSLKKDLVRCKCQIHGLKHAHSTLDVVLQLKEQQIEFLEKNIQIIENEIIRITEQDKEFSQRVKNIETIKGLRLLTIVTVLCETNGFAQFNNIRQVVSYAGLDIAERQSGLFKGKTRISKKGNARIRECLFMPALSATSYNEQIKALYQRVIERNPTIKRKGVIAGMRKLLILIFVLWKKNEAYSAEYQWDAH

SEQ ID NO: 345323 - protein, 385 aa, unidentified
MANQNDLSRSVVAFEQHNTIIAVIEMSLNSWLVAGIVPGIERHPLKKLSVNEEVLLKLLHRWRDEAVKAGHTISRIVVAFEAGRDGFWLARWLRARDIEAYVIHPTSVAVSREHRRAKTDRLDTELLKRAFLGWLRGEPDHCNMVAIPSLQEEDAKRPTRERENLVGERTRIINRMKACLVRFGIRNFNPTLRTAPERLNALCTPEGVSLPPNTLAELRRDLARLRFVMDQINEIEVARLQRLERAPTAEPHAMVRLLARVIGVGIETADMLVHEILSRKLRDRRAVARYAGLTGAPDESGSKRREKGLAKAGNARVRRGMIQLAWRFLLFQKDSALSQWYRTRTESAGKKRKTMIVALARKLLIALWRLVTTGEVPAGVVLRAA

SEQ ID NO: 345324 - protein, 343 aa, unidentified
MKLTCGVDWAEAHYDVALVDGDGVVVARARIDTGATGFNKLLALIAEHEGSAQDTPVSIETDKNLLVVALVEAGFTVYPINPRAVARYRERYGQAGGKSDPGDAAVLAHILRTDRHLHRQMPAVSEQGRAVKALARQHQEAIWALHQTVSRLRSVLLEFYPQALQAFPNLTHKAALTVLAAAPTPASSRQLTRRRVVTLLQRSGRGNHPTLVEQILTDLHTAALRQPPQVEQALGHTVVGLVGIVVAMQRAVDDLELELAREFDQHPQTAILRSAPGLGPILAARILAEIGDDPQRFANPNSLRAFAGTAPVTIASGRSHYVKARKVRNKRLADACHWWRSRP

SEQ ID NO: 345325 - protein, 372 aa, unidentified
MTQSNILFIGMDVHKESIVLSLADDDRTEVRRYGSIGGTMPDFKKTLRKLVSTGKSLFFCYEAGPCGYELYRFIVSQGHQCIVVAPSLIPKKAGDKIKTDKRDADNLTRLLRSGDLTSVFVPNEEDEAMRDLSRAREDIVLALKSAKQRLKSFLLRHNKRFDGSANWSEKHLRWLTEDINMAYPEQKIVFQEYLSSVTEANERVKRFDKEILFYAQQWRLFPVVKSLMALRGVRMVVAVTMMAELGDLTRFENPKQLMCFLGLTPSEYSSGDKQKKGAITKTGNQHARRVLVEAGWSYRFPAKVSKEMQKRHEDVSLNVRDIAWKAQLRLTKRFRGMANKGKPNNLIVVAMAREIAAFMWSIANEVPILPRN

SEQ ID NO: 345326 - protein, 418 aa, unidentified
MAHESEWYVGFDWASEKHRVCLLDRAGRVVGERDVAHDGAALTDLCEWLIDKSCAEPARIAIAIEMPHGPIVEMLLERGFAVYAINPKQMDRFRDRFTVAGAKDDSRDSRVLGDSLRTDRRAFRRLCPDEPLVVELREWSRMADDLKQERNRLANRVREQLWRYYPQMLKLADDLAADWFLALWECVPTPAKAAEARGATIARILKAHRIRRFNAAEVLRILREKPLAVAPGAVEAATAHIGAVAERIELVNRQLNTAQRQLDELCARLEQPSEGEPGQKSEQRDVAILRSFPGIGRINLATLLAEAWQPLQRREYSVLRAMSGTAPVTRRSGKACIVLRRLACNKRLERAVYHWARVAVQHDPRSRAKYAELRRRGHSHGRALRSVGDRLLFLACTLLQRQILFDPDYKHADVAAAA

SEQ ID NO: 345327 - protein, 349 aa, unidentified
MRCYQPPADTRFYAGVDLHARSLYLVVLDRDGQVRFSRNLPAAPDPFLRAVQPFREGLVVGCECMHCWYWLADTCRDAHIAFALGHAWGMKAVHGSKTKCDPKDAEAIARLLRGGNFPPAYAYPQERRGLRDLLRARLRLVRQRAELYGHVHTARRQANLPPVSSDVKYKSKRGGITADIADPFVRRRVETHLALLEPLDTTIRRLEAEIEEAAQGHYATELAVLQSTPGVGLVLSLTILLEIDTIDRFATRQQFCSYARLCGAVQESAGKRAGEGNRKAGNAWLKWAFSEAAVLSAQKDERIGRLLERLTARLGKAKALSALAHKLGRAFYHMLHTKEVFDVNRFVRH

SEQ ID NO: 345328 - protein, 344 aa, unidentified
MTYYAGLDVSLRTVNICVIDNQGELIAETKLASDVQDIVAYLDELSLDIESISLEAGTLAQYLTYGLQAAGFNVICMEARQVKGALSAMRNKTDKHDARGIAQILRSGWYSRVHIKSMHSHHIRMLLSSRKAVLSKCVDLENEVRGLFKIFGIKLPPKLGHGAFDAAVRDIIEADETLSHALLPLLDARLVLYRTFRVLDNRTRKMAHADPVCVRLMSVPGVGFITALTFKAGVDDPARFKRSRTVGAHFGLTPRRFQSGEINIEGHISKCGDADVRATLYTAANALLTRSARWSPLKAWGMKLAKTRGHRRAVIAVARKLAVILHRVWIDDTQFRWGTEGARS

SEQ ID NO: 345329 - protein, 401 aa, unidentified
MNEFNPAMHQLETASALEVMRAAGQEEKHAAYVGLDVHKETIAVAVAEPGRSEPVYRGEIANQPKTVAKLVAKLSESYDGGLLQFCYEAGPCGYVLYRQILECGHDCQVVAPSRIPKAPGERIKNDRRDALKLARLQRGGDLTAVWVPDQEQERMRDLSRARDDMKGQERKARQQLNAFLLRHGHQWPRGKSRWTPAHENWLAGLKMEHPWQQVVLEEYIAAERAAGERVVQLNAHLMRALPEWSLAPVVDSLVALRGVDKLAAIVLLAELGDISRFDSPKQLMAFLGLVPSEHSSGPRRRQGGITLTGNAHARRMLVESAWSYRFPARWTKHLKGKARQASAEAKQIAWKAQTRLCGRYRALTRAGKNTKVVCVAIARELAGFIWDIVRQEMPRLASQQG

SEQ ID NO: 345330 - protein, 409 aa, unidentified
MDRQLERCCGLDVHKDTIAACVRIGGPSGRAAQHVQTFRTTTADLLVLRDWLAAQGVTHVAMESTGVYWKPVYYALESDFTCLLVNAAHIKQVPGRKTDVHDCVWIAQLLEHGLLRGSFVPPVPIRELRDLTRYRKGLIHDRTRVANRLHKALEDAGVKLASVASDILGVSGRAMLEALAHGTTDPEILAQLARGRLRGKLPALRSALAGRFRSHHAFLVAQLLAHLDYLEEAIATLSTEIESRLAPFADQLTRLDSIPGINRRTAEVIIAEVGVDMSVFPSAAHLASWAALCPGNNESAGKHKSGKTRKGNRWLRNALIEAAAGASRAKDSALQARFRRVLRRRGPKKAVVALAHALLRIAYHVLADGSPYRELGADYSDRRHTQRLTRRATRLLEGQGYRVTLEPAA

SEQ ID NO: 345331 - protein, 365 aa, unidentified
MEEPAVFKNSMLFIGLDLGDRHSHLVSLDQGGEIVEEARLPTTQASLARKFSGIPACRVAIEVGAHSRWVSALLTRLGHEVLVADARKLRLIYNNPRKHDRADAEYLARLARLDPGLLSPIHHRSPQAQAHLAVIRARDSLVRARTQLINHARGLVKTTGARLPSCSAASFHTKTASAVPQELLPALSPILATIGSLTQSIQAYDRQIQQLALDHYPETRLLRNVPGVGPVTSLAYILTLEDPQRFRKSREVGACLGLVPRTDQSGAQDPQLHITKTGDSYLRRLLVQSAQYILGPFGPDCDLRRWGLKLAERGGKSAKKRAIVAVARKLAVLLHHLWKNGEVYDPLYRSQLARPSVKEAAIATG

SEQ ID NO: 345332 - protein, 337 aa, unidentified
MDNYIGIDVAKSTLQVFIPKNESDIEIENSLDGLKNLYNKLKKQYKKSIEDIVFVYESTGSYSTILEYYCQNKAIKCFKVGAYQSASFSKVVKNRSKTDKMDARMLSQMHILAKEGEIRVPSRDEKAHQIRSLIKYYQSLVKEERRKANYLEAATYNLEDSYVLKHVKRKIIQLQKEQTEIIDKIIEIISSNSHYLEAYTNILSIKGIGEKSAIILLYLFLRYPNASRQQLTALCGLDPIQRSSGTSVQHKERISKQGLSLIRDILYMPTLVSVRYNNEMKIVYEKLVERGKPKMVAQIAAMRKIILLAHSLYKNKQKYDPDRYLQFHQAKEENNMK

SEQ ID NO: 345333 - protein, 341 aa, unidentified
MVHVGVDLHKRVSQIAVLSANGEVTQHRLENDRLRVQRFFEQVPAPARVAIEASGTWWWLVDLLEQLGHEPVLSHPKQTRAIAAARLKNDRVDAERLALLLRGDLLPTVWIPSTAVREARELIRHRVSLVWERTGGKNRLLALLARRNLQPTSGQSWLTVRGQRELHALPLTPTPTAIVEDCLALRRLLDEQIRRLDQALIERWGDDARVRRLATIPGVGPFLAILVVLELGDIHRFPTAKHVASYIGLTPRVRASADRVRVGHISKEGNRLLRWALVVAATQAARRPGPLRTWARLVQRRKGAKVARVALARRLAEIIYYQVWKEETDFFAVLRRGGVRG

SEQ ID NO: 345334 - protein, 479 aa, unidentified
MNAKAKNNKNQVNNNFSVINTLSAEERQTRMDDLLNTLQAKTWHDLETSGKFDKNAKLSFISDDMLIVGCDIGSETHYMRAIDRNGRELSRKPFSFHNNEEGFEAAKAWMVELAALNGKKQIVLGLEPTGHYWFCVATWLIDNGISVVQVNPYAVKQTKEIEDNSQLKDDRKDPKVIANLVMNGNYGMPYLPEGIYADLRSLSLLRSQLAENRIRSINRLHRLMKIYFPEYKDAFGKTDGSFAMEILKVAPFPEDIIRLGEDGIRDIWHKAKLRGRGYSRAAEIFKYASVSIGKKEGSEADRYSVKCHVEDIISLDERLATVEAAINEKCMEIPHAENILEITGLGQNIVSGIISPMGDIERFDDAKEIQKLSGLNLVANSSGKHNGETKISHRGRKELRTWLFQGAKSVVAHAPEFQYIHEYYTTRAKNPLKKMQSLIVIACKLLRIIFTILKKGITYDPQKMLDDIKRFEEAEIVAA

SEQ ID NO: 345335 - protein, 326 aa, unidentified
MKKSNENKLVGVDISKKTFDVYCLDAKGQAVQRQLPQSSKGYRTLAGLIGPSAVCVMEATSTYHLPLAQWLYDHGIRVVVENPLKIKRFSQMHLQRHKTDKADAKMIYEYGTTIVAKNIVPWRPQSTRIQELQQCDSLSQRLNKELTAITNTHEALAQLSVVNAEVTRIVSSTIKQLKKALKQLDKQMQALIKKHYYENYKLLMSIPGVGSKTSVMLICQTDNFTKFDNVKKFLSYIGMSPRTYESGTSVKGKGHITKVGNGRLRSLLYMCSWTAKRTNPQCVAVYEKMHTKGKPEKVIKVAIAHKLLRQAFGVIKHQQPFSMQLA

SEQ ID NO: 345336 - protein, 342 aa, unidentified
MTIMMLGIDLGKNSCSVAGLDAAGKVVLLRRMQPKTIVSFASKLPACVIAMEACCGAHHLGRLLANLGHEVRLMSPEYVRPYVKAHKNDDRDAEAIAEAATRPTMRFVELKSQEQLDVQSLHRVRSRLVGARTNLTNQLRAILLERGTTIAQGRRKLEHVVDMQLADPNFMANSRIRRLVAEMREEWSDLDRRIEALDREFIELARDNEAAHRLVSIPGIGVLSATALVAAVGDGTTFARARDLGAWLGLVPRQHTTGGKPRLLGISKRGNKYLRTLLIHGARAALPSLAQSQTRLGTWLRNLLARRHRNTVVVALANKLARIAWAALRYGVTFEVTKPAAA

SEQ ID NO: 345337 - protein, 353 aa, unidentified
MVKVKSKIFFKGKKIFVGIDVHKKRWVVTVRTYDLELKTFSMVPSAEELERFLVENYEGAIFYIVYECCFSGFWVYDYYHQRGYNIIVTPTNRVYRDGSIVKTDKIDSRKLAFQHSRDLLREVKVPEMKIREYRSLFRIYDKEKMRLGQILRQIRSILEVRNHPLKWERFNKEMVRKLKSVKFQEVIFNKKFASLLMEYEYVQEQIKDTEERIKEIAKDKELSEKVRRIEKINGVGIVSAVRLVVYLFDMKERFESGEKLVHYLGLTPGEHSTGEQIVRSRTGLIGNKQLRSIIIQLAWVAVRKDGNLLDKFDRVYKSSGCKQKAIVAVARKLMVKVHSITEKEEEYEVNIAA

SEQ ID NO: 345338 - protein, 481 aa, unidentified
MQYALPLVLPDVPVGGVCAGIDWATADHVVCVVDMAGRVTDRFSAAHDKAGISAMITRLRRGKVTEVAIERGDGPLVDALLAAGLTVVVITSRQVKNLRSRFGAAGAKDDRFDAFVLADTLRTDRARLRPLVPDTPATISLRMAVRARRDLVRHRVAVCNQLRAHLAVAFPAGSTLFHDLDSPISLAFLARFGSQDAAAGLDEQAIGAWLATIAVRGRPAPAGVLCARLQAAPPGATGADGAAQAGVTAALTATLTALSAQIKALETQIAGQLAAHPDGPIFTSLPRPGTVRAARLLAEIGDCRSRFPDPESLAGLAGVAPVTRRSGTRIAHGFRWSVNRQLRDALCDFAADSRHGSSWAAAIYDSARARGKDHPLAVRITARAWAYVIWRCWHDSAAYDPAKHNALQAILARRAAQQEDQPGVVAVEPVRRVRVLGAEHHIGQRPLVEIEQAGLAWLVEVQQPGQLEHVVADAALAGPVG

SEQ ID NO: 345339 - protein, 316 aa, unidentified
MAALICGVDVSSISLDARVGPQGSEARFENTPEGVGRLIAFCHEYGVELVAMEATGGYERLAFGLLWGSSVPVALLNPRAVRRFAQGMGLEEKTDRIDAGVIAWFAEVKNVVPTQPASAAQARLEAMVTRLRQLTELHAAQRNQRLLVSEPSVLDSFGELLALVKTQIRALEKTIAELIAADPLWQQLDTAFRSIKGVAGRTVSRLMAEMPEIGTASNKAVSKLAGLAPLAKDSGKTQGKRVVRGGRSNVRTILYVVADVVRRYNPDFAAFADRLRAAGKPKKVIRIALAHKLLVRLNAKAREVRQPHLTAVCSTC

SEQ ID NO: 345340 - protein, 461 aa, unidentified
MPQPNSPSTVESLVGVHPNAAGLDIGAREIWACVPQDRAPESVRMFGTFTPDLNALADWLIACGVATVAMESTGVYWIPVFEMLEARGLQVFLVNARHIKNVPGRKSDYLDCQWIQKLHALGLLTASFRPDAEMCALRAYLRHRAQVLQHRAPHILHMQRALHQMNLQLTQVLTDVTGVTGLAILRAIVAGERDPLTLARLRNPACKSSEEKIVKALTGNWQPEHLFVLKQSLELYDFYTTQVAACDVTLEQYFTALKPRYEPAAEDLAGPALPRAKPGSKSKNRPAFDARAHLVRLLRIDLVAVEGVSASLAQTLLSEIGTDMAKWPTVKHFASWLGLAPHNDISGGRVLRSCTLKTDNRAGQAFRQAAASVTRSDSAFGAYYRRKKAQIGPQQARVATAHKIARTVYHMLKHRLAYHETGALVYEQHQRERELAHLQRKAAKLGFTLTAHEPVLAPAAM

SEQ ID NO: 345341 - protein, 431 aa, unidentified
MNEKGLPPRYIVTLIYEIMAAVEFTQVVSRGCGMDIHKEVVVATVRGGGIQKEARSFDTFTSSLTELRERLVSLGITHVAMESTGVYWKPIYNVFEGHIPHVWIVNARHIKNVPGHKTDKNDSEWICQLLMAGLLKPSFIPPREQRELRDLTRYRRKLIQMVSANKNRIIRTLEDGNVKLSSVLSDTSGKTGATLIEMLCDGKELTLQDIEDVRHGRCHHTSEEMLEACTGYMNDHKRYMLQRIRECNRKLTVEIVELDRRIKEIVTPYAEVMDRLDEIPGLHDRTLEDLIAEIGLDMTVYPSAESLCKWAAMCPGNNESAGKKKSGKTNHGDKYVKATLVEAAWAASRTKGTFYKERFERLSKRKGGKKALIAVGHSILKAVHYVISTGGRYHELGEQYVPSKIEKKRRDYLKSELQKLGYEVSIIKKKD

SEQ ID NO: 345342 - protein, 458 aa, unidentified
MSKVEEKRVARPRRRLSPVNAAAAGIDIGATFHVVAVGEDRCEPPVRSFPTFTSDLRELADWLSEAGIKTVAMESTGVYWIPVYEILEARGFEVLLVNARDAKNVPGRKTDVNDAQWLQQLHQYGLLRASFRPREALVRLRAILRHRERMVEYAASHIQHMQKALMQMNVQLHHVVTDITGLTGLRIIRAICSGQRDPAILAQFRDSRCKASTDLIRAALTGHYRSEHVFALRQALELYDVYQAKIEECDRELESALVEINRDRLAAEEPLPKRRDAGGRNEPHFDVRTALYTLLGKDLTQIHGLGAYTVLRLVGECGDDMNKWRTSKHFASWLCLAPGNKVSGGKLLSSKTRRSSNRAATLLRIAAVNVGRTQTALGAFYRRLAARAGKAKAVTATARKLALLFYNAIRFGRDYLDPGADYYEERYRSRVIRSLHRRAAQLGLILTQAPAMVESEVS

SEQ ID NO: 345343 - protein, 413 aa, unidentified
MSVTPDGVPARVCAGLDWAKDDHAVCILGPDGSVLDRFFVVHDAAGLKTLVRRLLKAGVDELGIERGDGPVVDALLQAGLTVLVIAPGQVKNLRSRYGSAGNKDDRFDAYVLADVVRTDRARLRPLVRDSAATTAMRTTVRARRDLVEHRVAAANQLRAHLQLVFPAAASLFAAIDTAISLSFLERFTTQSQADWLSPKRLGTWLSSVGYSGRTDPTILHAKLLATPRGTTGTDADVHAATTSAYVTLLRVLNTQIAVLEDNLTDQLKTHPDTHIYASLPRVKTLRTARLLAEIGDARGKFPTANSLAALAGVAPSTRQSGKVKAVTFRWGCNKQLRDALCDFAGGSRHDNAWAADLYERAIARGHDHPHAVRILGRAWAQVIWRCWHDNLSYDPAQHRALQSILANTANEAA

SEQ ID NO: 345344 - protein, 470 aa, unidentified
MQSILPISCGLDIHKDTIEACILIDRGYAEPEIIRNSFTTLRGDLAKLRDWLVSNGCNHVAMESTGVYWKPVYEILEEIEGINLCLVNAYHMRNLPGRKTDVKDAEWIASLFMCGLLNKSFVPEKGIRDLREYTRFYKKLEQEKTRQVNRIEKFLQTHGFKLSSVLSSIVGVSSRRVLEILCEKGQVSVFEVQMCLERGVKRSADEIAYAINGKLSAVSRALLRELLDTLYAHEKQLKSLYSRMEIVSAPYAPAIALLDSIPGIDILAANYVIAEIGVDMLQFAKAGNIVSWVGLSPKNDMSAGTIKSKKLKKGNNYAKSVLVQCAWATIKVRNTRLSNWYWRNVGRLGKKKAIVAVARKLLRYIYAILSTGEVYNRQLDVADTIKNKALKLESAKKHISTLESKNAKPIVKIVAEDDSTIGADKDGKPPVISSKKSKGGQKSPNSIPQKAIAPEVPKKRGRPRKNLTSA

SEQ ID NO: 345345 - protein, 341 aa, unidentified
MKQYVGLDISMEETSVCVLDHTGKATFQGSVTTGPEAIAEVLSQYATHAERIVFETGSLSNWLWHELKALGFPVICLDARHANAALSMRMNKSDKNDAKGLAEMARMGWFREVSVKSAENRKLRSTLSARAKLVDLRRDLDNQIRGLCKGLGILLGKAGSISLKNKLNAMLADAPELRQLFSPLLQAQECLTEQIEKFDRLLHAMAKTDQTARRLMSVPGIGPLTALSFVATIDDPKRFKSSADVGAYLGLTPRRYQSGEVDRTGRISKRGDILARTYLFEAANVLLHVVRRGSALKRWGAKLVKRIGAKKAKVAVARKMAVILHAIWADGTVFEPERKAA

SEQ ID NO: 345346 - protein, 379 aa, unidentified
MLAQFSFHWNLSRSTWLIASLSPGGGEKMSKHSVPAGDIGALLARFSEIRHKALARTGKSFPIIVIQEAGLDGFWIHRVLQKEGIESHVVDAASIATSRRRRRAKTDRIDGEALLRALLAYKRGEPRVCAMVKAPTPEEEDRRRLCRERKAPIAERVRRVNRIKGLLFCQGVSGYEPPRRNRRQRLGELKTGAGRALPDHLKAQISRELDRLDRLLEQIKAVEAERDALFAAAKAAAAATPTPAPAPVAMLLDIKGIGPEFAAILWIEAFFRSFANRRQVAAYAGLAPTPWQSGSVDCEQGVSKAGNPRLRTTLIQLAWLWLRHRPQSAPALWFKQRVARNGGRMKKTTIVALARKLLVALWKYVTAGVVIEGAVMKSA

SEQ ID NO: 345347 - protein, 304 aa, unidentified
MYGIGIDVSQATLDVAVHEQAFRQFSNDKRGFVRLIQWLKQWPITQVVLEASGGYERAALEALHEAGLPMVRINPARARRFAQATGRAAKTDRLDAAVLAQMAHLLPLTRYVPPAPWQRRLTEFAQCRRHLVQMRVSEMQRLRQLTDPVLITIKQRHLAQLSEDLKQLDKAMAEQLAAQPGWKNIGTLKGAGPILVSTLACELPELGTLGSKAIASLVGLAPMNRESGTWQGKRSITGGRAVVREALYMAALTAIRYEPKLRDFYATLKAKGKASKVALVAVMRKMLVILNARMRDAQSESIPA

SEQ ID NO: 345348 - protein, 349 aa, unidentified
MDIVGGFDVHRKQITFDYIEMETGELHRGKIRPATRENLRNWLSQFSERFAGKQAAIAVEATTGWRYVIEELRRAGVEPHLAEPAETKSLQGRKKRAKTDRLDAGHLRDLMVIDRLPESWIPPHHIQEIRTLMRLRHSLIEERTTHKQRINAQLFHNGYPQQKNLDSTEGRTHLEEMELPAAARQVVDLSLAMIDHINEELEPIDAQLRAYARCQAGCQALMKHYGVGELTSVALLSELGDTRRFSSSRKAVRYAGLDITVHSSDDKRAAGKLSRQGPPTLRWAAFEVAKRAWRKSSPDHDYYLKNKERIGANRAALSIARKLIRRAHHTLRELGEEAISEPVLTSSCV

SEQ ID NO: 345349 - protein, 350 aa, unidentified
MIIIGCDYHPGFQQIAFVDTDTGECGERRLEHREEADKFYRDLGAQGALVRVGMEASGHARWFERLLSELRFELWIGDAAEIRTKRVRKQKTDRQDAQLILRLLLEDRFPRIWVPSGENRDLRQLLWHRHRMVQARTRIMNQLQAVALNEGLRCKKRLWRDAGREQLESFALAPWASRRRRDLLELLDRLTPTIAELTQAIEQEVEKCPEAQRLQTHPGVGALTALAFVLIMGRADRFQCGKQIASYLGLVPLEESSGQRRRLGHITKQGNSLLRFLLVEAAQVTVRSDQEWRSKYFHLAMRRGRKIAKVAMARRLAVLMYWMWRKGWDYEQLKKFGSHAGEPGHRDGVR

SEQ ID NO: 345350 - protein, 340 aa, unidentified
MQAPRHIGIDLHRNQFTCCVRLENGRNYLTDWKLEDLPRFVKKLRPEDEIAVEVTGNTRLFHDAVAPYVKRVVAVDPNQFKVISPSVKKTDPNDARNLALYLQKDLLPEVRMKDKTQAQLASLTQTRDTLVKLRTALKNKINNILSAHGINLEKEALSSEKKLNEVLSMRFDPMVKIELEVIVEEIRSLNQRVAKLEKTIADEGSKLEGHKNLTSIKGIGPLTSSILLSVIGDINDFADEGKLAAYFGIVPRVSNSNETVHTGRITKRGSKLGRTALVQCALIAQRYSPYLKRYYERMKANKGAGKAIIALARKLLGIIYRTLKNNWVFEDFPNFVLAEA

SEQ ID NO: 345351 - protein, 336 aa, unidentified
MSKSFMGIDVHKARCVYSELDARGNVIRRGKFGNNLAEVSDFGSSLTGREQIVVEPVLNYLWLLDQIEGQVGSIHVATPHKVKVIAESKCKTDKYDSRILAELLRTNFLPESYIAPRAIRELRLLVRRRYWLIQIVIQLKNRIRYLLFLEGIDLMVSDVSSAKAFREIKKLSLSAWIRATILEQLDIIGQISPRIKELDKELERRSEGIRAIELLRTIPGIGIIWAATIYAEIGDINRFRSRKAFASYTGLVPTVRSSGESTHLGDITRTGSRPLRAALVEASRMAAKMSPSLGRLYARVNYRSNWQKARVAVARKLALIIYAMLKKETPFSACPA

SEQ ID NO: 345352 - protein, 387 aa, unidentified
MEPVYPISQAQSVVSEEATTLFVSLELSRARWLVTSLSPGGSKISRHFVTGAASKDLLQLLADLRVKAERHIAAPVKIVTIQEIGFDGFWIHRLLAANLIESHVVEAASIAVPRRRRRTKTDAIDGELLLRTLMAFKRGEPRVCAMVVVPSPDEEDQRRLSRERKTMIKERIEHINRIKGLMACQGIAGFEPMRANAREKLGELRTGDGRAIPERMKAEIRRELDRLELLRRQIADVEAERDALLRAEEASTGSPGAQLLKLRGIGPEFATVLWHEGLYRRFANRRQLAAYAGLAPSPWRSGDMKREQGISKSGNARLRTTMIEAAWLWLRHQPGSALSQWFQERVRTDRGRLRRVSIVALARKLLVALWRFSTHGEIPEGASLKAA

SEQ ID NO: 345353 - protein, 463 aa, unidentified
MSRKTTRKAQKKVVALAEGEGRRKSGPVMGVDVHKNVMAWCVVSEASLLDEGEVQNTLDGIKKLQAVIKKRQVDSVAMESTAQYHFKLLYTLIAAGTKVLLANPQQTKDTQGKKTDKLDAKRIAIAHRDGRLKPSVISPHEIMSLRKAMRAHTRLVEDQTKIKQRLLQVFHQKDAPFNTMLVTDWGTSVLRGLFDTDDVGSLVDAHLPRGRAKQRDDLIVALARFKDSMDEVERQVFRSELEMLCFIDFQKERLQLVYCQICKQNAAFVRTMRLLVSIPGIGPDTAAKVIAEIVDIAYFPSPKQLVKWAGLAPRVHQSGHRKNITGRIHKGGNKHLRRAVVLACQNIYARVDAGNPLHVFARRKKEEKDAYWLALCAAARKLLVMIWYMWMGGKPWKPKNTTTSLAATIKQMVDSKLAMLDRSVRRYEKVRDGLARDTTEALRAADPGGLSPKRLMLALLESV

SEQ ID NO: 345354 - protein, 370 aa, unidentified
MGNASTLHVGLDVHKDSIAVAYAPADSGAAPVAFGTIGTRQCDIDALIRRLQSKSARLVFVYEAGPCGYWLYRYFTKKELACFVVAPSLIPRKPGDRVKTDKRDALTLARLARSGDLTPVYVPAVSDEAIRDLARAREDALHDLNAARFRLKALLLRNDIRYTGRANWSAEHLRWLARLVFPTPAQQIVFQEYVRTVTERTDLLQRLEGELLEQAKPWRLAPVVAALQALRGVQFTVAITTIAELGDLTRFDTPRQLMSYLGLTPSEYSSGERRRLGGITKAGNGHARRVLIEAAKAYRHRAKVSEAIQARQQDQPAAVRDIAWRAQVRLCGRYRRLLARGKHPNTVAAAIARELAAFMWAIAKTQPLPA

SEQ ID NO: 345355 - protein, 375 aa, unidentified
MLQYSKYVGLDVHKDSIVIGVAERSGEPPQFHGRIANTAEAVKRLVKKLSPHGEVVAFCYEAGPCGYGIYRQIVALGHECVVVAPSLIPKKAGDRVKTDRRDSLSLARLHRVGELTAVWVPDEEQEAIRDLTRAREDMKALERQSRQRLGGFLLRHDRIYQGKSKWTQAHFRWLETVKFGAPVQQIVFQEYVDMVKQCQKRVADLERQMQIAVEGWSLGPVVQALMALRGVKLVTALTVVAELGDISRFDSPPQLMAYLGLVPSENSTGLRPRRGRITKTGNGHVRRVLIEASWSYRFPARKTAHLERHAQKCSQAVQAIAWEAQKRLCQRYRHLVLDRKKLTVVATTAVARELAGFIWAIACEVMGRTTRTEST

SEQ ID NO: 345356 - protein, 357 aa, unidentified
MLGVLTSQRFEEAPVSEAYSGRQIVGMDLHRRRSVLVRMTETGERLETVRISNDAEYLRQVMTRAGEHPEVVLEATFGWFWAADTLAELGATVHLAHPLGVKMFSYRRLKNDEHDAADLADLFRMGRLPEAWIAPPATRELRGWVRHRAKLVALRSSLKCQIHAVLAGAGVPVPMSDLFGAGGLELLSGARLAPESRARVDSVMRLIEALDFEIELFTKLVAGRLREHAGYRAIQAIPGVGPVLAAVFVAEIGDITRFARPAQLACWAGLTPTHHESDTHIHRGRITKQGSRLVRWAAVEAVQRVSAHTPVGAVRVRVGERRGANIGTVAAARELTELVFYGLRDGHIRRLSAPPAA

SEQ ID NO: 345357 - protein, 338 aa, unidentified
MYYTGIDLHKFTSYLTTIDSDGCIVKQENIKNVDYNFLQYFSDLSGEHQTTVESTCTWYWLNDLLTSINIPLTLAHAKYVKAIAYAKVKTDKVDSHILAQLLRLNFIPQAHKISNENRTLRDALRARLKIVQRCTSVTNSMALVLAKYNLTEPEGLQDIPKLQYDQLSAHASLLKEQMLTLEKSLYPYLIPNDDIQRLLWIPGIGKMNAFTILLEVDDINRFADVKNFFSYCRLVPSARNSAGKSKQRSSKDGNRYLKIVFTDAATHAVQYYSEIRKYHNSLLRKKNKQIAKTIIAKEIAEIVFHVLKNKTNFNNKFKGVELQHKKSLQWPRVVSPDV

SEQ ID NO: 345358 - protein, 481 aa, unidentified
MSSKRTTRKAKPRQNERRQGERKRKRQAPQAMPTLEANAAGIDVGAREMYVAVPPDRDPEPVRVFPTFTCDLEALADWLMECGITTVAMESTGVYWIPLYQILEDRGIRVCLVNARHMKNVPGRRTDWHECQWLQYLHTVGLLRAAFRPEQQVVAIRSVMRHRKRLVELVGIHVRHIHKALTQMNLQIHHVINDITGVTGTAIIKAILAGQRDATVLAGLRQPQIHADEETIRKSLEGDWRREHLFTLRQSWEIYGEYVSAIEACDREICEMLGEHEPKVDPEEKPLPATSKRQRKRHHMRTGDFRFDVRTEAYKCFGVDVTRIPGLEGIALVLYTELGNDLKRWPSASQFASWTALCPDNDKSGGQVLWAGVRGVKNRTGHLFRQAANSLHHSNNEMGDYLRRMKAKLGAEAGITATAHKLARIFYAVVKNQREYDQTMWGQQDQERQRRIQARIRKQARHLGFQLVPIQPSQEPGEQVP

SEQ ID NO: 345359 - protein, 351 aa, unidentified
MTRKTDAVVASTIGIDTGKNTLHLIGLDDKGAIVLREKLARGRIAARLANVPKCLIGIEAGMATHCVARELIALGHEVKQVPPVYARPFRQGHKNDFRDAHAVAEAVQRPSTRCVPVKTDDQLDLQALHGVRSRLISERTAVINQIRGFLLEHGIPVRQGLRFLRQQLPDILAKRIDVLSSRIIRIIEDLSGEWRRLDERIENVTEEIEGLAHGTEGCRQLMTVPGIGPIIASAMVAAIGSGTAFARGRDFAAWLGLVPKQMSTGDRTILGRISKRGNRYLRTLFMQGARVILLRPANWAKHSFGPWLAAAAKRLHHNVLATAVANKLARIAWTVLVQARSYETRVTSEMA

SEQ ID NO: 345360 - protein, 356 aa, unidentified
MPETNPAEVIIGVDTHKHTHAAVALTALGARLGTITVPASRRGYQELEAWAGSFGPVRAYGVEGSGSYGAGLSRFLQASGHAVIEVNRPNRQLRYQHGKSDPLDAEGAARAVLSGQADARAKPGTHAVEMIRHLKVARDTAVKSRTQAMITLKALIVSAPAALREQLEGLAGKMALIRHLAALRPGTLTSPTASAKAALRALAQRWLALDAEIKAHEAHLDALTAACTPTLRTAYGMSTGTAAEMLILVGDHPDRIRSEAAFAKLCGACPIPASSGKIIRHRLNRGGNRQANAALYRVVIVRMRSHPPTLAYVRRRMGEGKTKLEIIRCLKRFVAREIFGYLCGAKTLPTAPMTAS

SEQ ID NO: 345361 - protein, 351 aa, unidentified
MAIAEGGRGGEVRYLGEFPATEAAMRKLVAKLAAKYRRLTFCYEAGPTGYGLYRLIKSLGHECLVVAPSLIPKKPGERVKTNRRDGLNLAKLLRAGELTAVWVPDDRHEAMRDLSRARLAAHKDLRGKRQQIISMMLRLGRIYPGKKTWGPAHMDWLMRQKLEHREQRIAFEELMEAVRQESERVARLEQAIREAVPEWSLAEVVTALQAARGIDLIAAVTLLAETGDLSRFRNPRELMGYLGIVPSERSTGDTVKRGGITKAGNGRARRILVEAAWAYRHPPRVGREKQAKVAAAPKSVREIAWKAQVRLCGRYRSLSRKGKHPAIVVTAIARELSAFIWAINREVMARR

SEQ ID NO: 345362 - protein, 346 aa, unidentified
MPYSTTVGVDLAKNVIQVSVVSDRGKELVNRSLTRRKFAEFLGKQKPSLVAFESCASAHYWARAAVRLGHEVRIIPAKAVAPFRQGHKTDSNDALAVAEAARRPNIKDAPMKSVEQQGLQAIQRARELLIGECIALSNHLRGILLEFGVTVPLGFASLLRALPEILEDGDNELPDLYRPTLHRLHQRLIELREDIEAMTREVEQLVKAHPVCHKLTALEGIGPIGALSLYAVLGSGTAFTRSREFSAYLGLTPRQFSSGGKTNIVGLSKKIGNRRLRSILIQGALAYVYRMKEPKSSKDRWLKDLIDRSGPRRAAVALANKNARTAWALVTQGTEYHRRQPLEVAA

SEQ ID NO: 345363 - protein, 397 aa, unidentified
MYIVGIDIAKRKHEAAVIDGEGAVIIKPFSFTNNCSGYNRLLAMLAKAKLPLDEVSFAMEATGHYWLALFTRLQKEGFRVQVINPVQTNSIRSFYIRQAKTDPRDALLIAEVIRFGHFSESTLHPENIYELRELCRGRHAIVSMQADVKRKVVALLDQVFPEYETAFTNMFGDTSMAILQTCPTPKELSKMPLEELCHLIEVSSHKRFRMAKAQELQALARNSFGFAMAGDVFSTMIRLYAKHLVFLKQQVQEMDRKIAEIMDTLDTPITTITGIGPTLGAYILSEIGDISRFSSAAKLAAYAGIDPTMRQSGEYNGVRNRMSKRGSPYLRHAIWLAASSAVLHDPALKLYFQKKRDEGKPYMASVGHACRKMVSIIYAVMRDNKAYTPCIPNEISA

SEQ ID NO: 345364 - protein, 425 aa, unidentified
MDALHRCCAGLDVHKQTIHACVRRLADDGQVSSETRLFGSMTRQILALADWLAAEGVSHVAMESTGIYWKPIWNLLEGRFHLLLCNAGEIKQVPGRKTDVKDCQWLAQLLQYGLLKASFVPSRPLRELRDLTRQRVQLVNEHTAAANRLQKVLEDANIKLSSVASDVLGVSGRAMITALITGEQNPERLADLAQRRLREKIPQLIEALEGHVDEHHRFLLRLHSEHLGHLENMIAQLEERINQVLPTPALTESQDGADVLPFPEAVALLVTIPGVDERSAKAILAETGTDMSRFPDAAHLASWTGICSGNNESAGKRRSGRTTKGNRWLRRALTQAAWAASHTKDTYLSAFFRRLAGRRGKKRALVALAHSLLVTIYYMLKEHRCYADLGPDYLDRLHPERLAKALVRRLEKLGYPVELTTAEAA

SEQ ID NO: 345365 - protein, 338 aa, unidentified
MSFAKVIGIDLGKSTFHLIGHDYAGREVFRHKYSRAKLVDFLSVQESTTIAMEACCGAHWLARKCKQFGHEVKLIPAQYVKPYVKSHKNDYIDADAIAEAATRPNMRFVSVKTEEAQLGTVIRRVRSGYIKERTACMNRIGSILLEFGLSFPRGHHQMKNLFQWIADQNEVLPPLLIAELTTQYEYYNQLNVWIKAQEEKLLALNKENYVAQLLQTIPGVGPMTASCCISAVGSPQDFDNGRNFAAWLGLVPFQYSTGGKPRMLGISKRGNKELRELFIHAARAVMWRDKTAEKFFGTWLIDLKCRKPFNVALVALANKIARIAWSVMTKKKPFEIRV

SEQ ID NO: 345366 - protein, 341 aa, unidentified
MGKSNRVFVGCDLGDKQSDYCVLDEGGRVLEEGRVRSTPAAFSKKFTRLLRGRVVIEVGTPSRWAEEVLRKLGHEVVVANVRQVHLIWKRKNKTDRSDAQMLARLGRLDVTLLAPVQHRSRAAQRDLAYLKARDVLVRSRTKLVNFVRGTMKPFGVRFPSCSPEALPKHADSAIPAELAPVLIPVVETIAALNERIAAQDEQIEQLAKAHPEATRLTQVNGVGSITALAFLLTLEDPARFRKSRSVGAFVGLTPSSGGFSSSALTTSSVDTERPATFEPGGTRSGKEAATTAPSAPWWPSRGSSQCFCTASGSAGSSTSRWATAAWLPETLDTTQAKKEGH

SEQ ID NO: 345367 - protein, 344 aa, unidentified
MTYYAGLDVSLRTVNICVIDEQGERVAETKLASDVQEIVAYLDELELEIVSVGLEAGTLAQYLTYGLQAACFEVVCMEARQVKAALSAMRNKTDKHDARGIAQLLLSGWYRRVHVKSMQSHHIRMLLSSRKAVLSKCIDLENEIRGLFKIFGIKLPARLGHGAFDAAVRDIIEIDETLSHALLPMLDARLMLYRTFRELDNRTRKLAHRDPVCERLMSAPGVGFITALTFKSGVDDPSRFKRSRTVAAHFGLTPRRFQSGEMDIEGHISKCGDADVRCALYTAANAMLTRSSRWSSLKAWGMKLAKTRGHRKAVIAVARKLAVILHRLWIDDAQFCWGNEGVRS

SEQ ID NO: 345368 - protein, 322 aa, unidentified
MIENTNYFGIDISKDVFDVMGSNGLFYQFSNTASGFKNFIELTNTSSHCVMESTGVYHLRLAYYLISHDIKVSVENPLSVKRFIQMKLSRIKTDKSDSKMIYEYAVLTNPRLWTGQTKRQMECSHLLSLSNLYTKEIIALKNKLHSEKAQGSPVTRVIISINKSIKYYQKEIGSLESVVLKSVKEEYQDLHSRIKSIPGLGAKSSALLIVLTDGFERFNKASELCSFAGLTPIIRESGSSIRSRPRISKMGNKRLRKVLFICSFSASKHNKACRELYNRIVAKGKSKKLALIAVCNKLLKQAFSIAKSNLWYDENYKSTLVR

SEQ ID NO: 345369 - protein, 429 aa, unidentified
MTRISVGVDVSKNRSTVCIMDQDGKFIMRPFLVWHSTEELDFLADTLKRLNGEVRVIMESTSIYQYPIALQLKERGLFISIVNAYEMKQFANTDFRGGKTDKKDSRTIASYGISYWDKLVEWQIPKDTYFNLDLLNRTYMNAKKHRQIILQELQHYIDCAMPGMDKELHSLNLNTKKDFMLDFVEKFWHRDEIVNMTEAEFTEVFTAWAKKKGYRPVEGKAAKIYAIAKSCIPYYPANPTVKTILQCIVDKLSGVNRTLVTIVTQMIEEAKKLPEYQIVREMPGVGDPLAARFFGSAGDIRRFKNSKALVAYAGIDSPPDESGDFSSTHRHITKKGSKVFRDTGYEIMMALRAQKRTWEKVRKNPEVYDYMLKKEAEGKPRKVAKIAALNKFLRIVYARIKELYDNMALAERAKTKTRSKTRAKTKVTA

SEQ ID NO: 345370 - protein, 370 aa, unidentified
MEKNTENLVGWTAVGKVMVGLDVGDKKSHWTALDDGTGELRTGWVESTPAAVEEWLRGGPRCRVVLESGTHSYWMARLVKRLGHEAIVVPADALAGRKRRRKNDPIDSGLLMELGRDAERKRIAVVWQRGEADQRDLALMRARDTAVRMRSRLVSSIRGLVKQFGERVKAHDLRAFPEYARQELSAELVALVEPSLKMIEAANEQIRAYDRAVDEHLKRRDKEAEQLMEVNGVGPMLTGATIAFVGEAKRFSRNRDGASAVGLVPRLAESGESSPQLGISKAGNELVRRYAVQASQYILSARGTDCDLRRWGLKLVGESPNKTRKRKAVIAVARKLVTLLVMLLRTGAVYDPFYHSKQLVKETEAGAVAA

SEQ ID NO: 345371 - protein, 338 aa, unidentified
MNLSRIGLDLAKQVFQVHGVDRHEHVVCRRQLKRAQVRDFFRQLPPCLVAMEACGSAHYWARELRELGHTVRLIAPQFVKPYVKGDKHDAHAAEAICEAASRPSMRYVPVKSAEQQAVQSMHRVRSRLVRARTALCNEVRGLLGEFGLIATRRGRAATMALLETVMATEPASLPAPMGELLRELKDELQTLEARIARLERQIQAHVRGDARIQRLLAVEGIGPISASAVAASAGDARQFRTGRQFAAWLGLVPRQHSTGGQQRLGNISKRGDTYLRTLLIHGARAVVRCCANKTDARSRWLQGLLQRRPANVVAVALANKNARILWALLSRETCYRPG

SEQ ID NO: 345372 - protein, 391 aa, unidentified
MNAIRSTESTTSTVRLHLAFELGWTEWKLAFTIGQAQAPRLRTIAARDLDSLIREIAKAKERFHLPADAPVVSCYEAGRDGFWLHRYLNAGGIRNIVVDSASIEVNRRSRRAKTDRLDAVKLVVMLLRYHGGETKVWSVVTIPSVLDEDHRQLHRELLELKQERTRHVNRIKGLLASLGLAVATVNAAFPAVLPTLRLWDGTALAEDSQQRLLREYARWQFVDRQIKDLENARKKRVRQDETPHVEKVRQLLSLAGVGLSGSWLLVFELFGWRKITNRKQVGALAGMTPTPSQSGDSMREQGISKAGNRRLRTMMVELAWCWLRYQPQSELSQWYQRRFTLGGTRARKVGVVALARKLLVAFWRYLEQGEVPKGARLVPWRPKTGGGLAAA

SEQ ID NO: 345373 - protein, 329 aa, unidentified
MSVHSQGREAVAAARPNAGIDVSKEHLDTAWADRIERVSNDAGGWDALAAKLKADGVDVVALEASGGYEKGVACALQLAGLAVVVLNARQARDFAKAMGQLAKTDAVDAKVLEQFAAVIARHPQRDRYIHALPEGKRSYLAALVTRRRQLLDMHRAESNRMELAHEAAKPSLRAVLRALDKQLATVDHDIDQYLRQHFKEVAKLLDSVKGVGDVTISTLTALLGELGHLPRRQIAKLVGVAPLACDSGKRHGVRSVWGGRTEVRRVLYMATLSAMTHNRVIREFHERLIAKGKPPKVAIVACMRKLLTILNAMMRDGTAWDESKHPQKA

SEQ ID NO: 345374 - protein, 354 aa, unidentified
MRRNTKYVGLDVHQAMTVATVRSEGGRVIARSVVETSDESIGEYFNAMAGSVHVVFEEGTQAQWLYDLLSPRVDRVIVCDRRGEKRSGNKGDQVDADELSEQLRCGSLRAVYHGARARADLKELTRAYRNLVEDSTRVMLRLKALFRARAIRTRGVGVYQPKQRAAWVAQLPEQGARLRAETLYAQLDVLRTQRKKTKAAMVAEAKRDPAFGVLETIPYFGPVRIALLLATIGTPWRFRTKRNLWAYAGLAVVTRSSADYELFDGRPRRRRRPPLTRGLNRNHNRVLKNVFKGAANVAIGRQGPLQDFYHRMLERGMREELARVTLARKLAALTLRLLKTGEVFDPTQLSRPQI

SEQ ID NO: 345375 - protein, 389 aa, unidentified
MKIYVGIDIAKLNHFAAAISSDGEIILEPFKFTNDADGFQLLVSKLESFDKNSIIIGLESTAHYGDNLVRYLVAEFYQVCVLNPIKTCQMRKNNVRKTKTDKVDTFVIAKTLMMQDDLRFITFFDLDMMDLKALGRFRQKTIKQRTRLKIQLTTYVDQVFPEIQYFFKSGLHQNAVYALLKEAPSPKEIASMHMTHLANLLKVNSHGHFTKEQAKELRILAQKSVGANDSAISIQITQTIQQIELLDSQLEKIEAEMTDIMKFNDSVIMTIPGIGYINGGMILGEIGDIHRFSNPNKLLAFAGLDPSVYQSGNFQAKTTRMSKRGSRVLRYALVNAAWNVVRNNATFKAYYDAKRAEGRSHYNALGHCAGKLVRVIWKMLTDEVEFNLE

SEQ ID NO: 345376 - protein, 412 aa, unidentified
MQQSAPEDFGAYIGIDWADQTHFVSLRDANSQEVKRYKLEQKPEVLSQWVNELQQRFAGQQVAVALEQTRGALIYALMSYEFFVLFPVNPKALARYREAFNVGGAKDDPTDSDLLLELVTLHRSKLRAWRPDDELTRTITLLVQYRRDLVDMRTALTHRLAALLKLYFPQALQWAGELDTFQACDFLQRWPTLTKVQRTPAAKLRQFYVSHNCRNVAVIEKRLQQIPTAQPLTTDGAVITTSITMVQAIVNQLRPLIVSIKELDKQIAELFAKHEDHELFSSFPGAGEVLAPRLLSAFGADRDRFASAEEIQQLSGIAPVTERSGKTCWVHHRFACPKFLRQSFTNLRLSLSASRHGHARTTSVGENWAMAIRLPSAAWRLDGSELSIAVGKCVFPTANRFINRLYGVVVHR

SEQ ID NO: 345377 - protein, 397 aa, unidentified
MHEAQPEVGGGDVVVIGVDPHKASVTLEARDTREILRASGTFPTTTPGYRAMIQVARQWPRRIWAVEGARGVGRALVARLLAGGERVVDVPAKLSARTRVFDTGHGRKTDAHDAHAIVMVALRDHRLREVVIDEDLEVLRLLVDRRDELAAARTQALNRAHRLFAELVPGGAPTKKSVTQYQALLAGIRPRDGAGRVRRRMLAEELTEARRLEVRVKEITAEIKAAVLARGSHLMDLPGIGPAGAGRILADVGNVARFPSRHHFASWTGTAPIDASSGAHQRHRLPIAAALREIRRAKAEHAADAAQRSRIGQVEDEATRAEVEDLVRREQELVAGHGDLRFSGLVTVTASTLDELDAACAATEAAAAQSLCEVRRLVGQQGLAHLAGAVPLARGVL

SEQ ID NO: 345378 - protein, 341 aa, unidentified
MAAIGIDTHKRTLAACAVDDVGSVLDERTFACTKAGFAELAAWAGGVAREGRIGIEGSASYGAPVAHYLAAAGFVVCEVPPHLSRRERARSRRPGKSDPGDALAIARVTLREPELPPVRLEDRSTELGLLADARDDLVGAQTQARNRLHAHLVVLLPGYGRTVAQLVSGRQLEAIEGALAGSTGVRAELARALVAKIRDLGRRAADLERSIATLVAGHPLLGLPGVGALTAARLVAETGDVARFRSPAAFAMLAGVAPIPASSGAVHRMRLNRGGNRRLNRALYTIALSQAWHHEPAKAYIARKRASGKSWAEALRCLKHRIARPVFRLLQAGQSGWARAA

SEQ ID NO: 345379 - protein, 317 aa, unidentified
MNVLGIDVSKADFHAWLLQSDGHVDKRFANNAGGFGDLRKWLQTQGSPKPHVCMESTGNYFRPLATALFEADIVVSVVNPRRTLHFAKSLLQRTKTDKADAQMIARFCLTQRPAAWAPARPEILEIRGLLSYRHQLVGETTRLKQIVATVEVNKQLRRLHEAHLTSAQRAIAVVEKQLRQIVAANRSLSAQVAALEEAKGFGFLTAITLVAHLPIDRLRSPKAAAAFVGLSPREHQSGTSINGKPRICKAGNAQVRAALFMPAQSAKRFNPILAAFAARLEGRNKPSKVVTVAVMRKMVVLAYSRLKALEAKPVPAA

SEQ ID NO: 345380 - protein, 307 aa, unidentified
MTAVGIDVGKRALDVAIFGEPKVHRFSNTVAGIRRLIRLLQDREDVRIVVEATGGYEEAVLAACAEAGLWIARVNPRQARHFARAIGQLAKTDNLDARMLAEMVQAFHARLRAHVPLAPWQAELRGWLRRRHQIIEAIQRTRQQLAMTLPAIRPLMKKTLIALQREQTLVDAAMKQLLQVHATPAMRSSKGLGPMFQASVLALLPELGQLRRQQIAKLVGVAPLNRDSGQSQGKRRIYGGRAEVRVALYMATLSAVRWEPAMKAHYQQLRARGKVAKVALVACMRKLLTIVNARRRDELRMEAAMVI

SEQ ID NO: 345381 - protein, 453 aa, unidentified
MAQRNRSVSLKPGKSRAALTITHPNAAGIDIGSASHFVAVPPDRDDQPVREFASFTVDLNAIADWLQACGVDTVAMESTGVYWIALFELLESRGFTVFLVNARHVKNVSGRKSDVLDCQWLQQLMTYGLLSAAFRPTEKVCVLRALARQREMLLKSQARHVQHMQKALTQMNIQLANVISDVVGVTGQKILRAIVAGERDGLALAACKDVRIHASADDIAKSLQGNWRTEHVFALKQALALFDFIGTQLAECDREIEAQLQVLQAHDGEPAKGKKRSKARNAPKFDLRTQLFRMCGVDLTRIDGIDVTTALVVVSEVGADMSRFASVKHFTSWLGLCPGTKITGGKVMSGKTRRCVNRASQALRLAAAALRSSKSALGAYYRRMCSRMDKPKAVTAAAHKLARLIYTMLTKGQEYTDQGQDYYEQRYRERVLRSLSQRAAKLGLKMVPIEQPS

SEQ ID NO: 345382 - protein, 358 aa, unidentified
MVQSKEINFDGQNIYIGIDVHLKTWNVTIITQSGYKKKHSQKSSAKELFEHLKKHYPNGIYQAVYESGFSGFSTYYALQEYGINCMVIHAADVPTTQYENVMKSDPVDSEKLAKALKASTLKGIYIRRKANLDNRSVVRIRKTLKRQLGGYKSRVKHLLYNNGVQLPDCFSSSNTHWSKRFMSWLREDVVLLSSSRIGLDLLLEQVDLFRKSLLKANRLLRDLSRSPMYAERYAILISIPGIGVNTAMCLLTEIDDISRFNNQREFASYLGLIPTSHSSGEKSCNGEKTFRGNKKIGPMLVESSWVIIRHDRVMAAAYGGYCKHMKPQEAIIRIARKLSSRILNVLKNGKKYEYDRCR

SEQ ID NO: 345383 - protein, 358 aa, unidentified
MATTNLSALQSFVVPYHSEPFWIGIDVHKRSYHLALIRADAKTFTLVASAAPEKLVEQLRYLEIKVAGVAYEAGPTGFCLARALEAEHIPVIVAAPSKVPRSISAGAKTDRLDCLKLALFASKGLLRPIAVPTTQEEAERALCRRRHQLVDSIRRCKQRIKGFLLYHGFEETESLRRWHTDYPEQIAALPLETEGRLTIESHLRELTFFESELCSVIDQLGHMNKHPRHQPVIKSLTSVPGVGKVVATTFHTELFRPERFNRGEEVASYLGLAPTVRHSGEKTPRGYLVPVGQTRLRSLLIQAAWIWRAKDPYAHEIYNRLLSKSGVPQKAIAALARRLAIILWRLSIEQRVYRPIET

SEQ ID NO: 345384 - protein, 352 aa, unidentified
MTVTNLARSVTGGVDTHLDVHVAAALDERGALLGVESFATTTDGYKKLLGWLSNFGPVDLVGVEGTGSYGAGLTRHLQAERVRVVEVDRPNRQRRRRKGKSDPEDAVIAARAALSGDASGEAKTRDGNVESMRVLRVARSSARKGRTQALNQMRGLISTAPEPIRAELRGLNVFHLLERASTYRPGAKRDVISLTKFTLRMLARRAITLEEEISEIDAILKPLVIETAPRLVGALGVGTDAASALLVTAGDNPERLRDEAAFAHLCGASPIEASSGKQERHRLNRSGDRQANSALWHIVITRMVYDPRTTEYIDRRTKEGLTKKEAVRCLKRYVAREVFSLLPHDELGLDSP

SEQ ID NO: 345385 - protein, 466 aa, unidentified
MTPHKDYCLDPRPPATPTLPQSPVLADALQVCHPHAAGIDIGEAEHWVAVPPGCDPQPVRRFGTCTVDLDALADWLIDCGVTTVAMESTGVYWIPLFELLEARGVQVLLIDPRQAKRAPGRPKTDRLDCKWLQRLHAYGLLAGAFRPEDQVCVLRSYLRHRQMLLTSAAHHIQHMHKALQQMNLKLPQVVSDLTGVTGMAILKAIIAGERDPVTLAKLRNPHCHHDEDDIAKALQGTWRAEHLFALQQAVALYDFYHQQLALCDQQIKSHLATFADKSEGKPLPPKARRHKKTNEPRFDARTPLYRLAGVDLTTIEGIEENTALIILSEIGTDMHRWPSVKHFCSWLGLCPQHQISGGKILSRRVRPGAHRVTVALRLAARSLHHSQSALGAFFRRMKARLGTPKAITATAHKLARLVSSLLQHGSAYVHQGLDAYEAQYRERKVTTMAKQAKALGYTLVPLPAQG

SEQ ID NO: 345386 - protein, 372 aa, unidentified
MKEDSVIFIGLDTSKLKISVAIADGSRNGEVRFFGDISSEPASVASMVSKLSKRGAKLHFCYEAGPTGYGLYRQIVELGHDCVVVAPSLVPKRAGDRVKTNRRDAMSLARLHRAGELTAVWVPDEGHEAIRDLVRAREVASDALKQVRQQLQSFLLRHGRIYAGREPWTRAHRRWLTCQAFDHPAHQILLAEYCQAVADASVRLDRLTKLVVETAASWSMAPVVAAYQAMRGVAFMTAVTFVVEIGDVRRFDNPRQLMAYLGLVPSESSTGERVKRGGITKAGNTRARRVLIEGAWTYRFPARVSPKIQARLDDLPRTVREIAWKAQVRLCARYRKLIAAGKPKVVAVTAIAREMAAFLWAIGQEVAPTAKG

SEQ ID NO: 345387 - protein, 480 aa, unidentified
MNVKATRTKKQVNVENQAIKLLSKEELGIKIEVIKKELRSYTWRDLETNGKFAKNDKLSFITDDMLIAGCDIGSETHYIRAIDVRGRELSSGAFEFSNTSEGFANAKAWVLALAAKNDKKQIVLGLEPTGHYWFALAAWMVSNGISVVQVNPYAVKQSKEIEDNSQLKDDRKDPKLITNLVKDGNYGMPYLPEKVYADMRRLSMFRDQLTEDRIRNINRLHRELKIYFPEYMDAFGKIDGAFTLEVLKVSAIPSDITALGAEGIKNIWHNEKLRGRGYSRANEIVSYAEKSVGLTDGTDAGREAVKWYAEQILKLDEQLAVIESALHEKCREIPYAENILEIRGVGENILAGILAEMGDISRFDDVKEIQKLSGMGLVACSSGKHKGQTKISHRGRKRLRYWLFQAAKSAVSHADEFKQLHEYYTTRTNNPLKKMQSLVVIACKILRVSYTILKTGTTYDPQKLLKDIKRPTASQAPMAA

SEQ ID NO: 345388 - protein, 432 aa, unidentified
MTKEESRAVQSNMEANKMEVLYGTCSGVDVHKKLLVVCLRCGRKSEIRNFGTTTQELFDVANWLKSKNCEMVAMESTASYWKPLYNVLEVMGIPSMVVNAQHMKSVPGRKTDVKDAEWIADLCQHGLLKASYIPDKDQRELRELVRYRKSLIEDRGREINRLQKMLEGANIKISGTIRDISGMSGRCVLEKIIQGEKIDAAVYDDLYKNKAIAHNLKASKEQIIADLNGVLSDLQRKMMKELILHLDELDAHIKNLDDEINSFMTPDEKTASELIQAIPGIGNASAQAIISVIGTDMSRFPTDRHISKWAGLCPGNNESAKKRKSGRTTKGNQVLRTTLVNCAHSAMKVKDSYFSAQFSRICAHRGTKRAYVAVAHSMLIAIYHVLSTGEVFKDLGSNYYDQFNKERKAKSMVKRLNALGYEVTLATVAATA

SEQ ID NO: 345389 - protein, 314 aa, unidentified
MKKALEIFVGIDVSKAWLDIAVHKRNETFRAGNNDVGISNLVEHMKKLEPTLIILEPTGGFEILAVAELSHAGLPVVVVNAKRVRDFARATGRLAKTDKLDAKVLAHFAAALRPPLRTLQTEEEEHLTALLTRRRQIVDMLTVEKNRLVTVRAQMRLDIEAHIQWLSTSKSVLDKEIGDLLKTSPVWKEKDGILQSVPGVGPITSATMLGMLPELGKLNRQQIAALVGVAPVNKDSGRKQGKRRVYGGRADVRSVLYMAALAAKKYNPVIKIFYERLIKQGKEKKVALTACMRKLLVILNVMMRTNEPWRSQAA

SEQ ID NO: 345390 - protein, 323 aa, unidentified
MKSLFLVAGVDVSKDTLDVYFNDAKDQKHYLRVANSTKGHKLLRSKLGSARTYVMESSGPYYLRLAFTLQQAGCDVRVENPTRVKRFIQMQLERNKNDKKDALWLYRYGVEQQAAQWQLPSEESLKCAQIMGLIDLYTRQATMMQNQLHSLEQVPVICPEVVRSLQKSLRSVKAEIRKLEHELQQLLHTWQGEQVKSIGSIPGLGKRAVALLIVYTEGFTKVQNHRQLIALAGLAPREHTSGSSIRGRKGICKMGNGYLRNVLYMCSLSAIKHNEACKELYDRLKGKGKKGKVALIAVCNKLLKQAFAIATKKTMYLPNYKSD

SEQ ID NO: 345391 - protein, 366 aa, unidentified
MKKISTVQVFGNEIFKEQKLTIGVDLGDRWSCYCVLDEAGKIILEQKVSTTPEAIKQTFGKIPRSLMAMETGTHSPWVSRLLTELGHEVLVAHAQKVELITKSNRKDDRHDARTLARLARIDPELLGPVRHRSAQAQIHLTVIRARAELVSVRTALVNAARGLVKSYGQRLPKRGTYQVSRELATGLSAELRDVLGPLLKEVESLNERIQEYDERMEKIAKEEYPEVSLLQQVKGVGTQISLTYVLTIEDPYRFPKSRAVGCFLGLRPGRRNSGESEPQKGISKEGDRYLRTMLVQGAHYILGPFGEDSDLRRWGLKLAERGGKNAKKRAVVAVARKLAVLLHRLWVSGEVYEPLRNSQKAIRAAA

SEQ ID NO: 345392 - protein, 366 aa, unidentified
MGWMAPLRHLSAKLLSDRNSSEWEPSMGEVTTIGLDLAKHVFQVHGVDAEGATVLRKQLRRAQVLAFFSRLPPCLVGLEACATAHYWARELRALGHEARLMPAQYVKAYIKRNKHDAADAEAICEAIGRPTMRFVPVKTADQQAAVLLHRGRERLVRQRTGLVNALRGHLAEFGVIAPQGLRNVGKLIAIVRDEGDARLPDLARQVLQVLAAQIEQLEAAVAAIEKQLMAWHKSNPVSQRLASVPGIGPIIATALAATVVEPSGFRSGREFAAWLGLVPRQNSSGGKHRLGGISKRGNQYLRRLLINGASANLLRSKATKADPWVIGLRRRRPPLVVAVALANKTARIAWAVMHRHENYQRVAAAA

SEQ ID NO: 345393 - protein, 342 aa, unidentified
MTFVGCDLHTRMQQVAVLDTGTGEVSERRLDHDGMAVEEFYAALPRPVTVGIESTGYAVWFHALMQRLGHTLLVGDAAKMRAMVVRKTKTDRRDALHSLDLLRHDRFPTIWVPDPATRDLRALLTHRMRLVRIRTMVKNGLQAIALNSRLAWGSKLLRQAGLVQLQALALPPHTARRRDQSLELLAGLNTQIRELDDAVTTAALAHPDAPRLITHPGVGALTALTTIVVLGPVSRFHDSKQVVSYVGLAPALNASADKYHLGHITKQGSPLLRFALGQAAAHAARMDPDLKRTYGALVHRRGRPKAKVAVTRKLLVRLFIMLRDQIDYDEFCRRGRSAPASA

SEQ ID NO: 345394 - protein, 339 aa, unidentified
MNSMAVGVDIAKTVFQVHYIDQETGEIVNKQIKRAKFLEFFANRAPCLVGMEACGGAHHWARQFTKMGHQVKLMPAAFVKAFNIRNKNDAADAQAIWRAVQQPSKPVAVKTEMQQAVLALHRMREQLVKFRTMQINALRGLLTEYGEVMGKGRTALDKAIPEVLARVAERLPAVLIDTMREQWNGLTALDEQIAGIERRMREWKKDDPAVKAISEIPGVGLLTATAAVAMMGDPKAFRSGREFAAWAGLVPRQTGSGGKINLHGISKMGDTYLRKLLIHGARSVLTHAKEPGPWINQISKRRPPNVVTVALANKMARTIWALLAHNMPYQKDHLSVKPA

SEQ ID NO: 345395 - protein, 318 aa, unidentified
MSEAMFIGIDVSRDTLEVASSAQAASWRRANDTAGIEALCAELAALAPALVVLEATGGYEFEAACALQASGLAVAVVNPRQARDFARAMGALAKTDSLDARMLAAFAGVLHQHPERERFVKPLADAELQCLQALVLRRRQIVGMLTSERQRLRMSHASARPSIEETIAFLKKQLDGIEGQCAGHVQAHHGALAQALSSVKGIGAATVATLLAELPELGSLCRRRIAALVGVAPINRDSGQMRGQRSIWGGRADVRRTLYMATLVAVRHNAVFKTFYQRLLAAGKLKKVALVAAMRKMLTVLNAIAKSGKHWEDSLHTT

SEQ ID NO: 345396 - protein, 409 aa, unidentified
MNESTSWTPAPCLGLDVHKATTTATYLGPDGKTKRVWTFPTTRNALDALAREIDPTTPIVLEASTSGKAVATLLKETGRELHMASPRDVALIAKSPVKTDARDSAKLAHLYQAGFLPECYLPPPEIDRMRFVVPQRQDLGRKVTLVKNQIHALVTRNLLDGEMGGVSDFFGIGGLRRLTQLPLPLEERAALARYLRQLTYLAEQEEELQRTLAQLATDREDVRLLMSIPGVDYYTAVALVAEIGDILRFPTKQTLASYAELVPRADNSGATVSAHRHVKPGDMVLKRFLCGAVMGMLLARQETAIQRFYQRKAKQIGPAKAQVAAARKLSAVVWWVLTHQEPYREQDEALTERKTTRLDRAAQDSPSAIGPEEIEAIGAHLSEKVDALNRLSREIGSPQLGEEKENGNG

SEQ ID NO: 345397 - protein, 375 aa, unidentified
MIRFGLGANLITTTHLERRYPMNYIAMDSHISTLEFAVVNESGRVTQHKRVPTGVRELIEFVKSVPKPRKVIMEEGTLAGWALETCVGFGEELIITDPKTNRWIGQSGQKSDPFDARKLGQLARGGYIKEIHHPVGNRRRFRELVVSYHDTVKSETRIKNKLKAKFRQNGIRCTGETVYLESHREEWKKKLPKDSVVHLIVQGLWSQLDNVQEVKEGILHSIHMQGRQYPEIKRFTKVPGIGPIHAATISAIVETPDRFANKKKVWMYAGLGIVERSSGGKLYSKKLTKDYNRLLKYSVRQAAESAITARDNPFRRHYLQMTLEQGIPSHRAKLTVARSILATLYGMWKRGEAYDPEIQEKRLKQQQTGSSEPSS

SEQ ID NO: 345398 - protein, 344 aa, unidentified
MTHYAGLDISLRSINVCVVDDQGNVVAEGKADAETADLVAFLDALDVVITTVGLEAGMLTQYLTYGLQFAGYNVHCMESRQVKAALSAMRNKTDKNDARGIAQILRSGWYSRVHIKSMESHRVRALLTSRRALLDKCIDLENEIRGIFKIFGVKLPSKLGHGSYDRVVRPLIEADEALSMSLLPVLDARLELYRSYRELDNRTRHLAEQDPICQRFMTAPGVGFVTALAYKSGVDDPTRFKHSRTVGAHFGLTSRRHQSGEVDFDGHISRCGDAAVRTALYTAANALLTRSSKWSSLKAWGMKVAKTRGHKKAVTAVARKLAVILHRMWIDDTQFRWGTEVARS

SEQ ID NO: 345399 - protein, 457 aa, unidentified
MMKTKRRGEQRSMLPVHPDAAAIDIGATVHVAAVGPGRDPEPVRSFGTFTGDLHRLADWFAQCGIKAVVMESTGVYWIPVYEILEQRGFEVRVVNARDAKHVPGRKTDVSDAAWLQRLHEFGLLRGSFRPQGAIAALRAYLRQRERLLDYAAAHIQHMQKALTQMNLQIHHVISDITGATGMRIIRAIVAGERDPDTLASYRDIRCHSSPDTVRQALIGNYREEHLFALAQAVELYEVYQAKVATCDEKIEGVLERLKQPCRAPAKPLRAARHKTRQPNAPAFDVRGALYALLGVDLTQIHGLGPYLALKLISECGTDLSAWPSAKHFTSWLSLAPGNKISGGKILSSRTRPSGNRAAALLRLAATTVGRTETALGAFYRRLSARIGKAKAVTATARKIAVLFYNAVRHGMDYADPGASYYEERYRRRVLTNLQRRAKAFGYVLQPTEIKVVPMAVS

SEQ ID NO: 345400 - protein, 356 aa, unidentified
MQTQVTKKIDFTGKQLFIGLDVHKKSWSVTILVDGTEHRTFTQPPDPESLNSYLQRMFPGGEYNSAYEAGFCGYAIHRRLNELGINNIVINAADIPTSQKDKLQKRDPVDSRKIARSLEKGSLRGIHIFDRELEELRSLNRTRFYLMRDLRRSKTRIKSFLQYYGEPIPPEFDNNQWTLRFVSWLKQVKMQTMSGQDAFSNLISSYEYHRSQLLNLSRQIRERIREYDRELYTLLKSISGIGPLTASALITELGDINRFKNIDQLGSYVGLIPRIRESGETTYTGGITFRCNSFLRTLLIESSWQAIRMDPAMMQYYHAHLVNNKGHKVVIKVARKLLNRIRYVMKNRQPYITGVA

SEQ ID NO: 345401 - protein, 389 aa, unidentified
MFYLGIDIGKNTHVASLLDSKKKVVFKAFSFSNSIDGAESLICKLEPFKNELEIGMEATGHYWLSLYSYLAQKNFTVRVINPIQTDGWRQGIEIRKRKTDIIDSLLIADLLRYGDFVEASLFNEDYLSLRNLSRFRSYLVSSIGDLKRKTIALLDQVFPEYASSFSNIFGKTSKEILSNFSTPSDFENINSEDLQSFLDNVSKKKYASRKLEELSKKASTSFGVNFCMDSFSLQIKMLIKQISFIQNQVLDVEKEIEILFEKLNSPITTIPGIGSVNAATILGEIGDIKRFSNPSKLVAYAGLDASISQSGEFESTSNHMTKRGSPYLRRALFQSALRSEFYDPVFSDYYQKKIREGKHHLVATNAVARKLCHTIFAVLTKNEPYQQQS

SEQ ID NO: 345402 - protein, 349 aa, unidentified
MMVAGVDPHKQSHTAVAVDELGRKHAAKTVKARREGHLQLLAWARGLATEGLVWAVEDVRHVAGNLIRDLLAAGEMVVFVPPKLMAAERRGGRERGKSDPIDALAIARLALREQGRLPVAHLDERTRPIRLLTDHRDALVAERTRVINRLRWHLHDLAPDLAPKARALSQPAARTRLAAALAAVPPGTAARIAAAQLAHITALSGQIDALKAELTPLVEALAPALLAIPGAGVLTAAKILGETGNITRFRSTAAYARHNGTAPIPASSGTGPRGPHRLNPAGNRQLNAALHRIAVTQARYHPPAQALLQRRQETTRDTTKASRRVLKRHLSDVIYHALTTDAHPRQAAA

SEQ ID NO: 345403 - protein, 451 aa, unidentified
MSRPQVIDDQEHERVHERVAAVDVAKDTGMVCTRTPHPSRPGARRSTIWTVAARMGAVRALGRQLREDGIEIVTLESTSDYWRIWFFVLEACGLAVQLVNAAQARNLPGRPKTDKLDAQWLARLTEMGLLRASFVPPAAIRALRDYTRARTRLVQERTRCWQRLEKLLESALVKVSSVASKLTTISAQDMVKAMIAGQRDPRTLAALARGRMQAKHDDLVQALDGMFDDHHGELAQMLLDQIAFCDERIGQLTVRITGSVAAMPGAWGIDGDGTTGPDAGTGPDAAVLPAVARLAEIPGISPDLARAIIAETGLDMSRFPDAAHLVSWAGLCPSARQSGPRTRAGKKGQGNRYLRGSLGQAAIGAARTSTFLGERYHRIARRRGKAKAQIAVARSILVIIWHLLSDPAARFTDLGPGYYQARTDKDRKIKNHIRQIEALLGHSITIAPKAA

SEQ ID NO: 345404 - protein, 343 aa, unidentified
MDYFAGLDVSVKDTSVCIVDGTGKIVREVKVASEPEALLPVLRDSAYRFKRIGLEAGPLSQWLFSALAEADLPVICVETRHMRAVLKAQINKTDRNDARGIAQMMRVGLYRPVHVKTLRSQKLRMLLTHRKLLQAKAIAVENDLRATLRNFGLKVGAVGTVKFEARIKELIDNFPDLVALVEPLLVVRRVLREQISILHRRVLAAVRNDEVCRRLMTVPGVGPVVALTYRATVDVPARFRKSKSVGAVFGLTPARDQSGESDRPGAISRCGDEMMRTTLYEAAQVMLLRSAKWSWLKAWAMKIARHRGMKKAIVALARRLAVIMHRIWIDGTEFRWTREAAAA

SEQ ID NO: 345405 - protein, 380 aa, unidentified
MRSVALDLGGKITFCEVAGGEVLRRATASSFQGLESVLGPRTAPARVAIEACREAWFIERRLREWGHEPLVVDTTRVKQLGVGQHKRKNDRIDAEVLARAVEKEMIPLSHVLSPHRQALRMQLGIRRGLVETRAGYVTMVRGLARAHGVKLPSCKAEDFARKVESVALGEDLGLMVAPLLEITRALNPGIVEMDRKLEMLCSTEPVVLQLCTAPGVGLIVAAAFVSVVDEAKRFRHAHQVEAYLGLVPSEHTSVHRRLGSITKQGNSYLRSLLVQAAWCVFRTRPSEDPLGLWATAIAHRRGRRVAVVALARRLVGILWAMWRNGTVYDPVRLAHSSVRGLQQQVQTLELQQVALRLAARKTRLRRWTHLPGNRRRCMKS

SEQ ID NO: 345406 - protein, 392 aa, unidentified
MIYLGIDVSKDKHDCCILSQDGELLTKPFSVPNSRQGYDRLFSLVSSFENNPEKVKAGLEATGHYSFAILGYLLEKGFTCFVFNPLHTNLYRKAVSLRKTKTDKVDSKTIALMLLSSVGLKPYSKALYHNDQLKSLSRYRFSKIRERANLKQQLARLVNILFPELEKLVPSLHLRSVYALLEQFPGASFVANAHLTKLTNLLSASSKGHYKKEKAIQIRDAAASSVGCFMPAKSLELKHTVALIRVLSEEIEEIETEIKKLMDELHSPITTIPGISFRMAAMILSEIGDFSNFDSPDKILAFAGLSPSTYQSGKLDNAHSHMEKRGSKYLRYALYNAAIYVCLWDKTFADYLHKKLAEGKHYYVALSHAVKKLVRVIYALQTTGQTYIPAVA

SEQ ID NO: 345407 - protein, 312 aa, unidentified
MIKLTIGVDVSKDTLDVHLHPAGDHRQFSNDPRGFRSIVRWIAARPVARLVFEATGPYHRAFERAMGEAGLPLCKVNPRQAKRFGEALGQLAKTDRMDAGMLAHFGALLEPDVRPAPSKIISDLKDLHVARTALIKDRTAAKNREKNLTSPLLRRQIRQRLSSIESHLKEVETAIRVLIDRDESLRRKIAILVSIPGIAERSASALLIDMPELGTLAAQEAAALSGTAPLTRQSGKWAGKAFVSGGRVNVRKALYMPALVAARFNPDLKEKYICLTSRGKPPKVALTAVMRKLIILANALIRDDRDWSPERA

SEQ ID NO: 345408 - protein, 352 aa, unidentified
MALKIVYKICCGIDVHKTFVVACIASTNSKGVTTYESHRFSTYTRGLKSLLQWLISRNCKDVCMESTGKYWIPIYNVLENDCTIVLAHPKYVKAIRGKKTDKKDAKWIADLFKHDLVAGSFMPPADIRQLRDLMRYRFKLTCFKSSEKNRLQNCLTVSNIQLGNVVSDTFGKSAQAILDKILENPADTSFDLEPLVYKSLKKKIPELRDAIDGYITPEQAGKLKVIKTHYEDLESRKAELEELILALAAPYQQELAILQTAPGISSVFTAIGIISEIGTNMEAFPSAKHLCSWAGLTPTNNESAGKKKSVRVSKAGCYIKPLLVQCANAVVTSKKHPEIRNRYLKMACLSCA

SEQ ID NO: 345409 - protein, 348 aa, unidentified
MRFYKQPHAFYAGIDLHARSMFTHILDHAGATVFERDLPASPDAFLNAVAPYRAGLVVGVECMFAWYWLADLCEDEAIAFTLGHALYMKAIHGGKSKNDRIDAAKIAGLLRGGMFPMAYVYPRAKRATRDLLRRRCFFVNQRSQLIAHVVNTNSQYNHPPLTARLCYPGNRSEDLADRFADPATQLSIRADLKLIDNFDAQIDDIERVVLKTAKIDDPVSLGFLRTIPGIGKILSLVMLYEIDRAERFPEVGNFLSYARLVRCEHESAGKKKGFGGKKIGNAHLKWAFGEAACLMLRAMPDAKKWLARQERKRGKKKALSVLEAKIGRTVYHLMRKQQAFDAKRFFAN

SEQ ID NO: 345410 - protein, 365 aa, unidentified
MKKSSKKQQGSPVVENKPEKVVGLDLGDRHSHYCILSSSGEVMEEGRIQTTAASLEKHFGSEARMRIALEAGTHSPWVSRLLKRFGHQVIVANPRKIPTLTKSESKNDRNDARQLARMAAFDPELLHPIEHRSTERQQDLNLIHTRSVLVRARTMLINSMRGLVKSAGGRLPSCSSEAFPEKVPAAVPPALKSACAPVVKQIAQMNQTIAAMDKQIDGLEKKYPEIALLRTAPGVGPMVAACYVLTLGKPETMETNRQAGAYLGLRPRQQQSGDSNPQCGITKTGNTYLRSLLVQSAQYILGRFGPDSELRCWGLKLAASGGKRGKKRALVAVARKLAVILLSMWRNRKKFEPFLQSATQLARTV

SEQ ID NO: 345411 - protein, 354 aa, unidentified
MEIDTIGIDLGKTVFHLVGLNMSGEIVIRKKLSRKQLLHFTANLQAKRIGMEACGGAHFLSRALRDQGHDVRLMPAQYVKPYVKTNKNDYTDAEAIAEAVGRPRMRFVPIKSDDQLDMQSLHRVRDRWVRRRTSLINQIRSLLLERGITIRQGRRHAEAALPGILEDPDTPLSGRLRTLLAQLQRELRQLQSHIEEIDETIVRAAGEHEACQRLMTIPGVGVITATAVIAAIGTGAEFRKGRGFAAWLGLVPGQYSTGGKEKLLGISKRGNCYLRRLFVHGARSVLRCKDKQSSGLLAWLTRLGGHAHHNVVAVALANKLARITWAVLTKEVTYRPPLLAVDGGNSSTSELVCN

SEQ ID NO: 345412 - protein, 422 aa, unidentified
MLEQTHDEQEIIQRVAALDIGKAELVCCVRVPDPKGGSRRLEEVKTYSTMTRSLQLMADRLLDLGVTRVVMEATSDYWRSPFYLLEAHGFQTWLVNAKDVKHLPGRPKTDRLDAVWLCKVAERQMLRPSFVPPVPIRRLRDVTRYRIALVSDRNREKNRVEKLLEDAQIKLSVVASDIFGMSGRDMMAALIAGERNPQALAQLARSRMRGKIPQLEEAFVGYFTDHHRFLLAKMLTRIDALNADIDELETEIESQLAPFAPAVARLDEIPGVGITAAAVIIAEVGEDMTRFPTPAHLSSWARFAPGVKESAGRKKGNGSTGHGDPYLARVLGEAAVGASRTNTFLGERYRRIARRRGKKKAVVAVGRSILVIVWYLLSDPEVGYHDLGPGFYDSRINPERKKRNHIRELEALGYKVTLQPAA

SEQ ID NO: 345413 - protein, 393 aa, unidentified
MICVGIDVAKDKHDCFILNSEGEVLADVFTIPNNAEGFDRLLQTIRRCARPEDKMKVGLEATGHYSYNILGFLLNEGLPTYLINPLHTNLYRKSLSLRKTKTDRIDARTIAAMLMSDVDLKPYTDTAYHNEELKSLTRYRFDKVCERAKLKQSVSRLVTILFPELEKLVPTLHMASVYALLSEFPGAKQVAGAHLTHLKAVLYDASRGRYGRDMATTLRDAARCSVGSVMPAKSLELQHTIRLIRELDAEIEDIEAAIQSMMAEIQSPITTIPGIGVRMGAMILAEIGDFTRFDSPDKILAYAGMSPSTYQSGQLSLSGAYSHMEKRGSRYLRYALYNATKYACLWEPVFAAYLAKKRGEGKHYNVAISHAAKKLVRLIYAMEKSKQSYRNAA

SEQ ID NO: 345414 - protein, 369 aa, unidentified
MGDRITYVGLDVHKEGIVVAVAEGGVRGEVREYGRIANTAAALDRLVRKLGGTGVRLRFCYEAGPCGYGIQRHLSARGHECVVVAPSLIPKRAGDRVKTDRRDAVGLARLHRAGELTAVWVPDVGHEAMRDLVRARLDAVHALRRARQQLSGFLLRQGCHYGRPAWTKLHRRWLAGLKFEQEVHHIVLEDYIATVEAAKARRDRLTAQIEAMLPDWTLAPVVAALQTMRGMALVNAATLIAELGDLSRFANPRQLMAYLGLVPSEHSSGASVRRGGLTKAGNSAARRLLIEAAWCYRFPARVSRELLLRQEEQPKPIREIAWKAQLRLCTRYRKLARSGKPANVVTAAIARELAGFIWAIARRVPPAAG

SEQ ID NO: 345415 - protein, 348 aa, unidentified
MLHAGLDLSRKRLDVCLLSDHAEVVEEFAAPPDVDGLRGLARRVAAHGVPVRGVIESMTGARFVHDTLEELGWDVLIADAQKVKGLAPLACKTDKIDARVLAVLSHRDLVPAIWLPDPRVRREREQARFRLHLVKHKSMLKHRIHSTLITFGHPCPVTDLFGVAGRELLERLEIPAPWRGTLDASLQLIEDLEAQIDMTNRELRISGADHPYVPLLLTVPGIGWVLAFTIASEIGDINRFPTPKKLCGYTGLCPRVNQSGDKDRRGPLSKHGPKYLRWAMLEVTMHALRHPVYSERYQRNKQRLGKQRGARVAQIDIARKLTEAIWQMLTRNEPFAPAPGGAPLRLAA

SEQ ID NO: 345416 - protein, 356 aa, unidentified
MIYIGIDVAKDKHDCFITNSDSEVLFKAFTIFNNLDGFNDLYQKIESVMDDVTKVKVGLEATGHYSYNLLGYLIDKGLPTYVINPLHTNLYRKSLSLRQTKTDKVDARTIASMLMSDVNLKSYSDTSYHNEELKSLTRYRFDKVKERAKLKTSVSRLVCILFPELEKLVPTLHMASVYALLSEFPSAKHVATAHLTRLTNLLSESSKGRYGKDTAITFRDSARASIGSNMPAKSLELKHTIKLIQELDSEIDEIENEIKIIMDEINSPILSIPGINYRMGAMIIAEIGDFNRFDSPDKILAYAGFSPSTYQSGQLDGAYAHMEKRGSRYLRYALYNATKYVCNFFFTRLLSLYANF

SEQ ID NO: 345417 - protein, 340 aa, unidentified
MPVIRIGLDVAKNVFQAHGVDEHGQVVLRKQLRRREVLTFFASVPPCLIGIEACSASHYWARELTALGHQVRMMPARYVKPYVQRGKSDALDAAAICEAVSRPTMRFAAIKSVEQQSALTLHRAREILVKQETMLANLIRGCLGEFGIVAPLGIRRIAELVGIIRDETDSRIPPHARIAMTAVADQLGDLQRRIKEIEQAIRAWHRNNDASRRLATIPGVGVITASAIAATVATPTEFKSARHFAAFLGLTPKQNSTGGRQRLGRISKQGDGYIRRLLILGGTALVRYARGAGGTVWAKQLLARRPARVVTVALANKTARIIWALLVRGGVYRSAAPQAA

SEQ ID NO: 345418 - protein, 376 aa, unidentified
MRKEPVVSKNNTRFVGLDVHGETIAVAVADPGGEVRSVGTIPNRPEAVRRLVRKLGEPETLRVCYEAGPCGYVLYWQLTEPPTLVPVKTGDRVKTDRRDAEKLARCHRAGDLTAVWVPDAAHEALRDLVRAREAAKKDQLRARHRLLKFLLRHGRRRPENVTVWTQKHLLWVKGQCFEQAASQATFLDYLHEVDHAADRVERLEKALDEVLETIAPEMKVVIEALQSLRGVRKLSAATIVAEVGPLSRFNHPRKLMGYSGTVSSEWSSGAKTSRGAITKAGNAHLRRIVVEAAWAYRHRPAISKELRRRQKMASEKVKGIAWKAQHRLTERFRKMVGRGKPNQKVATAVARELLGFIWAIGIQAEREHAAGQLHAA

SEQ ID NO: 345419 - protein, 424 aa, unidentified
MNCNQNFKISQVTEETLVLGIDVGSVTHYVRAFNWRGLELSKVFKFKNSFEGFQNFVLWVNDLCCKNNKSKIIAGLEPTGHYWFSLGECLKENNITIAIVNPYHVKQSKELDDNIQTKNDSKDPKVIAKLVIDGRYSFPYIPEGVYGELRTADKLKDDITKQIISIKNKIHRWLSIYFPEYEKIYSSIDTKSGFLILKETPLPKDIAELGCEGIVKRWKQAKLRAVGLDKAKKLEEAAKKSIGCKNITSSARIEIKLLIEDYEYKKKQLELITEELNTLCEEIPEIKEIAEIKGIGMATAVSFVAEVGDVRRFKSAKQVQKYAGLALKENSSGKHKGLTRISKRGRKKLRTILFRTAIPLIGLNEKFSSIYNYYVERKDNPLKKKQALIAICCKMIRIFFTILSKGIKYDETKMIQDIRRSVAA

SEQ ID NO: 345420 - protein, 365 aa, unidentified
MLYLGIDQHRKQLTVCVRNEQGDVIFRRQVSTRWEQVRAFLAEIREKAGEAGFVVILEICGFNDWLVKLLNEYGCSKVLLVQPEGRSKKKTDRRDANALSELLWVNRRRLLEDKRVQGVRSIHWPTEDEARDRQLTELRKRMGQLRTRSINRVKHLLRKHNLEQEQPAKGIDTITAKKWLEKLPLPPMDRLEMDLLLAQWKLWDEQIKALNEEIAKRQAVNKTAMAIATVPGCAAYSSLALASRIGPIERFARPSSLANYWGLTPGCRNSGDVTDRLGSITKQGSATARFILGQLVLHVLRRDGSMRAWYGRIKKRRGSKIARVAVMRRLATILWHMVKNNEASMVGGPPRLKLKNQRGKQRGEP

SEQ ID NO: 345421 - protein, 304 aa, unidentified
MATAQLDMALRPSGERWAVANDASGVATLVDRVQTLHPTLIVLEATGGLERAATSALAAAGLPVVVVNPRQARDFARATGQLAKTDALDARALAHFADVIRPTPRPLPDAQTQELRALLGRRQQLIGMRTAEQNRLAGASERLTKDITAHITWLNVAIATLDDDLETMLRASPLWRANDDLLQSAKGIGPVSAHTFLLELPELGTLTRQQIAALVGVAPLNCDSGTLRGKRTIWGGRAHVRTVLYMSTLVATRFNPQIKVFYERLLAAGKVKKVALTACMHKFLTILNAMLKHRTPWQPQEVQS

SEQ ID NO: 345422 - protein, 481 aa, unidentified
MKRKHTYQSADVESIDVAALVAAVVAACVVPGRLDPAVCVAALDVAKERFFAALSDVRGNVLRILRFEHPRQTMAMLRLLLELRKKGLDVQVVLEPTGTYGDAVKYQCHRQGLAVYEVSPKRTHDMAEVLDGVPSMHDAKATVVVAQLHAMGKSRRWEPPTEDRRALRAAVDRRNLYSEPLEQQYGRLEALLARYWPEFGQVVDIRGSRSWMPLLAQYPGPEAVAQGGQNPREVLRIGARGLLSADRVEEIIGPCKESLGVPMTSAERVLLQDLVGEIQRLKRKVDDIDAELESQVRSNHVMQLMSAVIGAAATAALIAYVGEPREYASAAAYEKACGLNLKVRSSGKDEGKLKITKRGPPRVRQLLYLAALRCCQKDDIVRAWYQRRTSYKAEVKIKAVVAVTRKLVRGLWCMGHDRQQARAFDSRLLFDVRRLPVHRGAPGLFGREASAAQNPCSSGRNGKRTGSVAQLRKPSATEAHP

SEQ ID NO: 345423 - protein, 474 aa, unidentified
MEKKLSNRQEEVIKLLERQKIRDVKDLESYKLSECHPCSAGIDLGSKELYVALNPLTSAELGISIVHRFATFTNDLLACRDLLVYCGVKTVAMESTSIYWTTISFVLEEAGIEVCLVNPKKFRMVPGRKTDITDCQWLQALHLYGLLRGSFHPPHRIAMLRSYMRERDSIIKERSTFVQRMQKALVKMNLLLHNVIDDITGKTGMQIITSILAGERDAHVLASFRDPHCKKSEEEITEALTGYYKEDQLFLLKINYQSYCFFDKQLNDLDRQITKLLKRFPCKKDKREKRPDNGKRKSKGKNDIRTTENPEDILFHILGTDLAALPGIKANAILQIISEVGIDMSKFPTAHHFASYLGFVPHNKITGGQVLSARTDRIKSSAAQAFRKLVPSISQTKTALGAFYRRLAPRIGKAQAIIATCRKLAILFYNTLAFGKAYVEAGELMYKQKQEAWERRKLLILAKKYNCVIIPETA

SEQ ID NO: 345424 - protein, 310 aa, unidentified
MTVVTVGIDLAKNVFAVHGVNAAGKAVLVKPLVRRAKLLELIATLPTCLIGIEACTGAHYWAREFQKMGHTVRIMAPQLVSPYRMGGRHGKNAAADAAAICEAVTRPNMRFVPVKSVEQQGQLFVHRAHQGYVSERTALINRIRGLLSELGIVLPQAFKAFLSGVAQVLEDLPGYCNQVIGDLLNELYHIEEKIKNSEKLIQQLARDNSAAQLLMPFRGIGPMTATAIVASIGNGHDFKNGRQFSAWLGLTPRQQSSGGKARLGRITKAGDSYLRTLLVLGAGSVLLGAAKNARMCWAMLHLRDEFRFPA

SEQ ID NO: 345425 - protein, 342 aa, unidentified
MEAIIRIGMDTSKHVFQMHGVNEAEEPVLRRRLRRSQILEFMKGLDPTIIGIEAGGASHFWARTFAAMGHEVRIMAPQLVKPYVKRGKNDAADAEALCEAMSRPTMRFVSIKSEEQQADLMLVSIRVRLVRARTQLTNAIRGYASEFGLIAASGTGKVAPFLKRLVEDTNVPELARALFCDLEVELSQIEARIKRINVQLLARHRRNELSQRLTQIPGIGVIGATMPALKSPDPAGFKSARHFSAWIGLTPRDHSTGGKNRLGTITKAGDEILRSLLVAGATAVIRQMRRGRGRHWPWLQRLIDRKPPKLVAIALANKLARIAWKLMTSGQGFQPTYLIAAV

SEQ ID NO: 345426 - protein, 394 aa, unidentified
MYFLGIDIGKNTHVASMIGDDGKSVFRAFSFSNTTDGGESLLAKLPDIEPSEFEVGLEATGHYWLALYSFLHDKGYNIRVINPIQTDGWRKGVEIRRRKTDVIDSVLIAELIRYGDFIEARLPEEAVLSLKNLTRFRSYLVDSISDLKRKVICVLDQVFPEYQSVFSDVFGKTSKEILLQFSSPAEIEGVSADTLAELLAALSRKKLGLESAEKLSAAAAKSFGVTFCRDSFSFQLRMLIEQIKYIESQVKGTESEIGGIMSNLASPIMTIPGIGKTLGAVILGEVGGIERFDSPAKLVAFAGIDATVLQSGEFEGSSNRMSKRGSPYLRRALYQAALVASIGKNPDPILQAFYLKKRDEGKHHSVCIGAVSRKLCYIIYSVLKENRPFERRLP

SEQ ID NO: 345427 - protein, 333 aa, unidentified
MEKKWFIGIDISKKTLDVVIYVPTKKHADETNYERFLNKEEGYKSLLCWLKKKNMAKKRLVISMENTGIYSFDLCLFLEAASIDYCSFNPLHLKRSLGLVRGKNDRVDAERIAYFAYLHRDELSYSKLSGSSIIRLRDFAAERKRFVKQQAEYKGFLTDRKDCEMTSTIERAAHMVKILDEEIASVEEEMLQIINSDPSILRNYELLNSIKGIGTINAMNTIIHSNNFQAFETARQYACYLGIAPFEHSSGTSIKGKTRVYPTGAKLLKADLSQAANSAIVWDKEMKEYYERKRKEGKAYGVVLNAVKFKLVGRMFAVVKRGTPFVELMTYKK

SEQ ID NO: 345428 - protein, 346 aa, unidentified
MNQIIRIGMDTSKHIFQLHGVDAAEQPVLRKRLRRKQVLAFFAKLPPTVIGMEACGASHYWARELGRLGHEVKLIAPQHVKPYVTRNKNDGRDAEGTCEAMSRPTMRFVPVKTAEQQAALMLAGIREQLIARRTQLSNTIRGYAAEFGLVAAKGLDKIEPLLAQIAQEEDLPALARELFATEGREYARLQAELKAIEARLMAWHRANACSRRLAQIPGVGPIGATALVMKTPDPRAFASGRHFAAWLGLTPKDHSTAGKTRLGKITRAGDEVLRRLLVAGATAVIQQVRRGRGRPSPWLLAVLKRKPPKLAAVALANKIARIAWKLMTTGESYDGARMPGASAIAA

SEQ ID NO: 345429 - protein, 369 aa, unidentified
MSSVASLAGAIHLGMDTSKKTIMVATLMPGEQIPVTERIANEEAAVRRFIARLGDPSQLRACYEAGPGGYDLYWLLTSMGVACEVVAPSLIPKGGSDKVKTDRRDACRQARLHRAGELTPVRVPTRAEEAVRDLVRVRAGLLADRKRAQQRLTAVLMRHGCIWCHGSYWTGAHRAWIAAQRFTEPALTAAIAHYRAALDSREAELAAIEAELAPWAHREPLAGPVARLGCYRGIAELGALTLASEITDWRRFPAARAFMSYTGLVPAEYSSGERTRRGHITKAGSEPVRTTLIEAAWAYQHGPAIGATLRRRQAGAAPGTLARSWKAQRRLHARYRHLTSRGKAPGEAVTAVARELAGFAWAEMTADPA

SEQ ID NO: 345430 - protein, 405 aa, unidentified
MYDELAEGNVPEIWAGVDIGKTHHHCVVINSQGERLLSRRILNDETELLTLIGDALRLSDDVLWAVDLNHGGAALLIGLLTAHGQSVAYLTGLAVHRAAATYRGEGKTDEKDAFVIADQARIRRDLGLLRPGDEIATDLRTLTTRRLDLVFDRTRQINRLRAQLLEVFPALERSLDLTNKGPVILLTGYQTPAAIRRTGAKRIETWLKNRKVKGAAALARAAVDAAQAQHTALPGERLAAAMVVRLAKGVMALEEEITELDALIEAKFREHPHAEVIRSLPGMGARLGAEFIAATGGDMDAFGSADRLAGFAGLAPQPRDSGRVSGNLRRPRRYHRGLLRTMYLSAMASLKSCPASKAYYQRKRDEGKGHKQALLALARRRINVLWAMIRDRECYHGSLPVASST

SEQ ID NO: 345431 - protein, 341 aa, unidentified
MKITTIGIDLAKNVFQVHGVDQNGKAVLRKQLKRAQFPLFFSNLPTCLIGMEACGSAHHWARKLQGFGHTVKLIAPHYVKPYVKTNKSDAADAEAICEAVSRPNLRFVAIKTVEQQAVLSEHRVRQAFVQARTAQANQIRGLLAEFGLAIPKGIANLPKQVPLILEDPAYALPAAFRELMARLLAHFHELDRQVDELEAQIQAWHRSTAASRKLAEIPGIGPLGASALVASIGDAKTFKNGRQLAAWLGLVPRQHGTGGKQTLLGISKRGDVYLRTLLIHGARSAILAAQRRSETDSWLAKLMQRRNPNVAAVALANKNARTVWALLAHERQYQSDYAAAA

SEQ ID NO: 345432 - protein, 338 aa, unidentified
MQKNYLGIDVSKLSFDVSLVRVVDGLKQPAVIRQFNNDVAGLKSFKNWLNAHEVSFDVNSLLVIENTGIYHRLIWNFCTSNLLPVYIGNAADLKWSFGIARTKNDKVDSMRLCEYAYKNHEDIKPTSGLNKSLVTLKDLLSNRSKLLRQKNAIKQTISELKLSNDKATQQLLEKLNKAALDGLQTSIKLIETQMLYLVQQDDAVFANYKRMLTVPGIGKITAIFILCCTNNFALKVTGKQLANYAGVVPHEHKSGTSVKGRNRVHFMANKELKSLLTMGALSTINSYPEFKDYYHRKMNEGKKHLQALNAIKNKMLLRVAAVINQQKDYENKYQTTCA

SEQ ID NO: 345433 - protein, 317 aa, unidentified
MSSEKVFVGIDVGKYHVDIALSDESEVSRFKNDDSGIEEILRLLDARPVALVVMEASGGYERQLLASLLGAGIPAVAVNPRQVRDFAKALGMLEKTDAIDARVLSRFAQSVRPAVRPRPTQELAEVQDWLTRRRQLVEMMVAEKNRSQQARGGVLKSIRSHIDWLKKRIRDSEKELGDMLKNAPEWNAEVEVLDEVKGIGRVMALMLLGAVPELGSLNRKQIAKLVGVAPLCRDSGTLRGQRTCWGGRADVRACLYMAALAATQFNATIKAFYRRLLAAGKPKKEALVACMRKLLTILNARIRDYRAALPVSRTALS

SEQ ID NO: 345434 - protein, 347 aa, unidentified
MEVTTVGIDLAKEVFQVHGVDGFGKVVLRKQLKRSHMSAFFALLPPCLIGMEACGGSHYWGRVLQGYGHEVKLMAPQYVKPYVKTNKNDQRDAEAICEALTRPTMRFVPLKTEEQQGVLSLHRMREGVKKMRAAQSNQIRGLLSEFGIVIPEGLRNVLKRVPLILDEYSSELPASFLTGLSNSFALLKELDKQEKSFQKEILLYAKRDERCKRLETIPGIGPLTASAVIATIGSAKEFKNGRQLSAWLGLVPRQHSTGGKTVLGKISKRGDGYLRTLLVHGARSVITHIEKKKLKKDEQLKELIKRSNKNVATVALANRNVRIIWALLVHGKEYQENYEETRNYAKA

SEQ ID NO: 345435 - protein, 343 aa, unidentified
MQVSTIGVDLAKNVFQVHGVDNVGKVVITRQLRRKQVIDFFSKIPACLVGMEACGTAHHWAREISKLGHHVRLMPPSYVKGYVKRSKNDAADAAAICEAVTRPSMRFVPIKSADQQALLMLHRTRDLLIRQRTQLINALRAHLAESGLVAETGREGLAQLAEIIMDESNREALPSAMKQALQAIADQLAALELQIGALDRAIHAHHRANDMSRRIETVPGIGVIAATAIASTVTDPSNFKSGRDFAAWIGLVPRQHSTGGKERLGGISKQGDRYLRRLLVNGATSVVRNARQHPQKHPWIMRLLAKKPAKLVAVAVANKMARIAWAIMAKGGYYRAPELAVAA

SEQ ID NO: 345436 - protein, 534 aa, unidentified
MIQSVGIDFGETGPHKVRCLDERAQQCDGFIFHSTPEGLAKLEERIFQDGSNPVIVFEPTGLAWLPVAIYLRARHPDCRLVRAKTQKVAALRKYLRGSSKSDRIDALTLAKMPFIDPEQLYEVYLRPAELHTLYRLNRKRWRLEQGVTARKNRIGAIIDGYFPGLRQAFDDRWSPRARAFYRSRLNPLAVVRAGEEALHTFLKGAASGNKGSLVETHQVYMACQSAAAIYEASMAAGAVNEDSFADLQEEVACELRLMEAEEGEAENLARRIKELYRKLHPEDHLQTIPGVGEHTAPVFLAGIGEPGRFRNQSAFANWNGVVPGAKQSSEVEGKGLRMTKAGPAIMKWGLYQAGDVGRQWDPQLACVYYRQMVYHGKTHNQAMGAVMSHLAARILAVRREGRPYELRDTEGKPISKKEARQLILSKYQVSEDIRRQRRRRNRPKASTPAVGTKEKGVAERYKIHEAAMAPQLEAAPLIPQNPVYLADATKSSKPAGLVASAVKPRERSPGEPGRSERDNNSYRCHTGRGASPES

SEQ ID NO: 345437 - protein, 330 aa, unidentified
MENVLHFLGADLSKKSIDLVCHQIKSHVQIENASTGFKQLLKWMHQLKIDPSKMVVVMEHTGLYSFCFEEFLHNHGIAYCKVSALEIIRSMGLIRGKSDKIDAARIAAYGFAKRDKLKPEARVSKALQRLKLLNTSRELLVRQRTGLKCIIKELRNVGVPERDLALQSHIQVNKILDKQISKLEVEIKNVIHQEESLEKNYNLLNSIKGVGPVVASTTLIKTQNFSRFENARKFACYCGTAPFEHTSGTSIRGKTRVSHLADKRMKSLLDLAAKSAITSDKELKAFYERRLELGKGKTSTINIVRNKIIYRMFAVIKRQTPFVNDYLKAA

SEQ ID NO: 345438 - protein, 411 aa, unidentified
MAEGYDFYIGLDWGTARHQVCVLDAAGRRVAEQTVAHSGAGVAAWLAELARYAPTERLAVALEVPRGAVVDALLAHGCHVYALNPKQLDRFRDRQTVAGAKDDRRDAGVLAAALRTDRGAFRALQPEDPRLVPLRELSRLARELRTESMRLTNRLREQLVRVFPQVLTLCPAADEPWLWTLLERASTAPEAARLRPNALRALLAEHRVRRFSGADLYACLQAPPLPASAAALAAAGEHIAFLLPRLRLTFQQRGQCERRLEKLLDALAAGEPAPGQPLEHRDVTILRSLPGVGRVVAATMLAEAWPALAARDYQMLRTHSGVAPVTRQSGKTRLVTMRRSCNGHLREGVFHWASNSLRLDPRCRAHYDRLRRQHGHARALRGVADRLLGLLVALLQAGTLYDPARRHVATA

SEQ ID NO: 345439 - protein, 337 aa, unidentified
MQVKTIGLDIAKSWFQVHGIDDRGQPVLRKKLARSKVVEFFAALPSCTIGIEAGGGAHYWARELAKYGHTVRLMPPQYVKPYVKTNKHDAADAEAICEAVQRPGMRFVPVKDMEQQSLTMLHRVRDQLIGQRTATINALRGHMAELGIVAARGQGGLAELRLIIGDLDDGRVPPLGREMLQMLVVSLRQIEEKVADLDRRLIQLARAVPSCARLVEVPGIGPVISTALVAAVADGRTFRSGRHLAAWIGLVPRQHSSGGKERTLGLSKRGDGYLRRQLVHGARSVVRVARGRDGGLWSWINRLLERRPLNVVVAAVANKLARIAWALLARNDRWRTA

SEQ ID NO: 345440 - protein, 360 aa, unidentified
MAIVAHAHPFVIGVDTHARSHTLAILIAATGSLVDSAQFPATSAGMKRAIVWVARRTEGDLGSLWAIEGVATYGARIARIATKAGYPVVEAPRMDARAQRGTGKSDPLDARRIAAAALALDTTQLRHPRADDGVRAALRTLITAREHMTDDRTACVNGLTALLRVADLGVDARKPLTGQQIREVAAWRARSREIAEDVATATARAEAVRLAKRVETLDSELTMNHATLKALIESSKAAPLLEKTGIGPLTAAVVYAAWSHPGRVRDEAAFASLAGVSPIPASSGNTSRHRLNRGGDRRLNRALHMATVTRMVHDAETRAYVEKRRAEGLTNREIRRCLKRYLARQLFRNLNSLHVEPAVG

SEQ ID NO: 345441 - protein, 357 aa, unidentified
MTDPTMPVTGGVDTHKDTHVAAVLNAVGVVLGTSEFPTTPAGYRRLLTWMRGFGELTVVGVEGTGAWGAGLARQLTSNGIRVVEVQRPNRQFRRRHGKSDTADAIGAARAVQSGEANGAPKTADGSVEAIRLLSVARRSAIKARTQAANQMHAVVTTAPAELRTTLARLNTKQLVERCARFHTAPATSPVGAARRTLRLLARRWQALTTEIVELDAVLDDLTAELAPTLRELPSVGTQTAAILLLAAGDNPDRLEHERSFAALCGTSPIDASSGRQHRHRLNRGGDRNANAALYIIVISRLRWHEPTRAYMQRRLAEGRTKKEVIRCLKRYVARQVHRAILDDLPNISHARPLALAA

SEQ ID NO: 345442 - protein, 313 aa, unidentified
MYYIGIDVSKKDLSIFDGDNDLNFKNTEGLKAFKRYLKKRYRHFDNLGILFEATGIYSEPLQAFCAHHKIKAYRINPKQSHNFARSLGVRSKTDTIDARTIHAYQKLIPEESLQVPVIDPVARKLSGYLTSYQFIQKQRISLANHLEGIREKSLLKRLQQELKRIEHLEEDLLGEVKAYICAHPRLKEDYERLLTIPGIGEKAAFTLLTFFQHYPDTNRAQVTALAGLDPIQKESGTSVKGKAKISKNGNRALRKMLYMPTLCAIKYNRKMADFYERLLSHHKPKMVAVIAVMRKLLLVAHALYRSKTAYVPI

SEQ ID NO: 345443 - protein, 412 aa, unidentified
MEVLFRVCCGLDVHKDTVVACLSRLTAAGERVKQVRTFGTTRAGLRRLAAWLRAAGCTHLALESTGVYWKPVYNLLEGQFTVLVVNAAHIKAVPGRKTDVKDCEWLADLLQHGLLRASFIPDRAQRELRDLTRTRTTLTDERSAVVCRVQAVLEDAGLKLAGVATDILGVSGRAILAALVAGTTDPAALAALARGKLRKKQAALEEALAGELREHHRTLLALHLAHIDFLDGQIAQLSEQIAARLQEHTAALARLDTIPGVGQTTAEVLAAEIGLDMRRFPSAAALASWAGMCPGNYESAGKRKGGKTRKGSPWLRRALTEAARAAARRKDCYLAAQYRRLVQRCGKQKAAVAVGHTILVTAYYLLLRQDTYRDQVPADRDERRRERAQRRAVAQLQALGFEVALTAKHPAA

SEQ ID NO: 345444 - protein, 354 aa, unidentified
MHYVGVDYHKRSSYVTMVDERGKVVKEAQIANSQPALAAFLDGTAEEMAAVVEAGRNWPVMYDWLEQLVDEVTLAHPAKVRVIAEAKVKTDRIDSRMLAQLLRADLIPAAYVPGVVTREQRRKLRQRMFLVRVATMVKNRVHTLVDRHPELSREAGGWSDLFGKAGRAWLQQLELSASEADILRTDLALLGALEGHIKRSNHWVSRLAKQDERAKLLATLPGIGDFFAVLLAVEIDEARRFVRAEKLCAYAGLVPSTYASGGYVHHGRITKQGNKWIRWACIEAVYPAIRQDPDLAALYGRLKVSKGANVAKVAVAKRLLTIAYRVLTERRPYRPAIDQAGLRRRNSPAALIAV

SEQ ID NO: 345445 - protein, 456 aa, unidentified
MKAFLGIDVSKGYADFTLLDEQKNQREKVFQLDDTRKGHDQLKEQLIRMFKDHDITHLYCGVESTGGFENNWYGSIAQWSKSMPVSIARLNPAGVKKAAEADLNRNITDALSSRFIAEYLIRHPESVSYENQSVDYASFRSLHKHINLLKKQQTQLINQLKMILYSAFPELMRYCKHNVPQWVLEVLIKYPSVKKVASLKPEKLTKINHVDMDKAKALIAKAKSSVASRDSESTAFLVQSLAEQIAEKQILIAKHKKFLEQTCKGPEITLLTKIIGIASYSAAAIMIEIEDIKRFADPKSLVCFFGVHPVMKESGDKKLIARMSKKGRASMRSILYMCASTAVVYDEHMKAIYHRHRSRGKKHKQALGVIMQKLLRIIWGVLTSKTEYNPKVDQQNQNKAPKETTEKNNKEMAVKRRFQEADKEAPISRIQTKKRKAYVESQAPQSEANTGSSTYT

SEQ ID NO: 345446 - protein, 343 aa, unidentified
MQAVTTIGLDIAKMVFQVHGVDAEGKVIIRRKLKRRYVAAFFQKLPPCLVGIEACASSHHWSRELKALGHTVRLMPPAYVKPYVKRQKNDAADAEAICEAVTRANMRFVETKTPEQQSCLMLHRTRHLFIRQQTAVINAIRAHLAEFGVVAPVGRNGVEALLDVVADSSDKRVPEIARACLVALGAHLRVLKTQILEFDRLIMAWHRSNETSKRLDEIPGVGPALATALVASVGDARAFRSGRDFSAWIGLVPKQNSSGGKEKLGSISKRGDRYLRSLFTAGALAVIRYAKLHGTEHRPWLTALLARRPTKVAAIALANKIARMAWAMMAKGERYKEPVALAR

SEQ ID NO: 345447 - protein, 415 aa, unidentified
MEVLYPRCAGLDVHKDTVVAAVRLAIDGPACSEVRTFDTTTPGLLALLDWLSEAGCTHVAMEATGVYWKPVWHILSDGDITLILANAAHVKNVPGRKTDVADAVWLADLLAHGLIRPSFVPEAPTQELRALLRTRKQLVREQASHVQRLQKTLEDANLKLSSVLTQIMGVSGRTILQALIGGERDPDKLLTLVQRGVKAPPEKLRAALQGRITERHRFLLRLHLNQFDALNAAIAEIDAEVDRDLDPFRQAVRLLRTIPGVSDLTAQVIVSEIGTDMSRFPTAGHLISWAGLCPRNDESAGKRRSTRLRKGAPWLKTTLVQCAWAGARKKASYLQAQFQRLRHRRGPKKAICAVAASILTAVYHMLRDGTFYHDLGPDHFRRATPEDQANHLVRQIAKLGFTCSLAPISAQEVSV

SEQ ID NO: 345448 - protein, 411 aa, unidentified
MTQAEYLVRVGIDWASESHPICILDKDGNRTEHTVPHTSAGLMALATELAALNPEDPGRVAVAIEVPRGPVVDTLLERGLHVFALNPKQLDRFRDRHTVAGAKDDRRDAFVLADSLRTDRPAFRRVQLDDPLIVELRELSRLDDDLREELSRLSNRLRAQLHRFCPETLALCPAADEPWFWALLDRAFPPPRPKPLSIKAVTAVLKVHQIRRLTVDTVHAALQVPPLRVAPGTIEAACTHIALLLPRLRLVHDQRHRTVGARIEKLLAELAKEDGEGKHRDVTILRSLPGVGRLVAATVLAEASRPLAERDYQTLRAQAGSAPVTRQSGKKATVSMRLACNRRLRNAVYHWARVSVQVDPRCREHYDRLRQGGHEHARALRGVVDRSIGVLVAMLITRTLYDPERRYPKAA

SEQ ID NO: 345449 - protein, 321 aa, unidentified
MNYVGIDVSKATFVVAYSSAKGSETKTFENTTKGVHKFIQTITPEDTHCVMEATGNYSMLLVYLLSKAGITVSMENPLKIKNFARVMLSVVKTDEIDARMIAMYGEKMNPAPFKLRSDSLMVLKQKRTVLRQLKKQLNANTNLQESMEALPFIDSVCKKILDKTVKFLRKQIKEMEEELSSLANIEYKKQMDLLTSINGIGVTLATALIVATGGFTYFDNAKQLTRYLGLSPTYQQSGTSVNLKGHINRNGDSYLRSQLYVAAFSSLRCNTECKACFDRLRANGKPGKVAVVAVANKLVRQAFAVVTQGKEYVDGFISSKK

SEQ ID NO: 345450 - protein, 406 aa, unidentified
MTHPKMRYTYVGVDSHKDTHTAVFLDCFFEKLGAITFQNRPSHFDAFLDDAQQYLQDGTTFMFGLEDTASYGRTLTAFLNKNEQAVKHVNSLLVAKERKNQTVTQKTDNIDAECAARVLLSRFSDLPNATTHDDYWVLRMLVLRRGTIIKSNKILKSQLHTVLTQHYPAYRSYFENIDYKTSLTFFMKYPSPQTLQGVTVEELTAMLELHSRKTLREPKARQILSTLEDTAVEMQHIRDITVQSIIRQIQFNQSEQKDIEETLAQVLDGFGTTLTTMRGIDTVSAAQLLSCIGDINRFASPAKLAKYAGIAPTTYSSGKSDMQFANQRGNRELNHLFYNLALRVTIVASAKRVVLNSFFHDYYHKKLSEGKTKRQALKCVQRRLVNIIWNMLKYGSDYQNPDKIVP

SEQ ID NO: 345451 - protein, 387 aa, unidentified
MTGQAQVSRFIPGEYDIFAGLDVDKRSIAMTFSDHKTLIKSQRLPYSSEQLLNYVRKHFPGQRVAFVYEAGPTGFGLHDDLTANHHTCLVVAPSMVPTAPGQRVKTNRIDSKKLSLGLRGGELRSIHVPSRSYRELRHLVQLRDTQVQQLKATKLRIKALLLCEGIPFPEAPPSSQWSARVVAELRVLPCTSEVRFKLDHLIGTLYFHFNSAAVVQKRIRRFCQNDPELRQSISLLKSLPGIGWIVAAHTVARLGDWREIENVRSIAGFLGLVSSEHSTGDKVNRGSITRSGDSRLRNKLIQSAWVAIAKDPELRAFYRSIFERQPKKVAARKAIVAVARKLTTRMYAVLKQQRPYVIRPDISPAPLTTEETVGPRERLDSAQSDQP

SEQ ID NO: 345452 - protein, 349 aa, unidentified
MLADELDYVVGVDTHRDRHALAVVAAPSGGVVAQRSVRASVRGYAEAVRFADEFAPGARVWAVEGAGHYGVGLVRYLSLHGETVLEGGRGPRNERRLRGKDDPLDAVRAARATLASERLALPRTGERREALRLLLIARRSAVEVRRRALVQLRSVIVTAPDPLRDQLRALPERRLLERCSRFRRSSSSPVDELAAKLVLRTLARRIEAATAEAEQLEREILGHVRVLAPRLLDEPGIGPIVAADLIVAWSHRGRVRSEAAFARLAGVAPVPASSGQTVRHRLSRGGDRQLNRAMHTIVLHRRQHDAATRAYVERRVAEGKSRREATRLLKRYLARHLFRLLQQTEPLMT

SEQ ID NO: 345453 - protein, 351 aa, unidentified
MSHKTAATVAHTIGIDTGKNTLHLIGLDDEGAIVLREKIARGRIAARLANVPRCLIGIEAGMATHYVARELGALGHDVKQVPPAYSKPFRQGHKNDFRDAHAIAEAVQRPSTRCVPVKTDDQLDLQALHRVRSRLVGQRTAVINQIRGFLLEHGIAVRQGLRFLRQQLPDILAKRSDVLSPRMIRIMEDLSGDWRRLDERIEHITKEIEVLAGTDVNCGQLMTVPGIGPIVASATVAAIGNGAAFARGRDFAAWLGLVPKQMSTGDRTILGRITKRGNRYLRMLFVQGARAILLRPKSWVKHSFGPWLTTAARRLHRNILTIALANKLARIALSVLIQGRSYETRIVLAAA

SEQ ID NO: 345454 - protein, 411 aa, unidentified
MEKVYDKCCGIDVHKKLIVACFKKGNTQEIREFGATTRELLEMADWLKDGGCEMVAMESTASYWKPLYNIFESSDLNAIVVNARHMKAVPGRKTDVKDAEWIADLLTHGLLQASYIPDKDQRELRELVRYRKSLVGERNRELNRLQKMLEGANIKISGTITDINGKSARNILEHILSGKQIDSAEYDILYEKKVIAHNLKASKEQIIDDLNGVMSDIQRKMMRLLLKHLDELNAIIKELDDDIDSFMKPQEKQAAKVIQDIPGIANTSAQAIISVLGTDMERFPSDRHLASWAGLCPGDNESAKKRKSGKTRKGNALLRETLVICAHSAVRNKKSYFYAQFMRISAHRGKKRAYVAIAHTILIAIYHILKEGVTFKDLGADYYNQFNKERKINAYLKKLKALGWEAPVVAA

SEQ ID NO: 345455 - protein, 340 aa, unidentified
MNANSKFFIGIDVSKPFFDASLMVVTDHQKQAIETARFDNTLDGLKAFFKWLKSFKVAMDQNTLVVIENTGIYHRLIWSFCNKKGLSLHIGNAAHIKWSFGIARGKNDKIDSIRLCKYAWKEADTLKASPALNPTLMQLKDFMASRSRLLSQINSNKQYIKELKNINDPTVQKAIEQAHKTAIKGIAGSIKDIEALIHKIIAENPELKNNYDLLITVPGIGHLTAVYLICCTTNFSAKISGKQLACYAGVVPFEHSSGISIKGRNRVHHMANKDLKKMFHLSALSVIQYYPEFRTYYNRKKEEGKHPMSILNAIRNKIALRVVAVVNHQKPYVNNQLIAA

SEQ ID NO: 345456 - protein, 353 aa, unidentified
MEQFIGCDAHKKFSVFVAVNEKGHAGEAMRVAHDRQLYREFLGRLPPHSMIAVEASGHYSWLVDEMERLGHYPKLANPLEAKRRMALTKKTDKLDARGLAILLRNGTLPEVWIPPSELRDQRELLRLRIFLVRLRTRVKNRIHGTLARHNVQIPGADLFGVAARLKLGARLPELPIHTREAVEQELATLDFLEIQIESAEQRLEAIMNVSVEADLLKTLPCVGKILSMVLMLEIGRVDRFPTAAHLASYAGLVPRVHSSGGRTRMGQVCGNVNRNLKWAFVEIGNLIVINQTRLAGTHVVRLYQRIKCAKNHQKAVVAVARHLAEAAWWLLTKQEVYREPQGPRQRTLSSTLG

SEQ ID NO: 345457 - protein, 361 aa, unidentified
MTGMVTYAGLDVHARSTQAAAIDVSTGELLRASFGPGVEEPVAWLQNLPGPVRACYEAGPTGFGLYRAAVAAGVSVEVIAPGKTPRGPSDRVKTDRKDAELLARLLLAGSLTSVVVPPVEVEAARELMRAHDACRRDLMTARHRVSKMLLRHGRVYPERSTWTVAHRRWLAAQQFDETASELVFADLIASVDGLTARKVAIAERLSRLAEDEQWWATVARLRCFRGVDTLSAFALHLELGGDWQRFERASALSAWLGLIPSLHQSGESSHQGAITKTGSGFARRLLVEAAWHYGRDPRIGVTLQNRQLGQPDHVLQIANRAQHRLHRVYHRMRGRGKAHNVTVVACARELACFLWAAATAD

SEQ ID NO: 345458 - protein, 374 aa, unidentified
MKDNYNQGGPNMQDYTRDAGRVNVQECDLFVGLDVDKSSMSVSVRDREAIIRSVTMPYDSKNLLSFVENSYSGKRVAFAYEAGPTGFGLYDAIAGAGHGCLVVSPGSVPDAPNNRVKTNRLDAKKLANLLGGGQLRGIRVPPEPIRQLRSLVHLRYIYMQDIRAYKCRIKAELLKEWIAFPKAPKGSQWSSSVVTALRNLDCSAVTDWKINSILDHLEHLSRQMHLAEVSLKSVVNGNEDLKRCIGYLVSCPGIGWRIACYTLARIGDWRCLGVSKEAGAFFGLVPRENSTGDRTDRGSITKCGDPRLRSMLIQGAWAAIRKDDELRAFYERICASHPKRLAARVAIVAVARKLAERMHCVLRQQRRYEMRAAA

SEQ ID NO: 345459 - protein, 356 aa, unidentified
MKYVGIDVHKKMCQAAVLDEDGELVDQARFLNRKKSIKEFAVKLLTFRDDVKAVVESTGNLWIQIYDILEKFGIDVSLSNPGKTRLIAEAKNKTDKVDAKILARLLRADMLFTCYVPGEEVRNRREFLRARQDFVKNKTQVKNRIHGILDKHGLRFPGTPYSKKSIVWLRKQDLGFMDNAVVKGQLALLETLDDQIRVMEDKIAVMGMEDPQVKLLMTMPGIGFFTASMLVAEIGDINRFGSDKKISSWAGLAPRIHQSGETTHIGRVGQGNKRISGLLVQCAHNARRYDPRFKRFYDRYSKRSGKGKALVAVAHEMIRIVYFMLKRNEPYRGENVELTTRKLKSMKYRASIGLQI

SEQ ID NO: 345460 - protein, 342 aa, unidentified
MEHYAGIDVSLEYSSVCVVDASGKIVREGKVASEPDALISWLRSLGYELSRIGLEAGPLSQWLFAALRKAGLAVELLETRHVRKAFEAMPVKSDRNDARGIAQLMRLGWFRPVHCKSMGAQEVRAVLTARKLVQTKLLDVENSLRGILRGFGLKVGKTTARSFAGRIQELVKGHPNLEAIGKALLSVHAVLLREFNAFEKRVRAMARSDARTKLLMSTPAVGPIVALTYASAVDDTARFKSSKQTGPHFGLTPKRYQSGETDYSGRISKIGDASVREALYQAAHVMLTKPVKGCSQLKSWAMRIARRAGMSKAKVALARKLAVILHRMLANATPFNAAAAAA

SEQ ID NO: 345461 - protein, 381 aa, unidentified
MNRSYDYFVGLDVSQRTTSVCVIDADGKKFCEGKCNSRPEDIRGWLVNRVAEDKTLKIGLEAGNMSSWLYSGLVKFGFDVICMETFQAHRFLATYRNKTDKNDARGLAQLVRMGGEDFLKVVSIRSQASQETRVLLAMRDHLVSQKVGLENHIAGVLKPFGVLIERGNVTADTFYKRTLEGLAEAEKNGVHVRSYVLPSLNLYMEAVEAIAPLTEKIHAIAHSIEMVKRFMDIPGIGPVTALSFYAAVDNPQRFQKSSDVAAYFGLTPRQFQSGETNFMGAISRRGDPATRRVLVIAATVLLSGTLEWNSLKAWGVRLAKRIGFSKARIAVARKLAMIMHKIWVNNDRFRPKNLSAQERIKLKQELIVVASKSGRVASAPV

SEQ ID NO: 345462 - protein, 399 aa, unidentified
MIENYDSVDVFVGVDVGKGEHHAVALNKSGRVLMDKALPNDEAKMRTVWGKLKAHGTVLVVVDQPATIGALPIAVAQAEEVLVGYLPGLAMRRIADLHAGEAKTDARDAAIIAQAARTLPHALRSIQLADESVAELSMLCGFDDDLVGQITATSNRIRGLLTQIHPALERVVGPHLDHPAVLDLLQRYPSPAAMKTAGTSRLATRLTKLAPRMGRRLAQEITQALSEQTVVVVGTSAAATVLPRLAEQLAALRRQRAEIAVVVEKLVEAHPLSPVLTSMPGVGVRTAARLLTEVAGKHFETSGHLASYAGLAPVTRRSGSSIRGEHPSRRGNKILKRTLFLSAFAALRDPISRTYYDKKIAQGKRHNQALIALARRRCDVLFAMLRDGTFYESQHSLAA

SEQ ID NO: 345463 - protein, 437 aa, unidentified
MIPVTFSELVIRNQQRSIAVSKSKSQKIKRVNKETMIVTLDIGKGSHYGYFRAPDGQDVEPFAFYNTRDSFHSFWKKLNRFKKAHGCKQVVVGFESTGPYAEPITHFLKQRPVRLVQINPMHSKRIKELTGNSPNKTDRKDPRVIADVIMLGHALRVVIPQGSSAHLRRLTQARERAIKDRTAMLSQVQHLLFVIFPEFLKVIKNISSKTGLYLLRHYPTRQAIAALGEEKLSRIIKQVSRGKMGQWHAKKLFQSAQASVGISEGQESIGEEIGHLLDKIMRENDFIDRLECQMRSHLEQVAYSSCLLSLPGVGLITVAGLIGEVGDFRQYRTVAEITKLAGLDLFEVSSGKHQGRRRISKRGRPLMRKLLYFAAINTVKATGVMHQPYTRMVERGMPKIKALVAISRKLLTVMYALARDQSMYMENFVSHRYQFAA

SEQ ID NO: 345464 - protein, 456 aa, unidentified
MNKNKYSKKMVGSGEEMLKVSPDAAGIDIGSKEHYVAVPADRCQEPVRAFGCFTPDLHKMAKWLKSCAVKTVAMESTGVYWVPVVQVLEQYGFNVKLVDARQTKNVPGRKTDVLDCQWIQRLHSYGLLQAAFIPDKEIRVLRSYWRHRDELVKSCARQIHLMQKALEQMNIQLHKVLSDISGLSGMRIIRMITKGDHDPHRLASLAHGSVKASKEMIAAALLGDYHREHLFALTQAVELYDIYQEKLLKCDAEIESYMNSLNSKKDPDQLGPRPGSKRRKNQPHFDLTSHLYRITGVDLTRIDGIDSMTAQTVISECGFDMSRFPTIKHFTSWLALCPNNQITGGKVRKRGTKKVKNRAADALRISAMTLHSSKTALGAYYRRMRTRLGAPKAITATAHKLARIIYNMLKHGNDYADRGQEYYEKQYKDRVIKSLKRRARELGMCLVSTETGEFVS

SEQ ID NO: 345465 - protein, 386 aa, unidentified
MATSTTSRIEQDALPQPTLYLAFELGQHTWKLGFTIGVAQQPRERTIPAGALETLQREIARAKQRFGLPEDARVVSCYEAGRDGFWLHRALVAHGVHNHVIDSASIEVNRRQRRAKTDRLDVRKLLTMLLRHSAGEQKVWSVVRVPSVEEEDRRQLHRELTTAKQDRTRVINRIKGLLAGQGVQLVLQGDVDAQLDQVQQWDGSPLPSALRTRLKRAWQQVGLLTAHIQTLEAERRALLRHREEPVIAQVRQLFTLRGIGVHSAWLYVMEFFAWRDFQTPKQVGALAGLTPTPYQSGESRRELGIAKAGNRHIRAMAIEIAWAWRRFQPDSALSQWYERRFGAGSARLRKLGMVALARKLLIALWRFVKTGVLPEGAVLKTAAASR

SEQ ID NO: 345466 - protein, 326 aa, unidentified
MNSVRMHIGVDVGKNCLDICFPDGKKEHLKNNKPGRARIIHAAKKLDAIVCFEATGIYEEDLANECLAAGVRAARLDAWKTRQYAKSRGRIEKTDRLDCEMIRDFASSLEDGKMPFVKPRSAAHSLIKEYAKIRGNLMKARVVVSSQLEFVRDKSARKSIVAIVEKIEQEIARLEDECGKAVGEDERMSSLSRRFLEVKGVGPCLVRAIFAECPDIGSFSKKGIAKFCGKAPIASKSCTIEKQSRMRRGRQGLRQAFHMAALSASKHNHVLRETYRRLMSNGKSKMTALGAVGRHLAILLNNIAKYPDFKISHESEDGKRKRHATC

SEQ ID NO: 345467 - protein, 435 aa, unidentified
MTLTIVDEACAVTGGVDTHAGSHMAAALDRIGGLLGVQEFPATPDGYARLLAWLAGFGTVQLVGIEGTGSYGAGLARHIAAAGIRVAEVDRSDRQDRRRKGKSDPLDAVSAARAAQSGRASGAPRGRDGQVEAIRALMVAKRTARAERTQTINQARALILTGPDDIRIRFTRHTPADLVAGLAVLRPRPGSMVRYHTLLSLRELGRRAQFLDGQIERLDELIVPLVTARAPGLLRLYGVGPDTAAMLLIAAGDHPRRLRSEAAWAHLCATAPIPASSGKVTRHRLNRGGDRQANHALWRIVITRMSSHPPTRAYVARRTKEGLSKPEIIRCLKRYAAREVIPTWAASATNSGRGLTRESAAAPRCWPSNDPSAAPGPLSRPAGRDLIRACPPWPNPVLSASPAQDKHQTHTQLTGKETETKENLDKHRSIDLALP

SEQ ID NO: 345468 - protein, 331 aa, unidentified
MFPVGIDVSKNTLDLCILYDGIKGRIKTRNIQNNRHSVENILRWLRLQHCGPEDVHVVMEATGVYHERLATELHDAGFRVSLANPHRSREFARGMGIMTKTDKVDAYMLACYAFLKKPHHWEPPSPEIRYLAALLRRRDVLLGDALREENRLEKYLSTDTPADIISSCRRMAQLLREEVSNIERQIKAHIKASPALRRDHTLLNSIKSVGPQLGMHMLVELRSHNFASAEQAAAFLGVVPIEKRSGTSVRSRPRMSKIGPPQLRARLYMSALCGKIYNKRMRNIYDEMCLRGKPKMVAIGALMRKLVHWCYGVLKTGTVFNDEGLKQVLST

SEQ ID NO: 345469 - protein, 397 aa, unidentified
MYIVGIDIAKRKHEAAVIDGEGTVIIKPFSFTNNCSGYNRLLAMLTKAKLPLDEVSFAMEATGHYWLALFTRLQKEGFRVQVINPVQTNSIRSFYIRQAKTDPRDALLIAEVIRFGHFSESTLHPENIYELRELCRGRHAIVSMQADVKRKAVALLDQVFPEYETAFTNLFSDTSMAILQTCPTPKELSEMPLEELCHLIEVSSHKRFRMAKAQELQELARNSFGFAMAGDVFSTMIRLYAKHLDFLKQQVQEMDRKIAEIMDTLDTPITTITGIGPTLGAYILSEIGDISRFSSAAKLAAYAGIDPTMRQSGEYNGVRNRMSKRGSPYLRHAIWLAASSAVLHDPALKLYFQKKRDEGKPYMASVGHACRKMVSIIYAVMRDNKAYTPCIPNEISA

SEQ ID NO: 345470 - protein, 348 aa, unidentified
MENPTTIAVDLSKNVFEIAVERQGRICQRKRLNRRQMVEFFSQCPSATVLMEACGSSHYWGRVLQRLGHDVRLLPPQHVKPYVLGNKTDRRDVEAILSARHRESIVPVPVKSIEQQSVVFLHRLRATWMKTRTSRLNVLRGILRELGVTIPEGASRVLPAVSAALSDPSAPVPEVLHSVLMSAMAEVRELDERIEGVKRQLEAVAGTVPLVERLETIPGVGLLNATALAAMVGEFSRFPSGRRFASSLGLTPKEHSSGARRQLGAISKRGDTYLRTLLIGGARSVLLWAHRTKKPHRLQEWALNVERRRGRNRAAIAVANKLARIVWAVSTRGVPFHPIPLAPQNVPA

SEQ ID NO: 345471 - protein, 329 aa, unidentified
MSDTYSFLGIDIAKATFEAVLQVGPRQNSRGFDNDPADFRALSRWLDKNGAGRVWAVQEATGRYGEALAHYLSQQGHAVSVVNPARIKAYGASKLRRAKTDRLDAALILDFGRTQRPALWTPPTAEQQELCALVRRVADVQHMHQQERNRLTAGSHPPIVQASLQAILAVLEAQIVALQKAIEAHLQAHPALRHTCQLLRSIPGIGLLTAVRLMVELPNIHAFDNPRQLVAHAGLAPSVCQSGTSVYGRGHTSRKGNAVLRAQLYMPALVALRHNPVIQAMQQRLQRAGKPKMVIVVAAMRKLLHLAFGVLKSGRPFDPAFALSPALGT

SEQ ID NO: 345472 - protein, 328 aa, unidentified
MFSIHGTDQHGKVVVRKRLNRPKLLAFFAQLPPCLIGMEACSGAHYWAREMTKLGHDARIIAPRFVAPYRKSSKNDDNDAEAICEAVSRPNMRFVPIKTEDQQATLSLHRIRRGLTKERTAQINQIRGLLAEFGLIIPQGRYAARRRVPEILEDAENGLPMLARRLLNNINQRILQLDEEILAYDREIEAMARRDEQAKRLMAIPGIGPQTATALLASAPDPRQFKSGRHFAAWLGLVPRQYSTGGKPRLGRITKHGDKYLRTLLIHGTRAVIATIDTKEDRLSAWAKELKERRGYKRAAVAMAAKNARIVWALLMNQTEFKTQPVEG

SEQ ID NO: 345473 - protein, 364 aa, unidentified
MKIVGCDLHARQQSIAMVDTETGEFTEKRLMHEGNAVRDFYASLEGPVVVGIEATGAMQWFLELLEELGIKCRVGHPAKIRAAETRKQKHDRRDAEVILDLLVMKDRFPDIWMPSTEQRDLRTLLRDRHQWVKMRTRLQHTLQAIALNHALREGRALWTAAGQRALQGLALPPYTDQRRDELLSLYTQLEKRIQQLDKQVETEAQQRPRARRLLTHPGVGPVTALATEVFLGDPTRFATANQVASYVGMIPCEHSSGKKQRLGKLTKEGNSLLRYLWVEATLHAVIKDAELKRFYRRKLIQKGMGKARVAAARKLGIRLWIMLRDEIDYEEFCRRGKLPQKGKAHAGMPDFNSGPARVVTGSTE

SEQ ID NO: 345474 - protein, 344 aa, unidentified
MDNHTQYLGFAGVDLAKKVMQIHFVTADGEITDKSAKRAEFLDFFRNRGKCLIGMEACGSSQDWARKLEAMGHEVHLLPPKAVKPFVSGQKNDHNDAIGIYKAMFNGVRRVPVKSTEIRDLQTLRRIRSQVTKDKVKEINHVRGLLAEYGIVMGKSLNAFNKDISSALGILTERGDVSPLVAEELRTTVEAIKAKIERQKKLDQEIEQLARGCKNYENFLKTPGVGPFTAAMLCVLLCDPSIFANGRQFAAYIGLAPRSRGSGGKNYVTGIPSKFNCDSESRAVLVECAQAIARCKNKSLWVEEILRRKPKKVALIAIANKLARQVWAMANKGESFKQMAVLTA

SEQ ID NO: 345475 - protein, 320 aa, unidentified
MGTEKAYVGIDVSKETLDVAVHATDRRWRFANSDKGITETVACLEEMCPTLVVLEATGGMECPLAAALAVTGIPLVVTNPRQVRDFARATGRLAKTDAIDARVLAHFAAAVHPESRRLPDSQEQELKAILARRRQLIEMLTAERNRLHSARSKAVKVNIKAHIDWLEKEMTHIDHDLEQSIRQSPIWREKDDLLKSVPGVGPVLSTTILADLPELGLLNRRQIAALVGVAPFNRDSGHMRGQRTVWGGRAVVRSALYMATLVATRHNPIIRDFYRHLLSQGKPKKLALTACMRKLLTILNAMVKHQTPWHYPVSGTLQTP

SEQ ID NO: 345476 - protein, 344 aa, unidentified
MNITTIGLDLAKNVFQIHGVDSESKVVITKSLKRAQMVPFFANLPPCLVGMEACGSAHYWARKLETLGHTVKLMAPQFVKPYVKTNKHDAADAEAICEAVTRPSMRFVAVKTGEQQAVLSLHRARQGFVKARTAQANQIRGLLAEYGIVIPQGIGSIVRRLPEILEDGENELPGLFRQLLQRLGEHLKEMDRQVDELDGQIQLWHRENAASRKLAEIPGIGPLTASALVASIGDAQSFENGRQLAAWLGLVPRQHSSGGRHNLLGMSKRGDGYLRMLLIHGARAVIRVAERKLDPADSWLKRLLGRRHKNVAAVALANKNARIVWALLAHDRAFRPDYVAVAAR

SEQ ID NO: 345477 - protein, 428 aa, unidentified
MTQSAPHTCAAFVGIDWADAKHDVCLQAAGSAQRACCQLDHTPEAIDAWVITLRTRFNGQPVAVCLELNKGPLVFALHKYDFLILFPLNPLTLARYREAFTPSRAKDDPTDAELQLELLLTHRDKLRPLNPQSPTMRALAQLVEHRRRVVGDQVRLTHRLTSTLKNSFPHAVQWFQDKDTLLFCDFLSRWPTLKAAQLARRSTLETFFRDHHVRSSDVIDKRIHAIHAASPLTIDEGVIAPHALLVQALVSQLRVTLQAIETFDNAIAQRAQSHPDFPLCQALPGAGPVFASRLLVAFGEQRDRYASAAELQRYAGIAPVTERSGKKSWVHWRLQCPKFLRQTFVEWAAESTRHSFWAQVYYQQQRDKGKAHQAAVRALAFKWIRILFRCWQERTPYKESASLQALNSRGSSLIHHLAKEAGKIVERP

SEQ ID NO: 345478 - protein, 429 aa, unidentified
MNYNTQNAKIASITEKTLIIGIDVGSETHYARAFNWRNYEYSKKPFAFSNDEAGFSSFKDWMDDIAEKHGMKVVIPGMEPTGHYWLNLGAYLQEQGMKPVHVNPHHVKKSKELDDNNPSKNDRKDPKTIAGLVNEGRFSYPYIPTGIYAEIRNLSNLRIQTQEEITRIKNRIARWFSIYFPEIKDVYRNPDAVSGLMVIKQAPLPCDIRELGVEGVNKIWRDARLKGAGIKRATNLVTAAEHSIGNTEAPRSARKEIRNLLNDYEIYKNRMDELMEEIKETLSEIPYIDKLMEINGIGIKTVSCFIAEVGDIGRFDNPKQVQKLAGYAIVADSSGKHNGESRISHRGRKRLRYALYEAAISVIGKNKEFKEIHSYYRTREKNPLKKMQSVIAVACKLIRIFYTILTKGVDYDGQRMLADIVRPEMQLAA

SEQ ID NO: 345479 - protein, 354 aa, unidentified
MPNQEATASFTVGVDVGERHSHLCVLNTETGDVVEESRISTTPEAFERRFSGSQPMRVAVEAGNRSLWISKVLEACGHEVLVANARKLRLIYADGRKSDRLDAENLARVARLDPRLLAPIEHRGEVAQAHLALLRSRELLVRTRGNLVNHVRGTVKPFGVRFARCSPEIFPVRVRELLPEALVPALAPVLETISSLTARVREYDRELEALSRELYPETALLRQVQGVGPLTALAFVLTVEDPTRFETSRSVGAYLGLVPGRYQSGDSDPQQRISKRGDEMTRRLLVSCAHYVLGPFAEDSDLRRHGEKIAERGGKNAKNRATVAVARKIAVLLHRLWTTGEAYEPLHNANRATA

SEQ ID NO: 345480 - protein, 353 aa, unidentified
MSVYVGIDVHRKRSQVAVVTEDGTVQLNKNVVNGSEPMLRLIGELPSGTPVAFEAAFGWSWLAELLEDYGFEAHMVHPLRCRAIASARLKNDRVDAAILAQLLRADLLPEAWIAPAKVRQLRALLRHRISLVRLATQARNRIHAVAADHGYDRSASYWTGPGRGWLAELDLPAASREIITGCLAVIDGLAPVIDRIDGELHAHAKADPRVKVLRTLPGVGEFTALVMVAEIGDVSRFGSARKLASWAGLTPTVRGSDLHVRHGHISKQGSVWLRWAMNQAAQTAKRSPEFAASYAAIARRRGKKIATIAIARKLLTRAWHLLSEVQAADAGTPPRRPAPREGRQAPGELVPAA

SEQ ID NO: 345481 - protein, 391 aa, unidentified
MSMYFIGIDISKYKHDCCIISAADQQIISKFTITNDKDGFEQLLTALNSLSNPEDIKIGFESTAHYALNLELFLENAHHSFMEVNPVLIKEYKKSTTLRRTKTDSVDCESIARWLITVEYKPHSKGFYHAYSLKSLTRLRDRLIRQRSFYLVKITNVLDHTFPEFKPFFNERLSKTALYLLENYGSAEKMARMNSASYDKLRCISRGKFSIQQFLRLKELAANTVGVNNSIFDLELNTLLTLYKSLSDEINTLETEIIKLIEEVHPHYMSIPGIGPISAAVIYAEYGDISNFSNPGQMLAFAGIEPGINDSGTESHGGRMVKHGSSQLRYVLLNACLPLIRFDLTFATYYEKKRAEGKKHRVAITHVAKKLIRVIYALERQDVDFNAQKLR

SEQ ID NO: 345482 - protein, 350 aa, unidentified
MKICTIGIDLGKTVFHLIGLDEHGKVIGKKKCSRSQLLAYTANIPAALIGMEACCGSHHLGAALAVQGHQVRLIPPQFVKPFVKSNKNDYNDAEAIAEAVLRPRMRFVPIKTNDQLDLQALHRVRDRLVRRRTGIINQIRAFLLERGIAFRAGRVYLRSHMAAILEDAELNLSPLLRGLLEQLWEEWKITESRIEEVTDQLEVIADQDTSCKRLQSVPGVGPLVSTALVAAIGNGSAFTKGREFSAWLGLVPRQVSTGGKPKLLGISKRGNSYLRRLFIHGARAILIRERKKYAFGGWMTQLESRAHANVVAVAVANKLARIAWAVLVKGVNYRQTPTLSGSNCEGNMAA

SEQ ID NO: 345483 - protein, 344 aa, unidentified
MSNLDTCGIEVSAKELVVRLRRQEDLEPLRTFTNTPEGHMMILRYLRRAGRMVRVCMESTGLYGLDLALALSGQEGIEVMVANPRAVRHFAHALMQRSKNDQIDAGVLEQFAVHMPFKPWQRPSVATLALHALARRLRELVEMQTAEKNRQHAAGLSKAIPAVVRRDLARSLRAQERAIERLTRQARKLIAQDPQLAERFELLDSVPGIGETSAVQLLGELGVLAPDLEARQWVAYAGLDPRQYTSGTSVHKKPRISKAGNKHLRHALFMPALVAVQHDPHLRAFYQHLLAQGKFKMQALVAVMRKLLHALHAMFKTHQPYDGSKLFRLKSTPAQEVTHALVAS

SEQ ID NO: 345484 - protein, 402 aa, unidentified
MKVFIGVDPHKLSATIEVVDDRETVLATGRFGTDKAGYTAMRKVVARWPDRTWAVEGSNGAGRPLAQRLLADGERVVDVPAKLSARARQFDTGHNRKTDAHDAHAVAAVAVRTAGLRVLSYDVQLETLRMLVDRRQELTRTRIQTVNRLQRLLAELTPGKAKKDITTLQAKAILGSVRPRDLAGRTRRRLAAEQLAELVVVDKKIKALTKELKIMVLARGSTLMDLRGVGPVVAARTLADVGDVARFADRNRFASWTGTAPIEASSGEIVRHRLSRAGNRRMNHMIHIAAACQIRLDTPGRAYYRRKLAAGKTRAEAMRCLKRRISDALYRRLLIDARALRSGGADAGPGGHCGASLESSAAGSHPYTSTSDQPLPGPARTTLPAPTSTQKSSISRPLQPAS

SEQ ID NO: 345485 - protein, 414 aa, unidentified
MEVLYPRCAGLDVHKDMVVAAVRLVEAGAVRSEVRHFDTTTPGLLALAAWLAECGCTHAAMEATGVYWKPVWHVLADGDLVLILANAAHVRTMPGRKTDVADAVWLAELLAHGLIRPSFVPEPATQAMRALLRTRKQLVREQASHVQRLQKTLEDANLKLGSVLSDTMGASGRAILAALIAGETDPDRLLALVDRRVRAEPARLRAALTGRLTPCHRFLLRLHLGQIEALTAALAEVDAQVARDLDPFREAVRLLCSIPGVSDLSAEVIVAEIGTDMSRFPTAGHLVSWAGLCPRHDESAGKRRSTRLRAGAPWLKTTLVQCAWAASRKKDGYLRAQFLRLRQRRGPKKAICAVAASILVAVWHMLRDGTFWRDLGPNHFHRRSPEQQAQHLAQQITKLGFTCSLAPAHGQVSV

SEQ ID NO: 345486 - protein, 315 aa, unidentified
MSDQRKVVGIDVSKAMLDCAVMPGKLHFQVANDVAGIAQLIERLHPLKPDLVVLEASGGYETAAAAALAGALFRVAVVNPRQVRDFAKATGKLAKTDRIDAQVLADFGVAIDPQVTPLADEDTKALQGLLARRSQLVAMRTQELNRLAQAASAVRLQIKDHITWLNEAIRKCDIDLTAKLRSSPVWKAKENLLRSMPGIGAINSRMFMAGLPELGQLNRQKIAALVGVAPFNRDSGKFKGHRSIWGGRANIRQALYMAALTAKRCNPVIRTLYERLSARGKPHKVVMVACMRKMLTILNTMAKNNTHWNPNIKTA

SEQ ID NO: 345487 - protein, 373 aa, unidentified
MPKYSTAFGMDVHLRSTTVCALDADTGEAVTRRFPGNPWGEIAGWMGGFPGPSLAAYESGYPGFAPQRELAGLGVECVVAAVSKIPRSAADSASKNDRNDAARMAKAILAHDISPVWVPSPEVEGIRDLAGAYDGATARLATAKQRLLAFLAKRGFAYGGTTPAGNPRKYWTYDFLRWLDKVRPEDDGGIRTLAALRNEVEAAAEARADLLSEYRAAVDASPIAAEVAALQSIKGCAFALAAAFSAEVGDFTRFRSGRQVTAYFGLAPSQRSSGESVRLGGISGAGNALVRKLAVEGSWCYAAARHQPKLMPRDTGVPLEIRMHGRKGSERLLRRREEMLARGMPQAKANAATAAELVRWLWALGMMCREGAE

SEQ ID NO: 345488 - protein, 372 aa, unidentified
MLSLAVFTPRPGTGGVPQPGLEVEAMLADQLDYVVGVDPHRDSHALAVVGVVSGAVLFEANVAANSDGYAHALKLVDEHAPGRRAFAVEGSGSFGAGLTRFLSAHGERVLEVGRLRRERRSGGKTDALDAIRAARSVLAQNRPATPRASGEREALRALMAAREGAVNAKRAGLCQLRDLLVTTPEPLRGELRPLTRARLLRRLAATRPERRHDPELRGALLALRSVARRVLQLTAEERELAREIETLTRKLAPQLLEQPGVGPLAAAQLVLSWSHPGRISSEAAFARLAGCAPIPASSGQTIRYRLDRSGDRQLNRALHMILVTRRRAHTPTIAYIERRIQEGKTRREAIRCLKRYLARNLYRLLENAPAPT

SEQ ID NO: 345489 - protein, 343 aa, unidentified
MAIVTGYDVHRNQITFDALDTESGEVSRGRIDATPEAVRAWVGRFLGQEVHVAVEACTGWLFVCDALAEAGAVAHLAEPAETAARRGTKRRAKTDRADARHLRELLALGRLPEAWIPPAHVREWRTRTRLRKTLVDERNHWLQRIQATLFHHGVPAAALPARLLTPAGRDVLDHIALPAAARERVTVALSLIDAIDTQLAPLEREIRQLARRQTGCKALMRIFGIGELTAPTILCALGDVSRLSASRKAVRMVGLDIGVHRSDRRSRPGKLTRQGPPEARWALYEAAQSACRASSPDHAAYLELRARGLSHTRASLTIARKLTRRCFHTLQELGPAALEPLID

SEQ ID NO: 345490 - protein, 339 aa, unidentified
MTIVGCDFHPGWQQVAVFDSETGEIRELKLENGHGEAERFYRQLSSPALVGFEACGNTQWFEDLLERLGHEVWIGDAAAIRASYVRKQKTDRRDAGHILKLLMEGRFPRLWRPSAAERDLRQLLIHRHKLVGIRVRVKNGLHHLMLNKGVQMKRKLWSAAGQKALRELPLEGWAAQRRQDLLTLLSGLNPQIGQLDEAVERAAQANRRAQLLMTQPGVGPITALAYVLTIGDVSRFQRGKQVASYLGLIPSEKSSSNRRRLGSISKQGNSFVRMLLVESAQAVNRLDAGFRQQYKHRCHRMAKGVAKVAAARRLAVRLFWMLRTNTAYPEIARIESSPS

SEQ ID NO: 345491 - protein, 386 aa, unidentified
MQQNDLSKSLVAFDQDSTLVAVIELSAKSWLVAGLVPGVGREPLMRQGADPVALVKLLHRWRDEAVKAGKTITRIAVAFEAGRDGFWLARWLLAQGIESHVIHANSIPVSREHRRAKSDRLDTQLLMRAFVGWLRGEAKHCSMAAIPSVEEEDARRVNREHETLVGERTSLVSRMKATLVRFGIGGFNVKLKKAAERLAELRGAEGVPLPPNTLAELRRDMARLRLIKEQLKEIETTRLERLKQAPQEGTHPMVMMLARMMGIGIETADMLVQEILSRNLRDRRAVARYAGLTGAPDESGSKRREKGLARAGNARVRRGMIQLAWRWLMFQKGSALAQWFAQRTAGLRRNLRKTMIVALARKLLIALWRYVHSGEVPDGAILRPAA

SEQ ID NO: 345492 - protein, 391 aa, unidentified
MFYIGIDIAKKNHEASIIDSSGKSLSKSISFPNSTKGIEKFNNFIAEFGVTTNNCIIGMEATGHYWISLFSYIVDLGFTCYVINPIQSDAFRKMYVRQTKNDSVDSFIIAQIMRFGEFSISNFSDENTFALRNLTRYRFALVDECSDWKRKLIAILDQVFPEYSSLFSNIYGVASKELLSKYPLPEDMLSIPAEELGDLLCKCSKGRLGINKAEEIQSCARETFGIKFAKRSFSFQIKQIISQISFLEEQLKEIEIEISCLLEDICPVITTITGIGSVLGASIVSEIGNISRFERANQLVAYAGLDTRIKQSGDFSATNTKLSKRGSPYLRRSIWLAATVAAFKDPALSIYYQGLRARGKAHGTAIGAVARKLTNIIFAVLRDQKPYTPNI

SEQ ID NO: 345493 - protein, 410 aa, unidentified
MEPILISCAGMDVHEKKVDVCIVHGPFDKPPKFEIRTFPTMTSDLEELMAWLKKYEVTTIGMESTGIYWKPIFNVMESDFTIVLANAQRLKAIPRKKTDIMDCKRIANLLRYGLLPNSFIPPKEIRELRDLNRTRRKLVGMMTSEKNRLIKVLEAANIKLSSVVSKIYGVSSLALIRSLLEKDRLSREEISQLAKGKLKKKVDLLEKALNGKLTEHHRFLLRMHLENIDHIAKQIKKIDAEIQRKMVPFQKESNLIQTIPGISEVNASAILAEIGVDMSQFPDKAHLSSWAGVCPGNNESAGKKKSGKTQKGNSFLKGALTESAWAASRTTDTSYNVFYHNIVRRRGKKRALVAVAHRMLIDIYYVLKTGEPYQDMGAEAVVERAAKRRERSMIRSLEKAGYTVAKVEAA

SEQ ID NO: 345494 - protein, 270 aa, unidentified
MFYAGFDIHQKFIYATILDEKSQIVQQGKFLTNVADLDNFLGFLPPKQVKVVMESCGIWEDFYDLLESKGYDVCLANPQGVKAIASAKIKNDKVDSEVLAKLLKADLIPKSYIPPKEIRELRYLVRHRKILIKHRTKVKNNIHQILRMKNIKHGFRDVFTQKGVKYLKTLNHGRINCFLKIMETLDIEIKDLDKGLKDNKTSSKEVHLLQSMPGIGNYAAQVIQSEIGDISRFLSPKKLCNYAGIVPSQNQSADKDYKGRITKVGSRNLR

SEQ ID NO: 345495 - protein, 337 aa, unidentified
MIISPHCVGIDVSKRMLDIFDDAVGRPERIANTLQAITERVAGWRCGNVFVVFEATGVYDRELAEALRQADIRFARINPARARDFARADGRLAKTDAIDARMLAIFARKMMPAVEPAPEPARSALASLAKRRDQLVQIRAQEKNRRSEATDRTTIEGIQRHLDFLNGEIKAIEASIKTLIKAEPDISEQARLMRSAPGIGPVACMQLLAKMPELGCLGSKQVAALAGLAPFNVDSGSYRGKRAIGGGRKRVRDALYMAALNAVRRDLTMKAFYQKLRTVGKPAKLALIAVARKLLTTLNAIAARPQSLRPAPTHITVAGIRRDDSFVNQSSLPLPAA

SEQ ID NO: 345496 - protein, 351 aa, unidentified
MTLSIIGGVDTHTAIHCAAAIDTAGRLVGIAEFPASDTGYTRLTRWLRSHGQLLSVGVEGTGAYGAGLARHLHSERVHVIEVARPDRRLRRNHGKSDPIDAEAAARAVLAGTARAVPKRGDGPVEAIRALRVARIGAIKAKTAATNTLRSIIITAPEPLRAQLPSAGLPNKVIDACARLRPDHEHLSDPVQAVKASLRSIAHRARGLRDEIKMLDGQIHSLLAATAPTTLAVFAMGPDTTAALLVTVGDNPDRLRSERAFAHLCGVAPIPASSGKTNRHRLHRGGDRSANRALHIAVVVRMRYCPRTRAYVTRRTAEGMSKPEIIRCLKRYLAREIYRTILADYTALAAAT

SEQ ID NO: 345497 - protein, 347 aa, unidentified
MAHFVGLDVSVKETSVCVVDDAGKVILEQKVPTEPDAIIALLTSLGVTYGRIGIEAGPLSQWLVNALTAANLPVICVETRHMKALLTAQQINKTDRNDARGIAQMMRVGLFKPVHVKTLVAQEQRMLLTSRKLLQRKLDLESDLRGTLRNFGLKVGVVSDGRYEARVRELVTGFPRLAAIVEPLLNVRRVMRQQLAVLHKMLLDTVRGDPVCRRLMTAPGVGAVVALTYRATVDQPQRFAHSRAVGAHVGLTPKRYQSGETDYDGGVSKCGDALLRTMLYEAAQVLLTHGSKWSWLKAWGMRVAQRRGIRRAIVAVARRLAVVLHRMWVDGSEFRWSKDGAAAPTVA

SEQ ID NO: 345498 - protein, 346 aa, unidentified
MGKSITDLSSVTTVGLDLAKHVFQVHGVDASGRVVVAKAIRRNKLLEFFASLPPCLVGLEASGSAHHWARELIKLGHDARIMPPAYVKPYIRRQKNDASDAAAICEAVTRPSMRFVGVRSLENQAALMRHKAREMLVAQRTQLLNALRGHLTEVGVIAPQGPRHARELAELIEACDETIPFEVCEALAPLVVQLRNLDEAIARLDRIIAKLAQKDETARRLMSIPGFGPITASAMAATIQDTSSFAGPREFAAFLGLTPKQNSSGGKPKLGRISKMGNRYLRKLLVVGAHAVLFHRKPHTDPLRMWAKKLIDKKPFKLVAVALANKMARIAFAILRGKTVYREIPA

SEQ ID NO: 345499 - protein, 340 aa, unidentified
MNVVRIGLDIAKSVFQVHGVDPQGKPVIRKTLSRSQVCEFFAQLPPCLVGLEACAGSHYWARELGKLGHDARLMAGQFVSPYRKSGKNDANDAEAICEAVGRPNMRFVPVKSEEAQAVLTVHRARALTVSERTALVNQIRGLLGEFGIVAATGVSHVRRLLAEIGAGGKQLPILVRETMGELHDRLRALDERILAYDRKIEALARQSEPARRLMAIEGIGPITATALVASVGNASTFTNGRQFAAWLGLTPRQNSSGGKAKLGAISKRGDVVLRTLLIHGTRSVLRLTAQKHDQMSAWAEALKARSCANVAAVALAAKHARIIWAMLARGTDYRSAAVSA

SEQ ID NO: 345500 - protein, 427 aa, unidentified
MYRIAGIDVHKKKLAVVVSDVEVHGEYQFERGWFGANPEQLRCLSQWLVEHQVEEVVMESTALYWKPVWGALERYWQPICQKREGAGATSGILHLAQAQSNRGPRGRKKDFRDAERLVKRLVADELKLSFVPDWEQRLWRTLTRRRYQLTRARVQLQNQLEALLEEAHLKLSSLVSDLLGVSARRMLQAIADGETNPEALAGLADRRLRATPAQLSDALGACTELHAVYRRLIKMMLGELKVIEEHTAELNQELATLLRPHQDAVERLAEVPGLGVDSAQQILAEVGANAVVFASDKNLCSWVGICPGDEESAGESSSHRCPQGNRQMRRLLNQAANAAVKTKGSIFEIVYRRLVPRLGHNQTIGAVAHRLCRLIWLLLRKGVRYEERGPAVSQRSRQNRTSKMIRELRTLGYRVEFLNAVPSNPMP

SEQ ID NO: 345501 - protein, 341 aa, unidentified
MQITTIGLDIAKNVFQVHGIDTTEKVVVRKQLRRGQVIKFFEALAPCLIGMEACATAHHWARELTKLGHQVRLMPAKDVKAYVKRNKNDAADAEAICEAVRRPTMRFVMVKSAEQQGRLMQHRVRDLLMRQRTQLINALRAHLAELGISAAQGREGVKELLAIVAQNGAWRLPVDAHASLIVLAAQLQAVQTMIGSIEKRVVGQHRSNEESKRLETIPGIGVIGATAIAASVPDARVFRSGRDLAAWIGLVPREDSTGGKQKLGPISKRGDQYLRRILVVGACSVLRRARQQPEKYPWLIQLLARRPFKVVAVALANKMARVAWALLAKGGTYRAPRLTAA

SEQ ID NO: 345502 - protein, 331 aa, unidentified
MNYIGMDIHKQFTVAVAKDEQGNKLAEDKFDNGEDNFSRFLQAFQPQETKIVIESSSVWEYIYEILDGMHYEVKLANPVRTRAIAEARIKTDRVDASTLADLLRANLVAESYIPPKDIRRLREITRERKTFVKQTTQIKNRMHAMLTRRGVKIPTSTLCKKTLLWLREKFKEDRVFTHYLNLLEYHEKELKPIDSEISDIAEKNKDTKLLMTIPGIGATRSLDIFAEIGEISRFPSADKLCSYAGLVPSIYQSGNTLRFGRLIKQSSKNLKHNFIEASWNIVRTKESNPLQEFYKKLAKKKGKQKAICATARKMCCVTYAMLKNQKEFMVV

SEQ ID NO: 345503 - protein, 438 aa, unidentified
MSNKVIFNLDELFISVGIDVGADFSWMSIALPNQQFVGKPYKILHNSIDSLTTAVSKIKEAEELYSLESRIFLESTGIYHYPLFCYLRDKGFNCSVINPIITKNSTNINIRKVHNDRFDSKKAALVGLKPDLKVSLMPSDLALNCRNLCREYYDLMDNRSAYVNKLQGELRMAFPQYLGIFSKVTINTSLTLLETYTSPSAFLKADKQEIIDIIKSTARFGLTYAQNKYNAIIQAATDANQFGYIIDSNIKRIRLYISFIRKYDEEINSILESLHELVDANEDSDFVKQIHLIETFKGAGFLSAVSIMGEIGDFSAFSKPKQLFAYFGLDPAVKQSGKFEGTKVQMSKRGSAIARRVIHTLTLQSISISRNGEAKNPVLREYYLKKCDSKPKLVAMGAVSHKVCNMIFAILRDNKPFKIIAPQEHIQQYNSAKCDIAA

SEQ ID NO: 345504 - protein, 365 aa, unidentified
MTLRSSRPWESESRRASLGNELEQMRGPRARIRQDETCPIRHPPTAEEVRRPVEQFVGIDVSKAVLDVAVRPAGDAWSVANSPEGIAQLVDRLLEIAPKLIVLEASGGLERRAIAALAGARLPVVAVNPRQVRDFAKATGRLAKTDAIDAEVLALFAERIRPEVRPLPDEETQELQALVVRRRQVVDMITAEKNRLSAAPPSKRVRTAIGKTIKWLQKQLEEIDNDLDGAVRKSPAWREKDDLLNSVKGVGPVLSRTLLSMVPELGTLGRRQISALIGVAPLNRDSGTQRGRRSVWGGRASVRAVLYMCALAAIRSNPAIRAFYERLVAAGKLPKVAIVACMRKLLTILNAILRTKTPWTSEKAA

SEQ ID NO: 345505 - protein, 309 aa, unidentified
MEITVGIDVSKARLDVHVHPANESFAVSNDAAGLDELKARLAPIEPVRVGLEASGGHERLAVAMLAAAGLPVIVLNPAQVRHYALAIGQRAKTDPIDARLIALFLEAAKPEVRALPDAQSDELSALMARRRQLLDMLTAEKARRQQARPGRVRTSLAHIVTTLQDELRKLDRDINTTVRGTPVWRDKEDLLASVPGVRPVSARTLLAEMPELGSFTPKQVAAMAGLAPFTRQSGKWRGRSFIGGGRGTVRTALFMAALVAAHHNPVLKTFYRRLLATGKPKLVALIAVARKLIIILNAIIRDQKPWQPA

SEQ ID NO: 345506 - protein, 348 aa, unidentified
MRFYTKQHKYYCGIDLHARSMFICILDQAGKTLFHGNRKASAESFLKVIAPYREDIVVAVECIFMWYWLADLCSEEAIPFVLGHALYMKAIHGGKSKNDRIDSKKIAILLRGGTLPVSYVYPRQMRSTRDLLRRRNYLKRKRAELLTHIHNTNSQYNLPPLPKAITSRCNRQGVAEHFPDPSANKSIEVDLQLLDFYDGLLRDVELYILRTARDHNPEVLDLLQTIPGVGKILALMLLYEIHQISRFPKVQDFVSYCRLVKCPRESAGKKQGTTNKKIGNVHLKWTFSEAAVCFLIDNQRAQHYHKRLVRKHGKGKALSILAHKLGRAVYFMLKRREAFDMDIFLSAA

SEQ ID NO: 345507 - protein, 394 aa, unidentified
MKLVGIDIGKNSHHFCVMDKETGEFNVTPSSFSNNKEGFDFLINSLKPYSKKSILLGMEDTGHYHVALLKFLLSNGYTVALINPKTTDLTRKMEGGITKNDKLDTITICNVLDTPERKKQYRITKVDRFDLYEQRQLTRHHHNLKEELNIYCNRLQKSIDLVFPEFNTLFGSKYGVVYMNLLKTFGSAEAIASTDIRTIRKCFEIKGRGGRISLTPEKLKECAKNSIGISSEVETIQIKHLVSQITLIKEQIAEIDKKIEEFSITNNSPILSIPGISHFSGTSILAELGDIGNYSKPSQIIKFAGVAPYHYESSQYNAQHTGITKKGSKYLRKTLYQIILPVINNNPVFKKYYRLKISQGKGHRCAQGHCIRKLLRIIYHLLETGQSFDPALLR

SEQ ID NO: 345508 - protein, 429 aa, unidentified
MSYRIAGIDVHKKMLAVVVTDVEIDSEYQFEQRRFGSNPEQLRSLAAWLLEQEAEEVVMESTAQYWKPVWEALERCWKPICETRKGARRKSGTLHLAQALSNRGRRGRKRDFPDAERLVKRLVAQELTLSFVPDAEQRLWRTVTRKKYQLRCDRIRLQNQSESLLEEAHIKLSSLVSDLFGLSARRMLQAIAEGETNPATLAALADERLRATPEQLSDALGACSELNPVYRRLLQMALEELRLIDEQIRRLDQEMAGLLRQHQDAVQRLAEIPGLGVDSAQQIIAEVGPTAATFPSDKCLSSWVGACPGDDESAGVNHSHRSPKGNRHMRRLLNQAANAAARTKGSIFEIVYRRSVPRLGHNQAIGAIAHRQCRLIWLILHQGVRYEERGPAVTKRSKQLRTWKMIRQLRTLGYRIEPPNPQPTRAPAQ

SEQ ID NO: 345509 - protein, 342 aa, unidentified
MQISTIGLDIAKNVFQVHGIDAAEKVVVRKRLRRRQVLEFFKALPRCLIGMEACATAHYWARELTKLGHEVRLMPAKDVKAYVKRNKNDAADAEAICEAVRRPTMRFVRIKSAEQQGQLMQHRTRDVLIRQRTQIINALRAHLAELGLVAAQGNAGVNELRAIVTDEQDTRLPIDARASVIVLAAQLEALESVIGAIEKRIKMQHRSSEASQRVETIPGIGVIGATAIVATVADPTIFRSGRDFAAWIGLVPRQDSTGGKQKLGPISKQGDRYLRRILVVGAIAVLRRAQENPGKYPWLTQLLARRPFKVVAVALANKMARMAWALLAHGGTYRAPELAETA

SEQ ID NO: 345510 - protein, 426 aa, unidentified
MSQINFTNEPEFAAVVGIDWGDKKHAWSLQSVGSDQRERGEIDHTPEAVESWASMLSARFHGQPIAVALEQSRGALVFMLAKYAHLHLYPIHPRAAAQFRAALYPSGAKDDPVDGDMLLELVLHHRAHLRPLQPDTEQTRLVQHLVEARRKLVNEKTRQVQRLTDKLKLYFPQMLRWFEKVDSPLVGALLLRWPTLEELQKARSATLRSFLTQHNCRSQELIDERLKEIPQGIPAIRDAAVIQSAVAMTQILVELIATLRQGIDKLEKQIGQAARAHPDFPIFDSFPGAGPALAPRLLAAFGSLRDRYAVASDVQKFSGIAPVMERSGKSEWVHFRRACPKFLRQTFHEWAGHSIAFCEWARVYYDQQKRAGKDHHAAVRSLAFKWIRIAFRCWQDRVPYDDARYVASLHRHGSPLAAALASKNQA

SEQ ID NO: 345511 - protein, 342 aa, unidentified
MQITTIGLDIAKHVFQVHGIDAAEKVIVRKRLRRSQVLTFFKALPPCLIGMEACATAHYWARELTKLGHKVGLMPAKDVKAYVKRNKNDAADAEAICEAVRRPTMRFVQVKSAEQQGQLMQHRTRDLVMRQRTQVINALRAHLAELGIVAAKGDKGVKELLTILADEKDTRLPIDARASVIVLAAQLQALQTLIGSIEKRIKAQHRSNQASKRLETIPGIGVIGATAIAATVADPTVFRSGRDFAAWIGLVPRQNSTGGKQKLGPISKQGDRYVRRILVVGAHSVLRRAKENPEKYPWLTQLLARRPFKVVAVALANKMARMAWALLAHGGTYRAPELAAAA

SEQ ID NO: 345512 - protein, 471 aa, unidentified
MPRRQRSASKPRHAPKPAARPPRDQPVTLTIQHPHAAGIDVHCDMHMVCVPADRDPEAVRRFGANTCDLEAIADWLQQCAITTVAMESTGIYWIPLFELLEARGFEVWLVEPGQLSHCGARPKTDVLDCQWIQRLHSYGLLRPSFRPPDSIVALRCYWRQRQMQIRYAATHVQHMQKALEQMNVKLTEVLADITGVTGRRIITAILQGQRDALTLARLRDHNCKNDLASIAKALQGTWRPEHLFALRQAYELYQFHHQQIDQCDDMIQAELARLPNRAAGKAFTTKPRRCGRKANDLSFDACGPLFKALGVDLTEVEGIDVGTALVILAEIGVDVSRFPTEQHFASWLGLCPRVHESNKTQKKKGPRQGKNRVAIALRMAAQALGRTQTPLAMFYRRIKSRIGGKGAVTATAHKLACLVYRMLKFGREYVKQSLAEYEAKIRKQAERSLQRKAAALGFELVPKPLPTAVPS

SEQ ID NO: 345513 - protein, 335 aa, unidentified
MQIYGIDLAKEKFDVSFFDLTSKKVSNKPSHKVVKNNFKSIGRFLETLPSDAVLVAEHTGVYGDTLLKCCMDSNVKIAFVGGYVIHRYRATPDRAKTDVLDCALLREFGERYPDKLKYRKFPEEALYELRQLARHREMLVEQRKQLITADKSEDCRPIRSLAVKRSMDRIKEMLDTEIAETEKEMLKVINGHDSIHHNYEIVKSVNGVGLVTAVELLVKTDNFTKITTARQYAAYAGTAPYEKSSGKMDKGAHISKIGNRRSKTLLYICAESARLHNKEIKLYYERRTLIDKKPRHYVLNAIANKLLRIIFTLVEKGEYYDANFIRQDPRVVKYN

SEQ ID NO: 345514 - protein, 386 aa, unidentified
MMTMTRTTESTAPTVTSSRHLLLACELGERVWKLGFTTGMGQRPRIRQVAAGAVDRVLEEIARAKGRLKLAADAPVVSCYEAGRDGFWLHRWLVAQGVTNHVVDSSSIEVNRRARRAKTDRLDLAGLLNLLARYLLGDQRVWRVVRVPSVAEEDARQLHRTWESVQQDRSRLICRLQGLLVTQGLRLRIDADFLQRLETARLWDGAPVPAGLHQRILRVWAQLELADRQLEALEAAREALVPDRQTATGQYVAALPTLRGIGPIGAWVLATEIFGWRQIQNRRQLGALVGLVPAPYQSGETAHDQGITRAGNKHVRRLMVQLAWSWVRYQPESALTRWYQQRFGRGSKRMRRIGIVAVARKLLIALWRYVDRGEIPDGAIVKNQAA

SEQ ID NO: 345515 - protein, 387 aa, unidentified
MPQPNDLSRSRASFEQDATIVAVIEMSQSSWLIAGTVPGIERQPLKKIVPDAVALLRLLQRWRDEATRGGRCVARIAVAFEAGRDGFWLARWLMRHEIESHVIHPTSVAVSREHRRAKTDRLDTAMLMRVFLGWLRGERGHCGMVAVPSLEEEDARRPSRERENLVSERTRIVNRMKAALARLGIRGFKPELRKAAQQLESLHTPEESPIPPNTLDELRRDLARLAILRGQIIAIEQTRLERLEQAPHTGANAMIRLLASVIGVGIETADMLVREALSRGLRDRRAVARYAGLTGSPDESGTRRHEKGLAKSGNARVRRGMIQLAWRFLMFQRDSVLAQWFRARTEGVKGARKTTMIVALARKLLIALWRMVTTGEVPQGVVLRQPT

SEQ ID NO: 345516 - protein, 379 aa, unidentified
MSEIITVGLDLAKNVFQVHGADAAGRAVLRKKLRRDQVLAFFGQLPACVVAMEACGGAHFWGREIGKIGHEVRLIPPAYVKPFVKRQKNDMADAEAICEAAQRPTMRFVPVKSEETQGAAMVFRIRELLIRQRTQAINALRGHLGEFGKIVPQGAANVSKLIAIVEDPEGGLPADAIPTLKVLVATLAHLEAEISKLDTEIARCAQDNEVARRLMTVPGIGPLIATAIAVLAPPPETFRKARDFAAWLGLTPRQHSTGGKQRLGATTRMGERSLRRLLIIGANSVIIKRHVHAAARPGTWLGGMLTRKPPMLVRVALANKMARIVWALMARGGVYKAPATAACAFRGIWAVISRDLGHAFHGISGSHFAPSGRLANGCY

SEQ ID NO: 345517 - protein, 354 aa, unidentified
MMIIGCDYHPAFQQIAFVDTDTGELQERHLQHREEAEKFYRDLAAQGMKVRVGMEASGQARWFERLLAELNFELWIGDAAEIRTKRVRKQKTDRQDAQLILKLMLKDDFPRIWVPSWENRDLRQLLWHRHRMVQARTRIMNQLQAVALNEGLRCKKRLWREAGREQLEAFRLAPWASRRRRDLLELLDRLNPTITDLTRTIEQEVEKCPEAQRLMTHPGVGPLTALAFVLIIGTAERFQCGKQIASYLGLVPLEESSGNRRRLGHITKQGNALLRFLLVEAAQVSARSIPEWRNKYFHLAMRRGRKIAKVAMARRLAVQMFWMWRKGWDYEQVRKFGSHAGQPGNRDGVQSNTE

SEQ ID NO: 345518 - protein, 343 aa, unidentified
MIVVSAFIGPGWLPEHKGSLHKAGSTKMTKISMTAGIDTSKATLDIAIHGRRDCWQVENTVSGWRRLAAGFAKQGITRVGIEATGGYERGVVGYLRATGLPVVVLQPIQVRAYARQHLRRAKNDRLDAALIAACAAEVDPPEIAPDARLEPLAQHLTFVEQIEEDLARLKVRLEHVDDPRLRRIVMADVARLKARRATELTRIASLLRAHDDLARRLALVLSVPGIGERTALAIIIRMPELGRVSREQAAALAGLAPFDQDSGNHKGQRHIAGGRKRLRRSLFAAALPAAFRWNKALVELYRRLILRGKAHNAALTACARKLLIYANTVVQRGSPWINSPMPT

SEQ ID NO: 345519 - protein, 396 aa, unidentified
MVTIGIDIGGRTHVAARCRDGQARADREILRVSQSRAGFTGLDAWLERQAEPVSLVTMESSGHYWMPLASHLRRRDVPVAVVNPLAAKYFARSRLARTKSDPADARSLAEMGMRDTPPARDPLAGVELRQAARFAMTLVTEQAKVCQRLVRLVELGFPELGELFEDPTCRTAREVLRVAPTARAATRRRTATLANANAGPGRRRLGVARAERLQAAAADSIAVPELDTEVAFEVGLLLDQYDLLDRQIADADARVAELLDGEIARRLQTIPGVGPSIAATLLAEIGDIDRFTDFDQLLAFAGVHPAERSSGRKGSNPETAWHMSKAGNSHLRAAAYRMAVVGVQHNPVITAYYARKRAAGKSKMNALGHCMRKALSLVWGVWRNGQDFDPNWGLDT

SEQ ID NO: 345520 - protein, 419 aa, unidentified
MKSIELYIGLDVHKDSTTIAIAEPGPKGEIRLFGTVSSDIDRLEKALRRIGKAHPNAQLQVAYEAGPCGFVVARRLKQLGLPCLVAAPSLIPKQPGSPFKTDQRDARTLARLLRAGELTGVYVPEPTDEAIRDLCRARTDAVDDMRRSRLRLKSFLLRHGYRYQGKANWSQPHMRYLRELVLPHPAMKAILEEYLQGIDAAHQRVQRIEASMLNLLDTWRLKPAVQALMAFRGFQLVAAMVTVSELGDIHRFEHPRQLMTYLGLVPTESSSGPRQRLGAISRCGNGHQRWILTECAEHYLLPPKISKELSRRQEGQPPAVRDLSWKAQNRLHLRFLRLLGRRLPRHKAKVAIARELCGFIWALLRTQSCYTQPVGKPPSPGLPLAPVPAPQIPAGTATALHLQRLNRMANERRLRRNER

SEQ ID NO: 345521 - protein, 396 aa, unidentified
MSLYFVGIDISKYKHDCCIISATDQKVISKFSIKNDKVGFEELITTFNSLSSPEDIRIGFESTAHYALNLELFLENAHHSFMEVNPVLIKEYKKSTTLRRTKTDSVDCESIARWLMTVEYKPHSKGFYHAYSLKSLTRLRDRLIRQRSFYLVKITNVLDHTFPEFKPFFNERLSKTALYLLENYGSAEKMARMNSVSYEKLRSISRGKFSPQQFIALKELASNTVGVNNSIFDVELNSLLTLYKTLVTEINTLEKEINLLIEEVHPHYLSVPGIGPISAAIIYSEYGDISNFDNPGQMLAFAGIEPGINESGTESHGGRMVKRGSSQLRYALINCCLPLIRFDMTFATYYAKKRAEGKPHRVAITHVAKKLIRVIYALERQDTDSAFRSFVNTYFS

SEQ ID NO: 345522 - protein, 343 aa, unidentified
MAEYVALDVSLQSTSVHIVDERGRCLWRGKCPTDIGALSSTIRQHAPEVERVGLETGMLATWLCHGLAKAGLPVVCMDARQAKAALSCRVNKTDANDAEGLAQLLRTGFFREVRVKSKATMLVRTLVSARRQLVRTELDLANQIRGLLKIFGLLLPRGGGRVFEAAVRERLADNRQLATVILPLLQAWRAVREQVLALDRIAYAVAKRDARCRLLLTAPGVGTITALAYVAAVERPEEFKNGRAVSAWVGLTPARYQSGQIDVLGRISRQGDVHLRTYLYEAANTVLTRSRADSALKRWGLGLKARLGHKKAVVAVARKLAVVLHAMWAKGEPFETDAVAAAA

SEQ ID NO: 345523 - protein, 331 aa, unidentified
MTNATREAAADARPVDYIGIDMAKARFEWGVHGAHLTHSATNDAAGFEVLLADLRERRVGLIVIEATGGLEHALANLLLQLGLPVAVVNPRAAREFARSMGHLAKTDAIDALALAHFAHTLAHKANQAGVRLAPAPAHLESLQVMVLRRKQLTDMRTAELNRRGGAMRVLRASIDAVVKTLNEQIDSLDKDIGAHLDEHFKELDQHFESIKGVGPNTCAAVIAFMPELGQISNARAAKLAGLAPLNNDSGNSRGKRSIWGGRKLVRCALYMATLSAVRFNPVIKIFYQRLLAAGKPKKAAMTACSHKLLRILNAMARSGQAWNQELHGLTA

SEQ ID NO: 345524 - protein, 318 aa, unidentified
MDKHAEPDRYVGIDVGKDRIEVHIRPDGISFGCATDAQGLAYLVSRLKPLPPKVVALEATGGYEAVIAAALSSAELPVAIVNPRQTRQFAGALGQRAKSDPIDAGVIAHFAEMMKLEPKPPAEPQLTELRALLSRRSQLVEMATAEKQRAARAENPLTRRSCEKILRQLEAETGRVERAIGKVIDASPVFQGKETLLKTIPGVGDVVSRTFIAELPELGLVDRHEIAALVGVAPYTQESGRWRGKRQIKGGRPQIRAALYMACLSVIQYNKPLSAFYHRLLKRGKCKKLALVAVMRRLVVIANAMLKAGTSWSEAAPG

SEQ ID NO: 345525 - protein, 410 aa, unidentified
MEVVHAHCAGLDIHKDTVVACVRHMTDGKVTTAIKTFDTTTRELLALSDWLSAENATHIAMEATGVYWKPVWNILSDGEFELVLGNAAHIKNVPGRKTDVKDAAWLADLMAHGLISGSFVPDQTTQEMRDLLRTRKQLVRERTSHTQRIQKTLECANIKLDSVVSNVVGVSGRRMLEALIAGRTDPKELAAMAHGRLQATPAELEAALRGRVTAHHRFMLRLHLDQIDSFDEAIARIDKEVKDNDKNFRAAVELLKSVPGVGSLAAEVIVSEIGIEMNRFATAGNLVSWAGLCPKNDESAGKRRSNRLKAGAPWLKTTLVQCAWAAARSKGTYLHAQYVRIRARRGNQKAICAVAASILTTVYHMLKDGTFYEDPGPDYFDKRNKDQQANKLVNRLQNLGSNVTIQPAAA

SEQ ID NO: 345526 - protein, 344 aa, unidentified
MTHNPLQETSSQSTPRLFAGIDVGSEELVLLVRKNGKPLDPQKYANTRADHARMVKKLGKLPGVIVCMEATGAYHFDLAIALHDAGIKVMVVNPKVSHNFAKVLMKNSKTDAVDADTLAVYAERMDFVAWARPADEKIALRCFSRRIAALTRQKAAAKNQLHALGATAETPEGVMRDVKLAIAQLEKRIDSLTVLALALIGKHPELARVLQLLVGIKGIAEASAIALMGELLLLPPGLSHREWVKFAGLDPKAFESGKSVHKKTRLSKAGNSHVRAALYMPAMSAIQHDRHVKAYFQHLTEMGKLPLQGYCAVMRKLLHAIHGMLKHDKPFDNTRFYAIPISVG

SEQ ID NO: 345527 - protein, 315 aa, unidentified
MTSTQVFVGVDISKAQLDLALRPEGQFSVPNNEAGFAQVLEHLNAVHPTLVVLEATGGLELPLTGVLAAAGVPVVVVNPRQVRDFAKATGRLAKTDALDAQMLAHFAEVMRPEPRPLPDEQTQALAAILARRRQLVEMLTAEKNRLGTAGKPVRKSLRTHIAWLERELSHTDRGLAQTIRESPVWREKEALLRSTPGVGPVVTTTLLATLPELGTLTGKQIAALVGVAPLNRDSGTWRGKRTVWAGRAQIRAVLYMAALVAARCNPVIRACYQRLRAAGKAKKVVLTACMRKLLIVLNAMLKHRTPWRAELVQCA

SEQ ID NO: 345528 - protein, 353 aa, unidentified
MWRQTMRQETMVYVGLDIHKEFCQACVMNKSGKVLSNEKFLSNQESLDKFLDRFDKAKFVLESTGIWEFIYEGIEKRGFEAVLAHPLKVRAIAEARVKTDKVDAQTLAHLLRADLIPRSWVPSKDIRDLRQLVRQRSYLVRQSTSLKNRIHAELLRRGMRKPDDLGKTFTKKGIVWMRSLRIPTVDSCLSCLENVQEQIEVINEKLLAEFNRRPEAQIIATIPGIGFYGALLIHAEIDDIHRFSHPEKLCSYAGLVPTVSQSASSVRYGGVSKEGSAYLRWILTESAHVHIRYNPDSCLSKFYARVERRRGKRKAIIATARKMLHIIYWMLLNEEQYHGHGLNPGSQTCMRNA

SEQ ID NO: 345529 - protein, 305 aa, unidentified
MRPDGRHRTKKFANTTKGHDELVSWLKGHKIDHAHICIEATGTYMEPVAECLYDAGYIVSVINPALGKAFSQSEGLRNKTDTVDARMLAEFCRQKRPAAWEAPHPLERALRALVVRHQALTDMHTQELNRTETAREVQRPSIDAHLLWLEAELKRLEKQIKDLTDDDPDMKHRRKLLESIPGIGEKTSAVLLAYIGLKDRFAHARQFAAFAGLTPRRYESGSSVRGASRMSKAGHVSLRRALYMPAMVATSKTEWGRAFRDRLAANGKKGKVILGAMMRKLAQVAYGVLKSGVPFDASRHNPVAA

SEQ ID NO: 345530 - protein, 319 aa, unidentified
MKIYVGIDIAKLNHFAAAISSDGEIIIEPFKFTNDADGFQLLVSKLESFDKNSLIIGLESTAHYGDNLVRYLVTELYQVCVLNPIKTCQMRKNNVRKTKTDKVDTYVIAKTLMMQDNLRFVSFFDLDMMDLKALGRFRQKTIKQRTRLKIQLTTYVDQVFPEIQYFFKSGLHQHAVYALLKEAPSPKEIASMHMTHLANLLKVNSHGHFTKEQAKELRVLAQKSVGANDSAISIQITQTIQQIELLDSQLEKIEAEMTDIMKFNDSVIMTIPGIGYINGGMILGEIGDIHRFSNPNKLLAFAGLDPSVYQSGKVYRCCV

SEQ ID NO: 345531 - protein, 341 aa, unidentified
MQITTIGLDIAKNVFQVHGIDAAEKVVVRKQLRRGQVMKFFEALSPCLIGMEACATAHYWARELRKLGHQVRLMPAKDVKAYVKRNKNDAADAEAICEAVRRPTMRFVEVKSAEQQGRLMQHRTRDLLLRQRTQAINALRAHLAELGIVAAQGREGLKNLLTIIADEKDERLPIDARASLIVLATQLQALQMMIGSIEKRIIAQHRASEESRRVATVPGIGTLGASAITATVTDPSAFRSGRDFAAWIGLVPRQDSTGGKQRLGPISKQGDRYLRRLLVVGAHSVLRRAKQNPEKYPWLAQLLARRPFKVVAVALANKMARVAWALLAKGGTYRAPVLAAA

SEQ ID NO: 345532 - protein, 359 aa, unidentified
MAKARSLVGLDVHATKVVAAVLDVETGELVFFSMSADIAGVAGFCAGLPGPVRAAYEAGPTGYGLARELAGRGVGCVVAAPSKIPRGSGERVKTDRRDAELLVRLLLAGKLHPVRVPGREEEALRDLVRAREAVRVDLMRCRHRLSKLLLRHGIRFEDGDAWTTRHRQWLSTITLSQPAAQATLLDARGAVDALVHRREQLEREIVALLPGSPWSAQTGRLRCMRGLDTLSAVGLCAEVGDFASFRKPAQLMSYVGLVPSETSSGQQRRLGSITKTGSTHARRLLVEAAWHHRKRPRIGTTLTERQAGQPPEAIAIAWSAQRRLHRTWTRLEQRNKRRTLIAVAVARELAGFCWAICQL

SEQ ID NO: 345533 - protein, 416 aa, unidentified
MNDLIRIGMDTSKSVFVVHGVDAAERPVLRKKLRRRQVIEFFAKLPPTQVGMEACGGAHHWARELGILGHEVKLLPAQRVKPYVARNKNDTADAEGVCEAMSRPRMRFVPVKTSEQQAALMLAGMRDRLVARRTQLSNAIRGYAAEFGLVAAKGLDKVEPLLARIAADATLPALARELFAVLGEEYAQLKPKLGKIEAQLMAWHRQNELSQRLAEIPSVGPTGAALMVMKVTDPQAFRSGRDFAAWLGLTPKDHSTAGKLRLGVITRAGDETLRRVLVLGATAVIQQVRRGRGRPSPWLVALLKRKPPKLAAVALANKTARIAWKLMVSGERYRGALATGAGHDNACCEGASSQPRKARAVLAAIKARPGGAATRRTESATAGLDGGCARRATTIAVGTKKRSAVEQRNESHGHSV

SEQ ID NO: 345534 - protein, 412 aa, unidentified
MADIAAYIGLDWGDERHSVHLQMADGTLEHVELEQKPDVLHAWVTQLKERFAGGQVAIAIEQRKGAVVNALMLYDFLVLYPINPKALARYREAFRTSRAKDDPADSQLLLDLVVRHRDHLRAWIPDTTEARKLQLLCEQRRKLVNHRVALTNRLTSLLKQYFPQALEWVGDLASLQGCDFLAQWPNLDAVQSARPSAVRKFYQAHNCRMASVIDARLAAIKIAQPLTIDPAIVEPLSLSVQTYATQVHGLIRAIQAFDVRIAHVFADHADHDVFASFPGAGDVCAPRLAAAFGTDRSRWDSAAELQSYSGIGPVTERSGKTLWVHHRLACPKFVKQTFHEFADQSIRFSRWARAYYDQQRRRGNDHHAALRALAYKWIRILFRCWKDRTPYNEGRYIDALCRRGSPLVKHFA

SEQ ID NO: 345535 - protein, 352 aa, unidentified
METAYDGRQIVGMDLHRRRSVLVRMTEDGRRLGMARITSSPQELQAQIARAGTSPKVVLEATFGWYWAADTLTAAGAEVHLAHPLGVKAFTYRRVKNDERDAADLADLLRMGRLPEAWIAPAGVRELRELTRYRHKLVHLRTSCKDQVHGVLAKRGVPVTCTGIFGTAGSAWLDGLGLPQPYGGKVTSLRHLTGELTGEITTLSAVIADLLAQHRGYQVIQQLPGIGPVLAAVIIAEIGDVTRFKTAAQLCSWAGLTPRHRESDTKVTRGHVTKQGSRLLRWAVIEAVQRIPRDSVIGSVKDAIIARRGKEAKNIAKVAAARRLLTLVFYGLRDGQIRCLSQAPAGPPGPVA

SEQ ID NO: 345536 - protein, 437 aa, unidentified
MSEKKSVEIRVSVDVGYRRHSVAIGLPSGEVLEEFEIAHRPEGFAEFFSRIEKHQKVRDCEVAVAMEGFNGCARPLDAMVRRRGYRLYNINNLKLARFKEIFPGAAKSDRIDARKGLELFQLSDHLPLAKEVLQEVKGTPRENEVLKRLTRRRRRLVDERVRVISNLQTDMQAVCAGLLEITKNAGNQWFLNFLVSAPTLSQLARLRPATLRKIPAVGRKYAGLIEDWQKRAHFSEEVEWVGEMIQEDAQRCLELDEKIKALRAKIKEVAKDSKIAKTLLSIPGFGTICTAELAGEIGTIERFSKEGSLALYIGMSTLDNSSGKYQGSKQPKHVNTRAKAAMMVALDRHRKYVPESQRYYEKKRSEGKKHNQAIRALGRHLCRIIYKLLKEEREYEIRPEKGNTKTKVSPRSLIKRQIRKPKISDKGKNNKIYHQGA

SEQ ID NO: 345537 - protein, 378 aa, unidentified
MENTTKYVGLDVSKEKIAVAIADEGREAPRFYGTIDHHPDAVRRLIRKLSEKGVTLEVCYEAGPTGYDLYRWITGMKINCIVIAPSSMPKRPGDHVKTDRRDAERLAQLHRSGELTAVFVPTQDTEALRDLIRARDAAKEDLHRARQRLIHFLLRHHIHPPLTIKRRWTQAYRAWLGALSFDRGGEQSVYQEYLQMTREAEERIRRLEAVLVEQVKDCVHAPVIKALQGLRGLALLTAVTIVAEIGSFVRFRSPAQLMAYLGLVPREYSSGATTRRGSLTKAGNGQVRRALTEAAWSYRHRPAVKGDLAVRLDGQSAHVQNTSWKAQNRLHKKYMSLVRRGKHKNLAIAAVGRELVGFIWAIAVSIEQEQAERTALSA

SEQ ID NO: 345538 - protein, 433 aa, unidentified
MSTFLQRVPVDCIVAVDVAKTKFVAALASAAGETLKLVKFEHPRQTAAFVGSLQALQRAERRPVVVMEPTGTYGDALRYQCHVLGMPVHMMPPKHSHDFAEVLDAVPSMHDPKAAAVLAKLQAIKPARAWEPQTDTRRDLRAWVDQRHPIARILAIYHGHLEAMLARHWPELEVHVDVYDQRSCFALLKEFPGPQAVTAAEQAAARTLRKASRGQFGHARVQAIVDSAKSTTGVPMTVGEQERLRVIAEQIELHARRLDAVDAKLTDLVGLDEVLRRMATVVGPACAAAIGALVGTPLDFTSPRALEKAIGLNLKEKSSGNTKGPMSITKRGPGQVRRLLFMAALRLMKDDATAMAWCRARKGYKADQKLKAVVALMRKLTRALWHVARGEPFDPTKLFDTRRLDLPHRLHTAAPASPSAQTREPDQGGAAIA

SEQ ID NO: 345539 - protein, 363 aa, unidentified
MNTTTKTGSTTASTTTILAIDLGKYKSVACVYDEAGGEFRFTTFDTTRSEMHRLLTRERPAVVIIEACLLAGWVHDLCAELGIRCLVANTASEAWKFKHLKRKTDRDDAQRLAQLYLLDQLPTVTLPPAAVRQWRSLIACRQVLVGRRIAVQNRIRALFVAQGLPAPRGARAWAATGLAGLASWAKPLADCAADELWRGLLELSLTEYRQLCDLIDRTEARLDALGKQHADVALLQTVPGLGPRTAETVAAYLQDAPRFRTGKQVSAYGGLVPRQHQSGAMGRRGRITKRGPALLRRMLVECAWCMVRYNAWARGLYLRLTGGGQRRKKQAIVALARKILVRCWAMLRDGTHWKEPVTADATA

SEQ ID NO: 345540 - protein, 346 aa, unidentified
MEKLIRIGIDTSKSVFQVHGVDAAEEAVLKKKLRRREFVAFMARLEPSVIALEACGGSHYWARGLSALGHTAKLIAPQHVKPYVPRGKNDTADAAGLCEALSRPSMRFVPVKSPDEQAALMLVGVRHRLIGNRTQLTNTIRSYAAEFGLVAAKGLGKIEPLLERVLADQTVPSLARALFESLGREYAGLQKELKEVDAKLMAWHRQNECSRRLAEVPSLGPIGASMLTMKTPDPKAFRSGRYFAAWIGLTAKDHSSGGKLKLGAITRAGDPALRAVLVSGATAVIRQAMSGKGKPSPWLQALLKRKPPKLAAVALANKTARIARKLMATGEHYDPTRILQTAAQPA

SEQ ID NO: 345541 - protein, 338 aa, unidentified
MNTPHIIGIDLGKNSFHLVGHDQSGQRLFKKKLTRQKLLEFLAFHEPVIIAMESCGGSHWLARKCSEFGHTAKLIPPQYVKPYVKTNKNDFIDADAIAEAASRPTMRFSSPKTESAQVISTIQKIRNGYIRERTACMNRIGSILLEFGISLPKGHFIMKGLFQWLADKNQHLPPLIVFELTELHEHYLNLNERIASQANKVERILADNEQVKQLQSIPGIGPVVASACVSSVSEPSDFKNGRNFAAWIGLVPLQHSTGGKTILLGISKRGNKELRTLFIHGARSILWRDKSAEKYFGSWLINLKKRKPFNVAVVALANKIARIAWAVLVNKKSFEIRI

SEQ ID NO: 345542 - protein, 420 aa, unidentified
MKDHQRKLYVGIDVHSREHKAAVLPIALLEQPGAAWRKVKPLGIKNNIADFERLDTTIRSHISSAEEVAIAIDYTGGHYSEPIVYFLQAKGYTVYHLEAKAIKAARERFLDEESKSDVIDSTSAAYMLYLRDVHGLSFRISAMTPELGSKAAALNSLVLQRWQFNKLATQATNRLHQFLLAVFPEGEAHYFNKLLKVTPYYPTPKDILDSNGLERIEKLSQKDKKNMLELAANSTGIPGDIYQGLIKDLSIQRVESLAKRDTLTAILRSEVAAHPYGDILLSFPSLGEIAAATIIGIIKNIERWPDKKKFKKALGVYSSLTQSGGSSGQTRQGREGSRHGRRVLFQVCFGCIRTNVQDNDFKDYYLRQVARGKPKIKALVSTMGKLAEIIYHCLKAREPYHYRGKYKTRISFHDKKPELE

SEQ ID NO: 345543 - protein, 316 aa, unidentified
MQTVHDWGADVDSRTFVVACATHSVAPQRIANERRAILAWLRTVPAGSRLGLEATGAYHELLADLAHRVGLQVFVLNARDVRRYAQGLGRRGKTDRVDAEVIARYVAHEHTELHAYLPPSKEQRALARLIKRRAKLVTIKGMLTQSLRGVPGTHTELQQVITRLERLIGHLERLMQRALEQLPAAHQTARHCRTIPGVGPLGSTCLGYTLTRLPYATSDAVIAHTGFDPRPADSGQKHGRRRLCKRGPGELRRVLFNCGMAAAKTPLWRPYYQAQRAKGLSSTAAIVILSRKLVRVAFALYQHNQPFDPARVRVQT

SEQ ID NO: 345544 - protein, 593 aa, unidentified
MSPPVAPALQCIGVGIDTARYWHHATFFLEDLQPARAAFEFPENRAGYDQLRQAFAGLAQRHAGVHFCIRLDAAGQYAVNLEAFLRSLPWPMTLSVGEPKRNQRYREAISPKRKADPVDSACAARFALRERPAATATLPAAMHQLREVASRLAAQIRHSTRLVNQLHNLLARVFPELDMIVAHLPVQWVLELLNRYPTPARLARARLATLQAIPYADPDKVRQLHQAARTSIGTFDGDTAALLVRNLVQQLRAAQAATAELEKRLSADYQALPQPNHLHTIKGFGQATAAVLTAKIASIDRFATPGQLVGYFGVFPEEHASGADKHGQPHPRRQRMSRQGNDLVRKYLWMAAQTALLHNPPVRALYRRLRARGTRGDVALGHCMRKLLHLAFAVWKSGQPFDPNHYPWEPTKPAADTPTNSMPIAADQLPESAANKTAAGHNQGTGPEKQVVTAATSTVNLPAPSVKHSITLAPSSATPRQGLVDFAALRQKVRLAQALEHLGLLRDLKGSGPQRRGRCPVHQGPGTTGRSFSVQLDKNVFHCFHPPCGIKGNVLDLWAAVHRLPLVDAARHLAHTFRLDLDATTLRTEKRNP

SEQ ID NO: 345545 - protein, 395 aa, unidentified
MFIVGIDVAKRSHEVCMITSDGQTVQRPFSIRNNCTGYNLMLEKIRKHTNIKSQIVFAMESTAHYWLALFTRLRKDGYHVILLNPIQTSAMRDMFIRKIKTDAKDSFIIAELIRFGRYAESNVAQDRLLALKELCRNRFYLVDMAGDLKRKLIALIDRVFPEYEVQFDTIFCKSSVALLKKYPTPQKLSNAHLDKLTELLWNSSNGHFGEWKARELRELARNSFGVEDCDGAYSTLILLMLDQIQSLSGKADALEKEISRLFQSFDTTVTTIPGVGPIIGAVILSEVGDISRFSSADKLAAYIGVDPSVNQSGEFQAAHAHMSKRGSPYLRRCIWMASQVAVQRDPMFRAYYEKKAAEGLKYMTIIGHVTRKMTAVIFAILRDHKVYEPVLPTAA

SEQ ID NO: 345546 - protein, 312 aa, unidentified
MTSEKFVGIDVSKRWLEVNEYGEETTWKVNNDAIGFVSLIERMKAIQGVLIVFEATGGYEAQAAHALGAAGFAVAVVNPTRVRRFAEALGVLAKTDKIDARVIAHFASVVKPAANTLQTPLQEQLAAFVERRRQLLVELVAEKNRLSTCPACVRDEIQEHIVWIEEHVDHLEAEIQICISQNPEWQKRAEIIDSAPGVGPVTAATMVAELPELGQLNRQGIAALVGVAPFSNDSGPRKGKRRIFGGRSGVRRTLFMATLSASKHNPIIQAFYDSLIKRGKEKMVALTACMRKLLVIINAMVKKGQAWQDSPA

SEQ ID NO: 345547 - protein, 323 aa, unidentified
MSPRLHGKLTAEIIVAKAVLQITLGIDVAKDELVIHCWESGDYTSLSNQPEAVRSWLRSLNGPVRLAIEPTSNYHFEVVDQAYQLGHAVYLVNPRQLVHYRESVNLRHKSDPDDAWLLARFLDKEAGELRRFAPQSRQAQALWALIKRRATVVEARKQLQQSLRELQLAHQGLMTQFQRLIARIDQRIKSLIGQLGWQQDYRRCLSVPGLGPVNAAALVCAFNRGSFAGADAFVAYLGLDIRRRESGRFKGKRKLTKRGEAELRRLLYCAAKPARSHQRFDDYHRAQLDKGHSKIAANVILARKLARIAFTLMNRKQSFKKQL

SEQ ID NO: 345548 - protein, 342 aa, unidentified
MQITTIGLDIAKNVFQVHGIDATEKVVVRKQLRRGQVLAFFKALAPCLIGMEACATAHYWARELTKLGHEVRLMPAKDVKAYVKRNKNDAADAEAICEAVRRPTMRFVRIKSAEQQGQLMQHRTRDVLIRQRTQIINALRAHLAELGLVAAQGNAGVNELRAIVTDEQDTRLPIDARASVIVLAAQLEALESVIGAIEKRIKMQHRSSEASQRVEAIPGIGVIGASAIVATVADPTIFRSGRDFAAWIGLVPRQDSTGGKQKLGPISKQGDRYLRRILVVGAIAVLRRAQENPGKYPWLTQLLARRPFKVVAVALANKMARMAWALLAHGGTYRAPELAETA

SEQ ID NO: 345549 - protein, 412 aa, unidentified
MQRVIGMDIHRTFAEVVFWEAGRLRPVGRIDMTRSGLEGFGRSLSKEDEVVVEATGNTMAVVRVLSRYVARVIVANPLQVKAIAHAHVKTDKIDAGVLASLRAAGFLPEVWLPDAETELRRRLVARRNQVVRHRTQIKNGVHSILQAHLIPPCPHADLFGRLGRNWLGRQELPADERAAIDRHLRELDRLGEDLAVLDREISERMIEDPSVKRLLTITGVNIHVAAGLVAAIGDVRRFSSPQKLVSYVGLNPRVRQSGLGLAQHGRISKRGRSHARAMLVEAAWAAAKAPGPLRSFFLRIRTRRGHQIAAVAVARKLAVLCWHLLSKDADYQWARPALVASKIRAMQLQAGQPARKGNKRGAAYAYNVKELRDREIDVARHVNMPTNSSSADGSRVVLKNGARVPPMSLSGR

SEQ ID NO: 345550 - protein, 401 aa, unidentified
MSKKNTRNALDTSLSYAVIGLDLAKADCAVAAVPCSDDELGLIDRMDYESLFEQAEKLKPTLFAMEPCCGYSQISLRLQNMGHEVKVISGHAVKNWIATHKSNQKTDLNDATALAKLALYDHDLQPIRVKNVEECRIASVQAIRIQLRTQATKSLVCFKSLCQCWGIVIRRGSLNTKKMAEAVAAVEKLLGAEVASSLMILRDAYKFTMKQINALDKLLDELVEANEQARTMKTVLGIGTQTAARLAVTTGDIKRFPMPRSYVAYFGLAPRNIITGHSGTPSPSKRGALKPVSSRGQGKVSRRGDRVARSFIIQGAATIYMLYCKDMLPECQLRRWLHEQIKRGKPYGKIIVSLAAKLLRIVWALLTYGEKFDSHKAGVPRSVLAAMEKPLKHDAAAESAA

SEQ ID NO: 345551 - protein, 377 aa, unidentified
MGWTGRAPAPNGSQSAPGACQERSTTMPRTTTLHAVTAIGIDMGKNTLHLIGLDARGAIVLREKVARGRIALRLANLPPCLIGIEAGMATHYVARELAALGHNVKQVPATYAKPFRQGHKNDFRDAHAVAEAVQRPTTRFVPAKTNEQLDLQALHRVRSRLVSERTAVINQIRGFLLERGIVVRQGLRFLRQQLPDILAKRADVLSPRMVRIVAELAGDWRRLDERIETVTDEIEALAKSDDSCRRVMTVPGIGPIISSAMVAAIGNGAAFARGRDFSAWLGLVPKQMSTGDRTILGRISKRGNGYLRTLFMQAARVILLRSANWPKHGFGLWLVRAAQRLHPNVLAAALANKLARIAWTVLAQERSYEARVTKAAA

SEQ ID NO: 345552 - protein, 398 aa, unidentified
MLLDHPTAGPTAIRTQFCAIFISLELSRSTWVVTSLSPGSGEKMSRRSLKAGDLGGLLALFAELRRRAEEQTGSDYPVVTIQEAGLDGFWLHRALQKEGIESHVVDAASIATPRRRRRAKTDKLDGEALLRALLAFKRGEPRVCAMVVAPSREEEDRRRLCRERQTLLNERVEHTNRIKGLLFAQGISDYAPLRRDRRKRLEGLRTGDGQPLPTHLKAQIGRELDRLELLLGQIKAVEEAQEAMLAAAGKLAGAQEPRQTKPEGGRSNIVAMLLAVKGIGTQAAAVLWSEGLSRSFANRRQVAAYAGLAATPWRSGALVHEQGLSKAGNPRLRTLMVQLAWLWLRHQPRSELAKWFKARGARGRKGSIVALARKLLVALWKYVTHGVVIEGAVMERGA

SEQ ID NO: 345553 - protein, 419 aa, unidentified
MNTWTELTHFAGLDWAGDHHDVAVVDQQGQVVAEFGFEHSAAGWTEFRQKMGAYPAWGIALETRSGAAVEELLQSDGTVFPVQPKAAARYRERTAPSGVKDDQRDAWAMADALRVDGQHWRALAPEDPLIQELRLLCRDEVALIEQRTALVNQLRAALREYYDAALQAFDNWTLPAAWALVGQFPTPEVLSKAGKRAWEKFLHVHKLWRPATVEKRLELFAHAADWKRNEAVTRAKSRLAVSLAKMLQTLERQLGDYRAAIEALFAKHPDHDLFGSLPGAGSKLVPRLMSELGEDRARFASAQALQCLAGTAPVSFQSGQIFRVKMRRCCNAHLRHAVHRWADCRRAVCGWAQAYYQAQREKGKSRACALRCLGHRWLEVLWKMWQDRTVYDGELHARNQQKHGSWVFPILTQPAAKPG

SEQ ID NO: 345554 - protein, 342 aa, unidentified
MQHTTIAVDVAKSVFEIGMSHRPGHVDKHYRVSRNQLSIFFANQPPATVVMEACSSSHYWARQFMRFGHDVKLLPPFYVRPYVQRSKTDRTDVKGMLEAWRNSEIRPVPIKTEAQQQLIALHRVRSTWIATRTARINTTRGILREFGIVVADGASRVPARVTELIEDAGTELPMGVRDLLNELVVEIRQLTSRIENIERQLAAMAGETPVVERLRSIPGIGLLTATALVAFVGNVERFPSSRHFACYLGLTPREHSSGLRRQLGHISKRGDAYLRMLLTHGARSVLWAAKSKAKPDKFSTWAVDIHGRRGHNKASIAVANKMARIVWAVWKHGNSFGIRSHG

SEQ ID NO: 345555 - protein, 358 aa, unidentified
MKIIGCDFHPSFQQIAMVDTETGEIVERRLMHAGGEAQRFYESLRGPVLVGIESSGNTLWLERLLVKLEHKLLIGDAAAIRATVPRKQKSDKRDAKHLLRLLLENRFPAIWVPSLQERDLRQLLKHRHTLVQIRTRAKNQLQHIALNQGLQKKYKLWTKEGLKQLQALELEPWTQRRRDDLLKIVSEMDAHIARLTAAVEAEARQRPDAELLMSHPGVGPILALATVVTLGDVERFRRGKQVASYLGLIPREDSSGERRRLGSITKQGNSFMRFLLVQAGMSAARGDAELGRAYKRLVHRKHHGVAKVAVARKLVVRLYWMLRSKKQYPEVVRMQGSSSHSVAQATADRLSGRPASQP

SEQ ID NO: 345556 - protein, 314 aa, unidentified
MNENPEIFVGIDISKDTLDIGFQPPGHTGELPHDEQGISEATRRLREAEPRLVVLEATGGLETELAASLMAAGVAVVVVNPRQVRDYAKATGQLAKTDRIDALVLADFARAIRPELRPMKDALTRELDDLVTRRRQLVEMRVQESLRLGRASKVQQKSLKSHIAWLDKRIEEIDTDLRQRLRASPAWRTKDDLLRSIPGVGATTSATLLAKLPELGTLDRKGIAALAGLAPLANDSGKQRGKRVIWGGRAEVRCVLYMSAVAAIRCNPVIHAFAQRLKAAGKPAKVVIVACMHKLLSIMNAMLKSNTPWNPKIA

SEQ ID NO: 345557 - protein, 476 aa, unidentified
MTTPVLEKNVLLAHDAGLASQCIVFEEDVVGKASRLSGADHRRNARLEGLRALVPTGNAILGIDLADVKQHAVLCDHDSRVLKRWKVDAKAWQLGVLLDRALAEAVKLGFASVTVACEPTGHRWQIVGQLARERGLAMVCIQPLAMRRAREQEDFTTGKTDAKDSVLIARLAARLHCYVPEDIDQTWGQLRHLGARRHDLVVRSGAARQQMRDLLECVWPAALAAAPKCTFDSATWLACVDVALRGGDGRPERVHSDGLGAFSAAVREALPRFGGVKLRRGIVAAMFVALADPTGVHSRRAGALQRVGWVLQDWRLTVASLTEVEQHMVDVLDELGLRELLTSIPGLSAVGAAAILAESGDLARFSHSRALVKHSGLAPRAYESGEYSGTTRVSGRGRSGLRLAAWRAIFGALPHNPVLGERYLHLTTRTDNPLSDGQARASLAASLLRWIYAVVTQATPFNAVEAGGRRQLALAA

SEQ ID NO: 345558 - protein, 410 aa, unidentified
MSVTQHDQSPRPTAGVDWARDDHAVSVVGPDGVERERFSVEHAAAGLRALVRRLLGAGVEAVGIERPDGPVVDTLLQGGLTVFVIPPGQLKNLRSRYGSAGNKDDRFDAFVLADTVRTDRARLRPLSTDSPPTVTLRMTCRARKDLVGHRVALANQLRAHLQIAFPGAVGLFRDIDSAISLRFLTRFPSQGKADWLTAKRLAAWLRSVGYCGRKHPAELHARLTAAPRGTDGPDGEARAHVTLALVTAIRTLNEQIEALEAHIAEQLTLHPDAAIFTSLPRSGTVRAARLLAEIGDCRARFPTPESLACLAGVAPSTRQSGKVKAVSFRWSADKQLRDAVTDFAGDSRHANPWAANVYNRATGHGHDHPHAVRILARAWLHVIWRCWQDRMPYDPARHRALQNLQPPAAA

SEQ ID NO: 345559 - protein, 403 aa, unidentified
MDHALLAYDVYVGFDIGKHKHHALAQRAKDQKIILNMTVRQDEAEIRGVLEELARFGRMLVAVDQKASIGQLVVSVTKAMGFDIGFLTPNDFHYFSKGYSEVKSDIKDAFVISDVAMRFTDRLSAITEDDEKKESLKAMCASRKALVEENTRDKNRIRSLLVQTHPALEAIIDRGDLDKAVYLRIFEHYGGFLGIRRAGQKRFVRFVAKQPYYKNKALELSERIFEAIRQQTVVMPGTSTKESSIKQMASAIIARNAKIAPLEDEIAVLYQSLPESDILSSIPGVGPVWGPVLLSEIGDIGQYKDGGHLAAYGGVAPSRRQSGTTLDQAKKKIKCNRRLKEALCESAWSSVSWDEWSQWYYSKKRAEGKEHKQAILALARHRTDIIYAMLKNGSMYEPKTMKH

SEQ ID NO: 345560 - protein, 336 aa, unidentified
MNYNTVYVGMDVHKESFTFCAYTIDAEKGSRFQRTEADYKNVLRYLEFLRTVYGNDANFICGYEAGCLGYTLYHQLTEHHVNCVILAPTTMLEQRSKKRIKTDKRDAEIIAKCLAQHNYSPVHIPTAADEETKEFLRMRDDHKLALKKVKQQILAFCLRHNYRYDGNSHWTAAHIKWLKSLKPEALYKEILDEYLLTYTALSDKLERLDKRIEELASKDEYKESVKKLCCFIGVKTHTALSVLVEVGDFHRFASAQNFASYLGLVPGEDSSGDGQTRLGITKAGNRHVRMLLTEASQCYARGQIGFKSKKLKSRQAGNSPQVIAYADKANERLRRR

SEQ ID NO: 345561 - protein, 357 aa, unidentified
MFYVGMDIHKRFSQVAVVDESGKVMDQRRLNHTPPEELTNYFNQFPKDTQVIMEPTCGWGWLSDGISDLGLEVILAHPLKVRLIAESQIKTDKVDAVVLAQLQRASFLPQAYLAPKEIRKLRDLFRCRCGLVRLRTILKLQIHALLDRLGIFHGFSDLFGKSGRAFLEGLELESPYRENLGRQLRVVDLLYKEIKQIEKQIQKRVSQDPQAKRLTTMPGVGSILAYLFTTEIGEITRFSSAKKLASYCGLVPSVKQSGGFVHYGHLTKTGNTLLRWGFIEAAQVAIRYNPELRIWGEKIRRKKGSGVAICAVARKLVGIVYQLLTQKRDYISRKDITQGNSWSSRPVHPLVVPPVAG

SEQ ID NO: 345562 - protein, 311 aa, unidentified
MTLPQDFIGVDISKDWIDVFHLSSARRERISTTKQALARFAKTACGALVVLEASGGYERPVTEVLAKAGVDYARVNPRQAREFARSLGKLAKTDRVDAGILARMGKALELGPTPPTDPDRQRLADLVARREVLVGMIRAEKNRAGTTRDAWLSREIALSVRVLQGHLAAVEEQIASLVETRDRLAEQARRLRSVPGIGPAVAAVLLARLPELGQLEARQIAALAGLAPHACDSGLSRGKRHIWGGRAGVRRALYLAAFIASRYDPVLKAFRTRLQDAGKPTKVALTACARKLLTILNAMMRDGKDYVKQVG

SEQ ID NO: 345563 - protein, 405 aa, unidentified
MTRLPTEEFAACIGIDWADAKHESCLQAAGSEQSECSTLDHQPDAINEWVSTLRTRFKGQPIAICLELNKGPIVSALRQHDFLVLFPVNPLTLARYREAFTPSQAKDDSTDAELQLELLLKHRDKLKPLQPQSPTMRALEQLVASRRRLVGDKVRLTNRLTSTLKNYFPQALQWFHDNDTTLFCDFLTQWPTLKAVQLARRSTLERICRDHHVRSPDVIQQRLHAIKSATPLTTDEGVITPNALLAQALVTQLRATLHAIEEFDKAIAQRAQSHPDFPFFDTLPGAGAVFAPRLLVAFGEQRDRYASAAELQKYAGIAPVTERSGHKAWVHWRLQCPTFLRQTFVEWAAESTRHSFWARAYYQQQRAKGASHQAAVRALRSNGFAFSSGVGRIARRIRSRSISTP

SEQ ID NO: 345564 - protein, 414 aa, unidentified
MDGLSPHHFAGIDWASEKHSLCVIDPAGAIRSSLSFTHTADGIADAIRQLDRLGPRAQLPIAIERPSGLLIDTFVDAGFPIVPIHPNALKATRPRYSAAAGKADPGDAYIAADILRTDGHRFRVLSGPSDHTRALRAAIRTRDDLVATRIQLANQLQALLDSFWPGPLCMFHEVASWICLKFLEEFPSPAAAAKLTEKRLQRFLTRNGYSGRRTPSELLARLHQAPTGHAPELECQVKAQLVRSLVAILRILMAQIRDGEQLIEAQLQQHPDAPIIRSFPRTGSVNAAQILAELGDNRDRFSSFDQLSAESGVCPVTFQSGKHRGVAFRFACNKRLRQAITTWADNSRHGSSWAAAVYKAARQRGCDHPHAVRILARAWLRVLWRCWTDRTLYDPQLHGRALPFLAPEPSALAA

SEQ ID NO: 345565 - protein, 399 aa, unidentified
MSKNAPLELRVGVDVGCHSHNVAIGLSSGEILDEFEVSHNPEGFHLFFSRIEKQERVYDCPVAVAMEGFNGYARPLDTLVRARNYRLFNVNNMKLARFQEIFPGAAKTDRIDARKCLELFQLRDLLPLAKDALQEVAATPVENEILKRLTRRRRRLVNERARVLNNMQGDLQAVCPGLLEATGDAGNLWFLHLLTSTDSLIKLAKLRRATLLKIAGVGAKYANTIQTWQKRAHFSHEAELVGEMIQEDAFRILELTDKINAIEAKIEDVTSRSTIAQKIITIPGFGPVAKSELAAEIGTIDRFKDESGLALYLGMAALDNSSGRQKGTKIPKHVNTRAKAVMMVAVDRHRKCVPESQNYYEKKRAEGKKHNQAVRALGRHLCRVIFKMLKQEKDYEIRK

SEQ ID NO: 345566 - protein, 346 aa, unidentified
MTIVETRAITGGVDTHADVHVAAALDPIGGLLGVQEFPATPEGYGRLLGWLGGFGTVSLVGIEGTGSYGAGLARHITWAGVRVVEVDRSDRQDRRRQGKSDPLDAVSAARAAQSGRARGASKGRDGAVEAIRTLMVVKRTARSERTQTINQARSLVLTGPDDIRVRFIHHTTAGLVAGLAGLRPRPGATVGYATRIALRELGRRAQFLGGQLASLDELIIPLLTAHAPGLLALYGVGPDTAALLLIAAGDHPERLRSEAAWAHLCGAAPIPASSGKTVRHRLNSGGDRQANHALWRIVITRMSSHPPTRAYAERRVKEGLSKTEIIRCLKRYVAREVYPHLRPPAR

SEQ ID NO: 345567 - protein, 320 aa, unidentified
MRNAVGLDISKLTFDASAMVGKTEHSAKFDNDSKGLDQFSDRLKSLGCQNLHICMEATGNYYEEVADYFAQYYSVYVVNPLKISKYAESRFKRTKTGKQDAKLIAQYCRSAQESELVKRQKPTDEQYRLLRMTAAYAQIKSECAAMKNRHYAAKDEEAAKAYAQIIKAMNEQLEVLKEKIKEQTEKPNCKEGVKRLETIPAIGRMTAAVLFHHLTSSKFETSNKFAAFAGLSPQQKESGTSVRGKGKLTKFGNRKLRAVLFMPAMVAYRIRAFPGFIKRLEEKKKPKKVIIAALMRKLAVIAYHVHKKGGDYDPSRYKSA

SEQ ID NO: 345568 - protein, 339 aa, unidentified
MQNTNNNIYRHYIALDWSKQIVAMAAMRDSGSKLDLQMLQPDPRIIKEKLKKYLGSKILTIEETTTSHWLYVEFKECVDKIIICDPYRNSLLKDGPQTDKTDAKKLCLLLRTGMLKEVYHTLEKDYEIRKLVSGYIDTVKALVRIKNQRSAIFRSLGRNHKKEKLVEDGSIKEFITQKQIELLTHYAEIIEEYEKEFKKIEKTNKTIQRLIKISGIGRKTAIMIYSTVIDANRFENKYKYWSYSGLIKQYKESGGKIYRSKLVRYSKLLKRCYKSAAIAAINGKNDIREYYEYLLHEGLSIEKARHQIARYISKVSYAVMKNKIEYRVYQWRESKNKDS

SEQ ID NO: 345569 - protein, 348 aa, unidentified
MLADRLDYVVGVDPHRDEHALAIVEVRTGGVVFEASVAASSGGYARALELADEHAPGRRAFAIEGTGSFGAGLTRFLSGEGERVLEVGRLRRERRSSGKSDALDAIRAARSVLGQKRAAEPRAGGEREALRALMAAREGAVNARRAGLCQLRDLLITTPEPFRSELRPLSRAQLLRRLAAVRPERRQDPELRGTLLALRALARRVKTLNVEERELAGEIETLARALAPQLLEQAGVGPLTAAQLVISWSHQGRIRNEAAFARLAGCAPIPASSGQTIRYRLDRGGDRRLNRALHMILVTRRRSHPATIAYIERRVQEGKSSREASRCLKRYLARNLYRLLEQGAPLAA

SEQ ID NO: 345570 - protein, 366 aa, unidentified
MQKISTMQTSGKNIFQGQLTIGVDLGDRSSAYCVLNEAGEIVLEHKLATTPEAMKQVFGSMPRCRIAMETGTHSPWVSRLLTALGHEVIVGHAQKVRLITKSRRKDDRLDARTLARLARIDPELLSPVKHRSAQAQLHLAEIRARAVLVSARTALVNAVRGLVKSYGERLRKCGTQQFRRETISGLSAGLREALEPLLREVESLSERIQEYDRRIEKMAKQTYPETALLKQVKGVGDLIATAYVLTIEDAHRFRKSRDAGCFVGLQPGRRDSGDSEPQMRISKEGDEYLRTLLVQGAHYILGPFGEDSDLRRWGQKLSARGGKNAKKRAVVAVARKLAVLLHRLWVSGEVYEPLRNSQKKVVRTAA

SEQ ID NO: 345571 - protein, 365 aa, unidentified
MRILALDLGKFKTVACEYEAESGRHRFATVLTTPKALHDLMVDREPQRVVIEICSIAGWVGDLVRSLGIELQVANTADERWQWRKVKQKNDRRDALKAAQLSAVNQLCPVHVPELQMRQWRALIAYRSKLVQRRTKIKNHIRDLLLREGQLLPRGRTAWTQAGMATLATMAQPLAVLDSEQLWRGELGLELAQLTELQQQIMTVHAKLDEMGAADARVQLLRTIPGVGPRLAEAIVTMFDDVTRFRTAGQVGAYIGMVPKQFDSGETERSGRITRQGNRLVRSLLVEIAWAALRHNPWARQTFQRISGGKKSRRKIAIVAVGRKLLVKCWGMLRHQTPWRVSVPRADPGPRAGSPRGVVVATGSM

SEQ ID NO: 345572 - protein, 374 aa, unidentified
MSVYVGIDVHRKRSQVAVVAEDGKVQLNRNVVNGVEPVLKLLGGLPAGTPVAFEAAFGWGWLVQLLEDYGFEAHLVHPLRCKAIASARLKNDKVDAAILAQLLRAGLLPEAWIAPPQVRQLRALLRHRASLVRVGTQARNRIHAVVADFGYDRAGTYWTGPGRGWLAELDLPPVSRQIVTDCLAVIDALEVTIGGLDGQLRARAKADPRVKTLTALPGVGQFTALVMLAEIGDITRFGSARKLASWAGLTPTVRGSDLSVRHGHISKQGSAWLRWVLNQAAQTAKRSPEFTATYAAIAKRRGKKIATIAISRKLLTRAYHLLAAEAARAPAAAAATSATGTAGGAPADGGGSPGPGHARSSGMSRPPGRARSSD

SEQ ID NO: 345573 - protein, 371 aa, unidentified
MTDVSSNAPQDVRRWVALDVHKLSIVAAALPPTGGQPEVQQIETTPAAVRRFIERLGGPQGLAVCYEAGPGGFDLLRVLMRLGVACDVIAPSLIPVRAGDRIKTDRRDAKKLVRLYRAGQLSYVAPPTPETEGLRDLMRCREDLRRARTSARHRVSKQLLRYGRIYREGRSQWTKMHRVWIARQRLDDELAQAALCQMLLHLDGLDRQLDALDRDLEEIARSARWQAAVEVLTRFRGISTRTALGLLAEVGDFARFSHPRELAAWIGIVPCEYSSGEQRHRGRITKTGNGHARRLLIEAAWAYRHRPRRPDRGPQPDERAWQAQIRLHRRYHHLIGNGKRSTVATVAVARELAGFLWAASTDQPFAAAAGG

SEQ ID NO: 345574 - protein, 439 aa, unidentified
MTTVVVASIRRDWPPTNERFCKNWRNPVGVDEFSDPCPRVARASQPLYVSFCLSCLASAKREDRSAAAPAGAAAAAWTRSFNPRTTESVAQLDPSALLRPKLEPLLERRRNIRQLVSARMSQNTIASMNQNPASVYAGLDISKASLQLHLQSKSYDLSNTAGGHRQLIKRLAASPGVHVVCEATGGYERAVVAALHATAIPVSVLNPARVRQFARASGELAKTDPIDAVMLSAFGQAFAPEPTPPRTATEIALAALVARRAQLLELHVAERQRADTCVEQVLRKLFTTWLAQIEKQIAKVDTLIEELLVQETALAGRVRRLEEITGVGRITAVTVLATIPELGQLNRRQAAALAGLCPYNRDSGQYTGKRCISGGRAEVRRALYMAALSASRSNHLLKPFYDRLIAAGKPGKVALTAVMRKLIVLMNHLLKNPNFSLAH

SEQ ID NO: 345575 - protein, 332 aa, unidentified
MDNFYFIGVDVSKKKLDFCVLFEGKVLREEQVSNHQQAVARLIGELKNDLEMDNEQFLICAEHTGQYTFPLVCACKSVECKLWLENPSQIKYSSGMQRGKNDKVDAKRIAIYASRFGDKVKYYDRPTEEIERLKQLERERALYVTDLAKYKGQMYDQKDFMPAALYRKKTKRMKGLIQELQAAIDAITAEMEKIIGSTEVLARQMELLMSIDGVGKVVALNVIIETEAFSRFDNPRKFCCHAGVAPFSYTSGSSQHSKNKVSHRANKNIKKLLHMAAGSGTHRKKGELKAYYMRKVEEGKNKMSVINALRAKIVARMFAVIKRNEVYTPIYS

SEQ ID NO: 345576 - protein, 387 aa, unidentified
MIYLGIDVAKNSHVAAAMSSEGEVLLMPFSFANSADGFTLLREKLNNLPKLPLLVGLESTAHYGENLICFLCGNGYHVAMINPLQTAAIRKSAIRKTKTDKVDAFVIAKALMMEGYTELQQSDIQILKFKGLCKTRQNLILMRTRCKIQLGSFVDQLFPELNRFFRSGLHINVSYTLLKAHPRPAEVGALHLTYLSNLLRKASRGKYKKEDAIRLRELARNSIGTDNPALALQIRQAVSQIELFSAQLKQVESEISTIMDSLDSPIMTVPGIGYLNGAMILSCIGNIQRFSSPAKLLAYAGLDPAVVQSGNFSAKSTRMSKRGNSMLRYALINASHNVVRNNETFAQYYNSKIAQGKSHYCALGHTAHKLIRVIFALLTNNIAFDLA

SEQ ID NO: 345577 - protein, 338 aa, unidentified
MGSYVGIDLHRQRSVIVVLDEDGNRVSWSRIDNSPANLAREVTAAGADAEVAMEACWGWYWAADVIVECGVRLHLAHPLGIAGYANRRVKNDIRDATLLADLLRMGRLPESWVAPPEVRELREEVRYRHKLIRLQTGLKCQVHQVLGKEGVIPETKGIWWSGGQRWLDELQLADVYTNRIESLRDLIELNNREIVQSDTRIHRRLKGHPGYVAIQQIAGVGRVLGAVFVAEIGDVHRFGDARRLCSWAGLTPRLRESDAHTHRGHITKQGSRLLRWAAIEAVSGAARDRRVASVKARVGARRGHNIGRVAAARHLLTLVYYGLRDGEVRCLAATDDAA

SEQ ID NO: 345578 - protein, 342 aa, unidentified
MQISTIGLDIAKNVFQVHGVDARGTIVVVRQLRRGRLIAFFEKLPACLVGMEACATAHYWARALARLGHTVRLMPPGYVKAYVKRGKNDAADAAAICEAVTRPSMRFVPLKSAQQQSALMLHRTRDLLIRQRTQLINAMRAHLAELGVVAAQGREGVHRLMALVAEESETCLPTLARFACQALAGQLVAVQGQIDALERRICVEHRACEVSRRLETIPGIGVIGATAIAATVTDPKAFRSGREFAAWIGLVPRQSSTGGKVRLAGISKQGDRYLRRLLVIGAMAMLKQARAHPDKHPWLIQLLARRPAKVVAVALANKMARTAWAVLARGENYRAPALMPAA

SEQ ID NO: 345579 - protein, 429 aa, unidentified
MSETKSIELRVSVDVGYRRHSVAIGLPNGEVLEEFEIAHGPEGFQEFFSRIEKHRKEREYGVAVAMEGYNGYARPLDSLVRSRGYRLYNINNLKLARFKEIFPGAAKKDRIDARKGLELFQLSDHLPLAKEVLQEVRGTPKENEVLKRLTRRRRRLVNERVRVVNNLQADLQAVCPGLLEITSEASNQWFLNLLLSADSLSQLARLRKATLLKIPSVGRKYASLIQDWQKRAHFSEEVEWVSEMIQEDAKRCVELEEKIKTLETKITEVAKDSKIAKILLSIPGFGPVCTTELAGEVGTVERFSKEGSLALYLGMSTLDNSSGKYQGSKAPKHVNTRAKAAMMIALDRHRKYVPESQRYYEKKRVQGKKHNQAIRALGRHLCRIIYKMLKEERDYQLRSEKGDTQARVGSRSCVKTKIRRPKISPSRQK

SEQ ID NO: 345580 - protein, 421 aa, unidentified
MLNENLIERGKYVNREILVVGVDIGKYTHVAVGTSLEGGFTKSYSIRNNRKSYKDFESIMKNWKERFNCRYIVIGFESTGHYWKPLGYYLKDRGYMLLEVSPSNTKKSKEMMDNSPLKSDPKDARVIADLIKQGKILTPVFPEGRILDLRGFMHTRENFIKERTSILNRLEKIMDVAFPERKEIIKKVGNKTSLFLLKEAPFPADILKKELRWLNKYMWKKSRGRYTELNAKRLYNLAKETVGLKQGMEGSLYELNALLVRLKEINKKIEEVESIIESYLEDTEEARYLLSIKGVGPNIAAAIISESGGLSKYRRAESVIKIAGLNLYERSSGKSKGEKHITKRGRSLMRQKLYFAALQQTHPGMPLYSYYRRLVEENGLEKTKAIIATARKLLRIMFALVRDKNEYKWDYREIELKKEAA

SEQ ID NO: 345581 - protein, 331 aa, unidentified
MKKKDVIGIDVSKLTIDAYLKLAQAHAVFGNDTKGFRQLVKWIRKHTDCKTEELLICFETTGLYSLQLASFLSQSNIDFVMENPIQIKRSMGLVRGKDDHVDSKRIAEYAYMRKEKLKLTQLPSEELIKMQNLLAIRERMIRQKAGYQASLGEYKRVLVQQQQKDFFLLLNNMINALKKQIRKAEETLIEIIHSSSKLLNIYTLLTSIKGIGVILAANIMVTTICFTKFNDSRKYACYCGTAPFKYSSGTSIHGRTKVSQMANKKMKALFNLAALSAIQHDPELKLYFDNRMANGANGMSTINIIRNKIIHRVFAVVKRGTPYVVMAKYAA

SEQ ID NO: 345582 - protein, 449 aa, unidentified
MKHKQVPTLVPEEIPDAEHELVIERVCAIDVAKAFGKVCVRTPRERRRVSKVWDVEATTGAVSELAAQLAELGIEKVTIESTSDYWRIWYYLLEAAGLDVQLVNARDVKNVPGRAKTDKLDAVWLAKLTEKGLLRPSFVPPAIIRQLRDYTRLRVDLTRERSRYWQRLEKLLEDALIKLSSVASTLDTLSARDMIEALIAGERDPRRLADLARARMKTKRPALIKALDGRFNDHHAELARMLLDQIDSLTAQINTLTARIGELLVAAGPSERDGGANLTGEPAPGSKLSTVERLTEIPGIGMTGAQIILAEIGLDMAQFPTAGHLVSWAKLCPRTVQSGPVTRGGKTGRGNPHLKGALGEAATAAAKTDTFLGERYRRIVKRRGKLKALVAVARSILVIIWQLLSDPTARFRDLGSNYHASRIKIERRMRNHIAQLAAMGYRVTLEPAA

SEQ ID NO: 345583 - protein, 346 aa, unidentified
MMIIGCDFHPSWQQIAWLESETGETGDAKLVHAAGEAKQFYAGLTKPALVGMEATGNSQWFVELLEDLGHGIWIGDAAQIRASYVRKQKTDKRDAAHLLKLLLEGRFPKLWRPDPEQRDLRQLVLHRHKLVEMRCRVKNELQHLSLNKGMQRKRTLWSQAGLQLLRELPLKPWASCRRADLLRLLALFDDQIGKLDEAVQQAAEQHPQAKLLMTQPGVGPNTALAFVLTIGDVARFPRGKQVASYLGLIPRERSSGGRQRLGAISKQGNRWLRCLLVEATHNVVRLDPGFGKQYLHHCHQKPKGVAKVAVARKLAVRLYWMLRTQVGYPEIVRIESSPRVPLASAS

SEQ ID NO: 345584 - protein, 482 aa, unidentified
MKTKPQEKTKKATDHPMQRHWQEMNRKQRREMTRKIQSEDISLEVIHPDAAGIDIGNESHYAAVPPGRDSQPVRRFGCTTAELKAMADWLKQCGIRTVAMQSTGVYWVAVFDILEQTGFEVFLVNARDTKNLPGRKSDVQESQWLMKLHTYGLLRNSFRPSQEIRVMRTYWRQRNDLVQSASRHILRIQKALTQMNLQLANVLTDISGATGQAIIKAILAGERNPHKLAEFRDPRVKASEEQIAQSLEGNWQPDLLFLLKQEQDGYEFCQRQIAECDRQLAQYLQQREDRSQGAPLPEEKRKGRLKKKRGNKPRFDLRKGLFRMTGTDLTRIDGIDVMTATTVISEAGYDMSKWKTENHFVSWLRLCPDNRISGGKVIGKGRLPTNNPISIALKMAATTLRQSKTYLGAQFRRLRTRLGAPIAIKAMAEKMASLVYRMLRYGMKYVDQGAAFYEAQHRQVQIKQLKWKAAKLGFQIVQAPAA

SEQ ID NO: 345585 - protein, 457 aa, unidentified
MNRKRSKAKIDRKMPMVHPNAAAIDVGATMHMAAVRADRTPEPVCSFGTFTTDLHRLVDWFAECRVETVVMESTSVYWIPIFELLDARGFTVFLVNARDAKHVPGRKTDVSDAQWLQRLHSYGLLRASFRPKGQIAELRAYVRQRERLLEYAASHIQHMQKALTEMNLQLHHVVADITGATGLRIIRAILAGEHDPKTLARLRDYRCHANAETIEKALTGSYRAEHLFALEQALALYEAYHEKVSACDVRIEAVLKKLSIDRGHRSGSLPSSRRRTDQANGLAFDVRAALFALLGKDITQIDGLGPYLSLKLIAECGDDLSAWPSAKHFTSWLCLAPSNKISGGKVLSSRTRRCGSRAAALLRLAAVTVGRTDTALGAFYRRLSARIGKAKAVTATARKIAVLFYNAVRHGMEYVDPGASFYETRYRTRVINNLHRRAKAFGFVLQPVEVTPGPAVS

SEQ ID NO: 345586 - protein, 326 aa, unidentified
MQGKEASEQEANVKSSAGVDVCKDWLDAHVWPCDKRLRVPNTPEGIRKLKRWLQRFDLSIVIIEATGKWHRLLWRSLFQSNIPVAVIDPYKARMFAKALGILAKTDQIDASVLSRYGFMVRPAVRAPQPQAIEQLAELVTGRDTAVAEQTRLQNQLSAATVDFFRKQLRQRLARLDKNIDELEREIVARIAAEPELARRYEIVISIPGIGPTVAATLVVRLAELGGLPDKEITMLAGLAPIADSSGKHDGKRVIWGGRAAVRRMLYLAALSAKQWNPTLKPFYDRLIENGKETKVALIAVARKLVILANTLIAEDRTWQKIPPQNA

SEQ ID NO: 345587 - protein, 406 aa, unidentified
MTAVMIGVDPHKGSHTAVAIDTAEEPLGKLRVQASASQAGRLVKWAAKWPERTWAVEGAGGLGHLLAQQLVAAGELVLDVQPKLAARVRLPEAGDSNKNDPNDALSVAVAALRSRARRQVRADDHAAVLRVWSRRHRDLGRAKNQAACRLHAVLCEVVPGGVPEEITAAQATRILGSAKPSGAAGQARCDLAAELLADMRRLDEQMRESKKKLAAAVRASGTSLTELFGVGPFVVATVIGDVTDVSRFASRDHFAAYNGTAPVEVSSGNRKICRLSLRGNRRVNHAIHMAAITQIRHAHSDGRAYYDKKLAEGKTHKEALRCLKRRISDAIYARLRADARQPAPSTQTGPGGQPGSDTDSSAAGSHPERRLFGQATPGPDTSLRPATPARPAMPPEPDSREIRRSP

SEQ ID NO: 345588 - protein, 433 aa, unidentified
MLKINYMSTLFVGIDVSSKTNSVYAMDFEENKYFSSSFGNNQPGADKLVDMIAECMRKHKNLDTVLIVLESTSVYSVHISNFLSTSEVLMPYRPYVFCVNPKATSNYRRSYIGMEKTDPTDAYLIADFGRVGRTKKLEPWRGGQFIALKRLTRHRMHLSECITREKAYMVSNLYLKFSELQLLEGDDRPFGSLYGATSSAVLTEFLSPQEIIDMPEEDLLAFLAEKSRNRISDISRTSGLLRKAARDSYRLDKCMYEPLNISLASSFNCIHAYQKEIKLIGQAIGKCINGMNPNALIILQSIPGIGPVWASGILSEIGDITAFHSSDALAKYAGLYWPKGDSGDFTSEDNKMSKAGNPYLRYYLGEAANSVRKHIPEYADYYARKYAEVTKHQHKRALALTSRKFVRLVFGLLVKNQLYTGEKLDAELNIDTN

SEQ ID NO: 345589 - protein, 423 aa, unidentified
MKVKYEDRLKQKVIAITTDTLVVGVDIAKNCQWARFVDFRGIERDRALKFKNSKGGFETILARIREICKKENFSKAVVGMEPTGHYWKAFANWLEKQDGITVVLVNPYATKQAKELDDNSPTKSDKKDALTIAKLVKDGRYFELYLPHDVYAELRGLSTTRTGLNKRKNALKNAITAVMDEYFPEYGEVFKCPLSGKASRHILKTCPFPKFILGLGEDGVADEIKRAVRKTVGRKKAAQLTEAAKDSIGVDYGEEAARLKLRLMLEELELLERQAEELEEQMRASLQKTDYAGFLLSIKGIGVVTLAACLGELGDPTRFEDPRQMSRMAGYNLVEDSSGKNRSGTKISKRGRKNLRSALYQMALTMVATNDEMKQLYHYLKTREKAPLRKILTLIHVLAKKKENYDPGKVFGPVRREQLKAAA

SEQ ID NO: 345590 - protein, 461 aa, unidentified
MRSRPRPDSIGFGHASSGAGVTTPRQYDLQPEPANPKHIMNTTEYAAFVAMDWGDTQHAFALQMAGNKETEAGQFDAGAEATHDWLKQLGARCAHRPIALAVEAGCDALIAALLEHEWIVIYPVHSSMSARFRKALVPSGAKDDVPDATVLLTLLLRHGDKLKPLQLDSAPTRELSALVLSRRGAVDRRSQIGNQLRAVLKGYFPQALNLVGDEMAGTLALDFLERWPDLASLQRARTATVKSFYFLHSVRRPELVETRLKQIIRSQPLTRDAAIIAPAVLQVHMLVAVLRTIQRHIAQFDECIAQKFAAHAESAFFQQLPGAGPQLAPRLLVAFGDQRGRYPDASSLQKYAGLAPVKEKSGRQLWVHWRWNAPIFLRQTFVEWAGQTVVYCAWAKAFYRHQKQAGKGHHAIIRALAFKWIRILWRCWQRQEPYDEARYLEALRRKRSPLFAALNGAPAQS

SEQ ID NO: 345591 - protein, 375 aa, unidentified
MKEKLRFLGMDVHAETIAAAIAEPDGEVRSLGTIPNRIESVRKLLKKLGPVEKLRVCYEAGPTGYVLYWQLAELGVQCEVIAPSLVPVKAGDRVKTDRRDAEKLARSYRSGDLTAVWVPDEGSEALRDLVRAREAAKQDQLRARHRLGKFLLRSGHRPPSGVRAWTHLHLIWVSQIRFTQVAQESTRLDYLHEVEHMRERVLRLEQAIAEAVKLASPVLQEVITDLQALRGIAHISAVTIAAELGQVSRFAGARELMGYCGAVPSENSSGKRTRRGGITKTGNAHLRRIVVEAAWSYHRPPAIWAGLRKRQQSASEEAKEIAWKAQHRLHKRYARLAATGKDKRKIVTAVGRELLGFIWAIGTKAEATVRQRIAA

SEQ ID NO: 345592 - protein, 339 aa, unidentified
MTLTPVGIDIAKNVMQLHYIDQETGEIVNKPVKRAQLLEHFANRAPCLIGMEACGGAHHWARELSKIGHQVKLLPAEFVKAFNIRNKNDAADARAIWFAVQQPSKPVAIKTEMQQAMLALHRARQQLVEFRTMQINGLRGMLAEFGEVMGRKRAGMVSAIADVLARVAERLPAVLIDTLREQWNRIQQLDEAIGGIERRMRAWKKDDSAVKAISEIPGVGLLTATATVAMMGDAKAFKSGREFAAWLGLVPRQTGSGGKTNLHGISKRGDAYLRTLLIHGARSVMMNARDPGPWAQQLKKRRCWNVVIVALANKMARTIWAVLAHDRPYQRGYVSAKPA

SEQ ID NO: 345593 - protein, 398 aa, unidentified
MKEFNAEHHRVESASALAVVSNAERYAAYVGLDVHKETIAVAVAEPGRSEPVYRGEVANRPKSVEKWLSKLSTAYDGGLLAFCYEAGPCGYGLYRQISASGHDCQVVAPSRIPRTPGERVKTDRRDALKLARLLRSGDLRAVWVPDQEQEMMRDLSRARDDMKEQERKARQQLNAFVLRHGRHWARGKSRWTQAHYNWLESLRFEQPWQQVTLQEYIDAAKEASARVAQFDAHLMGALAEWSLAPVVESLIALRGVDKLTAIVLLAELGDISRFDSPKERMAFLGLVPSEHSSGGRRRQGAITRTGNGHARRVLVESAWSYRFPARQTMHLKRKAKNASASAKKIAWAAQKRLCGRYRTLIQCGKHKNVVCVAIARELVGFVWDIVRQEMPRLAPQAA

SEQ ID NO: 345594 - protein, 327 aa, unidentified
MTQKMDVVGIDVAKATLDAYALTSQQARQFANDAAGHQGLVAWLQELGVGVAVFEASGGYERAAAQSLRRAGLVAHVVDPKRVRHYAQAAGQLAKTDRIDARMIAAFGAAFLLGKPSGVAGGDDPARQDLAELVGTRQVLVDHRTSLQQQADAVTLAIAKKLLLATLKQFDRQIETFDRQIAAAIARHEPFAALARRLDTVPGLGPVSIAALIAWLPELGQLDRRQLAALVGVAPFADDSGKRTGQRHIQGGRMKLRNVLYMATVGAATRHNPVLHARYRRLLENGKKPKVALIACLRTLLTILNAMVAHQQDWNPTRLPATEPAAA

SEQ ID NO: 345595 - protein, 364 aa, unidentified
MMIIGCDFHPSGQQVYGIESESGEVVAERWIAHGGEQVDQFYADLPAGAVIGVESSGNMLWFERKLAQYGHRLRIGDAAQIQAQEVRKQKHDRRSAELIARLLVEGRFPDLRWVPSLAERDLRQLLLHRDKLVRMRTQVKNQLQHIALNQGLQKKRQLWSQGGRQLLEELPLEPWTTRRRDDLLRWLDQLDQECARLDEAVEQAAAANPEARRLRTHPGIGPVISLAFVLTIGPITRFQRSRELVSYLGLNPREASSGERRRLGGISKQGSVFLRRLLIQGAQTAVRGDAELARQYRRLAAKKHRAVAKVMVARKLAVRLFWMQKTQQTYPELVRTRGSSSHPGVSKTDRLSERPASPQGPAGS

SEQ ID NO: 345596 - protein, 396 aa, unidentified
MLQENEGTISTQDQPTGSNIFVSVEMSRSKWVVGIHTPLADKIGLHTMACGDVEALLALIDRARVKLVASGANSPAAMICYEAGYEGFWLYRRLVALGIRVVVIDPASLLVDRRAKRAKTDRIDARAMVRALMAWARGERQVLSEVRVPTVEQDDARRGLRERQRLVKERTAHGNRIKGLLKTQGIMDFDSRAADAAAHLDAIVTGDGRPLAACLKREIVRELDRLALVMRQIDQVETERDAVVQACDAGVGTDALAAEPERGAAMIGELNRLKGIGMNDATILVREAFWRDFRNRREVGGWSGFAPSPWASGSVLRDQGITKAGPPMLRAHMIQMSWRWLLWQPDSDLAQWFRKRTEGATGRMRRIMVVALARKLLIALWRYATTGMVPHGAIVT

SEQ ID NO: 345597 - protein, 360 aa, unidentified
MTSTAPASLPQVTIGVDTHKHLHVAHAADELGRPLGSYTMPTTSIGYGDFLAWAHGLGELEVVGIEGVGHYGAGLGRALRAAGVRVTEVGRPNRQRRARHGKTDSVDAAGAAAMVLAGEDLGDPKTADGITEMLRVLRIARVSAVRARAKAFNALKDLIVTAPAELREQLAGQHKLHLIGACAGLVTSEIPSTPAEAMSIALKSLAERCRQLDAETKTLDTQIEVLTAHACPALRQVYGVGPDTAATLLVALGDNPERIGSDAAFAKLCGVSPIEASSGKTVRHRLNRGGNRDANRALHVVCVVRLRRHQPTRDYLARRIGEGRTKPEIMRCLKRYIAREIYHAVLPTRQEIPSQTIATT

SEQ ID NO: 345598 - protein, 388 aa, unidentified
MQAANHQLEDQAAIRTDLGAIFVSLELSRSTWLITSLSPGGGEKMSKHSVQGGDVGGLLTRFSQLKEKVRGRTEKDYPIIVIQEAGLDGFWIHRVLEMEGIESHIVDAASITTSRRRRRAKTDRIDGEALVRVLLAYKRGEPRVCAMVRVPTPEDEDRRRISRERKTLTAERVAHVNRIKGLLFSQGVEYEPLHRTRRARLEELRTGDGRSLPDHLKRQICRELDRLELLLEQIKAVEAERDALLATAKNDEIPAPARMLMDLKGIGAEFATVLWSEGLFRHFDNRRQVAAYAGLAPTPWKSGTVDREQGVGKSGNPRLRTTMIQLAWLWLRHQPDSALSRWFHERVDRNGGRFRKTMITALARKLLVALWKYVTAGVVIEGARVRTA

SEQ ID NO: 345599 - protein, 388 aa, unidentified
MIYVGIDIAKLNHFASAISSDGEELIKPFKFTNDNDGFHLLISKLDPLDKDSLIIGLESTAHYGDNLVRYLVAKNYKVCVLNPIKTSTMRKNNIRKTKTDKVDTYIICKTLMMQESLRFVTFYDLDLMDLKALGRFRQKTIKQRTRLKIQLTSYVDEIFPELQYFFKSGLHQKSVYALLKEAPTPEAVASMHMTHLAHLLKVNSHGRFDKEMAQQLRVLAQKSVGASDSSLSIQVTHTIQQIELLDSQLERVEAEMTEIMKFNDSVIMTIPGIGYINGGMILGEIGDIHRFSSPNKLLAYAGLDPSVYQSGNFQAKKTRMSKRGSKVLRYALVNAAHNVVKNNATFKAYYEAKMVEGRTHYNALGHCAGKLVRIIWKMMTDNVEFNLD

SEQ ID NO: 345600 - protein, 359 aa, unidentified
MRALYAGFDLHGNSNYLGIIDGDGKRVFGKKLSNDLEWIREVVVPFEAEVVGVAVESTYNWYWLVDGLMEEGYKVHLANPSAIQQYVGLKHADDKHDAFWLAEMLRLGILPEGYIYPKEERPVRDLLRKRGHLVRLRTSLVISLQNILSRNLGRKVDVNDVKALREDRVTPLLEGSEDLVLAGRVSKEAIDFLTHQIRRIEGVVEKRIELREQYRYLLTLPGVGKILASTIMLETGPIGRFATVGDYVSYCRKVPSQWTSNGKRKGSGNKKNGNKYLAWAYAEASELARRFYSEPRAYYHRKMQKTNAPVAHSALAHKLARAGYYVMRDQVPFEPQKLFGRGRGWNGEPELGLVKSHEA

SEQ ID NO: 345601 - protein, 313 aa, unidentified
MYYIAFDVSKKELSVYDGKKDMTFLNTEGLSSLKKYLKAHYRDFNQLIFLLEATGSYSDHLIEMCARCRIKAVIINPKASHHFAKSLGIRNKTDKIDARMIYQYRRLIDYQMITVPRINKEAKTLSAYLGSYQLALKQRIALDNHLEHVREKDLFRLLKKELKRAYRLEEQILKRITAYILKDPQLKADYQRLLTIPGIGEKSAPALLYLFITYQGANRNQITALCGLDPLQRQSGTSVKGKPKISKHGSKLIRKVLYMPMLSAIQTNPRIRVFYQRLLRNHKVKKLAVIAAMRKMILIAHAIYQNKTEYVPV

SEQ ID NO: 345602 - protein, 348 aa, unidentified
MIVIGVDTHKRSHTLVAVDAATGGVLGERTIVASDEGALTALRVATALGDERVWAIEDCRHVSGRLERALVAAGERVIRIPPALTANARRTAREPGKSDRIDALAVAHTAVREGLERFPAAFLDPQAMEIRLLCDYRDQFVADRTRAINTLRWHLLSLDPELEAGLRPSGLQGPRIRAKVARRLAKLGDGAQARIAKALLRRITEITRQELELRAEMNTLIAAHSPQLLAEHGCGTITAAILIGHTAGAERFPTDATFARHTGTAPIPASSGNTVRHRLHRGGDRQLNRALHTIALSRARTDPLTRAYLDRRAAEGKTKLEALRCLKRHLARHFWKLLYRNPQIPQPT

SEQ ID NO: 345603 - protein, 350 aa, unidentified
MIIIGCDYHPGFQQIALVDTDTGEVRELRLEHREPAEKFYRSLAAQRAVVRLGMEGSGHTRWFERLLAELNFELWIGDAAEIRTKRVRKQKTDRQDAQLLLRLMVEDRFPRVWVPSWENRDLRQLLWHRHRMVQARTRIMNQLQAVALNEGLRAKKRLWREAGREQLKSFPLAPWASRRRGDLLELLDQLNPTIAELTQAIEQQVEKYPQARRLMTHPGVGALTALAFMLIVGEAGRFRCGKQIASYLGLVPLEESSGNRRRLGHITKQGNSLLRFLLVEAAQVTARSLPEWRNRYFHLMMRRGRKIAKVALARRLAVRLYWMLRKEWDYEQVKQFGSHAGQPENRHGVQ

SEQ ID NO: 345604 - protein, 356 aa, unidentified
MNEGSCVGLDVHARSVVAGVIDMGSGEVRSVRVPPGSEATVAWLGTLPAPVRVVYEAGPTGYGLARACADAGISCVVAAPSKIRPAADRVKTDRRDAERLARLLRLGEITAVRVPGPDEEAARDLVRAREDARGDLMRARHRLSKLLLRHGAVYDATAWTRAHDAWLRKQRFQGGPLAIVFDECYSRMIDAKTRRDTLDKAITELAASEPYVDVVERLVCLRGVSTLTAFALTVELGDWHRFRPESLGPFLGLTPSENSSGERRRQGGITKTGNSHARRLPIEAAWHQRSAPRLSVTLERRRTGKSLAVRAQADSSARRLHGRWNALEARGKPRLIVVVAVARELAGHCWALATME

SEQ ID NO: 345605 - protein, 467 aa, unidentified
MKRRHRRRPPAPPRRSPAALDHLNPNAAGLDCGATDHVAAVPPDRDAMPVRTFDTFTAGLHRLADWFTACRITHVALEATGVYWIPVFEILEARGFQVSLVNARHVKNVPGRKSDVSDAEWLRDLHIMGLLRGSFRPADEIVALRAYLRHRSALIEGAAAQVQRMQKALVQMNVQLPLVVSDITGVTGLRILRDIVAGQRDPRVLARHRDRRCRAAEAEIAAALTGNYRPEHVLVLAQHLALYDAYQQQLTACDAAIAAHLATLAAAAAEPAGPLGPPRGPRKPAHSNEPAFDVRTPLHRLTGADLSQIDGIGPYTALRLVAEIGTDMSCWPTAQHFTSWLTLAPRNKISGGRLLSSRTQPSANRAAAILRMAAMTLGRSATALGAFYRRLAARVGKAKAITATARKLAVLVYRTLKGELVYADPGADAYDARHRDQLTRRLRSRAAKLGFALVSLTTGEVLQPEVS

SEQ ID NO: 345606 - protein, 365 aa, unidentified
MQKSINWIGFDEDATKVVVARVVGDEQKVRETFTVDFSDAGLRQMVRRLKQFEGEVRCVYEAGGSGYELYRYLRRHSMECEVAAPSLTPRKPGDRVKTNRRDAAKLAMLYRSGGLTMISVPDEKRESLRDLVRTREDAQQDLLRQRNRLTKLLYRRGLRHGQGRRWTRVYWRWLRALRVDDAHLQAVIDDAILSIEYAAERLRRVHDLVLAAAQEAAYAPAIGRLMVLRGIGVLTAISIIAELGDLRQFTQASKLMAAVGVVPSEFSTGTHERRLGITKTGNAHLRYLLVEAAWQARHRPSARGAIVKRRAGQPAEIVAIARRCEQRLHRKYFRMIARGKPSSKAAVAVARELLGFIWAIGQVPV

SEQ ID NO: 345607 - protein, 316 aa, unidentified
MDHNNAVYGVDVSKAKLVIARYDVQTLAEVDNRPESIAAWLAGLPKGAVVAMEATGVYHRLLAHLAHAAGMRVYVLNPQTLKHYAQAIGRRGKTDNCDARMIARYAVHEQAKLRRWQPPARAADRLSQLLERRHTVVGVRQTLAQSLSGMPMIKVARQSLLASLERTVGRLDILIRHEMARLPGATALYERLKSIVGIGPVVAAQLVAVFSTLSFARAGAFIAYTGLDPRPNDSGIHRGRRSLSKHGPPLLRCQLYNAGMAAANSRVFKPVYKQLRERGLQTTEAIVILARKLARIAFALYKSGEVFDAQKHFKTA

SEQ ID NO: 345608 - protein, 395 aa, unidentified
MLYLAIDQHRKQLTVNLRNEAGDVILKRQVSTEWKRVREFMEEMQKRSVPEGGFVAIVEVCGFNDWFLKMLTEYGCRETVLVQPEKRSKNKTDRRDANALGELLWTNRERLLAGKRVQNVRQVVPPSERDAEDRQLTALRQRVGRLRTRTINKVQHLLLKHNLQQECPTKGIQTKKARKWLETLPLGTIDRLEMDHLLAQWELLDKQLEDLDPMIGERYAENKTAQIIGSIPGAGAYGSLAIAARIGSIDRFPHARSLAHYWGLTPSSNNSGDATRRLGSITKEGSAIVRFLLAQIVVHVLRRDAVMKEWYRRIKKRRGAKIARVAVMRRLATIIWCMVKRQQYYQRGGAPATGNGSECMNVPDRNAFLEEIQGRSRNSKEKGRQGLETVAAARP

SEQ ID NO: 345609 - protein, 371 aa, unidentified
MNSILYVGMDVHKENYTLCCYSFDRDKVEYRQTVPSDYRLVLKYLEQVRRKYPEEVEFICGYEAGCLGYSLYHQLTDHGVKCIILAPTTMGITNTNRVKTDRKDAANIARCLAFHTYSAVYVPDGEDNAVKEYLRMRDDQKLALKKIKQQITAFVLRLGKQYTGGKSLWTENHLKWLRGLDLTLLEKETLQEYLITYDYLTDKLERLDARIEELARNERYGERVRRLGCFIGIKPHTALSLLVEVGDFRRFEKAPNFAGFLGLVPGEDSSGGGRNRLAITKAGNSHLRRLLVESSQSYSRGTIGFKSKELKKRQEGNPPEVVAYADRANERLRRRYYRMTLKNGAKRNVAIVAVARELACFIWGIMTDEIA

SEQ ID NO: 345610 - protein, 394 aa, unidentified
MKNLLFAGIDVSKDSFDITIINQKKEIIMQNKFEMNSKGLKALSENIAALKYDEVLFVMESTGVYHLNLYFFLVNNNFKAAVVNPLLIHNFAKSVSLRKTKTDKKDAETIADFVLSNYQNIDFSNKIYNSIRNISRERDKLAQNVARMKTEIKNVLQVLFPELSKHTNVFTKTMLRILLKAPGRFPIMKMKPQQIARSFNKTKGNKIKISPRELKALAKYSIGIKDDSLETVLILKIKRLIFIIEQIDDMNDHLRLFVKEKLQQDFDILNSIKGIGVTTAEKFLIEIADIENFKSHNQLRAYIGTDPSIKQSGSSINVSGRISKRGNAYLRKTIWQMAVGVIRCCPHFADYYHKKISEGKKYKQAVIAVANKLIKTLYAMLKNKTFFRLQTKTN

SEQ ID NO: 345611 - protein, 315 aa, unidentified
MSNHSTRAAGIDIAKDKLDLAIHGLPIRLTVENRRPGWRRLADELAKAGVNRVGVEATGGYERGVVAYLRAAGLTVVLLQPLQVKAYARLHLRRAKNDVIDAALIAACTAALDEPHSAPDAHLEPLADALTFVEQIEEELIRHKTRLEHIQQARLRRMVMADIRRLEARRLAELRRIAQELRRHDDLSRRLDLVQSVPGIGERTALALLLRMPELGQLSREQAAALAGLAPFDDDSGTHKGQRHIAGGRQRLRRSLYAAALPAAFRWNAALVSLYKRLTARGKSHKVALVACARKLLIMANAVVAHATPWQVRPA

SEQ ID NO: 345612 - protein, 387 aa, unidentified
MRRIVDQAPVAAALDYDSTVIGALELSSKKWVVAVQCPGSRKHTKHIVEPNGPALATLLETIRTRSAAAGKPIARIVVTHEAGRDGFWLARFLMRREVEVHVMQASSLPVDRRARRAKTDAIDAEMLLRTLLAWLRGEPRVCSMVPVPSEADEEARRAHRERQDLIGERRSILNKIDGILATLGICGFKGLRGDRRRQLAELRQPDGAALPSAALSRIERLLDRLELIMTQLKTIETARDAVVKKDAPANASERMIRDLCGLRGIGVESATLLVREAFCRSFANRRALGSYAGLTGTPFASGAMAREQGISKDGNRRLRACLVELAWFWLRFQPESALARWFHGRVNGARGRVAKIMIVAMARKLLVALWRFAEDGVIPEGATMKAP

SEQ ID NO: 345613 - protein, 364 aa, unidentified
MKRKVYVGMDVHKETIQLAYLTSNTKALVKEQQIKHEEGQIKKFIQKLKSEGNEIHCCYEAGVTGYPLYRYLKTLGVNCTIVAPGKIPRQNSDKIKTDKRDAIKLARLLRSGELESIHVPSEEDEAVRDYLRSRDSLRLDLGRSRQRLMKFLLRKGITYSTTKYWTASHYKWLNNLHFENEILQATFNDYYSRVRVQEENLKAMDQKIREIAESEPYREKVGILRCFRGVDYLTAMFLLSEVNDFKRFKTAGSFMSFLGLVPGEYSSGSKRKQTSITKTGSPRLRRILVEAAWQHRFPGTGSKVVAARRVGQSALVVSLAEKASLRLHKKFKSMQLRGKTPQVMITAVSRELSGFLWAAMNLVA

SEQ ID NO: 345614 - protein, 402 aa, unidentified
MNAVGIDVSKGKSMIAVMRPFGEVVVSPFEVQHTGSELSELAKRLKSLDGETRVVMEYTGNYHAPIARTLQNAGIYVSVVNAMLVHDYGNNSLRRAKTDKKDAIKLANYALDHWLSLPRYFPEEDTRLMLKNCYRQYEQYSKLRTMLKNNLISLLDQTFPGVNRLFSSLRRADGSEKWIDFASDFWHSECVSILTEKRFSLRYQKWCKKNGYNFSEKKALDIYTCAHGHIGVIPKTDTAKLLVKQAVSQLQATSTALSTLQQEMQALAASLPEYDVVMQMYGVGPSLGPQLMAEIGDVRRFHSKKALVAFAGIDAPPYQSGQFNVQSRRISKRGSSSLRRTLFILMGVILQNSPADEPVYQFMDKKRSEGKPYKVYMIASSNKFLRIYYARVKAYLDLIETP

SEQ ID NO: 345615 - protein, 456 aa, unidentified
MAQQRKARSAVVPMPMLSQETLSIGVDSGKFRHVAGFLSRTLLTRHGRFEGCPTCAFEQSREGFRSLVDRIRELVPLEQVMVLFEHTGHYHRLLEQSLRELDITVYRVHVQERPKGMLKTDKRDALRLANMLSTQLELGAQVEDKMQLVRRAGAPTRAAAQLRGLIRHRYELSHHGTQLQNKLTAICDEAFAEFTQVCHDPNRPPALAFRERFPTPSALATASLSALQALRVRTFPSDAQLLKLPRLARETIGSKEVDRQKGLLREQALLRKELRLAQEHLALLQTEIGALVTNCRAGQILLCIPPLGHVQAATIIATIGTIANVERASELKSYFGWAPRRHQTGVTFDRTKLTKTGVRPVKQMLFLMAACATTMDCEWAHLYHRLLPRLGSYDESMKDDRGKLKVSGRIAGQMASLIFALLKTDQETLSKLMPGQEPPPPMLSDPEVHRRHQEGH

SEQ ID NO: 345616 - protein, 316 aa, unidentified
MKTNTNQNINVGVDTGKFQLDIYIRPLDIYFTVKNDEKGIAEAIKKIKIHSPKRIIIEATGRLEMPFIIACAKANLPFVIANPIHIKRFAGAIGQRAKTDKLDAQLIAHYGEAIKPTLSTLKPDIMQIMSDLVARRNQLLVMQTMEKNRLQILPKELISTIKPILAAFKNQIEKIENKILKLIESCPEYSAKNTILQSMKGIGKIAAASIISNLPELGYMSNKEAGALVGVAPMNRESGRYKGLRKIQGGRHQVRTVLYMAMMSAIQSNPVFKSTYQRLVAAGKPKKVALIACVRKMIVILNSMLRDGVMWEAPKV

SEQ ID NO: 345617 - protein, 395 aa, unidentified
MKTKVSLGLDVAQAGVAYHLQDSDGRVLAAGRADATTAGWRQLTATLKHAHVGWADCLVVIEATGQWHLPWAEAASAAGATVFVLNPLIAKRVNSVGNAIRDGKSDPIDAEGLAETVARYHEKLERFRYRSRPADIGLRRLLGVRGAVRSALTNLRKAAGDLQALCFPELAASGLSPQHQRALLLEAGHPAAVAALELHRLRELAGEHTAAVRASARSSFAPASVAAASAPALQALLRSDQALDQQLDALDEQITAQAALVLDAEQLRRARTLPGFGPRTTPAILACIPAELFQTHPSHRAQANALQALFGCEPRLRTSGQWTGKIKISKRGIREGRTALYQAAFCALASDSDLKAYYDALRARGKHHKTALVDVMRKLVRRLVAVLDPKLPCPA

SEQ ID NO: 345618 - protein, 377 aa, unidentified
MSQVKFVGLDVHAETIAVAVAEPGGEVRSLGVIPNRQESVRKLVRKVGPAEHLRVCYEAGPTGYVLYWQLTALGVKCDVVAPSLVPVKSGDRVKTDRRDAEKLARSRRAGDLTPVWVPDAAHEALRDLVRAREVAKRDQLRARHRVSTFLLRHGWQRPPHLKTAWSKPHLEWVKMKVHFDQPALEVVISDYVHEVEHVAARLERLEAAIHEAARSAPPRMRAVIEALQALRGVAEVAAVTIVAELGEISRFSKATQLMGYSGLVPSEYSSGQSRFRGRITKSGNAHLRRVIVEAAWAYQFRPWCGGYLLKRQVGLSEEIKEIGWKAQNRLHLRYRKLLARGKNKPQIVTAVGRELLGFIWAIGVKVERQFQENRVAA

SEQ ID NO: 345619 - protein, 400 aa, unidentified
MLSIGIDVSKGKSTVCGMKPGGEIVYTPFEIQHTREGMSELVSLLHNSGEEVRAVLESTGSYHCPVVAALLENGIFVSVVNSLRMKRFCSQSIRKVKTDRIDAMQIALYGLAYWQELQPTRLPEDTYRELQLLARQYYQMTSMLIKAKVDFNAICDQVLPGMQELMSDHAGRHKLSDFVLRYRHTAHILEMGETRFRKDYCKWAEKKGYRNCERMAVLIFATAQNGIPVLPNAPSTQIVITEAIRVLHTVEASRDAILTQMQALAKTLPEYSLVREMPCIGDTLAPRLIAEIGDVRRFHSKRALIAYAGIDAPPYQSGKFCANNRHISKRGNRYLRKTGYEVMQSYVMHKPANDPIFTFIEKKRGEGKSGKLAMVAGLNKFLRVYYGKVTELYRSLPAIE

SEQ ID NO: 345620 - protein, 425 aa, unidentified
MKYNTQNAKIASITEKTLIVGIDVGSETYFARAFDWRNYEFTKKPFEFSNNEAGFLSFKAWVEDLLEKNGKSVVIPGMEPTGHYWFALGKFLQDNGMRPVHVNPHHVKKSKELDDNNPNKNDRKDPKTIASLVNEGRFSYPYIPTGVYAEIRSLSNMRFQAQEELTRAKNRIARWFSIYFPEYKDVYRDFKAVSGRIVLQAAPLPEELGVEGVNRIWRGAKLRGAGMKRAKTLVSAAEHSIGSKEAPEAARIELRNLLNDMDVYASRVEELLGMIGEKLKEIPYIDKLMAIKGVGLLTVSGFIAEAGDIRRFEDPKQLQKLAGYAIVANESGKHKGESRISYRGRKRLRYVLYEAALSLIGKNAEFKEIHEYYRTRKENPLKKMQSVVAVACKVIRIFYVILTKGVDYDPEKMMGDIRRPQIQEA

SEQ ID NO: 345621 - protein, 340 aa, unidentified
MQVSTVGLDIAKNVFQVHGVDAAGRTVLRRKVRRDQLLKLFASLEPCLVGMEACATAHHWARQLGALGHEVRLMPPAYVRAYVKRNKNDAADAEAICEAVVRPTMRFVPIKSAAAQSVLMLHRARHLLVRQRTAQASALRAHLAEYGVVAAKGLSRLRDLLPVLETGAGIIPELARQTLRLIAQLIEALTLQIRKIDTELLRWHRTNPVSQRLETIPGVGFITASALAATILDAKAFRSGRQFAAWLGLVPRQNSSGGKDRLGAISKMGDRYLRHLLVVGATAVVRYTRRKTTAVSLWANRLLQRKPARLVTVAVANKMARIIWAVMARNENYRGTPVTA

SEQ ID NO: 345622 - protein, 483 aa, unidentified
MKGNRQKQQEKPSKKASSEKRQRGASRNRRKQRRELARKIQAQDVSLEVKHPDAAGIDIGNTAHYVAVPPARDREPVRRFGCVTAELKEMARWLKQCGIRTVAMQSTGVYWLPVYDILEEEGLEVYLVNARETKNLPGKKTDVLESQWLMQLHTYGLLRNSFRPTQEIRQMRNYWRQRNDWIRSAVRHLQRIQKTLTRMNVQLANVISDLSGVTGQAIIQAILKGERDGRKLAALRDGRIKASEEQIAGSLEGNWQEDLLFVLKQEQEGYEFCQKQTKACDLRLHEYLKQRPDRSAGADLPEETRKCRRKKKRGNAPQIPMREGIFRMTGVDLTRIDGVDVMTAATVVSEVGWDMSKWPTESHFVSWLRLCPDNRISGDRVIGKGRLTTNNRLTVALKMAASSLKESDSYLGAQFRRLRMRLGAPVAIKAIAAKLARLIYRMMRYGMEYVDQGAELYEQQHRQRQIQSVKRKAAVLGLKIIAA

SEQ ID NO: 345623 - protein, 378 aa, unidentified
MSSENTLHIAIELSLSSWLVAARLSGAEKPRLHRLEGGNAAALLTLIAELRSAAANKVGGPVGVACCFEAGRDGFWLHRVLTAHDVASYVLEPTSILVNRRARRAKTDRLDAEGMLRVLAAWLGGDRQVCSMVRVPTPDEEDAKRPHREREHLVQERLRIENRLEALLFTQGIRGRPSLRSWERDMAKLRTGDGRTLPPLLRAELDRLRRRLVLVLELIHEVEAERAAALAASTTDTMTRKIIALQRIRGIGENFAAVLGRELFYRTFDNRRQLASYVGIAPMPYQSGGMDRDRGISRAGNPRARTTLIQLAWLWLRYQPGSALAGWFRQRVGTLAGRTRRIAIVAMARKLLISLWRFVETGVLPEGVEIRTAALPAA

SEQ ID NO: 345624 - protein, 356 aa, unidentified
MLYLGIDQHARQITISLRDDHGDVLLARQVSTHPEKITAFFQQLTRERLRDGERFVAVLEVCGFNDWLIRMLQDYHCHKVVLIQPEDRKKCKTDRRDAATLSELLWVNRERLLQGKPVRGVRQVEITSPTDQEDRRLTTLRKDAGGARTRLINKVKQILRRHNLQWQMPTKTFPTVAAVAWLKGLALPEIDRLEMDHLLADLEQAEKRLKDLGRVIARRCAASAGGKVLSSMPGVGGGFTALSLACRVGQVERFPRARSLANYWGLTPGCRNSGESDQRLGRITKAGSPTARWLLAQLVHKVLRRDARLRDWFRRVKRRRGPTVARVAVMRKLATIIWHVLSKRKTYAECRAPAAA

SEQ ID NO: 345625 - protein, 441 aa, unidentified
MAVEFVGGPEQAEFMARVRGLDPGQVLLVPVDVGKSEAMAMVTDLRGEVVMSPFKFALTASGAKVLSDRTVSASVSRSAALCRVGVETAGHYHRPLVEHLVADHVEVVELNSAAVKAARGQQLRARQKTDERDLAAIADLLIRGAGRPPQQRSAALLEQAAWVGHRRRKVDMGRRLRQQIHAQLDLVFPGLGACFGDIFATRSGRMILTEFCNPERVVRLGPNRLAGCARTRGIRMTVAKSELIVACARDALTPQSSQRDLVEQHLAADLSMFLTVEGEVLRCERELAALIASTPARVLTSLPGFGVVRASAYGAAIGDHTRFTDADSAYAFAGLSPASYESAGRARPGLGITKSGSVTLHQAILELGKGMGMHQPDFADYRARLISRGKPRPIAAVAVAHRAHRVAFALMRDGVAFDPAHPIPTSAGRPVTTSQPTPETT

SEQ ID NO: 345626 - protein, 410 aa, unidentified
MKKHNYRTKKVNEINWPELGQQLGGEAVTFAVDVAKAQQYALLTNDTQSLSIIVKWELLETKGLIHELKQLNCPVTVVMESTGTYGDAMRHQFRQAGFILYQASAKRVHDAKEIFDGVPSLHDAKAACLIAKLHKEGLTKPWHELDEAGRELNAVRREYDMHQSQYERNQNRLEAYLSRHWPEVLGLFDLDSVTLEKLLITYGSPQAIAADAEQAAKDMKAWGGHFLSAEKIACAIDSAVGTIGQPCIDAERRYLQALATEMQHSRCQRQAAKQLLEASVEADTGLKEMAALIGKLTTAILIGLHLDPRNFSSAHSFLKALGLNLTEKSSGQYHGQLKLSKRGSATARKYLYLAALRLIQKDPVIGEWYRAKADPKVKMKTVIACLRKLAKALWHVARGERFDARKLVTI

SEQ ID NO: 345627 - protein, 346 aa, unidentified
MKVTTSGIDVAKSVFQVHGVDEGGKVVLRRQIRRAQLLLFFSRLAPCLIGMEACASSHYWARKLSALGHTVRLMAPQFVKPYRKNDKNDGNDAEAICEAVQRPSMRFVPVKSPAQQAELAVHRIRRRLVGQRTALINQLRGLIAEYGVVLPQGANHVRSKLPALLEDCSESLPTLAVELFRDLYEELVQLEQRIGTYERRVERLYRGNPVCQRLGQLDGIGALTATAFVATVAHATQFKNGRQCAAWLGLVPKQDSTGGKPRLLGISKRGDVYLRTLLVHGARSAMRHTPKRNDPKSRWVEQLRKRRGENIAAVALAAKHARILWALMVQGQSSPQPATQSIEQPV

SEQ ID NO: 345628 - protein, 405 aa, unidentified
MLYLGIDLHRVQMTVSLRNESGDVILRRQVSTRWAKLEEFRGQLQQAGAAGEKFIAIVEVCGFHDWLVKWLQQDDGCHKVLVVQPLGRSATKTDRRDANTLSELLWVNRERLLRGDRVQGIRTVLVPGAEEQADRHLTQLREQLVWKRTRTINQIHKILRRHNLEWERPTKSFQTRKVAEWLQTLPLGPMDRLALNQLLVQWRLWEEQLAVTDSGIAERFQANQHAQLLATIPGVSMYIALAITCRIMPIERFPRGRSLANFLGLTPGCRSSGETERLGSITKEGSRLVRCLLAQVVLHLLRRDQTARAWYQRIKRRRGANIARVAVMRRTATILWRMLSKGERWRPGAANSETPAAASDPRPARLWRPRQTMLSALTAREAEAAGSSTGSSSLLAGGEVTRCPA

SEQ ID NO: 345629 - protein, 437 aa, unidentified
MVHPDAAGIDVGGHEHWVAISPERDPEPVRRFGCFTADLREMAGWLVVKGVRSVALQSTGVYWMPVFEMLEQHGLEVYLVNAQHTKNVPGRKSDIQECQWLLKLHACGLLNNSFQPTDEIRIARTLWRHRGNLVAEAASAIQRVQKAWIEMNVPLSDVLSDLSGMSGRAILNAILQGERAPEQLAALVQAGVQATPEDIAKSLEGNWRPELLLVLRQQVELYRTYQEKIVDCDEQLRRHWESLGGSVDLKAQPLGPRPRGKRASRNAPAFDLRSELYRITGIDWSPVNGLDVRTAQTVISEAGPDREAFASEKHFTSWLGLCPTHEPSGGKVLKRRTRKVVNRASTAFRGTASSLLRSQSYLGAQYRRLRTRLGAPKALTAMARQLACLYYRLIKHGQPYVDKGSAYYEARYREPQIRSVVKKAQKLGLQVLMPKSA

SEQ ID NO: 345630 - protein, 335 aa, unidentified
MRYIGLDVHFSSSTYCILDENGREVTCETIRGHWPKLLDRLRSVEGAWTICFEATCGYGHLYRELSGMARRVVVAHPGQLRLIFRAKRKNDRIDARKLAKLLYLGEVPEAYVPGEDVQSWRELIEHRRHMVDRQTTCKNAIRSLLRSHGKIAPRGLWTKKGLAWLRDEPMPTPAARLKRDLLLDELTDAKRRVRTVTEALNALGRSHPVVILLRTIPGVGIRTAETIAAYMDNPRRFVRRCQVGAYFGLVPCQDASAGVNRLGHITRQGPATARKYLVEAAWQGVYRSPTIRAYFERVLHERPERRKIALVATAHYLLRCMHAILLSGTPWHEAA

SEQ ID NO: 345631 - protein, 345 aa, unidentified
MSVYVGIDVHRKRSQLAVIDAKGEVLANRNVPNGAEPILQVIGGLPTGTPAAFEAAFGTSWLVELLEDYGFDPHLVHPSRCKAIASARLKNDKVDAAILAQLLRADLLPEAWIAPPPVRQLRALLRHRVALVRLRTQLRNRIHAIVADHGHDRPRGGYWTGPGRAWLAALDLPAVSRELVDDDLGLIDAIQARVDRLDGEIRQRARSDPRVKVLTQLPGVGPFTALVILAEIGDVSRFASARKLASWAGLTPTVRGSDRVAHYGHISKEGSVWLRWVLCEAAQTAKRHPQFAATFQRIANRRGKKIATTAVARKLVTRAWHLLTNSEPATVPQLASAPAAQTGTP

SEQ ID NO: 345632 - protein, 481 aa, unidentified
MMHGHEKSDLAIVAVKLTNKAEQSAAELVERRAGTKGNAGQQSTRRTQSRVSVSQALERIRQGLPFGPEVGETMGRAAEVVAPSSSIRTDGGCPVAQVNDLSRSLTAFDPISTLVVVVEMSKAHWLVSGAVPGVERQPLKKLEPNASALLRLIERWRNEAVRAGRPISRIALAYEAGRDGFWLARWLIARGIEAHVIHSASVAVSRERKRAKTDRLDAAMLMRVFLGWLRGERGHCGLVAIPTMEEEDARRPSRERECLVNERSRITNRMKSALARLGIRGFKPHLRKAPERLAGLRTAEGTSLPANIIEEFRRDMARLALVREQISSIEKTRAERLERAPDTGSHAMVRLLARVIGIGIETADMLVREILSRKLRDRRAVARYAGLTGSPDESGLKRREKGLAKAGNARVRRGLIQLAWRFLMFQKDSALARWYRMRTEGPSGARKTTMIVALARKLLIALWRLVTTGEVPDGVELRSAP

SEQ ID NO: 345633 - protein, 429 aa, unidentified
MNKNEATPTEEYAALIGLDWASEKHDVWLWDVATGKSRHRVIEHTPEALADWLSELQSQYPGQRVAVCLEQSRGSLIYALMGHAFLDLYPINPVTLAKYREAFAPSRAKDDPGDAKLLAEILRLHRDKLAVWKPADDQTRLLGFLNEERRKAVNLRTKLVLRLQAALKLYFPQAIQWAGTDLGAPMACDWLLKWPTLEALQRAKPQTIRAFYYAHNVRRPDLVEGLLATIASAKPLTQDAPVIGAHRLTVQMLAKQLRTLHSSIAGYDKQIAQLFKEHPDALLFESLPGAGAILAPRLLTAFGPDRTRHPDAKGMQTYCGVAPVIERSGKSRWTHWRWNCPKFLRQTFHEYAKSSIPYSAWARAFYDQQKQRGKGHNAAIRSLAFKWIRVIHRCWQTHTPYDEARYLQALELRGSPLCRLIAAPDREAS

SEQ ID NO: 345634 - protein, 356 aa, unidentified
MSHDVKYIGMDVHQEAIVIAVLNESGKLVMESVIETKASSILQFLHGLRGELHVTWEEGTWAAWLYDLLQPQVQHMVVCNPRRNALLKEGSKSDKVDAGKLADLLRSGMLRPVYHGENGLRTLRELGRSYQTISKDLTRVMNRLKALYRGWGIPCAGTQVYAVRCREEWLSKIPHAGVRRRAELLYQQLDGLQVLRRELRPEFLAESRKHKAAKLLRQIPCIGPIRAARLIGLMQTPHRFRSKRQLWTYSGLGIETHDSAQYRFVRGQVQRSKKPQQVRGLNRNHNHEMKEIFKSAATRASCGTGPFHDFYTGLLAKGMKPEMARLTLARKIAAITLTLWKKEERFDVEQLKTQAA

SEQ ID NO: 345635 - protein, 359 aa, unidentified
MSTITIGVDLAKSVFSVCEMDGAGHVRRRLDLKRDVLAVWLSQVPAGSVVAMEACSGAHHWARRCLEYGLQPRLIAAQFVTPFRKSRTAKNDRNDAEAIATAARQGNMRFVPVKDVDQQARLAWHRVREGYKTESLAIGNRLRGLLAEFGIVVANSDVALRRVLADLDAQDGLPGELRELLRDLAAHWTQLRERIDACDARIDSHARQDARCIRLRSIVGIGPITADAVVATLGSATEFRNGRQLAAWLGLVPMQHSTGGRARLGTISCRGDAYLRTLLIQGARSSLQRAKAVATEKATPEQLWIRTVDCRLPFGKVLVAIANKHARQAWAMLARDVDYDPHACLQHPRRQPTSTVQAA

SEQ ID NO: 345636 - protein, 382 aa, unidentified
MPDGIRWVGLDVHARESTFAVFDQGSGEVITKRVVGRPHELLPYLRQIERPARMVYEAGPTGYGLARRALAEGIELGVCAPGKTERPPADRIKTDKRDAVRLARLLAAGELVLVTIPSVEREQLRDLVRCREDIRADLVRARHRIGNFLLRREIYWEGPGEAWTRKHRSWLTSIRFADHASQATLGDYLHAQDVLISRRDQVEADLAQLAVSAPCAHTVARLRCLRGIDTLTALGLCAEIGEWGRFDHPDQLSAYLGIVPCEHTTGAQRRLGSITKAGSTPARRLLVEASYHYRRGPVVGAPLERRQRGQAPEIINISWKAQRRLNARWRQLKDARRKPGGVVAVAIARELAAYCWEIATCTITAIEPTPTPTTRKRLTNSR

SEQ ID NO: 345637 - protein, 415 aa, unidentified
MDVLYERCCGLDIHKKLVVACMITPGPRGTPHKEVRSFGTMTADLLMLSDWLEEHGATHVAMESTGVYWKPLFNLLEDRFTLVLANAQHIKQVPGRKTDVKDCEWIADLLSHGLLRPSYVPDRPQRELRELTRFRTTLVRERAREVNRIQKTLEGANVKLGDVASDVLGTSGRAILDALVAGTSDTAALADLALGRLRDKRVSLERAVDARMGAHQRFLLAEQLAHYDALNQSIERVSAEIVERVRSVERIIERMDAIPGIGRRVAEVLVAEVGTDMSRFPSAAHLASWAGICPGNNESAGKRKSGRIRRGSAWLRTALVEAAHAAVRAKDTYLSAQFRRLAARRGAKKASVAVAHSILVIVWHLLQHDCEYVDLGTNYFDEHDRQQVARRLVKRLEGLGYRVPLDSLPPSVPAA

SEQ ID NO: 345638 - protein, 338 aa, unidentified
MQVIRVGLDVGKRFFQVHGVDARGGVALQRKLRRAEVERFFAGLPRCLIGMEACATAHHWARVLMAQGHQVRLVPPAYIKPYLKRGKSDAADAAAICEAIDRPSMHFVAVKSAAQQAALVAHRVRALLVTQRTMTVNALRAHLAEFGMIAPAGIGRIEDLIALVAGKEDLRLPGEARSVLLTLITQYRSLAAQIEAVERAIMAQHKASPASRRLAAIPGIGPITATAFVATIGDARAFRSGRHLAAWLGLTPRQNGTGGKMQLGRISKGGDRYLRTLLVLGATSALRSAKRGDPALAWLRALLARKPARLATIAQANKNARIIWAMLTRGEAYRPAAH

SEQ ID NO: 345639 - protein, 379 aa, unidentified
MIYVGIDVAKDKHDCFITNSDGEVLFKPFTITNNLDGFNELYQKIESVTEDATKVKVGLEATGHYSYNLLGYLIDKGLAAYVINPLHTNLYRKSLSLRQTKTDKVDARTIASMLMSDVNLKSYSDISYHNEELKSLTRYRFDKVKERAKLKSSVSRLVCILFPELEKLVPTLHMASVYSMLSEFPGAKHVASAHLTRLTNLLSEASKGRYSKDTAITFREAARASIGSNMPAKSLELKHTIKLIQELDSEIDEIENEIKVIMDEINSPILSIPGINYRMGAMIIAEIGDFSRFDSPDKILAYAGFSPSTYQSGQLDGAYAHMEKRGSRYLRYALYNAAKYVCHWDPTFAGYLAKKRAEGKHYNVAIKDSSCLFFVRAEI

SEQ ID NO: 345640 - protein, 295 aa, unidentified
MDHFAGLDVSVKETSICIVDDTGRIVREAKVASDPEALLQVLRNVNYSFKRIGLEGGPLSQWLFSGLAEAGLPVICVETRHMRAVLQAQINKTDRNDARGMAQMMRAGLYRPVHVKTLRSQKLRMLLTHRKLLQSKAIAIDNDLRGTLRNFGLKVGAVGTGRFEARIRELLEDLPDLAELVEPLLVVRRTLREQIGVLHRRLLSVVRKDDVCRRLMTVPGVGPVVALTYRATVDVPARFRNSKAVGAVFGLTPARYQSGEIYRTGAISRCGDEMMRAMLYEQLRSCWCAWGSGPG

SEQ ID NO: 345641 - protein, 413 aa, unidentified
MQVLIERCCGLDVHQDTVVACLLVGAPGFRPKKEVRTFRTMTRELEALRDWLKASGVTHVGMESTGVYWRPVYAVLEGDFELIVGNARHIRNVPGRKTDVKDAEWIADLVRHGLIAKSFVPPPPLRELRELLRYRRKLVESQAAERNRLLKLLETANIKLASVASDVFGVSGQAMLRALIEGTASPIEMAALAKGKLRRKRDDLILALEGRVEPHHRFLLTMQLHRLEVTEQDIDALDLRITERLEPYRIQLALLMQIPGVDWVVAAVLIAEIGVDMSVFVSAHRLAAWAGVCPGSHQSAGKQKSGRARKGNVHLRTILVGAAVCAGRTKGSYLKDKYHRLRARRGALRAALAIAHKILVAAYHMLSRGLPYRDLGEAYLDQLDQTRTAANLKRRLERLGYLVSLQPKEAATA

SEQ ID NO: 345642 - protein, 377 aa, unidentified
MKKELYLGLDVHKDCIITAVAQEGRKGEVRDTGVISNDLHALEKWVGRLRKAHGSDVVLRACYEAGPCGFGIARRLKQLGVECEVVAPSLTPKRAGERVKTDRRDARKLARLLRAGELSPVYIPESTDEAIRDLCRARTDAVDDRCRSRHRLKGFLLRHGYHYQGKSSWSAAHERYLRELVLPHPAMKVILEEYLQGIAAAGERIARCEEAMRALLEKWHLRPAVKALMAMKGFRTVAAMILVSELGEVHRFSHPRQVMAYLGLVPTENTSSDRRRQGHITKCGNAHARWLLVECAQHYATPPKVSKELSRRQEGQPREVRALSWKAQNRLHGRFARLSARRLQRNKAMVAIARELCGFIWELLRTQPCYQAQSPPV

SEQ ID NO: 345643 - protein, 350 aa, unidentified
MVTLGGDSHKQTHTVVAVDDNGRQLAEKTLPATCAGHLEALQWAARWSERKWALEDCRHVSRRFEAELLAAGELVVRVPSKLTGGARKVARTSGKSDPIDALAVARAALREPDLPVAKLEGAGREVRLLLDHREDLVGERTRIQNRLRWHLHELEPETAIPARRLSRYHILAEIEQRLERHQGVVAQIARELVVRIRELTRCINQLEAEIGHRVGALAPTLIQLTGCGALCAAKVIGEAAGISRFRSRAALAMNNGTAPVQGSSGNQQRHRLNRGGNRQLNVAMHRIAITQLSRPGPAKEYLAKRLAAGNTKTEAVRALKRRISDEVYRRLLRDERESSTSDVTTCVAAA

SEQ ID NO: 345644 - protein, 311 aa, unidentified
MTDHTIGIDISKDHLDAHRLIDGKSRRFVNDRSGHKALIAWIGCDAVRIVYEPTGPYHRKLEQALAAADLPLVKVNPRQARRFFEGAGQLAKTDRLDAAMLATMGSLLAIAPRLARSPLLHELKDLHMARTALVKDRTAAKNRAKSLSMPLLKRHNGERLTQIERQMEAIEAEIMHRIKADPDLARSFAILTSIPGVSDITAFLLIIDMPELGRLEATEAAALAGLAPITRQSGTWRGRASIRGGRANLRQALYMPALVASRFNPDLSAKYQQLLTAGKPPKVALTALMRKLIVLANALLKANRKWTSKPA

SEQ ID NO: 345645 - protein, 296 aa, unidentified
MRNAVGLDISKLTFDAFAMVGNAEYSAKFDNNSKGLNQFSDWLKSLGCQNLHICMEATGNYYEEVADYFAQYYSVYVVNPLKISKYAESRFKRTKTDKQDAKLIAEYCRSAQESELVKRQKPTDEQYRLSRMTVAYTQIKSECAAMKNRYQVAKDEEAAKAYAEIIKAMNEQLEVLKAKIKEQTEKPKCKEGVKCLETIPGIGRMTAAVLFHHLTSSQFETSNKFAAFAGLSPQQKESGTSVRGKGKLTKFGNRKLRAVLFMPAMVAYRIRAFPDFIARLEAKKKPKKSHHRRIDA

SEQ ID NO: 345646 - protein, 310 aa, unidentified
MDATVVVGIDVSKDRLDVHVLPEEEAFAVARDGKGLAELIERLQPLACTAIAVEATGGFETVVAAGLGGAGLPIVVVNPAQVRAFATALGKRAKTDPIDAAVIARFVEATRPQIRPLPDAETQMLADLVARRRQIVDMIGAERQRQKRATAHAAKSIARLLTALERELASINQDIDDNVRRSPAWVADENLLTSVPGVGPIVARTLMAELPELGTLDRREIAALAGLAPWTRQSGQWRGRSFIGGGRPQVRSALFVAAMVAGRHNPVLRAFRQQLLDRGKAKKIAIIAVARKLLTILNAIIRDQKPWASA

SEQ ID NO: 345647 - protein, 317 aa, unidentified
MDTIVVGIDVSKDKLDVAVRPGGEVFATSRDAAGLDAVIARLAPLSLAAVAIEATGGFETVVAASLAAAGLPVVVVNPAQVRAFANALGKRAKTDPIDAMVIAHFAEAVKPDIRPLPGEAAQYLADLVARRRQIIAMIVAERQRQLAAGRLQKSIARLLKALEKELCVLDADIDAAVRGSPAWREREDLLASVPGIGPTIARTLIAELPELGTLSRKEIAALAGLAPWTRQSGRWKGKSFIGGGRSCVRAALFMGALVAARCNPALKAFKQRLIAAGKPKLVAVIAVARKLLTILNAVMRDKRPWRNVEQEPAHARP

SEQ ID NO: 345648 - protein, 317 aa, unidentified
MHIAKNSQDLKIDNTLAAVKKLYAKLKKIYKKEVEKLVFIYEPTGSYSELLRKFCADKSIQCFIINPKQFSNYAKALGVEVKNDEVDAQVLAQAIVLAKPSQIKVPVYDKDVEQIKELMSFYKFTTKQTAQLKGHLESLVAKAGDSFSIKELQKSIKASKEREKRIIEQVHQLIQANPIYKKSYENITSIMGVGQIGGIALLHLFLKYPEANQRQITSLAGLNPVYRQSGSSLQSSYRISKSGSVFYRGALFMGVMTAVRYDKNFKAFYERLKANGKHTTQAQIAVMRKIIIVAHSLYKNDAKYVKKEDTLEGETMD

SEQ ID NO: 345649 - protein, 376 aa, unidentified
MKSIIYMGMDVHKNTYSLCAYDPSMKEFVAETRCTAEVKMIKKFIKNLKKKYADDYGEVDIDVKTGYEAGCLGYSLYNQLKEEEIDCDILAPTTMYRSSKNRVTKNDKLDARNIATNLANNTYKAVYVPNADDVEVKECIRMMNDFKLELKKVKQYINAFTLRLGHKYDGKSRWTGLHIKWLTKLELTDMHREILNEYLAEYDRLTDKIDRFKERIVGISQTEKYEQPISQLRRFKGIDTASAMALHVEISDFQRFPNAKAFSSYLGLTPGENSSGDSVTYTSITKQGNKGLRNLLIESAQALVRGKIGVKSKVVKARQKGQDKKVIEYADRAVERLQRKYHKMIYRGIQRNKAITAIAREMACFIWGMETGNIER

SEQ ID NO: 345650 - protein, 493 aa, unidentified
MSNSKKKVPKKVLVDEGVLSQVNLNAAGIDIASEEHWVAVPADRDEQPVRMFGPTTGELRALAAWLHKCGITDVAMESTGMYWIPLFEILEEEGLRPILVHPSHIKQFSGRKTDVLDCQWIQVLLCYGLLRACFRPTQEICQLRTYMRQREVLIKQSTIHIQHMQKALDQMNVLVHRAVSDITGKTGMSIINAIVNGERNPKKLAKMRDRRCKKSEKEIAEALDGNFLPQHLFCLGQALEGYQFIKGQLHDCEQQLESALKGLDLKIEGDEIQKVKEKGTKKPKPQGNDLKFDIDHYLIGMSGVDLTQIESIGSLTAATILLEIGADMSMWPTSMHFCSWLSLCPGNNKSGGKQKSGKSRKSANRVANALRIAAQSLKWSQQPLGHYYRRMRARLGPAQATTAAAHKLARIIYVMLKEGKPYQSEIHEVSEKELHQRKLKGLTARANNMGMALIDGQTLAFLAPLLEKLETGEIAPELLEASGLGELATGCVT

SEQ ID NO: 345651 - protein, 355 aa, unidentified
MDSTMYVGMDVHKDTISIAVMNSAGKVVMESILETKAVTILQFIQGLRGSLLVTFEEGTWAAWLYDLLKPYVTKVTVCNPRKNALLKSGTKSDRMDAQTLAELLRNGSLSAVYHGENGLRTLKELSRSYLTISKDLTRVMNRLKALYHSWGIACAGTQVYAPRHRLEWLNKITEVGVRGRAEFTYQQLDGLQALRQGVRRDLLAESRKHHATKLLRQIPGIGPIRAALLVALLQTPDRFRTKRQLWAYSGLAIETHGSGEYRYLEGQLRRSKKPVALRGLNRNHHHDLKWIFKSAAVKAISPAGPLHEFYESLLAKGMKSSMARLTLARKIAAITLIVWKKGVHFDAEHLKPQAA

SEQ ID NO: 345652 - protein, 405 aa, unidentified
MKKVIKVCGLDVHKDTIFACIKSGNYQSQVKQFSTMTCGLTALNHWLKGEKVSKVAMESTGIYWMPVWRALENDFKLLLVNPYFIKQMPGRKTDVQDAQWIATLLEKKLLRGSVVPEKTIRVLRSYLRRYAQLQGQMTRCLQQVEKQLSQCNIKIASLSSAIDSKTVLDIVESISKGNYAPEQLLALVHGRIVKRHGEKVKQSLQGIIEEHDVFLLRQIYEDYLHITGQCNELLGQAQKIAEEHYKEQLELLQTIPGIKQLSAVIILSELGGNIKLFETAQRLTGWCGLRPKNDESAGKIKSRSITKGNKYLRRILVQTAWAASRTKTCYLKTKFEHLAVRKSSKKALIAIARKQLVIIWNVLTKQEVYQEPSIRLSAQQISRKQKYYQEKLNKLQQQQVLEKAV

SEQ ID NO: 345653 - protein, 347 aa, unidentified
MRFYTKQHPFYCGIDLHARTMYICILSQDGEVVLHRNMKASPDVLLKAIAPYRDQIVIAVECIFTWYWLADLCAQEEIPFVLGHALYMKAIHGGKAKNDKIDSQKIAVLLRGGMLPQAYVYPAAMRATRDLLRRRLHLTRKRAELLAHVQNTNSQYNLPEIGKKLAYKANRDGVAERFPDPAVQKSVEVDLALMDYYDQLLSDVELAIVQTAKQHHAQTLYRLQSVPGIGKILSLVLLYEIHDITRFPRVQDFVSYCRLVKCAKESAGKRYGTSGAKIGNAYLKWAFSEAAVLFLRNNPVGQKYLARLEHKHGKGKALTILAHKLARAVYYMLKRDTVFDMAKFLNG

SEQ ID NO: 345654 - protein, 366 aa, unidentified
MKKISTVQVFGNEILKEQKLTIGVDLGDRWSFYCVLEEAGQIILEQKVPTTPEAMKQTFSRIPQSRIALETGTHSPWVSRLLTELGHEVIVAHAQKVQLITKSNRKDDRHDARTLARLARIDPELLGPIRHRSVQAQIHLTVIRARAELVSARTALVNAARGLVKSYGQRLPKCGTQQVSRELAAALSTELRDVLEPLLKEIESLNERIKEYDERMEKIAKEVYPEVSLLKQVKGVGTQIALTYVLTIEDPHRFVKSREVGCFLGLKPGRRNSGESEPQKGISKEGDRYLRTMMVQGAHYILGPFGADSDLRRWGLKLAERGGKNAKKRAVVAVARKLAVLLHRLWVSGEVYEPLRNSQKAMRAVA

SEQ ID NO: 345655 - protein, 435 aa, unidentified
MSNKVIFNLDELFISVGIDVGADFSWMSIALPNQQFVGKPYKILHNSIDSLTTAVSKIKEAEELYSLESRIFLESTGIYHYPLFCYLRDKGFNCSVINPIITKNSTNINIRKVHNDRFDSKKAALVGLKPDLKVSLMPSDLALNCRNLCREYYDLMDNRSAYVNKLQGELRMAFPQYLGIFSKVTINTSLTLLETYTSPSAFLKADKQEIIDIIKSTARFGLTYAQNKYNAIIQAATDANQFGYIIDSNIKRIRLYISFIRKYDEEINSILESLHELVDANEDSDFVKQIHLIETFKGAGFLSAVSIMGEIGDFSAFSKPKQLFAYFGLDPAVKQSGKFEGTKVQMSKRGSAIARRVIHTLTLQSISISRNREAKNPVLREYYLKKCDSKPKLVAMGAVSHKVCNMIFAILRDNKPFKIIAPQEHIKQYLSLIHI

SEQ ID NO: 345656 - protein, 439 aa, unidentified
MPQPILAVGVDPAKRLHRAVAVLFPDQVILDVALPNACDAIANLDDRLAELANQHGAELVYGLEDHRRYGRLFCQVLTERGRELRVVNPLWTSRQRAFYGQDKDDAIDGRSIAAVVLRRHQDLPLATDFGEVAQAVREAERSLQDLDKARTRLINRLHLQLSDTYTATYEGFFGKLRSPLALRFFRHFPLPQDLVGHNVEMLASLLLDLAGGKVGPHKGGNRLIAMRSKAQAILETSAAMRASPRTLALELKAELIRQLCDELLANHVRIIRLERMLREQLLPVTKQTITTITGISTILAATIIGETGSITRFRSPAAFAVYNGTAPARNSTGGRDRHKARRDCNHRLKRAFYLAARAAVRHDPIAKTYHQCCTSRGLSYCEALKRVARRMSDLVYVLLKSGKAYDRLIVENAIEQRREQGGTRRTSPRKQSLLRSRPN

SEQ ID NO: 345657 - protein, 436 aa, unidentified
MKRARKRYVGLDVHKDVVEYCILDASGKKIDGDRIVCEQSVLKRFATKILSPKDHVALEATTNTWSIVDILEPHVAKIVVGNPLKTKAIAEAKIKTDKIDAMILAQLLRCDFLPTVWIPDAKTRILRRLSSFRKSLVQDSTAAKNRIKGILNHLLVKHDVTWMKDGFDELKRLDIPLHERTIMDCEIVILEHLKKQIENVEMEIKKLAYEEENVRLLMTLPGVDYNTATAVVAAWGDISRFKDADHAASYLGLVPGTKKSANSCYHGPITKTGASLARSLLCEGAQCLSRNDGPLGVFVRRLLQKKPWNIAIVAGARKLATIAYHILKNKEPYRYASVVRTQEKLRRLRKSVTGKRLEQRYRYDKKLREDIPKGEEVCVRFIPPLSDVYEKEGLPSTRPYNGLSDGEKRAIDEMGLTEQVQKTEKVQVIVSPKKIK

SEQ ID NO: 345658 - protein, 433 aa, unidentified
MLKINYMSTLFVGIDVSSKSNSVYAMDFEENRYISSSFGNNQPGADELADMIAACMQKHKNLDTLLIVLESTSVYSVHISNFLSASEALMPYKPYVFCVNPKATANYRKSFIGMEKTDPSDAYLIADFGRVGRTRKMEPWRGGQFIALKRLTRHRMHLSECITREKTYMVSNLYLKFSELQLLDGDDKPFGSLYGAAASAVLTEFLSPQEIIDMPEEELLSFLAEKSRNRISDISKTSELLKKAARDSYRLDKCMYEPLNISLASSFNCIHAYQKEIKLIEQAIDKCIKGMNPNALIILQSIPGIGPVWASGILSEIGDITAFHSSDALAKYAGLYWPKGDSGDFISVDYQISKAGNPYLRYYLGEAANSVRKHIPEYADYYARKYAEVTKHQHKRALALTSRKFVRLVFGLLAKNQLYTGEKLDAEYHIKSN

SEQ ID NO: 345659 - protein, 416 aa, unidentified
MTEQQRWYVGVDWASENHHVLITDGDGRKIGEKIFKHGGEGLAEMAIWLMATSSATDPCQIHIAIEVPHGPVVETLIERGFKVHAINPKQMDRFRDRFTLAGAKDDSRDAETMASALRTDPRCFRLLGVGDPTVIELREWSRIAEDLGAERNRLTNRMREQLWRYFPAILEFDGDLGAEWLLELWETVPTPAKATRVREATIVKLLKRNRIRRFDASHVLAVLRQQPVTVAAGTMEAASAHIATLIGRIRLLNRQLKQAHERLDALTSRLALNEEAEPGHKKQHDVEILASLPSVGRIVLATLLAEGFDALQRRDYAALRSLTGVAPVTRRSGKSLIVIRRQACHQRLSNAMYHWARVAVQHDRISRAKYAALRSRGHSHGRALRSVADRLLNVACAMLKTGTTFNPSLADEKTPC

SEQ ID NO: 345660 - protein, 392 aa, unidentified
MVCVGIDVAKDKHDCFILSSEGVVLADVFTIANNRDGFEMLLQRIRTCTRPTDNIKVGLEATGHYSYNILGFLLDNGLATFVLNPLHTNLYRKSLSLRKTKTDRIDARTIASMLMSDVDLKSYTDTAYHNEELKSLTRYRFEKVQERAKLKVSVSRLVNILFPELETLVSSLHTVAVYTILREFPGAKQIATAHLTHFKTVLSDASNGRYDREKAVAIREAARTSIGSIMPAKSLELQHTIRLIREFDEEIREIELAIKAIIDEMAPPILTIPGISYRMGAMILAEIGDFSRFDSPDKLLAYAGLSPSIYESGKLKATGAYSHMEKRGSRYLRYALFNAAKYVCIWEPSFAAYLAKKRAEGKHYNVAISHVAKKLVRLIFALQTSGKAFQPA

SEQ ID NO: 345661 - protein, 342 aa, unidentified
MIFYFIGLDIHKKMIAYCIKALDGRLVEQGIIDADRKSLVEWVNGLPGPWIGAMEATIFTGWIYDFLRPFAVELKVAHPEMLKAITAAKKKNDRADAEMIADLLRVNLLPECHMLSEEIRELRRILRYRNHVVRTAVKMQNKMSGLLMEVGAGYSKKRLHGKKYFEELLEKIEEIPASVKNLLKLSRASFEMFHAVQKRLVKALHTNTLIQDRVQHLMTIRGVGEVTALTWALEIGDPLRFGSIRQAISYCGLCSAQRESAGKEQRGPISKKRNKHLQTMLIEAAKIAPHWNPQLAAIHERELKKGNRNRATLAVARRLVAYMMVVDKTQTDFIPHEEKEAA

SEQ ID NO: 345662 - protein, 439 aa, unidentified
MKKFQALQSKREFVRNKTVVGIDPAKRGFQAVALNPNGVLLSTPFKFDADHHGLHHSLWNNLSRRLEKFNTENLLFAVETSCNLWQPLCFYLQQCGYRILLVSPLTTKHSRPLVSHDFSRTDPKDALLIASNARDGYYDFYEGFTPHSAAMHRLSITYDKLRKNYVQNRLRIRALIEQVFPEFFKVLNLDTLTAKYLVKQYFLPQHYIEMDIEEETEKIRKVSQRRHGKETLLKLREYAGQSIGIGLDGVEITAARLSLDCWLSLLETIEEQMKVVMDELIRLAQETPHFKPIVSVKGISEKLTALFIAETRDLSSFKHYKQIEKFAGLNLRQSQSGDYVGARYISRIGNRRLRWILYKMAEETVKYIPEVRVKYLRRQVSRRNYRKNIVASIPQVLKLIMVLNREQRAYANQDTHQRELRELEERYGQIKKQQQKKAA

SEQ ID NO: 345663 - protein, 448 aa, unidentified
MTELEGSAAVAVGIDAAVVANHHIVVRRPEAGRPGTVIDDFVVPPTLAGMERLTKRLASWPGTVAVAEPTSMTWLPLSIALRDAGVKLSLVGTRHSARLRSALAGKNKSDPIDAAVLSRAGEFFELSPARMPAATELALRRAAQRRGKTIIDANRCLRRVISQARWAFPDLWNAFAGSRPTALAVLGRWPQLDALARARVSSITEVVAAHTRGVRTVEHRAQQIRATARAWAEFWDGHLDLDALGWETAELLADLAVAEERVDRATHQTRRYWEQLWGDDPVLLSVPGMGPVLAPTVRAFLTDGSHLDDAKAAQSFVGLNPSNWSSGLMESPSRAITKEGPPVLRLAFYQAANVARAHDPQLAEFYRRLMIERGHCHTKATCAVARKLVARTWATITSGTPYQLRDLDGTPITRHQATTLAADLAVPDNVRRRTRAHSAATHRARLTR

SEQ ID NO: 345664 - protein, 351 aa, unidentified
MAETLKNSIAFVGIDIGKNSFHVVGLDKNGTIVLRQKWSRGQVEARFANMPPCLIGMEACVGAHHLSRGLQKLGHDARLMPAKYVRPYSKGQKNDFRDAEAIAEAVQRPTMKFVATKTVDQLDLQAMHRVRERLVSQRTGIINQIRAFLLERGVAVRQGLRFLRAELPDILARPSDILSPRMVRLLEELAGDWRRLDGRIEGLSNEIEAIARQDSSCERLMSVPGIGPIISSAMIAAIGAGDVFSKGRDFAAWLGLVPRQISTGDRTILGKISKRGNRYLRVLFVQAAWVVLIKPKSWERHGLKSWIEAAKKRLHRNVLAIALANKLARIAWSVLAHGRNFEATKFGEAAA

SEQ ID NO: 345665 - protein, 367 aa, unidentified
MKKISTAAAKQTRNFQDQKLTIGLDLGDRTSWYCVLDGAGEVLLEQKLSTTPKAMKEVFGGMPRSRIALETGMHSPWVSRLLGELGHEVIVAHARNVRLIGESRKKDDRLDARRLARLVRIDPQLLAPVKHRSAQAQAHLMVIRARAGLVRARTSLINTARGLTKSYGERLRGCNPRNLNPEKAQELSPELRLALEPLLGEIESLSERIGEYNEQIEQMSKESYPEVARLKQVKGVGTLIALTYVLTLEDARRFGKSRDVGCYVGLQPGRRNSGQSEPQLHISKEGDPYLRTLLVQGAHHILGPFGADSDLRRWGLKLAERGGKNGKKRAVIAVARKLAVLLHRLWVSGEAYEPLRNHPKVGLATAA

SEQ ID NO: 345666 - protein, 352 aa, unidentified
MAKNDFDELMSVGVDIGKDVFHLVGFDKEGRLVLRKKIKRMALVATFEELPHCIVGMEACLSAHFVSRTLRKMGFEPRIIPAIYVKPFNKGQKNDYNDAEAIAEAALRPNLKTVSEKTQEQLDLQALHRVRSRLVSRRTAAMNQIRAFLIEQGITVRRSAAALRASLEAILSNRGDEMSLRMRRLILGLQQDWIWLDKRIDMTTSEIKEVSETEESCQRLMTIPGIGPIISTAVVAAVGTGEAYDRGRDFAAWLGLVPRQHSTGGRTILGRITKRGSRYLRMLFVQAAQVIMMRPKNWHKFSFGAWLEAAATRMQHNKLGVALANKLARIAWSVLNSGKDFDWMEKELATAI

SEQ ID NO: 345667 - protein, 411 aa, unidentified
MEVIYPRCCGLDVHKRSVVACLLASGPDGAPTKAIRAFGTMTDELLRLADWLAAAGCTHVAMESTGVYWKPIWNLLEANFTLLLANARHVKAVPGRKTDVKDCEWLADLLRHGLLQGSFVPDRPQRELRELTRDRTSLVRERTAEANRLHKTLEGANVKLGAVASDILGKSGREMLAGLLAGNADPAALADLAKGRLRAKIPELERALAGRFGTHQRFMVVRHLAHIDFLEEAIAQVSAEIGERMRPMEEAIARLDAIPGVGRHLAEALVAELGTDMARFPTAAHLASWAGMCPGNDESGGKRRGGKTRKGSPWLRALLVQAAHAAARTRGTYLAAQYRRLTARRGKAKAAVAVGHTILVIIYHLLRRGTDYQDLGPQCFDERDRRAVERRLVGRLERLGYAVVLRPTAAV

SEQ ID NO: 345668 - protein, 365 aa, unidentified
MELRNIFVGIDLGDKNSVARIAVDRGKAERYGFVNNAQGRARLFEEVKRRAAAANGKVWMAYEASACGFVLADEAQNRQMLCAVLAPTKMEKSVEQRKHKNDDRDADGVVETLRGHVLAGNRLPGVWIPDKQVRDDRELIRMRLELAEKQAKLKSQVQMLLKRYGLEKPSGLGAGWTVGYRQWLQALAETSSPPLGMGGRQALGSLLRQLQLIEEEIQRMDQCVKQLANEARHKPFMDELMKEPGVGRLTALVYRTEIGYAGRFRRGRQVGKFVGLTPSSYESGQQNDRKGHISHQGPPRIRKMLCQSSWVGIGSGEGGDRRLYDRIVSRNPKRKKIAIVAVMRRLAVRLWHRMRQVEMKLAATA

SEQ ID NO: 345669 - protein, 320 aa, unidentified
MENIALIGIDLGKNSFHIHCQDHRGKAVYRKKFTRPKLIEFLATCPATTIAMEACGGSHFMARKLEELGHFPKLISPQFVRPFVKSNKNDFVDAEAICEAASRPSMRFVQPRTESQQAMRALHRVRESLVQDKVKTTNQMHAFLLEFGISVPRGAAVISRLSTLLEDSSLPLYLSQLLLKLQQHYHYLVEQIKDLESQLKRKLDEDEVGQRLLSIPCVGTLTASTISTEIGDGKQYASSRDFAAATGLVPRQYSTGGRTTLLGISKRGNKRSELCWFSVPGYSYKNWNTSLASWPTGSGSCCVGKATLSSPVLWQTSWPE

SEQ ID NO: 345670 - protein, 294 aa, unidentified
MSDQPVFVGIDVGKDWLDVARHSSDEVQRFGNDERGIQELVAFLANIRPRLVVLEATGGFEFPAAAALAAVEIPVVIVNPRQTRDFAKSTGRLAKTDTIDARGLALFAARVQPEVRGLPMEEARALEAIVARRRQIIEMITAEKNRLGFALKPVVKGIQKHIRWLERQLHDVDQDLDSMIRNSPVWAAKSDLLQAVPGVGPNLSRTLIAELPELGCLSHKQIAALVGVAPLSKDSGKMRGKRMIWGGRAAGPYPKGASRRRAAVDGLLSKMAALRLGDPGEFPEPALRDAGRLS

SEQ ID NO: 345671 - protein, 412 aa, unidentified
MDVIVERPAALDVHKSQVTACVRVPGADGARRSEVVEFSTMVGGLLTLRDWLKAHGVTQVAMEATGVYWKPVWAVLEEDFELLLVNARYVKNLPGRKTDVKDAEWLCQLLEAGLLRASFVPPKPIRALRQLTRYRKAQIKERQREANRLHKALEDTGIKLDCVATNILGKSGRAMLDALCHGTTDPEILADLAKGKLRKKIPALKQALEGRFESLHALLVSSILAHLDFLDEQIERLSEAIEEQLRPFAQAVELLRTVDGIETRTAQNILAEIGVDMSVFPTAGHLSSWAGQCPGNDQSAGKRRSGRTRKGSKWLNDALKDAAMSAIRTNDSYLQAQYQRLRPRIGHSRALGAVKHSILCACWHMLTTGELYRDLGGDYFRKRDPERQTKRLVAQLERLGHKVTLEALAEAA

SEQ ID NO: 345672 - protein, 429 aa, unidentified
METVFEVMNACCAFLDIHKETVEATVRILQGQRVRQETRRWSTTTGQIQAMADWLATHGVTHAGMESTGVFWKPIFNILETRFTVILTNPAHMKQVPGRKSDLRDSQWGAQLLQAGLLRGSFIPPRWQRELRDYTRYRSQLQAEQTRVANRLHKVLEDANIKLGSVATDILGLSGRAMIHALMEGEQDAATLAEMAQGKLRTRRPELKLALEGRVTPHHRRMLRMLWKELAAVEECIADVDREIQEVTQPYTSQIEQMDPVPGIDRRTAEVVLAEVGANVDPFPSDQDLASWAGMCPGNEESAGKRRTGRTTKGNRWLRAALVQAAWAASHTKRSYLGAQYRRLAGRRGKKRALVAVGHSILVILYHLLKDDRPYSDLGRDFFDRMNHDRLIRYYSRRLAELGQKVTVEPLPEVTPGEGMVNVPSPCQS

SEQ ID NO: 345673 - protein, 347 aa, unidentified
MNITTIGLDLAKNVFQIHGVDERGQARLRRQLKRGQVVGFFMNLPPCLIGMEACASAHFWARRLTGLGHSVKVMAPQFVKPYVKSNKNDAADAEAICEAVRRPNMRFVPVKNAEQQALLGLHRARQGFVHARTAQANQIRGLLGEFGIVFAQGIHWVSQKLPDILEDATNDLPGTSRELFSRLLKHFRELDRQVKEIERQIHVWHREDPASLRLQGIPGIGPITASALVASIGDARTFKNGRQLAAWLGLVPRQHCSGGKNQLLGISKRGDTYLRTLLIHGARSVLQYLKSQGNATQRWLERLLTRRHHNIAAVALANKNARIVWALLAHNRDYQPGYGAAATAGLA

SEQ ID NO: 345674 - protein, 366 aa, unidentified
MREQQNNRQKRTIIGLDLGDRWHRFCVLGESGQVVEEGSVANNRVALSELSSRYPGALVVMEAGCHSPWISRHLEQAGCEVIVSNPRKTRAIYQHERKSDRRDALMLARIARMEPALLYPVRHGSEEAQQDLLRIKLRDSLVRARVGLINSLRFTLKSLGYTIANPSTERFHKVIQSALPESVVQMIAPSVQAIEELSLRIKLLDREIRTLAHTKYPETRWLEQIPGVGPITALYFVLKIGDPARFERVRDVGAFIGLCPRRDQSGENDPQLRISKRGDAYLRRLLVSSAHYILGPFAPPSALRQYGLALAAGATARAKKRAVVAVARKLAVLLLTVWKNKSPYQAFPQQREKMRIHDLERLRCIA

SEQ ID NO: 345675 - protein, 317 aa, unidentified
MEARVAGIDVAKASLEIAVRGIRQWSHPNNLKSVSALVEELQRLKITLVVLEATGGYERAVVKALHEAKVPVAVVNPRQMHDFAKATGQLAKTDALDAEVIALYGELMQPKPRPPPSPETERLERLVTRRRQVVDMAAAEKNRHSGLAAEEREHVAAHLDWFETEVARLDKELHDTIKSIPAFRQRAKILRSVPGVGPVLASTLLAQLPELGSLNRAQIAALVGVAPLNSDSGQRTGRRFVWGGRASVRQVLYMAAMVGSKRNPRLRALYQRLVEKKKPAKVALTACMRKLLVTLNAMLKANAAWQPSHSPTLGPKR

SEQ ID NO: 345676 - protein, 368 aa, unidentified
MNTKQISPTSSTAEPNKLGGVIKLGIDVHIEKYVVVMKIDGSAPQRAKRFTPAEFIAWAQALSTQCDELHSCYEAGPFGYTLHRRLTQMGVTNHVIRPINWDEHAKNVKTDARDATQMVLCLDGYLRGNPRSFSTVRIPTETEEQRRSTTRQRQSLIKERQRLAAKARGHVMYYGGRLQGEWWKPRRWRDLSEQLEPHLLELLSALRTIMVVVEEQIVRLEQCLEQMTEVALPKGMGPVIFQQMEREVCDWSRFETRKQVGGYTGLCPSEDTSDKRRFQGSITKHGNPRLRHMLIECVWLLIQWNPDYRGIVKWREKLLEAKLTKASKKKIIVAIARQFAVDWWRIRTGKATPDQLGLSMKALPAMSA

SEQ ID NO: 345677 - protein, 480 aa, unidentified
MSQQKKHSKPLGEEKTAAGTGKRGRKGKGMCLEDRPILEANAAGIDIGAREVFVAVPPDRDEHPVRVFSTFTEDLEKLAQWLVSCGITTVAMESTGVYWIPLYDVVEKYGVKACLVDARGMKNVPGRRTDWHECQWLQFLHSVGLLRAAFRPEGDVCAVRSMMRYRTELVEMTSQHIQHMHKALTQMNVQIHHVISDLTGLTGLAIVDAIIAGQRDPVVLAKLRDPRIKASEETIRKSLVGNWRAEHLFTLEQSRKSYQHYQGQISACDEAIEKLLVAFVPRVDPTERPLPPDRKRKQRGRKKKNANPNTFDLRTESYKLFGVDLTQIPGLMAMVLMLFSEVGRDMSRWKTAGHFVSWLALCPDNDISGGRVLWRGMRRVHNRAGDLFRMAAYSLHHDATPLGDYLRRMKSKLGPAGATTATAHKIAIIFYTMVKKQVEYDATLWADRDAEREKRFEAKLKRQAQQLGYKLVPIEERPTA

SEQ ID NO: 345678 - protein, 418 aa, unidentified
MSTSSLSQPSAAAGFDVFCGIDVARETHHVVALDPGGRRLVDRPLPNAEPELVDLFAELGVHGRVLVVVDQLASIGALAVAVARSRGVTVGYLPGLSMRRIADLYPGEAKTDARDAHVIADAGRTLPHALRRVGVEEHTTVELAVLAGYDADLATEATRLTNRLHDALLHVHPALERLLGKQFRSPGVLRLLAGTGTPAAIAALGPVRIKKALAVGSPRIASRLTGQILTAMSEQTVVIPATEQYGQVIRGLAGQLLSVLQQRQALTAQLEELLATHPLAEILTSMPGVGPRTAIELLRTVGDGSTFASAAHVASYAGLAPATRQSGRSIKGEQQARRGNRSLRGALYISAFAGLRHPPSRAYYDRKRAEGKSHTAALTCLARRRVDVLYAMLRDRQHYRAETFDPSPTPTSQPPIAA

SEQ ID NO: 345679 - protein, 480 aa, unidentified
MNVKATRTKKQVNVENQAIKLLSKEELGIKIEVIKKELRSYTWRDLETNGKFAKNDKLSFITDDMLIAGCDIGSETHYIRAIDVRGRELSSRAFEFSNTSEGFANAKAWVLALAAKNDKKQIVLGLEPTGHYWFALAAWMVSNGISVVQVNPYAVKQSKEIEDNSQLKDDRKDPKLIANLVKDGNYGMPYLPEKVYADMRRLSMFRDQLTEDRIRNINRLHRELKIYFPEYMDAFGKIDGAFTLEVLKVSAIPSDITALGAEGIKNIWHNEKLRGRGYSRANEIVSYAEKSVGLTDGTDAGRETVKWYAEQILKLDEQLAVIESTLHEKCREIPYAENILEIRGVGENILAGILAEMGDISRFDDVKEIQKLSGMGLVACSSGKHKGQTKISHRGRKRLRYWLFQAAKSAVSHADEFKQLHEYYTTRTNNPLKKMQSLVVIACKILRVSYTILKTGTTYDPQKLLKDIKRPTASQAPMAA

SEQ ID NO: 345680 - protein, 356 aa, unidentified
MAIYVGIDVHKRFCQAALMDDSGAVIRELKFENTLEGAHRLVNIARSIDRHVKAVVEPSANYWIKIYDRLEDEGVEVKLTNPSRTKAIAEAKIKMDKLDARTLAYLLKGDLVAESYVPTRKNRMRRTLIRHRASLMKMRVEVKNRIHTILDKYDLSYECTDLFGKEGLEWLRDLTLPEIDDHILESNLQILEALNEQVRGADIRIAKDAVNEEQVKLLMTMPGVDYYAAMILLSEIGDVKRFASPEKLVSWVGLAPQVHQSGENQWTGRITKKGSKRARWILIQCAHTARQHDPKMREFYERIERKHGSRKAIIAAARKMLSIMHVMLTRNEPYHGENRRLTMQKHKRLERIANTA

SEQ ID NO: 345681 - protein, 413 aa, unidentified
MKSSAITAVGIDVSKNKSMVAVRRPGGEIVMHPFEVCHTSDDLSWLASTLKKLGGDIRVVMEHTGNYWRPLALTLKKAGFFVSVVNAMLIHDFSDNSIRKLKTDRADSLKIANYALTFWNELPPFNDEEETRLLLKTQSRMYERITTTATALKNGLIALSDQTFAGVNLIFDDATKSTEGHFKWVDFFMHYWHRDCVCKFAFEAFMESYRCWCKRKKYRFRSEIAQKVYESAKKSVSTLPKCESTKILITQACKSLNAICEAKQACQCEMQRLASLLPEYDIVMSMEGAGPVTGPILMAEIGDVRRFKNKKALVAFAGVDAPPFQSGTFESKSRHVSKRGSPHLRRTLFTVSGIILQLSHRENQVFCFMDKKRSEGKHFYVYMVAGAAKFLRIYYATITHYLRTIETSDFVSS

SEQ ID NO: 345682 - protein, 353 aa, unidentified
MRRPNEKLIAGIDLHSNNVMIGVMNQDGKRVAHRKLDCDLKAVTEFLAPLKPQLQSMAVESTFNWYWLVDGLRAQGYPIDLANPAKIEPYRGIKHADDKDDAFHLAELQRLNILPKGHVYDPELRPVRDLLRRRLNLVHQRTALLLSFKSLHARTTGQQLDLAEAKKMEPKEAPKLYRHPANQLIAQVQAEHIQALAKSIARIEKAVLACAQEIPLYEKLLTLPGIGRILGMTITMEVGDIKRFKTDGDFASYCRVVDARRFSNGKRKADNNQKCGNKYLSFSFVEAANFARRYCEHCRRWYDRKAARTSKVLATKALACKLAKAAWHVMAKPCAYDEQRMFPELATKAMKTS

SEQ ID NO: 345683 - protein, 420 aa, unidentified
MSQTLAGIDIHKRVLMVVVATVSRTVGDGEVNEEIEYEGRRFGSGASEREHLVAWLRERGVEQVVMESTAQYWKPLWLDLEPHFSKLHLAQAHSNKAPKGRKNDFGDARRLARRLLAGELILSFVPDAEQRAWRTMTRSKLQLVRDRVRLQNQLEALLEEMRIKLSSVLSDLLGLSGRRILEALAGGQTDPVKLAELGDDRLKCSQEELIDALRGRAEPMHLQILKLYLERLKLLDRQIEALQHMAAQALHRHEQVVIRLAETPGLGVDSAQQIIAEVGIEARAFPSAAQFASWAGTIPGSEESAETNHSSRSPKGNKFLRRILTQAAQAAIKKKGCHFQSVFRKLLPRLGYKGALWAVAHRLCRLVWKILHDQVRYIEQGSETNPQAKKRRAQKLTKALHKLGFNVAITPIATSLGTVG

SEQ ID NO: 345684 - protein, 411 aa, unidentified
MEQIYERVAGCDVHRDQVTVCVRTPGPRGGVHKDKARFKTTTAGLIEMADWCGERAVELVAMEATGVYWKPVYYALEDRFRVWLCNAYHVKNVPGRKTDMSDADWLADVAAHGMVRPSFVPPVPIRELRELTRYRKKQIDTRASELARLEKVLQDAGIKLTSVASKVLTQSGRAMIQALIEGEGDPGALAELAKGKLRPKIPELTAALSGHFGAHHALVADRVLAHLDFLDDTIAQLSRQIAERVAEGYQPVLDLLLPIPGLQHTSVEVIIAETGADMSCFPTPGQLASWAGLCPGNHESAGKRRKVGTTAGNQWLRRTLIESARAAARTKGSYFGAQYHQIARRRGPNKAAVAVAHSLLDVIWHALSTGEVFTDPGADYFTTRQDPEHRTRRLVNQLERLGYTVELTQTA

SEQ ID NO: 345685 - protein, 423 aa, unidentified
MGKTIPICCGVDVHKKFLVATILTGDYLIPQCKQKHFGTSFRNLLAFKQWLLDNNCKDVCMESTGKYWVPVWNVLEGIVNVVIANPKWVSAVKGNKDDKKDSKWIGNLFRMGLVPSSYIPGKDIRILREFTRYRSKLVSMRASEKNRYQNAFTVCNLTLDAVVSDMFGKSAMAIENYLLDTDVVDPEFCVSLLQKKLKKKSAEIIEAVEGFNMTQEQKERVRIIQGHFADIDKRISQIDEIVGRLTAEYEGTISLLCTIPGIDRRLAITIISEIGTDMSEFGSSRRLCSWAGLVPGNNQSAGKKKSVRITRAGVYLKPALVEAAHAAVKATEKSPYFRIKYEKIMKRRGKKRAIIAIARMILTSIYAMVSTGEVFNPSDLLKYDMPEELLKKRTLAEAKDAVKLLVSLGLVAEGSISLEALAS

SEQ ID NO: 345686 - protein, 354 aa, unidentified
MHDHHDSPVIIGIDTHADTHHLAVITDFGQPLHDITIPATPTGYRQALELVAGYSQVDRIGIECTGSYGAEITRHFLAAGYHVIEVNRPNAFDRRRQGKTDTFDAYSAAEAVLSGRATALPKGNDGLVQSLRVLRTTRTSAVHDRTATINQIKAMLVAAPDELRAKYRGLTTMKLINTLAATRPTTTPISAVESTAVALRHLARRYKFLHDQVNELTRHITRLLNEHAPQLMDVYGAGPDSISQLLITAGDNPERLRSERHFAALTGTSPIPASSGKTNRHRLNRGGDRKANSALHRIILVRMHYDPRTRDYVARRTAEGKTKREVMRCLKRYLARELFPLIQTTLLPRSAPNP

SEQ ID NO: 345687 - protein, 349 aa, unidentified
MEHYAGIDVSLELSSVCVVDAKGKIVKEAKISSDPVALVTFFRGLGIAIERIGLEAGPLSQWLHAGLTQAGFEVVLLETRHVKAALSAMTVKTDRKDARGIAQLIRMGWFRPVHCKSIGSQEVRALLVGRKLLLGKLLDVEFSIRGILRGFGLKMGMVTRRNFEARVRELCAGHSMLEQICAAMLVARSALQTEYTKLHKAMLTIVRKDEVCRRLMTTPGVGPLVAITFKTGIDDPSRIRKSKAVGALFGLTPKKYQSGETDVTGGITRVGDEMVRTALYEAANILLSRVTRFSALKRWGMDIAKRRGTKRAKVALARKIGVILHRMWVDSTNFRWTKEAPNAPRLIQA

SEQ ID NO: 345688 - protein, 413 aa, unidentified
MKIFCGIDWAESHHDIALVDDTGQLLAKRRISDDAAGYRLLLDLLAEHGDTEAEPIPVAIETSHGLLVAVLRTGRRQVFAINPLAAARYRDRHGVSRKKSDPGDALVLANILRTDLPMHRPLPADSDQGRAVTVLARAQQDAVWNRQQLGNQIRSLLREYYPAALEAFQAKAGGLARPDARAVLGAAPSPARAAKLSLAQLRAALKRAGRTRGIDAEAERLRDVFRAEHARHPDVVEDAFGHQLAALLKQFDAACQAAGDLAVAVEAAFREHPDAEIYLSFPGLGVQLGARVLAEIGDDRTRFADARGLKAYAGSAPITRASGKKSYVGRRMVKNNRLMHAGFLWSFSSLQASPGADAHYRRRREHGDWHAGAQRNLLNRLLGQLFHCLQNRALFDEHHAFASPVASSITAAA

SEQ ID NO: 345689 - protein, 359 aa, unidentified
MVIIGCDFHPGFEQIAMVETTTGEITELRLAHKEEAQQFYAGLRGQEVLVGVEACGYTQWFEQMLEQMGHRYLIGDAAAIRASYVRRQKTDRRDAGHLLRLLVEGRFPALWVPTGADRDVRQLIVHRHKRVEMRTRVKNQLHALALNQGLRLRWKLWTRAGMEQLKALQLQPYGTARRADLLRQLEEMDGEIARLDETVRKEAEARPAAVRLMSHPGVGPVTALAFVLTIGDVERFKKSRQVASYLGLIPTERSSGGKQRLGHISKQGNPLLRFLLVEAGHSAVRKDAELSRCYRRLQHRHSTGVAKVAVARKLALRLYWMLRRQTDYAQLPAVRMQASPCHSVVESKTVRLSGQPASL

SEQ ID NO: 345690 - protein, 418 aa, unidentified
MGKRKNRVCGADVHKDIIVATIQDSDDTEFQEKFGTTSIELGRFRDWLIVHNCEQVAFEATGVYWFPVYDALSPSIDTIVANPWMIKGIPRNKSDTLDSKWIASNCLDGKIKRSRVLPKDGRDLRTLTRARSAYTKTRTQLRNRIHKYLALCGITLSSYISDIFGKSGRHILDGLIESKDIDTIMDGIPSGKVKKKREPIKASLGNGLDDVSRMLIKDTLELLDHLDEKVSDTSLEILGRLQERARDLAIVMSVPGIGFVSASIILAEIGDYHDFQKSEQLVKWCGLAPGLNESAGKKSPCGITKQGSKHLRTILVEIAQVVAKMSKNNLSSFFHRLRARKNYNVAITALARKLISIIFHLLINQELYQEDNCATVKTKPIKKDLLCLSKEEQFKDGVAAIVDAFYYFKKKSSLEGGG

SEQ ID NO: 345691 - protein, 347 aa, unidentified
MRFYTTQHPFYCGIDLHARTMYVCILDQSGEVLVHRNMKTDPETFLHVVAPYRQGMVVAVECMFTWYWLADLCADAGIPFVLGHALYMKAIHGGKAKNDKIDSHKIATLLRGGMLPQAYVYPAKMRATRDLLRRRMHLTHKRAELLAHVQNTNSQYNLPAIGKKIAYKANREGVAERFADAAVQKSIEVDLALITYYDALLRDVELTIVNTARHHDANTLHLLQTVPGIGKILSLVLLYEIHDVHRFPRVQDFVSYCRLVKCARESAGKRYGTSGAKIGNAHLKWAFSEAAVLCLRDHPAAQKYLARLEKKHDKGKALTMLAHKLARAVYYMLKRQVAFDPETFFQR

SEQ ID NO: 345692 - protein, 432 aa, unidentified
MNKRVYCAIGIRHVEIEKIVSGRDRLEVVMGVDVGKFELRIVPRWSDGRFEKPWRVANPEEIPQLIDLLKRLGKGRKLKVAMEPTGTYGDAFRQALADAGIDLHLVSGKRAHDYAEVFDGVPSQHDGKDAAVVAELCALGKSSFWRWSPGDQTSQRIGLMVDQMEAANRHKAAWLQRVEGVLGRYWPEATRELALSSGTMMRALSHYGGPAAMRDDPKLEQRLRTFSAGKFKPARLRKIIASAGSTLGVRQTVIDYERVRWCAGQSLSAHLEVSRYQRHLTQLAADHPVIAKQGKTIGVPTACVLWTHLGDPRQYHCAAAYRKAMGLNLMERSSGQYQGQLKITKRGSGAVRQWLYMSALRLIRDEPKAKRWYRRRLRRGITKMSAITALMRKLAMAMWTIVKQDEPFDVQRMLGSIHRRDAKAKGGSVVRR

SEQ ID NO: 345693 - protein, 454 aa, unidentified
MPETTTAASAKRTGACHGARNSRSIAARLEGEPRARLLLRKKVADLSPPADAGDTPARSETQGVGAQERSAMRTVALDMGAKKISYCEVKRRQVVERTTVRTLEALLPLLGPNTPPAAVAIEACREAWHVHAKLSEWGHHPVLVDTTRVRRLGIGGHGRKTDRIDAEVLARGLEAGQVPKAHVLSPERQQLRYHLGIRHALVETRAHYVGTIRHLARSHGVHLPSCTAGYFAAKLRSVSLGEELRALVAPLVTILEQLDVQVRLADTKLAQLCNHEPLVMRLMTAPGVGLIVAAAFVSVIDDAHRFKTAHEVEAYLGLVPSENSSGERRRIGSITKQGNRYARSMLLEAAWSLLRSRKQDDPVKRWGEAVASRRGRNIAAVALARRIAGVLWAMWRDSTVYEPAKVGRASASGIRLNAQDLKVKADAMARAAEKLQRRLRRTTKTTESMNARMN

SEQ ID NO: 345694 - protein, 355 aa, unidentified
MERYIGMDVHAASCTLAVISQTGRRLKDFPVETNGQALVEAVRMIPGHKHLVYEEGLQSAWLYETLSPHVDEIVVAGITESRGSKSDKRDAYGLAEKLRVGNLDKPVFKAPRQFTRLREFSRIHMTLVADVVRAQSRIKSLYRSRGILVSGVNVYGVRHREEWQKQLCSSAQTRATRLYDHLDFLLEQKKQAEADLLREAKKHPIVRVLETAPGFGPIRAARLVPIVVTPHRFRTKRQFWSYCGLGIVTRSSSDWIQTADGGWIKARVPQTRGLSRQHNRVLKSLFKGAATTVITQLSKDPIYVRYERLLDGGTKPTLAKLSLARMIAATVLRMWKDEEEYDPGRAGPSTATREG

SEQ ID NO: 345695 - protein, 346 aa, unidentified
MMLIGCDFHPSWQQVSWLDVETGETGEQKLVHARGEAKQFYEQLAAPVLIGMEATGNSQWFIELVEDLGHQIWIGDAAQIRASYVRKQKTDKRDAAHILKLLVEGRFPRLWTPDREQRDLRQLVLHRHKLVLIRSRVKNELQHLSLNKGMQRKRRLWSQAGQKLLRELPLKKWAACRREDLLGLLTMLDEQIGKLDGAVEHAAEENPQSKLLMTQPGVGPNTALAFVLTLGDVGRFPRGKQVASYLGLIPREESSGGRQKLGAITKQGNRMLRSLLVEAAQVAVVHDPGLRKQYRHRCHQKPKAVAKVAVARKLAVRLYWMLRTNVAYPEIVRIESSSGLPLVGAS

SEQ ID NO: 345696 - protein, 423 aa, unidentified
MKPLHTHPFSAYVGIDWADTKHDICLQVAGDDRREFDCIAHQVACIDEWAKSLHKRFGGTIAIALELAKGPIVYALQKYDFIVLFPINPSTLAKYREAFKPSRAKDDPTDAELALDLLMRHPERFAPLQPQSVPMRTLLSLTEHRRELVDDKTRLTNRLANTLKQYYPQALEWFEQRDTILFCDFLTRWPTLAQVKRARQASLKAFFHAHNGRRPKVIGARLDSIKAAASLTEDRGVIVPCRLHVLVLVEQLRVTLQAIDRFDREIADLAPTLPDYSLFQGLPGAGPHLAPRLLAAFGEQRQRFQGADELQKYTGIAPVTERSGKKSWVHWRWQCPTFLRQTFVEWAGQTINKSFWAGAYYRQQREKGSSYQAAVRALAFKWIRILYRCWITRTPYDETTYLNALRKRGSPLLNNLKLNPKIA

SEQ ID NO: 345697 - protein, 312 aa, unidentified
MGTFVGIDVSKDQLDVAVRPTQKRWSVANDSTGLAQLVTELQQLESPLVVLEPTGGYERELVSSLVRAKVCFVVVNARQVRDFAKALGKLAKTDRIDADVLAHFGDAVRPEPRLLPDEDTAELDALITRRRQLVEFRAAEMARKHLAPEVVRPSIDKVIDFLTKQIDDVDGRFRKLLRSTPAWREKDDLLQSIPGIGPIVSCTLLAQLPELGRLNRKKIAALAGVAPFNNDSGKRRGTRQTWGGRATLRSVLYMAAVTGARHNPVLKRFYQRLIALGKEPKVALVACMRKMLVWANAMLRDGKKWNPAQLAA

SEQ ID NO: 345698 - protein, 337 aa, unidentified
MVYVGVDLHRKRSHVVALSPAGEVVLSRRIGNAPAEFLRLVGELEPNPIEVVFEATYGWSWFADLLADAGIPAHMAHPLATKAISAARVKNDAVDAKTLAHLLRTNLLAEAWIAPPAAREARRLVRTRASLVRMRSRVQSQLHALLADLGVLPELTTLFGPAGRQWLAELRLPAAARGRLDTGLRLIDAITVEVGRADADLRAGFAGDDRVRRLLPIPGIGLVTAATVVAEVWDIQRFPSPERLCSWAGLTPGERTSDAHTRRGHITKQGSRWLRWVLVEAATTAVRDPDLGRFTAQIGQRRGTKIARVALARRLLTLCYYALRDDGGCRAYPAPAQ

SEQ ID NO: 345699 - protein, 318 aa, unidentified
MAEVTFPQLIQRACGIDVHLKVVVATIDGAGIQRETRSFKTFTSSLNELKEWLLSNGVTHVGMESTGVYWKPVYKVLEDSIPNVWIVNARHIKNVPGHKTDKMDSEWICKLLLAGLLKPSYIPPKGQQRQLRDLTRYRNKLIQQIASEKNRMMRILEDCNIKLSSVVSNTSGTTATSLIDMLCEGKVLTLDDINSVYHGKLSASPEELLEACTGFVEEHHIYLLQMIRKDIDQTQTLVDDLSERIKRLLSKYENVLELLREIPGFSTKVVEDLVSEIGLDMSHFPSEKHLSSWAGLSPGNNESAGKKKAHESLTETNR

SEQ ID NO: 345700 - protein, 345 aa, unidentified
MGETKRRAFKHFVGIDVSKDTLDIALMSDTKLLEHCKIANEPLAIKSFLTHLKSIENLKLSNCLFGLEFTGIYGNYLLEALTKAKANVVQEHPLQIKKSLGLTRGKNDKVDSIRIGQFLRRYDHAVNLWEPKRKVIQQLATLSTLRARMVNHSQALTKPLKEDIGFLSKEFTLLNKQLCADSIVALKSDIAKIDLEIQNVCNSDERVMRLMELALSVPCIGPVTAVQIIVTTNEFKDISTPQKFACYSGVAPFQFASGSSVYKPARVSFIANKKMKTLLHICAVSAIRTVPDIKAYYLKKTLVEGKHKMLVLNAVRFKLITRVFACVMNNRLYQTTYTLNDNYDK

SEQ ID NO: 345701 - protein, 457 aa, unidentified
MLPVSGLPSEFEQINLNAAGIDIGAQKHYVAVAKGRDPEGRDIRYFDTFTIDLHALADWLKQCGIDTVAMESTGIYWIPLFEILEQNGFDVRLVNPRSIKHAPGRKSDVVDCQWIQQLHAYGLLTSAFHPDDQISVLRAYHRQRTMLVNHAGTHIQHMQKALEQMNLKLTNVISDITGTTGMKIIRSLLAGERDPKKLSKHRDPHCKKSEKEIAKSLHGNWRDEHLFALQQAVALYDFYQTQIVDCDKQIQAQLCRFEDRSDTGELPPAASKSSGSGKKLTFDAREHLYRMAGVDLTQIVGLNTPTVLTVLSEVGLDMSRWPTAKHFASWLGLCPGSKISGGKNFSSKSKPSANRAAHAFRMAAYSLHRSQSAIGAFLRRKKAQLGAPKAITATAHKIARIFYEMLKTRTEYKDLGVDYHQNRYKERMLRNLKHKAKEFGLELVNPNQDQLVMANSE

SEQ ID NO: 345702 - protein, 324 aa, unidentified
MLPSLGIDIGKDSFHVELSRNEKLRHRRFANRQEGFAELGVWLAKHQVAQVHACLEATGPYSEALALYLHQQGHTVSVVNPAQIKAFGQSELLRNKDDRPDAGLIRRFCEKQQPAAWTPAPAHLRELQALTRHLENLHETRQQQLNRLEGTNTKSVVKSLRKLARHLEAEIQRTEKQIADHLNSHPDLKQQCRLLESIPGIGKRTAAKLLAEIEGINQYKSARQVAAYAGLTPQNNRSGTIRGKTRLSKTGNARVRKALFLPAMVAKQHNPIVRTFCQRLAQRGKTKMQIVGAAMRKLIHIAFGVLKSGKMFDPNHELLLNSVS

SEQ ID NO: 345703 - protein, 369 aa, unidentified
MPLVRGERAARFSFGTPSPRGSIWRAFATVLWKPEQLIDFNSHLQGWETENMPELIHVGIDVSKDALEVACGPQSPTQCFTNDDAGHEALVNVLHVHRVDLIVMEATGGYEAPCACALQAAGLAVAVVNARQARDFAKAMGYLAKTDRIDAQVLAALAAVLANRADRQKLIKALPSDEQQRLHALVLRRRQLVQMLVAERNRLPMSHQAARVSIEALIKAIRKQIVDIEADLSSHIAHHHADLAGLLRSAKGIGPHTSMALIADLPELGKLSNREISALVGLAPFNRDSGKMRGKRMIFGGRTQVRCALYMATIVAMRHNRVIQRFYQRLLAAGKPKKVAIVACMRKLLTILNAMVRTGKQWDETFHFA

SEQ ID NO: 345704 - protein, 328 aa, unidentified
MQDGELMERAVRTERERFAIALKAHRGARVLLEAGTESEWVARSLEQLGHEVIVADPNYAPMYARRQRTVKTNRRDARALAEACRLGAYRPAHRTSDPQRRVRARIAVREALVRTRSRYVVLIGSLLRQEGLHLPGGAPETFLTRLQTVTVPEPLQQAIAPMLPVLETLHEQIRKADRELEALSRTDPRVRRLRTTPGIGPVTAATFVATVDRVDRFAGPHQLEAYLGLVPREDSTGDHCRRGPITKAGNTRLRWLLIEAAWSIVNYPRSETASLRAWTLRLAVRRGRPRAVVALARRLAGILFAMMRDESVYDPKRLTCTTQSARVH

SEQ ID NO: 345705 - protein, 350 aa, unidentified
MEYVGIDWSYRRAAWCALSDAGAIVGEGAVSSDEDGLARLVIKRGTEVRAVVEMMSGAVWVRDTLVTAGWEVQIAHARKVRDVAPLACKTDKVDACVLAELCRRELVPELWVPALADRELRERLRRRMHLVRMRASAMNRIFGLLTQWGLRLSLKRLREPDAMTLLEQRGVPLVWRRSIAEALDVIELLDARIGPIDAELGPLARADTRVALLDTIPGVGALLGLTIASEIGAVARFGSPRKLVGYAGMAPKVSQSGDRSRTGALSKAGSRTLRWAAVEAAQHAWRPTNPWHQLYTDVAKRAGKNPAKSAVARKILIATWHVLSRQQPFKPAAPRRPHPASASSRCFLAA

SEQ ID NO: 345706 - protein, 377 aa, unidentified
MDRTSCSAVSRHTLHCALELSKNSWLLAIQFPDREQPSVYSIEGGDTEKLMAKLTAARDCWAKVIGSLPVITLCYEVGYDAFWLARFLRADGIECLVIDPGSVQVNRRGRRVKTDRVDVKMLLRTLIAWCRGERHVWSLVRIPSIDEEDLRRSHRERSRLVRERTAHINRIKGLLFAQGIRGIKVKSQCKTLAVDKLLTGDGHRLPPRLACEIARELQRLAMVQEQIAEIEHERDTAPTPCEATERKRQLLLQLKSIGPAISALLSREVYYRQFVNRRQVGSFLGLTPSPYNSGEEEHCQGISRAGSGHVRAIMIETAWLWIRHQFVERTAGQSTRMRKIMIVAVARKLAIALWRYVEHGLVPQGAILNPPTTGKAR

SEQ ID NO: 345707 - protein, 342 aa, unidentified
MKEYHYVGLDVHKKVIAYCVKKADGTIIGEGNVAATREDLYKFADRLPKPWVGAMEATLFTGWIYDFLKPYADELKVANSFMLRAICASKKKNDRLDARKIADAFRCDWFPEAHMPPAHIRQLRTTLRYRNLLVREEVRMKNKTAGLLMEAGAVYNKSKLNRNKYFNELLDTLDYVPETIRELAESSHESAKYFERAQKELVEALLEAPALKERVERLRSIQGVGEITALTWALEIDDPRRFASVKKAISYCGLCSGQDQSGGKNHRGPISKQRNKNLQTILIEAAKLAPRWNPQLEQVHNKAKERGANRNEATIEVARKLVAYMLYVDKTGNRFQLRENKN

SEQ ID NO: 345708 - protein, 412 aa, unidentified
MSLLQAALEPSTLVLAIDPGKVSNRVWLSDGSGLLVEPVSMPVSRDGLAGVERLVSSHDAGHPGVVVAIEATGSLHRPWTSALEQRYPGAVRLFAPSETKAARTQLGSGRFKTDDRDCAALTYLARQGGGRRWVDEVEIDALRAVVRHRRGLVHDRKIIQQRLHDQLNALAPGLSAPAAHGRSLALDQPSGQAVLACAVAFAGRAPTVRSLQARAVGRFRRTDADYWAHRWRCCLPPPPDAEQRAERLDRDLARHQALQADIAALEADLEPLLTGAGGQVLTTLPGVAVVRAAGFAAHSLPINRYPDAEHLYSATGLAPALYESATIRHRGRISRQGLAEHRDALMGIAWGLSRFSPAFAERDREYRNRGMTPIQARVALARHACRLAYRLLTTLEPFDEERYRRGRRRRGR

SEQ ID NO: 345709 - protein, 324 aa, unidentified
MYLGLDVSKNTLDCCLNKDGFFYACKISNNEKGFQKLRAWLDGHGCDETLHCCCEATGNYYEAAAEYLAAHYKMSVENPRKIKAYAVSELKRSKNDKQDAKTIAEFCEEKSRKLKVWKPKNQTEKELQSITRYIARLKQQKASETVKRQTASDNIKDLIDETIDYLGRKIKEAEGRLKTYINQNPELKQKAANLTTIPGIGIQTAAIIMAALSGNNDFKTAKQFTAYLGLDPAEYKSGTSVKGKDRISKVGDCTTRAALFSPALVAYRIGTFPRLVANMRQNGKHIMQILTAIMRKLAVVAYTLHKTNTTFEKQRHTRIQQKAA

SEQ ID NO: 345710 - protein, 453 aa, unidentified
MAKRKPSGTKKKKHNAIWEQINEHAAGIDAGAEYHYVAVPDDGVSASVRKFSTNTRGLYELADWLIERGVTTVAVEATGVYCMPLLEVLDARGLAVVLAKPSSLKSINDRRKTDMLDCQWIQLLHSFGLLRGSYRPEQQIATYRTYNRHRQNLIEQASTAIEHIKKALTQMNIRVDQAVSDITGQTGMQIIRAILDGERDPSVLASKRDKRCAKSEEAIAEDLTGKYVDHHLFTLRHAVRTWDHLKELLAECNVAIEEQAKTFQKKCARESIPKPRRIEHVRKNVLSFDARELFYEVLGQDLTQIDAIATGTVSAFIAEVGTNVDAFKTVKNFCSWLRACPGSNSSGGKNRSGRNRTTTNRLWTALRIAAQTLSSSKSALGAFYRRKRAQLGPEKAINAAAHKLARMIYLTLKYQRPYVDPGPDQYLHRHEQRIVKTMEKRAKQLGYTLVKAA

SEQ ID NO: 345711 - protein, 425 aa, unidentified
MNYKQNEKINQVKESTLVVGIDIGSTTQYARAFDWRGIELGKVFTFSNSREGFEAFKAWMQRLQDKYRKSDVIVGIEPTGHYWFDLGAYLEDEGILLVMVNPYAVKQTKELDDNSQSKNDRKDPKVIAKLVTEGRYSAPYTPDGVYADLRIMVTNRKRLIREMTQIKNRFARWFAIYFPEYTDVFGDYEAQSSMLLLKKVCTPEAIVELGAEKINQIWRDAKLRAVGMKRATTLCKTAKRSIGLKKGSSAAQYEMKLLLEDYEYKKAQLDAVMEEIEKLCRKIPESEQMLAIKGIGVITVAGFLAEVGDVRRFESPRQIQKLAGLSLRENSSGKHKGQTTISKRGRSKLRAVLFNAAIPLIATNPEFKSLHEYYTTRANNPLKKKQSVIAISCKLIRVFYAILANGVTYDAQKMLSDIHRQPQAA

SEQ ID NO: 345712 - protein, 435 aa, unidentified
MRCERGSVDVVLPARSRSESTGKGTGMRIIGLDIHRAFAEAVAWEDGKLNRLGRVDMRRDLLSAFAARLSPEDVVVVEATGNAASVVAVIAPHVKKVVIANPMQVRIIAHAKIKTDTIDARVLAQLYASGFLPEVWIPDEPTQALRRQVTRRNQIVRQRSRLKNIIQSILHAHLIPSCPHQDLCGPRGRDWLAVQVVPEDERLAIERHLREFDRLGEDLKVIERDLARSALADDGVKRLMTIPGVDMVVALAMAAAIGEARRFDKPQKLVSYLGLNPSVRQSGPGPAYHGRITKRGRGHARGMLVEAAWAAARAPGPLRAFFLRVRARRGQHVAAVATARKLTIIIWHLLIKGESYTWARPSLHARKLRDLELKAGHKAARGQKGEAHAYNVKSHRDEERRWVEQAETAYTRFVAGWNRRGPKKVRTGAAKEERL

SEQ ID NO: 345713 - protein, 342 aa, unidentified
MKTTMIGVDLAKNVFQLHGASMTGDVKYRKKLSRGQFFRFMSEQPPALVVMEACGSAHYWARELVKLGHAVKLIAPQYVRPFVKRQKNDAADAEAIVIAARQPEMRFVEPKTADQQARAVLFRARERIVYQRTELVNTLRAVLYEYGQVIPQGIGHIKRIEAIVEKAEIGLPELVREECRDLLAQIGEKTARIAEKAKKLAELSRQSGVARRLQTMPGVGPLIALAVEAFAPAMQSFRCGRDFAAWLGLVPRQFSSGGKERLGRVSKAGQADIRRLLIIGAMTRVRWASRKPLVQGSWLSRMLAKKPRMLVAIALANKMARKIWAMLTKQEDYRDPALAVAA

SEQ ID NO: 345714 - protein, 410 aa, unidentified
MEVVHAHCAGLDVHKDTVVACVRHMADGKVATTIRTFSTATQELLALSDWLSAENATHIAMEATGVYWKPVWNILSDGEFELVLGNAAHIKNVPGRKTDVKDAAWLADLMAHGLVSGSFVPDQATQEMRDLLRTRKQLVRERTSHTQRIQKTLECANIKLDSVVSNVVGVSGRRMLEALISGQTDPRELAAMAHGRLQATPAELEAALRGRVTTHHRFMLRLHLDQIDSFDQAIARIDKEVKDNDKNFRAAVELLKSVPGVGSLAAEVIVSEIGIEMNRFATAGNLVSWAGLCPKNDESAGKRRSNRLKAGAPWLKTTLVQCAWAAARSKDTYLHAQYVRIRARRGNKKAICAVAASILTAAYHMLKDGTFYEDPGPDYFDRRNKDQQANKLVNRLRNLGFNVILQRASA

SEQ ID NO: 345715 - protein, 364 aa, unidentified
MNPDPDSRLTSIVKVIRLSSSPFFPVRLEDKSMENFYFIGVDVSKKKLDFCVMFEGKVVHEEETANHQSSIMALLHQLEENYGIAGGQMLVCAEHTGQYTFPLACACKTVECRLWLENAAEIKYSSGVQRGKNDKVDAKRIAIYASRFQDKIQCYERPTEDIERLKQLESERTLYVTDLAKYKGQMKDQKDYMPKALYERKMKRLQALMDDLEEAIQAITDEMDEVIASCSVLSRQKELLMSIDGVGRVVATNMIITTEAFTRFDDPRKFNCYAGVAPFSYSSGSSLHSKARVSHRADKVMKKLLHLAAVAVTHRIGGELKKYYERKVAEGKNKMSVINALRAKIVARMFAVIKRNEKYKPILS

SEQ ID NO: 345716 - protein, 342 aa, unidentified
MKDTMIGVDLAKNVFQLHGATMTGHLSFRKKLTRSRFRQFMAAQPPAVVVMEACGSASYWAREMVKFGHEVKLIAPQYVRPFVKRQKNDAADAEAIVVAAQRPEMRFVQPKSEEQQACAVLFRARERLLHQRTELVNALRSVLYEYGHIIPKGIAHIKRIESILDEPNSDLPALVREECFDLLEQIAEKTARIDVKTAKAKALSLATDTARRLQTMPGVGPQTALAISGFAPPMESFKRGRDFAAWLGLVPRQYTSGGKERLGRVSKAGQTDIRSLLIIGAMSRMTVLARKSIVEGSWLARMLRRKPLMLVAIALANKMARAIWAMMTKKEDYRNPARVVAA

SEQ ID NO: 345717 - protein, 451 aa, unidentified
MEVLYLRCCGIDVHKKLLVACLILVIDGQRQKEIRTFATTTQGILSLLDWLQAAGCTHVAMESTGVYWKPIYNLLEGHFEILVVNAQHIKAVPGRKTDVRDAEWIADLLQHGLLKGSFIPPAPQRELRELTRYRVSLVQERARTVNRLQKTLEDTNIKLGDVATDILGKSARAMLEALLAGQTDPAVLADLARGRMKAKRAQLEEALVGTVKPHHRFMLTEELVLIDSLDEAIERVSQEIAQRFDPPPDPKTSSESACQQVKEDQTAPPEVHPGQEEQTRDAQELTWKDAVVLLDSIPGINQRAAEGILAEIGIDMSRFPTAGHLASWAGMCPGSNESAGKRLKGSTRKGSPWLRQLLVEAAHAAAHTKNTYLSSLYHRIKARQGAKQAMIAVGHAILVICYHLLDRQVAYQELGGNYFDEHERQAVEKRLVRRLEKLGYDVSLQPATHVA

SEQ ID NO: 345718 - protein, 351 aa, unidentified
MIIIGVDYHPSDQYIAFVDTETGECGERRLSHSAGEAEKFYRELAARGVSVRVGMEATGYSRWFERLVTELGMELWIGDAAKIKSKRVRKQKTDREDARLLLRLLLQENFPRIWVPSPENRDLRQLLWHRHRLVQMRTRIMNQLQALAMNEGQRRKKKLWSEAGRAQLEKLPLATWASRRRKDLLELLDRMNPTIAELTAAVEQKAKTWPEVQRLMSHPGVGPLTALAFVLIIGTAERFQCGKQIGSYVGLIPEEDSSAGQQRLGRITKQGSSLLRFLLVEAAQAAARCDADWRRRYMHLAMRRQKNIAKVAMARRLAVRLYWMWRNGWEYAQWVAFGSHAGQLGTGHGVQ

SEQ ID NO: 345719 - protein, 355 aa, unidentified
MDSKKYIGMDVHQATISVAVRDAAGKLVMESIVETKAATILQLIQGIHGSLWVTFEEGTSAAWLYDLLRPHVAHVVVCDPRRNALLKAGNKNDRVDPRKLSDLLRAGLLTPVYHGQAGVRTLRELARSYLTITKDGTRVMNRLKGLYRSWAIPCDGDKVYSVRHRNAWLEQLSQAGVRRRAEWLYQQLDILLDLRREARRELLTESQKHPAHQLLREIPRLGPIRVALIIALVQTPHRFRTKRQLWAYCGLALQTRSSGEYRVTEGRLEYTKRPPAVRGLNVNHNHDLKNVFKSAATQVSGSGDPLGDFYQNLLAGGMRPAMARLTLARKIAAIALKIWKKGERFDPGQLKRKCA

SEQ ID NO: 345720 - protein, 322 aa, unidentified
MSVSVLGIDIAKQKFDAALLVDGKTKHKTCKNSAEGFETLMLWLEKQGIQKVHACLEATGNYGEDLASYLHEAGHIVSIINPARIKGFAQSELIRTKTDKIDAGIIARFCLAMKPDPWIPPSPEIRFLRALVRRVDSLIDMRSQEKNRLSTAHESVISLIKEHITYLDQEIEKIRRQIADLIGQNPHLKQRKELLDSIPGIGKVTIPHILAELDDLEKFNHVRQMVAFIGLAPKETLSGSSIKGKPRLCKIGHARLRKALYMPALVSIQCNPVMIAFYNRLKDKGKNGKVIVCAIMRKLVHVIFGVLKSGKKYDPNYKPASA

SEQ ID NO: 345721 - protein, 418 aa, unidentified
MKKDSKSCQRSEANLKRTKVRGPVQRDAKEVMAEVLGKLTGKLDGRAVSTSAKENRRGNTVGPNRDRLTVGVDLGDRWSQYCILGLEGETLAEGQLRTTQEDVGEFFQGMTAARVVIEVGTHSAWVQDVITEWGHEVLVANPRLMEGSKRRKRKSDRIDANKLARLGRVDPQSLHPIRHRSREVRQDLVVLRARDALVSVRTELINTTRGLVKSMGTRLPRCSSPSFAEKVKDAIPVEAREALLPLVQLVETVNDCIEKYDQRIEELGRKKYGHTSLLRQVKGVGPITSLAYVLTLEDPQRFSSSREVGPYLGLVPKQEDSGDSQPQLGISKTGDRMLRRLLVGSSQYMLGAFGPDTDLRRYGLRLCERGGKNAKKRAVVAVARKLAVLLHHLWVTGDVYEPLRHTEAEIRTAQARAA

SEQ ID NO: 345722 - protein, 364 aa, unidentified
MYKLTTATTVIGTDVHKYTHTAVALNCLGKELDTIEFSNQKLAAFEDWLGKLGTQDSLVIGLEDVNGHGLHITRHLLKSKFHVVYVPPVLTERQRIRSTHREKTDRIDAKRVGKAILNRIEEALPATDIVSSKFATVRSIDLLVQEYDNLCRDQTRLKNQLHALLHQYYGDEYRQGYKNPFTRKAMSWYQKDLEKSRHLDQLTGSLASGLLRRLTKLTLVQGQLKTTLKELGLITENHREVQILRGKIPGCGLLTACRIVSEVGDIKRFKTADKLARYMGLSPVQRSSGQRKRLHIDKYGNRKLNKAIHWVAIAQIGRSGHEPAKRYYKRKQEEGKSKLWALRCLKRQIVKVVFKQLNISSDNV

SEQ ID NO: 345723 - protein, 347 aa, unidentified
MLADELDYVVGVDPHRDTHALAVVDVRSGGVVFEATAVADGEGYACVLRLADQHAPGRRAFAVEGTGSFGAGLARFLVSHEERVLEVGRLRRERQSGKNDALDAIRAARSVLGLTRPARPRAGGEREALRALSAAREGAVTARRAGLCQLRGLLVSAPEPLRAELRSLTRAQLLRRLAAVRPEGRQNPELRGTLLALRALARRVKALTVEERELAREIETLTRKLAPQLLEQPGVGPLAAAQVLISWSHRGRITSEAAFARLAGCAPIPASSGQTVRYRLDRGGDRRLNRALHMILVTRRRTHAPTIAYIERRIHEGKSRREASRCLKRYLARNLYRLLENGSPLPT

SEQ ID NO: 345724 - protein, 341 aa, unidentified
MTEVSIVGVDLAKQAFQLHAAARDGMVVFRRKLSRSKFVEVMAKLPRCVVAMEACATAHYWGRVLGAQGHEVRLIPPVYVKPFVKRQKNDAADAEAIVEAAQRPTMRTVAVKSADQQARAMLFRTREMLIGQRTQLANALRGHLAEHGHLVPQGLGNVARFAAIIASTENDLPDLVRDLARLYLDQIAHLSERIKTLEARMADEAEKSAVATRLRRMPGIGPVTAMAIETFAPAMANFRRGRDFAAWLGLVPRQHSSGGKQRLGRTSKMGQRDIRRLLIVGAMSVVTWRGRRSSPGSWLARMLARKPRMLVAVALANKMARAIWAMITYERDYREPAAAVF

SEQ ID NO: 345725 - protein, 410 aa, unidentified
MEALHSRCAGLDVHKKTVVACVRIQQGVTVEQEVRTFETTTSGLLDLSAWLSEKGCTLAAMEATGVYWKPVWHILADGEFELMLANAAHVKTVPGRKTDVNDATWLSELAAHGLIRGSFVPDRPTQELRSLLRTRKQLVRERSSHIQRLQKTLEDGNIKLDSVISDILGVSGRAMIEAMIAGQTDPAVLARMANQRIRATPEELREALRGRLTAHHRFLLQLHLEQIDALDRAIGRIDEEVKTDLDPFREATQIVKTIPGFDDLSAQSVLSEIGVEMSRFPSDAHLLSWACICPRNDASAGKRRSTRMRKGSRWLKATLFSCAWAAARTKGSYFQAQFHRIKARRGAKKAIGAVAASLLRTIYHMLKDGTLYQDLGADHFDKRHKTASTRRLVQRLHNLGFAVQLTPAQG

SEQ ID NO: 345726 - protein, 488 aa, unidentified
MKATSKENSTRAREAKNSTHPAGQMKWHQMSRKQRQELTRKIHSEEISLEVVHPDAAGIDIGNELHYVAVPPDRDREPVRRFGCTTAELKAMADWLKECGIRTVAMQSTGVYWIAVFDLLEAAGLEVYLVNARDTKNLPGRKSDVQESQWLMKLHTYGLVRNSFRPGLEIRRLRTYWRHRNDLVRSASRHIQRMQKALSQMNVQLANVLSDISGMTGQAIIKAILGGERDPRELAAFRDCRVKASEEEIAAHLEGHWQEDLLFVLKQEQDGYEFCQKQMSECDRQLEQYLARMKDRSQGAELPEEKRRGRIHKKKSNAPRFHLRQELFRMTGTDLTRIDGIDVMTAMTILSEVGCDMTKWKTEHHFVSWLRLCPDNKISGDKIIGKGRLPTNNRAALALRMAASTLRASSTYLGAQFRRLRTKLGPPVAIKAMAAKLARLVYRMLRFGMDFVDRGAEFYEAQIHQRQVHHLERKAAKLGFRLTQIPAA

SEQ ID NO: 345727 - protein, 391 aa, unidentified
MTKPKTKTVNDFSRCLDPLDMDATVIAVIEMSQSSWLVAGIVPGVERQPLKKLAIDEHALLNLLNRWRAEAEKQGHRITRIAVAFEAGHDGFWLARWLAAQGVEAHVIHASSVAVTREHRRAKTDRLDTELLKRAFLGWLRGERGHCKMVAVPTLAEEDAKRPSRERETLVGEASRIITRVKSAFVRLGIRGFNPKLKAAATRLETLRTPEDEPIPPNTLAALKRDLERHQIVKKQIREIEQTRLDVLKQAPEKGPHAMVLLLARVIGVGVETADMLVQEVLSRTMRDRRAVGRYAGLTGSPDESGAKRREKGLAHSGNARVRHGMIQLAWRFLLFQKDSALAQWYRQRTADAPSTRKTLIVALARKLLIALWRLARDGVVPEGVRMRPAA

SEQ ID NO: 345728 - protein, 327 aa, unidentified
MSDRQVVYVGIDVSKDSLSVDAGALFKGDVPNTPASIRGLIRKIGKQAGDGSVPHFCFESTGPYSESLFIECCEAGAAASVLNPAKVRHYAQAMSESAKTDPIDARVIRLFAEARNPEPTPAPSAAAVTLRKLVLARDALTKSIVQLSGTLEGASSGDAGSVLKSSVVLLRKKIKTLDRLIAEALKGDARLSGLAGALTEIAGVGVLTAAKVVALVPELGTLGRRRSAAIAGLAPFTRDSGRCKGKTFISGGRAEVRRALFMPATVAIKHNPVLKAVYQNLMKEGKAYKVAITAIMRRLFAHMEAVAAKWLRETAAAASSTPSTALP

SEQ ID NO: 345729 - protein, 410 aa, unidentified
MTDTNITRTKPVLVAIDISKARHEVLISVPGKKRRRRLTVLNQLEDFNRLIATLSDYGCPVRVAFEATGNYHRALAYHLAAAGFEMKLVSSVALARTREALHNSWDKNDPKDAQVILHMMEIGNEQFYHDPLVCGTNDIQELSKTHDVVSKSKTELWHRVLTHYLPLYFPEADRFHRSSRSDWFFAFLERYPSPHFISAMSKDAFTADAWDVVGRKVAKERLLTDIYETAKTSVALPVAPDSDAISMFRLVIAEGRSLIAQRNQIEDRAVALLKDLPDYQLLTSVPGIGPINALTILAEAGDLRRFGHHRQFLKFCGMDLATIQSGTFRGQTKLSKYGNARLRRTLWMAGQVAILQRTNSFRDKFERYISKDRHNTHLRRKAYTAIAAKMARTVHGIIKHGEPYRPFFEG

SEQ ID NO: 345730 - protein, 394 aa, unidentified
MPELFVGIDVAKDTSSAQGIDSNGKGRFSLTFAMDAEGFMQLWKAITAHSNDLSEVSAAVESTACYHINLYSFLTAKGVSTVVINPLLIANFAKLSLRKTKTDKKDAMSIAHFLLVHRDTISQLSLSQDLQDFRDIARERESVGNMLSAHKVEIKRLLQSTFPELERMGDLSTRVMLEFIAAFPSARLVKMARPKAIQKILQRKGVGTRLTYTAEDLIQAAKQSVATISPAKELILQGKVRTLQHLRERHEEMTKILTEYCKSSMLEDFEIITSIDGISKCTATTFLAEIGCIGNYASYKKLIAFAGIDPTVYQSGKFEGSSRISKRGNRHLRRVIWLMTTCVIQHNVSFRVYFMKKRNEGQPFKKAVFATAHKLVRVIFAMLTHRTMFREVCA

SEQ ID NO: 345731 - protein, 402 aa, unidentified
MNAVGIDVSKGKSMVAIMRPFGEIVSAPFEIKHTASGINSLVELINSVEGESRIVMEHTGRYYEVLAHQLSEANLFVSAINPKLIKDFDNDSLRKVKSDKADAVKIARYALDKWQNLKQYNVMDELRNQLKTMNRQFGFYIKHKTAMKNNLIGILDQTYPGVNTYFDSPARSDGSQKWVDFASTYWHVDCVRKMSLNAFIDHYQNWCKRKKYNFSQSKAEEIYGKAKELVPVLSKDAITKLIIKQAVDQLNSASTTVESLRTLMNETASKLPEYPVVMAMKGVGTSLGPQLMAEIGDVSRFTHKSAITAFAGVDPGVNESGSYEQKSVPTSKRGSSDLRKTLFQVMDVLIKTHPQDDPVYQFIDKKRAQGKPYYVYMTAGANKFLRIYYGRVKEYLSSLPES

SEQ ID NO: 345732 - protein, 351 aa, unidentified
MMIIGCDYHPSDQQIAFVDQETGECSERRLNHSEGEAEKFYRDLQQRGVSVRVGMEATGHARWFERLMAELGFELWIGDPAEIKTRRVRKQKTDRQDAQLLLKLLLEDRFPRVWVPSPENRDLRQLLWHRHRLVQMRTPIMNQLQAVAMNERIRRKKALWSKSGRVQLESFSLAPWSSRRRQDLLELLDRLNPTIDQLSAAIAQEAEKRPEVRRLMTHPGVGPLTALAFVLIIGSPERFRCGKQIGSYVGLIPCEDSSAGHQRLGHISKQGNSSLRFLLVEAAQIAVRHDPDWRRRFLHLAVRRERRIAKVAMARKLAVRLYWMWRKGWDYQQVLQFGSHAGQPVKAHGVK

SEQ ID NO: 345733 - protein, 336 aa, unidentified
MKILKYAIGIDISKDDFKTCISTIDESQKVTVKSNTKFNNTASGFKEFHLWTSKHHKDTSIPIFFLMEATGIYYENLAWHLYNQSLNVIVVLPTKAKRYIQSIGIKSKNDKIDAQGLAQMCAEKAFDLWTPLSKNIYMLRSLTRMHEDLHIQRSSTKSRLHAIEYSMYELKLVTKSNEKILKLIEDQIEKIESEIEKLIEKDVLLKSKYEFVRSIKGAGLMTFAVLVAETNGFALIKNASQLVSYAGYDVVENQSGAKSGKTRISKKGNAHIRRILNMPAFCVVTHDPHFKTFHERILKSTGLKMKAYVAVQRKLLCLVYTLWKKNEMYKPNEKIL

SEQ ID NO: 345734 - protein, 425 aa, unidentified
MRYIGLDVHKRVVQAHIADQAGAKLGACRFELSASTLNRFAQRHLGPDTAVALEATTNTWAVVDVLTPYCDRIVVSNPLRTKAIASAKIKTDKVDAEVLAHLLRLDYLPTVWQPDAPTREARALASRRGALTRQSITLKNRIQSVLHQKLIASPARLFGKSGRAWLATVELPTLARAEVDTLLHLLDTLAVEQQALQAQIDASAVASEDMQLLMTLPGVDVVVAQGLVAAIGPIERFTSAASLTAYLGLVPSVRQSAAHAYYGKITKRGNTNARWLLVQAAHVAARHPGPLGAQFRRLNRRKSYCVAIVALARKLAVLCWPLLSHREPYRYALPATVEAKFARLRGTQQNRRPVGPKKGTVRPAQYGSGVRTRKRQSLDEVLSREGLPVTQTPPPAETRVVKELGLFDFTRRIQRSDRIQQPVRG

SEQ ID NO: 345735 - protein, 358 aa, unidentified
MRMAVYVGIDVHKKYCQAALMNDNGKLERELRFDNTTEGAKSLVNLAKSIDPEIKAVLEPSANFWIRIYDQLEDESVEVKLSNPLRTKAIAEARIKTDRIDAKTLATLLRGDLVAESYVPNHKNRERRAIIRHKASLMHMRVEIKNRIHALLDKHELTHSYSDLFGKEGLEWLRNIQLPTIDHQILQSNIQILETITTEIDNADIQIAKDAVNENQAKLLMSMPGVDYYAAMILLSEIGDVKRFPTPDKLASWVGLTPQVHQSGETNWTGHITRKGSKRARWILGQCAQSARQHDPRMKNFYERIERKHGSSKAIVAVAHKMVTIMHVMLTRNEPYRGQNIQLTEKKHKRLNNIANSA

SEQ ID NO: 345736 - protein, 340 aa, unidentified
MDKHDFSGIEVSAEELIVAVEREGRTVRLECFANDAAGHQALLRFLRGGSHTVRACMESTGVYGLDLALVLARAGIEVMVANPRAARHFATAMMQRSKNDRLDARVLLEFVKRMPFQAWTPPRPAALQLHALSRRLEALKDTQAAEQNRLHAARATDTTPAAVRRDLERSLRSLRRAVARLSVEAVKIIRQDSGLQLRFDLLLSAQGIGETSAIALLAELAVAPPDLDVRQLVAYAGLDPREHSSGSSVHKKPRISKHGNVHLRRALYMPALVAIRREPHLHAFYEHLRARGKAKMVALVAVMRKLLHAIFGMFKHQTAFDGNKLFALPVPEISTTEAAA

SEQ ID NO: 345737 - protein, 340 aa, unidentified
MEKAIMIGLDIAKNVFEVHSRNAAGEVVVRRSLKRGQVEKFFAKLPAALIGLEACGSAHHWARVLGKLGHEVRLMPPAYVKPYVKRNKSDAIDAAACWEAVGRPDMRFVPIKTVEQQAALSLHRSRDLLVSQRTQLTNALRALLSEFGIVAGKGRAGLARLVDELRAGTLELPADAVVAATALADQRAALDAAADALERRITAQAKADKNAAMLQTAPGVGPLSAHATLATMPDPALFKSGRDFAAWLGLAPRLNGTGGKTRTGAITKQGNSPLRRLLVLGATAWLRQVKARPEKASPWLRGMMARRPSKVVAVAQAARTARILWAMLSHNQPYRAPAIG

SEQ ID NO: 345738 - protein, 415 aa, unidentified
MSEHLSAPIALFYVGLDWAAETHAVCVLDDTGRVKSRFTITHTADGFADLIRRLGKLGDRADVSVGIERPDGRLVDALLDAGHPVVPVSPNAIKAWRDGEVISGAKSDAGDALVIAEYLRLRQHKLRIATPFSDQTKGLRTAIRTRGDLVEMRVAATNQLSALLDMHWPGAKAIFADVESPIALKFLTRYPTPKSAAWLGEKRIAAFCSTHGYSGRRPAAELLTRLRSAPAGITSPALTEALQHAVLAMVTVLTALNTAIKDLDHTTITHLGEHPDGEIFTSLPRSGQINAAQMLAEWGDCRQAYGSADAVAALAGLTPVTKESGKHRAVSFRWACNTRFRVAMTTFADNSRHDSPWAADIYDRARSNGKDHPHAIRILARSWTRVIYRCWQDRQPYDPNQHGAIQRLNQPQQAA

SEQ ID NO: 345739 - protein, 309 aa, unidentified
MKEQLVYLGVDIAKSYLDAALGNEKRRFSNDTIGHREMIKWVKQLQTPVQVICESSGGYERALVQGLARARVKISLVQANRVRQFARAAGILAKTDRIDAKVLCAFGEVIRPGIIGAVQLEQEHLRELESQRRHLTHLLVMEQNRAARVSDGCVRRLNRSLLNQIKKQIDKLDLLIKEHIEASPELSTKARKLTAINGVGARTAALLLARMPELGQLNRREVAALVGVAPFNRDSGRMCGKRAIYGGRKPVRHGLYMATLVAAQHNPTLRTFYLRLRAAGKPAKLALTASMRKLLIMLNSALKPDLNFA

SEQ ID NO: 345740 - protein, 337 aa, unidentified
MHSENIAAYVGLDVHKETLAVAIAAPERLGEVRYYGTINNEAQAVRRLFQKLQGLYGNILSCYEAGPCGFGLYHQLTAMNIKCQVIAPSRIPKSPTDRIKNDHRDAISLARLLRAGELTPVWIPDLTHEAMRDLIRARAAAKRDSRVARQRILSMLLRTDKHYAGKQWTGKHRTWLANQSFSQPSQQIAFQHYCQSLEQIEDRILQLDQEISRLLPEWSLCNLVCQLQALKGVGQLIAITLVAELGDFSRFSSPKQLMAFLGLVPGEYSSGNSIRPRGITKVGNSELRRLLYEAAWSYRTPAKVGAWLIYYRPDSVTHIPKILHGKLNNDCVLVTEV

SEQ ID NO: 345741 - protein, 337 aa, unidentified
MGRIGTRQCDIDMLLRKLISKAKQLVFVHEAGPCGYWLYRYLTKKKLLCWVVAPSLVPKKAGDRVKTDRRDAIQLARLMRSGDLTPVYVQQVEDEAIRDLTRAREDAVRDLKAAKSRLKAFLLRQDIQYEGRANWGPAHLRWLAEVVCPIPAQQIVFQEYVRAVSEHEERLQRLKTELHEQAPAWRLYPVVQALQAMRDVQFTVAVTLIAELGDLTRFDNLRQLMSSLGLTPSEYSSGERRRQGTITKAGNRFARRALIEGAWSYRYPAKVSRHLQVRLEMFPKAIQNIGWNAQARLCKRFRHLTARGKNPNQVVVAIAREMAAFIWAITHKVHITR

SEQ ID NO: 345742 - protein, 428 aa, unidentified
MIDHSHSTAATNLVAIDVAKEWNVALVQEPCGRRRSFKFANRRADHDDFMAFLHSLAGPVQVGLEPTGDFHRNIAYRLLTEGFQVVSISSLALARFREARFGTWDKNDPKDAQVMLAMMTQGMVQVYWDPLFSGSHDWQELSNTYFQITLARTRLQHSLLLHHLPLYFPEFTRYWNSTRSEWFIRFLHRFPTPASIRSLDREAFIAEAWDLVGRKVSKRAKLEEIYTLASESIGLPISLDSLAIETYRLQLARYLALNQQRAQLEARAQELLSNNADFRRLLTVPGVGAITALTILAEAGDLRRFRHHRQFLKYCGLDLAKSQSGQNKGREALSKRGNKRLRLAFWIAGLVAIHQRENAFRDKYERYLSATPFDADRKRKALTAVAAKMARVAYAVIKHRSSYQCFFEHRLPSGSIPLTRAVEATPTS

SEQ ID NO: 345743 - protein, 341 aa, unidentified
MNEVTMIGVDLAKSVFQAHGATATGEPMFRKKLSRGQFLKFLGEQPSCVVAMEACASSHYWGREIMKLGHDVRLIPPIYVKPFVKRQKNDANDAEAIAEAAVRPTMRFVPVKSAEQQSRSMVFKTRDLFVRQRNSIINALRGHLMEYGIIAPPGRNFVKKLAEQIESPDCDLPSIVIELSHIHLDQLSIITDKIVAVERRLKEESKSDPETIRLQTAPGVGPVSAMAIKAFSPPLEGFKRGRDFAAWLGLVPVQKSTGGRQVLGRTSKMGQRDIRRLLIIGAMTRIRWAIKNGPPKGSWLEQMLERKPRMLVAIALANKTARTIWAMMTKHEDYRDPIATA

SEQ ID NO: 345744 - protein, 400 aa, unidentified
MISVGIDVSKGKSTVCILKPYGEIVSKPFNITHTHKDLSELSSMLFRLNDEVKIVMEATGIYHLPILTYLQEKGFFVSVINPYLMKSYRNESLRKAKTDKIDSRIIANYGIDHWFKMKEFQISGVIYEELKLLGQQYRHYMKLHLLSLAELTHLLDLTMPGIKNLLASWNETNRKDKRSDFVERFWHYDIITSMSEQEFTEKYILWAKEKKYVPSQEKAKVIYTLAQESIPTLPSETSSVKMLVTEAVRVLKEVDATLGLILSRMQEIAKTLPEYSVVREMGGVGNTLAPKLIAEIGDVRRFRNGKALVAFAGIDPPPYESGQFVSCNRKISKRGSASLRKVGYETMRSLKMRSRPEDPVYRYVVKKESEGKSKKSAKIAGLNKFLRIYYARVTELYKNI

SEQ ID NO: 345745 - protein, 309 aa, unidentified
MEIIVGIDVSKDRLDVAVMPQGEAFAVGNDDAGIDELIGRLKTIGADAVALEATGGFETQAAAGLSSAGLTVLVINPAQVRAYANAIGRKAKTDPIDAAVIAAFVLATKPEIRPLRDAETQALSELVARRRQIVQMIVAEENRLRMVLAKQAQKSVKRLLSALRRELESLDADLDDHIRKSPIWRVRETLLVSVPGVGPTTARTLLAELPELGSLDRRQIASLAGLAPWTRQSGKWKGKSFIGGGRGKVRAVLFMAALVASRHNPSLKAFRDRLVAQGKPKIVAIVATMRKLLTILNAIIRDGRPWQNA

SEQ ID NO: 345746 - protein, 433 aa, unidentified
MKAKMYPQTIPVMGIDVSKDKSDYCILDTDNRVVRRGVVKHTLDSMNKFLNMLSVTCSELDAKPVCIMEATAHYHRILYKQLVDNGYTVMVINPIQSGSIKNVDIRNIKNDKVDAYRLAYLYRLGKLKASNIPEGVLSQLRSLSRFHMTLTDDIADHIIRLRACVEQSFPGFEEVFSKLKGKTPLAVLEKYPTPAAVLSASDDELIELMSKASRKGVCYAKPRVKNLKSAAETALKIGLDRPEDEILIPAQIAIIHQLQESLNKADAEIAELIKNNDHLKEQTDLLKSIPGVGDHSAAALLAEIGDISLFSNAKQLTAYFGLDPAQRQSGKFNGTRTKLSKRGSSNLRRVISMVAVKNAFKQKNGTYVNPVLAEYYEHKCEQKEKKTALCAVMRKLVHIIFAVLRDRKPFELRTPKEHERLIFEKNRMLRLSA

SEQ ID NO: 345747 - protein, 521 aa, unidentified
MITIPVVTERCAGIDVGKRGLAVAVAAGPADKEAEIKTRSFGTTVPTLRELQGWLRAEGCTTVAMESTGSYWIPVKNILEEDFKITLVCARKHRPKKGDKTDFRDAIDLAVHHRHGLLTGSYLPERGIVELRDLTRRRKKLMGNLRSEKNRIQKVLETANVKIGNVVSDVFGVSGQEILQALLDNRPITAEDMAGMAKKRLRQKLPQLTEALQDHHMNDHHRWLIDQSIEHAKFLDQQVEELEKRIEQHLEPYRRQYELLLTIPGIKETAAANVLAETGPYMDQFPTSDHMCSWAGICSGNNRSAGKSKSSHIKKANKFLLAALVESGWGAARKDGSVFQRKFRRWLRKLGKKKATIAICRSLLRVVWSVLKNERPYVEPDTTVLKTLEREKQVRHHAHRLHQLGADQKTIEALVHTLLEPPAPVPTGPTLGALDKPAAVQPPRRPKCAPANQRAGRRPPARGVLGFRIRTADKKQYAVIKEQPGASLTTRAQTTSRRKQRQAPKHKTGDSLPERPANRGG

SEQ ID NO: 345748 - protein, 416 aa, unidentified
MNAAGIDVSSSKSTVAVLRPFGEVVKLPFDVRHSAEELASLAEQLKSIAGETRVVMEHTGRYYESIAKVLHEAGLYVSAVNPLLIKEYGNNSLRKVKTDKADAIKIAKYALDNWSELRDYTPMDTIRYDLKTMNRQFQLAIKQKTAAANNLIALQEQSFPGIRKLFDSPVRSDGTQKWVDFTHDFWHTDCVRSGSLNAFTERYRKWCKRNRYQFSTEKAAEVYALAKSAVVLVQKTSVTKTLVQEAANQLTAISRSAETYRSEMNKLASQLPEYSVVMEMYGVGESLGPQLMAEIGDVRRFERKQSLVAFAGIDPAPSESGNYCSRSNRTTKRGSPYLRRTLFNIMKVHLQRAPADEPVFQFMDKKRAEGKPYYVYMIAAGNKFLRRYYGKVMAYFSSLEDLPPVDMESTGLHHTK

SEQ ID NO: 345749 - protein, 355 aa, unidentified
MLSTKYIGMDVHRESISIAVTNSAGKLVMECVIETKANAILQFVDGLRGDLQVTFEEGTWAAWLYDLLKPRVTKLVVCDPRRNALLKEGNKSDRIDARKLAELLYLDKLQTVYHGEHGARALKELVRSYLTISKDVARVMTRVKALYRSWAIPCTGKQVYAACHRAEWLAKIREPGVRRRAEFYYQQLDALRSVRREVRRELLEEGKKHKAWSLLCQIPSMGPIRAAVLIGILQTPHRFRTKRQLWTFSGLGIEMRSSADHCYVDGQLRRSKKPVSIRGLNQNHNHDLKNLFKGAAIVAASKPGPFQEFYAARLAKGIRPEMARLTLARKIAAITLMVWKKGARFDAQYLKPQTA

SEQ ID NO: 345750 - protein, 455 aa, unidentified
MPRKSAKATPELARHIHGAAAIDIGSRMHMAAVSPETAKNPIRSFGTFTSDLHTLAEWFRVCNVTSVAMESTGVYWIPVYEILEQHGFEVILVNARYARNVPGRKTDVSDAAWLQQLHSYGLLRGSFRPQADIAALRAYLRQRERLVEYAAAHIQHMQKALMEMNLQLHHVVSDITGVTGMQIIRAIVGGERDPNTLAANRDIRCRSSAEVISAALMGNYRDEHVFALTQALELYDIYQERIVACDRRMEGLLLRLSHKSAKPAADLPKPRIRTKQVSAPSFDVRSILYRLLGVDLTQIHGIGVSLALKLVAECGTDLRAWPSAKHFTSWLCLAPGNKISGGKLLSSRTHRSSSRAAALLRLAATTLGRSDTALGAFYRRLSARVGKVKAVTAMARKIALLFYNTLRHSMAYADLGAGHYDEIHRKRVVSNLHRRAQSLGFILQPISGDPQPAVS

SEQ ID NO: 345751 - protein, 370 aa, unidentified
MGNRSMFVGLDVHKETIDVSIAEGARHGEVRHYGVIASDLEPLDKVVRALRAPDRRLHFVYEAGPCGFGIYRHLTKRGEDCVVVSPSMIPKRSGDRVKTDRRDSQMLARLHRAGELRAIYVPDATDEAMRDLVRAREDAVGVGTQVKYRLKAFLLRQGRRYPGREGWTLPYRRWLTDLSFPSAAQHIALQEYRDAIAEAEQRIDRLTEQLRQLAPTWRWAPLVAALQALRGVSFITAVGVVAELGDLTRFRHPRELMAYLGLVPSEHSSGPTVRRGAITKAGNPHVRHLLAEAAWAYQGIPRIGRQHAYRQEALPKIVCDIAWKAQLRLTTRFRRLVARGKAKPKVATAIARELTGFIWAIAQEVSPAPR

SEQ ID NO: 345752 - protein, 347 aa, unidentified
MDQIIIGVDTHKSNHVGVAISRQGARLGTITIPTTRQGYRDLEAWASELGTIKAFGIEGTGSYGAGLSRDLLAKGHTVLDVMRPNRQLRYLHGKSDSLDAESAARSVLNGQATALAKTQAGASEMIRHLKIARDSAVKSKSQAMITLKTLIINAPAELRDTLDLIKGPITLIRHIAALRPGKITSPVASAKAATRAIARRWLVLHEEIQAHGNELERIVSENAPGLMRSHGISTMTAAEMLILVGDNPERIKSEAALAKLCGVCPIPASSGKTNRMRLNRGGNRQANAALYIIAITRMRDHEATKNYVIKRTAQGKSKREITRCLKRYIVREIYRELCVPNGANATP

SEQ ID NO: 345753 - protein, 341 aa, unidentified
MSEISIIGLDLAKNVFQAHVAARDGRVLARERLPRSRVLAFFAEQPKCLVAMEACASAHHWAREIQALGHEVRLIPPIYVKPFVKRQKNDSADAEAIAEAASRPTMRFVAVKSRERQAAGMAFRTRDLFVRQRTQTINALRGHLAEYGTVAPKGIAHLGRLRLVVEDPDGGLPEPVVDLAMLLLEQIGHLEEKIGHLDREVRARARQDEMARRLMTIPGIGPVCASAMLAFAPPPESFSKGRDFSAWLGLVPRQFSSGGKERLGRTSKMGQRDLRRLLITGAMAVVRWARRRGAPEGSWLHRMLMKKPPMLVAVALANRMGRIAWALMAKGGVYRDPAAAV

SEQ ID NO: 345754 - protein, 360 aa, unidentified
MRHLGARMLVDSKTSEREPSMGEITTIGVDLAKHVFQVHGVDADGVAVLRKQLRRSQVLSFFRRLPRCVVGMEACATAHYWARELDALGHEVRLMPAQYVKAYVKRNKNDAADAEAICEAVVRPTMRFVPVKTAEQQASLLLHRGRERLVRERTALVNALRGHLAEFGVIAPLGLSNVGKLITIIRDESDARLPALAHKVLQVLATQIEQLEAAVAALEKQLMAWHKSNPVSQRLATIPGIGPIIATAIAATVVDPIAFRSGREFAAWLGLVPRQNSTGGKNRLGGISKRGNQYLRRLLINGASANLLRSKATNADPWVIGLRRRRPSLVVAVALANKTARIAWAVMHRQEDYQRMAAAA

SEQ ID NO: 345755 - protein, 346 aa, unidentified
MMIIGCDFHPSWQQVSWLDTETGETGERKLVQASGDAERFYRQVAAPALIGMEATGNCHWLVDLLSELGHELWVGDAAQIRASYVRQQKTDQRDAAHLLKLLVEGRFPRIWMPSSEVRDLRQLLLHRYKLVIIRARVKNELQHLCLNKGVQRKRKLWSAAGQQILRELPLKPWAARRRDDLLKLMAMLDQQIEPLDQAVQEEAQRDKMALLLQTQPGVGPITALAYVLTMGDVSRFPRGKQVASYLGLIPREHSSGGRQKLGAITKQGNRMLRMLLVEAAQIAVRFDPEFRKQYLHRCHSKPKAVAKVAAARKLAVRLYWMLRTQTKYPAVVRIESSPRVPLVGAS

SEQ ID NO: 345756 - protein, 434 aa, unidentified
MMPTEFAAMIAIDWADRKHAWAMETETSKIEMGAIDHTPEAIDVWAAELRMRFGGQSIAVALEQSRGSLVFMLTKYDHLVIFPVHPTVLVNYRKSFRPSGAKDDPSDARLLLDILRLHREKLRRFNPDRPETRTLQFWVEERRKFVPEKTRYSNRLTAHRKMYFPQVLDWFDEIGSNIAAEFLERWPSLDKLQRARPATIERFFINHNSRDPERIKERLEQIRKAVPATTDAAVITSSSAAIVAWAGLLKQVLVAITGYDKQIDELARAHPDYALVKSFPGAGPAMAPRLIAALGSPRERYQSAAEIQRYSGIAPIVASSGKQHWVHWRWACPKFLRQTFHEWALHSIPYSGWAREYYEQQRAKGKRRNTAIRSLAFKWIRILFRCWKDRRPYDEAVYRRAMTVRQPNPQPAATTLEIQWKRVAGFKKISAVQA

SEQ ID NO: 345757 - protein, 370 aa, unidentified
MLDTTTFIGLDVHARSIKAVSLDVMTGEVRCATFGYDAGAVAEWVRSVDPRARCVYESGVTGFDLQKRLSGLGVDCVVGAVSKMIKPSADRRRKNDRNDAEFLARMLSVGNVVEVWVPDDECEAARDLTRALEDARDDLSRSKQRLSKFLLRHGLAFDERTPTGRRKGNWTRAHWSWIESIRFAEGADNDVLAYYVDAVRRAAEEKARLEGLVEAEARKPRWRRRVDSLRCLKGVDTASAADLVFEAGEFSRFGNARSFAAWVGLTPSEHSSGESDRRGAITKAGNKHLRKTLVEAAWHYLTCSGRPKDLAKGQAPDRVARRHAAKGVRRLVERREALLARGVHGNKANVATARELACWVWAVGLMAEEA

SEQ ID NO: 345758 - protein, 370 aa, unidentified
MSVRRILAKTIDTDLEYEAIGIDLAKNCVSAALLTTDGEVVCIDRLDYSELEKSAQALSPTTFAMEPCTEMNYLVQKLEAWGHRCLVIGGKNVQNYVENHYSGQKTDLNDAQALAFLAQDKQLRTIKAKDIEQQKYASLTTLREQYIKQYRQTIVSLKGICQAWGLNISKGISGKAQLKDLIENHAAFPEELKESLVDMVTHAQTTQKTLNKITKTLEELAKNDKLCQLIRTIPGLGLICSCRLRATIGDIKRFKNPKDFPAYYGLVPRSIATGHNEKKGRITHRGDKTMRSLMVQAAGSLVNMATKGKLKSKQLTKWILKKQKEKMPWGKLVCAVAAKLLRIVRAVLISNKPYNSKIAGVAKCSLSKGS

SEQ ID NO: 345759 - protein, 313 aa, unidentified
MIITPRCVGIDVSKHHLDIFDEGIGVSERVANAPHAITELVARWRCDALVVFEATGVYDLELRAALRAADIRFARINPARARDFARASGQLAKTDPIDARMLAAFARAMRPATEQVSMPARNALARLAKRRDQLVLMRAQEKNRRSEAGDRAMVERICRLIEVLDHEIAEIEADISALITAEPEIADDAQLMRSLPGVGPVACMQLIAQMPELGHVGPKQAAALAGLAPFNVDSGAYRGKRKIGGGRKRVRNALYMAALNAVRRADRFKAFYAKLRQAGKPAKLALMAVARKLLTILNAIMRDRKAYIPAQQS

SEQ ID NO: 345760 - protein, 318 aa, unidentified
MSAFIGVDVAQDDFVVAVEGEAGSRSYSNNDRGFRDLIKNLSELNTELIVLEATGGYERRLVAALGAEALPVVVINPRQVRDFAKSTGQLAKTDRIDAHVLADFAAKIRPDLKPLPTEEQEELRALLARHEQLIQMLGAEKSRLLQAEGQGRHALRKKIRHHIKFLEREITLLDSDLDDTLKKSDLWREKDDVLQSVPGVGKVTSRSLLGLIPELGTVSARQVAKLAGLAPLNRDSGKYRGSRHISGGRARARAVLYMATLVATRWNPVVKHWYQRLLSAGKPKKVALVACMRKLLVVLNQMLKTNTRWQAHLAAPAT

SEQ ID NO: 345761 - protein, 369 aa, unidentified
MNESTTRYLGLDAHAATVTVAVAEETGAPALYGTVPNQPAAIRKLVARLGRSGQLVAAYEAGPTGYDLYRQLLELGVQTIVVAPSLTPTRPGDRVKTDARDALSLARLLRSGDLTAVWVPDRAHEALRDLVRAREDAKGHLLQTRHHLSKFLLRHGIRPPAGCSNWTLRYYAWLRQLRFELVAERLAFEDYLNAEQAARDRMRRLEAAIRECITQSRLLPLVTRLQCLRGIAFLSAVIIAVEVGDFRRFRAAPSFMAYTGLVPSEHSSGEARRRGHITHTGNAHVRHVLIQAAHNARHRPSGHAEFLRRLEGGPPDLLQLALRAQARLHDRYWHLQRRLGSPKAVTAVARELAGFVWAVGCRMEISASG

SEQ ID NO: 345762 - protein, 341 aa, unidentified
MGEVITIGLDLAKWVFQAHGVDASGAVVFRRKLRRGQVLSFFASQPRCVVAMEACAGGHYWAREIGALGHETRLIAPAYVKPFVKRQKNDAADAEAICEAAQRPTMRFVMAKSAAAQAAGTVFRARDLLVRQRTQLINAVRGHLAEYGMVVRQGAENAPQLIALVVDPTSDLPEEARSSLQVLTQTLQALQTRIAVLDVEIARRAKADALAKRLMTIPGIGAVVATALVALAPAPETFRRGRDFAAWLGLTPLQHSSGGKERLGRTSKMGERTLRRLLIIGASSAARAAAIKGAPTDSWLARMLSRKPRMLVVVALANKIARIAWALMAHGGIYRAPASAA

SEQ ID NO: 345763 - protein, 416 aa, unidentified
MDVVHERCAGLDVHKKTVVACVLRSAPKGVIDKEVRTFGTMTADLEALRDWLAECGCTHVAMEATGVYWKPVYNILEQSEPLTLLVINAQHLKTVPGRKTDVKDAEWIATLLRHGLLRASFIPDRHQRELRELVRYRTALIHQRAAEVNRLQKTLEGANIKLAAVLSDVTGVSGQRILEALLEGESDPEQLAELAHVRVLKHKREALEQAVVGRLSDVLRFVVRQQLQHLHDLEAQIAACDAKVEDLLRPFDADLERLRTITGVGPRTAEIILVEVGMAIERFPTARHVAAWAGMCPGNRQSGGKRQQARTRKGSPWLRAALAEAAWAASKSKDAYLPAQFRRLSARRGKKRAIVAVGHSILVTCYYLLTRGGTYQDLGETYFDERDRQNVIRRNVRRLQGLGFTVHLEPADSKAA

SEQ ID NO: 345764 - protein, 465 aa, unidentified
MTPHKDFFLHPRPPTPPPPQPPALAGPLQVFNPHAAGIDIGEAEHWVAVPPGRDPQPVRRFGTFTADLDALADWLIDCGVTTAAMESTGVYWIPLFELLEARGVQVLLIDPRQAKRAPGRPKTDRLDCQWLQRLHAYGLLAGAFRPDDQVCVLRSYLRHRQMLLTSAAHHIQHMHKALQQMNLKLTQVVSDITGATGMAILKAIIAGERDPVTLAKLRNPHCQHDADEIAKALQGTWRAEHLFALRQAVELYAFSHQQITQCDQQIKAHLETFGDKSAGQPLPPKARRHKKTNEPRFDARTPLYRMAGVDLTTIEGIEEGTALVILSEIGTDMHRWPSVKHFCSWLGLCPQHQISGGKVLSRRVRPGAHRVTVALRLAARSLHHSQSALGAFFRRMKARLGTPKAITATAHKLARLVYSLLKHGSAYVQQGLENYEAQYHERKVKTMAKQAKALGYTLVPLVAQG

SEQ ID NO: 345765 - protein, 342 aa, unidentified
MSLIKAIGIDLAKLVFSIHGVDEYGKTKLKQTVKRNKLLEKIANIPPCIIGMEACSGAHYWAREFTKYGHDVRIMASKFVIPYRQSEKNDANDAEAICEAVTRPKTRFVSIKSEEQQAVLCLHRIRQGQIKDRTAMINRLRGLLSEFGIIMPKGRYPAQKHIVGILEDTDNALPTLARELLNDLWQSIKLQNQDILKSDRKLYALANQMKDAKRLMTIPGIGEVTATAVVATVSDAKHFSTSRQFAAWIGLVPKQYSTGGKPTLGRISKRGEKHIRTSLIHGARAVIANCTNKMDRTSLWIKALIERRGFKRAVIALAAKNARLIWSLLQSGNEYQVNYVKT

SEQ ID NO: 345766 - protein, 364 aa, unidentified
MHTTTVSVFAEPVATTVAIDLAKEVFELAFADASGRIVERKRLKRGPFAHCLENRAPLRIVMGAWGSAHAWARQFVRLGHEVILLPAQHVRPYVRRNKTDRADAAGLLEAARCGDIRPVPIKAPEQQGTQGLHRIREHHKAQRTAAINTVRGLLREFGIAIPAGADTVRPAALAALEDGDNDLPMALRHALAGLLDQITLCQDAMTGIEKQLADIARCDTRSHRLMAASGVGLITATAMSAGIGDFARFPSGRHFASALGLTPHEYSSGGTRRLGRITRRGDVYLRTLLIHGARSALISAHTARKRGQPLDRTQQWALALAERKGHNKAAVTLANKMARRLWAAEHHGTRFDPEHVSRCEPRVA

SEQ ID NO: 345767 - protein, 370 aa, unidentified
MKKSIMYVGLDVHKNSIEVAFAEAGRDGEVRNYGKIDGTLTALDKVIRKLEAKGYELHFAYEAGPCGYEIYRHLTGKGYDCIVVAPSMIPRQSGNRIKTDRRDAQMLARLYRAGELTSVYVPALDDEAMRDLTRAREDAKAVERKAKQRILAFLLRHGYRYNGKTPWSKAHFRWIALLKMPHPAQQIVLQESLDALSECTERVSRLTEQIQRLLPEWRMFPVVQALQTLRGVSLIVATTTVAELGDLTRFSSPVQLMSYLGLVPSEHSSGLQTKRGAITKTGNGHVRRVLVEAAWTYRLPARISTKLHRRQEGMPQNICAISWKAQLRLCHRYKRLLAKGKANQLIITAIARELCGFMWAIANQVEARPA

SEQ ID NO: 345768 - protein, 347 aa, unidentified
MRFYTNQHKYYCGIDLHTRKMYVCILDEKGEIREHRNMKTDRDAFLKAIAPYREDIVVAVECIFTWYWVADLCHNEGIPFVLGHALYMKAIHGGKAKNDKIDSQKIAALLRGGMIPMSYVYPEKMRATRDLMRRRNHLMRKRSELFAHIQNTNSQYNLPDSFGCISRPQQRNGIIEQFEHPSVQESVAVDIEMISSYDAILSQLEKSIINMANHHDPVSYALLQTIPGVGKIIALIILYEIENIRRFASVQDFVSYSRLVKCAKESNGKKCGSGGSKIGNAHLKWAFSEAASFFVKNNNPAKKYFDRLINKHGKSKALSIIAHKLGRTVYFMLKNKEAFDQKKFLNI

SEQ ID NO: 345769 - protein, 420 aa, unidentified
MQKPVPFAALLGIDWADKKHDICLCAAGSTKRERSVVPHTPAALRDWADKLRERFGGAPVAVCIELTQGPIVSALLEHDFFVLFPVQPKTLARYRETFTTSGAKDDPTDAEFALELLLRHPDKLTPLEPESVPMRSLRRLVEARRTLVQDRVRLTNRITAALKAYFPQVLNWFRDKEAAVFADFVERWPTLEHAQRARSETLTAFFRSHNVRYQSAIDRRIAAIRRELSLTTDAAAIEPNRLLVEVLLPQLRAACGAIDRLDHEVGKLAPALPDYALFRALPGAGAALAPRLLVAFGERRERFPDAASLQKYAGIAPVTKRSGNKSSVHWRYRCPTFLRQTFIEWVGQTIPRSFWANAHYQRCRARGMKHQAALRSLAFKWIRVLHRCWTDRVHYDESRYLLALQRRQAPLLKVAASLPS

SEQ ID NO: 345770 - protein, 407 aa, unidentified
MEVLYPRCAGVDVHKDLVVARARCVSEPQVDETRSFATTTAALIELQEWLSAQGVTHVAMEATGVYWKPVWHLLEGHFELVLANAQHIKNVPGRKTDVNDAAWIADLLAHGLIRSSFVPPAPIQELRDLTRTRKQLVREISQHTLRIQKTLEDANLKLSSVLSSVVGSSGRAILNALIAGESDPERLAELAQGTARKKRAALIEALHGRITPHHRRLLKLHLDLIGALEAALAEVDADVGKLLAPIRKSARLLTTMPGISELTAQVVLAEVGVDMRRFPTPAHLLSWATMCPRNDESAGKRRSTRTRQGSPWLKTALVTAAWAAVRAKDTYLQAQFLRLKARRGPKKAAIAVAASILTAVYHMLRDGSFYHDLGSNHFAHHDKTRTAMRLVRRIKDLGYDVEIKAAA

SEQ ID NO: 345771 - protein, 360 aa, unidentified
MQKQLVTRYNVGVDFSFKKFDVKLAANYQDNTRKVIGSRKFENNEKGFKELAGWVEDKCKEKGAQVRISGEATGVYHERCCYYLHGKGYYVTIAVPSRVKKYKESCGYKSKDDCVDATALAYMGLEKNLDKWEPMNSFYYDLRSLTRHYQSVQEMETVLRNQLHAEQAGMFASKAVVQQIKAGIKLFSSQADLLKGAIEEKVNSAPEVKRKLEGITDKLKGVAILTVATVIGETNGFAFFTNRRQTASFAGYDVVRDQSGNREGKTKISKKGNSHIRRALYFPAINVVKCKMKPFAQKYERIFERTKIKMKGYTAIQKDLLMMIFTLWKYDRKFEPYYKYQQEQKALVISGDCKAVSSFG

SEQ ID NO: 345772 - protein, 342 aa, unidentified
MNTVTIIGIDLAKRVFHAHGAHADGSVAFRKRMGRSQVLPFLARQPTCVVAMEACASAHEWGRAIRDLGHEVRLIPPSYVKPYVKRQKNDTADAEAIAEAGSRPTMRFVAVKTEEQQARSMVFRTRDLLVRQRTQLINALRGHLAEHGVIAPQGPAHLKTLAAAIDAAEPAMPQLVLDIGRVYLEHVDRLSREIAELEKILRREAQCGEDTRRLQTMPGIGPITAMAVEAFAPPMSTFKRGRDFAAWLGLVPVQHSTGGKQRLGRTSKMGQRDIRRLLIIGAMSVIQWASRRGSRPGSWLARMLDRKPLMLVAMALANKMARSVWAMLTKKEDYRDLGSAAA

SEQ ID NO: 345773 - protein, 345 aa, unidentified
MELHTIGIDLGKTVFHLVGLDLRGEVVVRRKFSRKQLLHFAANLQVKLIGMEACGGSHFLGRALREQGHEVRLMPAQYVKPYVKTNKSDYIDAEAIAEAVERPKMRFVPIKSDDQLDLQSLHRVRERWVMRRTAVINQIRGLLLERGITLRQGRRHVAEALPGILEDASAKLSGAVRLLLAQLKLELDHLQMRIDEADAIIQKIAGENEACRRLVAIPGIGPVTATAIIAAIGNGAAFKKGRGFSAWLGIVLGEYTTGGKQKLLGISKRGNSYLRRLLVQGARFVLQQSAKQSSGLSAWLAQLTTRVHSNVAAVALANKLARMAWAVLAKNELYRAPMLVGAATA

SEQ ID NO: 345774 - protein, 315 aa, unidentified
MEGITYFGVDVAKGELVVASHQHPLALSVPNSSEGVEQLCQQLREVACPLVVLEASGGLERVAVMELARVGIAVAVVDPGRVRHFAKSLGYRAKTDPIDARVMARFGQAAGLRPQALPSDQSLALRGLLARRYQVVSMLSVEKQRLQRAVGRSQESIRAHLAWLEAHLAEIDQEVDDLIQGSPLWRVKDAQLRSVKGIGAITARSLLVWLPELGSLNRQQIAALAGVAPYAHDSGGYQGRRHTGGGRPRARRALFMATLVAVRHNPFFRVRYEGLLAKGKPKLVALTACMRKLLTILNAMLRDGTYWQDAQPVHA

SEQ ID NO: 345775 - protein, 399 aa, unidentified
MTPDDIDVWVGLDVGKSAHHAHALDHDGNTLYDKPLKQDEKAIRTMLGKLSKHGRVLLVVDQPNTIGSLPLTVARDMGIAVAYLPGTAMRRTAQLLPGDAKTDRRDAHVIAWAALKLPETLRDAGPDDETLAALKLLAGHDEDLAHESTRHVNRLRSLLLQTHPAFERALKGERITRDATLALLERYGGPAGMKRAGIEDVKDWAKSNGLRAGRIIDDMFKAIGEQTVTVPGTLMAETIIPSIAHDIKTIRDRRREVGRQVEKLLEDHPLLTVLTSMPGIGVRTASNILLGIGGDIANFKSSAHLAAYAGISPVTGQSGTSIKGERPSRRGNKRLKNALWQTAFVASTKHPPSVAYYKRKREQGKHHNAAIICLARRRCDVIYSMLKNGTLYQEPALVA

SEQ ID NO: 345776 - protein, 365 aa, unidentified
MRKISTMQASGKNIFEGQLTIGLDLGDRSSAYCVLNEAGQIVLEHKLATTPEAMKQVFGSMPRCRIAMETGTHSPWVSRLLTALGHEVIVGHAQKVRLITKSRRKDDRLDARTLARLARIDPELLSPVKHRSAQAQLHLTEIRARAVLVSTRTALVNAARGLVKSYGERMGKCGTQQFSRETASGLSTGLRQALEPLLREVESLNERIQEYDRRVEKMAQQTYPETALLKQVKGVGDLIATAYVLTFEDPHRFRKSRDAGCFVGLQPGRRNSGESEPQMRISKEGDEYLRTLLVQGAHYILGPFGKDSDLRRWGQKLSARGGKNAKKRAVVAVARKLAVLLHRLWVSGEVYEPLRNSQKAMNAAA

SEQ ID NO: 345777 - protein, 467 aa, unidentified
MKNNDYNLFVGIDVSKGKADAAVLAVPELRSVKPRFLRKKLSFKFIKSDVVEFLNTVRKYSNDQHCLHTYFALEVTGIYSTNVYSFIKQNCNSDEEIHQLNTDFVNKWRESHNISKSDPLDAQTISTIVGTDDDVRYVSDSVFENKNGYQDLKALVHRHYQIKKLYSQETNRLIALCDCYFPELQYVFEPKSAAFLALLSQYPTSHDIINASKNEVFSLVYEASKHRCNMDKIDKLFNYAQDTLVPHVSDYIRCVIFNTVESIFNIRAQLKLIEKDIRKLASTFNVYSLLMTITGCGPLTAAVIIAETGDIFRFKNADHYVSYSGSSPRNKRSGKSVEIMGKISKKGSKYLRHALYMIAEFARRHNPVLKHLFERVKNGNKKRHKLAVIAVANRIARYIYSIMKSESSFIIMHENIMRLPEETRNTFFNSISLDFPKNTRKQIYQYSDVNGEIHRFVYKNETTESIA

SEQ ID NO: 345778 - protein, 439 aa, unidentified
MRRRAYRATDVKDVQLEEVLKRAPGGAVTLGVDIGKEAIYGVLRFSDGSFQRPWKAKNPEEVATLVGVLRAVASQRELIVAMESTGSYGEPLRSKLAEAGLTVHRVGGKAAHDYAEVFDGVPSQHDGKDAAVIAELTAFGKSTPWPFRAKSASEAEMASWVDWLDIQQNLQRTWIGRLEALLARHWPEATRVLELSSATLLRALTHYGGPAGLAKDSAASARLALWGGYWLKKEKIEQFLASAARTVGVPQGAEEVRRMQQYAAMALAARRETHKARRELQRLAVGNDVIGRQAKAVGVATACVLWVALGDPRDYPCGEAYRKAMGLNLKERSSGKYQGMLKITKRGPSIVRRWMYFAAMRTAQSPFVKPWYEAKKAKDKDRGHGALIAIARKLALALHAVGARGTPFEPRRLFSQKELHRKARRRAMRRERMAEQKCY

SEQ ID NO: 345779 - protein, 353 aa, unidentified
MLIIGCDFHPGFQQIAIFDNQTGAYEERRLSHRAEAEQFYRSLAGQQVRVGMEACGHYPWFEHLLAELGFELWLGDAGKIRASVVRQQKTDRRDAEHLQMLMREDRFPRIWVPSLEERDVRQLLVHRHKQVQARTRTKNQLHALAMSQGVQKKWKLWTAAGRAELESLELLPYAAQRRRQLLHRLDALEAEIAGLNRQVEEEVKGRPAAVKLMTHPGVGPVTALAMVLTLGPAERFRDGRKVGSYFGLIPSEYSSGGRQRLGHISKQGSSFVRFLLVEAGQSAARKDAELGRFYRRLGARKHRALAKVAVARKLAVRLYLMLREDWTYAQLCRAVVQASPSHSVAASKSRPLE

SEQ ID NO: 345780 - protein, 331 aa, unidentified
MEQRKTIIGIDVSKKTLDVFIKTIEVHIQISNDSEGFKKLLALLKVNKLKPEDCLFVLEFTGGYEYRLVQFCQAKMFSYVRISGLALKRSMGMVRGKSDKIDAKRIAEYGDEKQSKLAAETGSLANIVRLKRLLSQREDFVADRKAYDHRYKELQYMMDLPDSDSILKRFKKTVADFQKLIEKTEDEIVKLIKANDAFQLNFELLTSIKGIGQINAWTMIAYTENFTSFQNGRQFGAYIGVVPYDFTSGTSIKAKSRTSKMANQQIKALLQMAARAAVLHNKELNLYYERRIALGKHHMAVMNEIKFKLVNIMFAVVKKQKPYVDKYKIAA

SEQ ID NO: 345781 - protein, 343 aa, unidentified
MEHFAGLDVSVKETSICIVDDTCRIVREVRVASEPAALLQVLANPIYRFKRVGLEAGPLSQWLFSALAEAGLPVICVETRHMRAVLQAQINKTDRNDARGMAQMLRAGLYRPVHVKTLRSQKLRMLLTHRKLLQCKAIAIDNDLRGTLRNFGLKVGVVGTVKFEARIKELVENLPDLAELVEPLLIVRRTLREQIGILHRRLLAIVRNDDVCRRLMTIPGVGPVVALTYRATVDVPARFRNSKAVGAVFGLTPSRYQSGEINRPGAISRCGDEMMRVMLYEAAHIMLVRLAKWSWLKAWAMQIARHRGMKKAIVALARRLAVIMHRIWLDGTEFRWTREVTAA

SEQ ID NO: 345782 - protein, 441 aa, unidentified
MAMRKREEDEVFPNAAGIDVGGSSHWVAVPRQADDEPVREFGAMTDDLNALADWLLACGVDTVALESTGVYWIPVYEVLERRGLVVWLVDARQMKYVPGRKSDVQDCQWLQKLMSLGLLRAAWRPGDEVCVVRAVVRQREVLLTEQADWVQRMQKALVQMNLQLTEVLTDVMGMTGQAIVRAIVAGERDPKVLARHRNGRVKASAADIERALTGNWREEHLFVLGQALAMVDSLAQRVLECDAKIEALLVPLGCHEVELSGPGKRRGKNTPQFDARTALARWAGVDLTRINGLAVTTVMTILSEIGPDLSRFANVKHFCSWLGLCPGTKVSGGKVLSARTRRSTNRVRQALKLAAMSLSRNDSALGAFYRRLCSRMDKPRANTAVAHKLARMVYFMLTRGEAFVDQGQQHYEEQQRQRSIDALRRRATALGFQITPAAQTP

SEQ ID NO: 345783 - protein, 345 aa, unidentified
MKKVYAGMDIGSKECAAVVIDSKGKPVDSAVFKTSERNLRAFFSRHPASRVLVEECEMAAWVRATIKPCVALVTVCDPKRNAWVAKGGNKNDRVDAAKLAELNRLGSFSEVWHTDDQDIAGFKVLVKHYDDTSARLAALKCQIKARLRKQGVIARGEAVYGARRHEALCRVENTFVRIAIEQDYELLDYLVGAKAAARQSVIAASRRFPVTGKLQEIPGVGPILAARFVAYVGNPHRFNKRTLASYSCLGIVKRSSDGSPIGREHLSRAGNSALKDLSRTAFERAMATRKPNGIKEFYASSMARTNDKTKARLNTQRKILALMLAIWRDGTDYRDDLVTRAFTGA

SEQ ID NO: 345784 - protein, 370 aa, unidentified
MIRLARAMQYLINTELSSHEETRFEFNRSTGAIKLGIDVHQDFYVVVEQVEGGNPKPPQRFDKQAFLHWASKLKQRGAEVHAVYEACGFGFSLQRNLTALGIKCHVVCPQKLDERNKRVKTDGLDAKALCLKLDRFVQGNRDALALVRVPTEEEERSRAIHRQREQLVGARKRLEAQGRSLMVNHGVDPVQNWWKPRTFATLPVPHWMRELLLNSQPILLALQEKIAVLTLQLQNAAAPNQPRGLGKMTSVVIDREIGDWHRFNNRRQIASYTGLCPGEYSSGNTRLQSCVTKHGNPRLRAALVELAWRLVRFQPNYKPIVKWRQILAKGALATGAARKKAIVAVARQLAVDLWRIKTGRLRAQELGLIN

SEQ ID NO: 345785 - protein, 375 aa, unidentified
MSDLSEAFVGLDTSKLRNSVAIAEGGRNGEVRFVGEIDNTPAAIGKLVKKLAAKYDRVTFCYEAGPTGYGIYRQITAVGHECIVAAPSLIPKKPGDRVKTNRRDAVGLAKLLRAGELTAVWVPDRRHEAMRELTRARDSAMMDLRRKRQQISAFLLRHGMHYPAEKKTWTKAHVDWLARQKFELAEHRIVFEEMMLAVREAQDRLRRLEDAIRVAVPEWSLAKAVTAMMAMRGMDLVAAATFLAEMGDLSRFQSPRELMAYLGLVPSEQSTGDSIKRGPITKTGNRRARRMLVECSWSYRHPPRVGRDKLEKVAAASPAVREIAWKAQNRLHNRYRLLIRKGKLKTVANTAVAREFTGFLWAVHREITSAGVVSR

SEQ ID NO: 345786 - protein, 367 aa, unidentified
MSSVARPAGPVHVGMDTSKNTIMAAVLWPGEESRVTERILNEEPSVRRLLGRLTGKTGGRECLRCCYEAGPGGYDLYRLLDSMGIACDVVAPSLIPKGSGDRVKTDKRDSRRLARLHRAGELTPVRVPSRDEEAVRDLARARTALLEDRKTAQKRLTAILMRHGRTWRGPTYWTRAHRDWIAAQKFAEPALATAVGYYRAALATREAEMAAIEAELLPWVSREPLVGPAARLMCYRGIAELTALTLAAEVVDWRRFPAARAFMGFTGLCPAEASSGDTARRGHITKAGPQPVRTALVESALAYRHPAAIGACCAGGSATRPRTPWPAPGRPSGGCTPGTFTWSATARPRRRPSPRPPASSPGSPGPR

SEQ ID NO: 345787 - protein, 339 aa, unidentified
MKLIRVGVDLAKNVFQVHGVDRAERTVWRRRLRREDWIKVLRERVEPGCEIGMEACGGAHHWARELQKLGYRVKLIAPQFVKPYVKSNKNDANDAEAICEAMGRPGMRFVPVKTVEQQDVQAMHRVRSGLVEQRTAKASQIRGLVAEYGLVVPRELVQLRRALPRWLEDEANGLSSAFRRLLEGLRHDLVLLDERVKELDREIEQLAQRDPSARRLMQLRGVGPITATALVATIGNAKQFANGRQMSAALGLTPRQQSSGGRERLLGISKRGDAYLRTLLIHGARAVIRTAPSKDDRLSQWVTRLAARRHINVAAAALANKTTRIAWAMLSRGTDYQPA

SEQ ID NO: 345788 - protein, 354 aa, unidentified
MPTTARTAIAVVGIDIGKNSFHVVGLDDRGAIVLRQKWSRNQVAVRFANMPPCLIGMEACVGAHHLSRGLQRLGHDARLMPARYVRPYSKGQKNDFRDAEAIAEAVQRPTMKFVATKTADQLDLQGLHRVRERLVRQRTGIINQIRAFLLERGVAVRQGLRFLRNELPSILAAPSDALSPRMLRIIEDLAGDWRRLDERVEGLSKEIEAIARQDAGCERLISVPGIGPIISSAIVAAIGAGDVFSKGRDFAAWLGLVPRQISTGDRTILGKISKRGNRYLRVLFVQAAWVVLIKPKSWERHGLKSWIEAARKRLHHNVLAIALANKLARIAWSVLAHGRSFEASKLAAAVTQPA

SEQ ID NO: 345789 - protein, 342 aa, unidentified
MPNCPKREVEVFAGLDVSAREISVARFRRKEETLTVASFANTASGHKALLAYLLQGTEDVRVCLEASGNYSLDLALALHAHRHVEVSLVNPRRARRFAESLGERSKTDPVDARVLCEYAARMPWVLWRPPTTRALRLRAITRAIESLGVMHTQEKNREHALKASQALPSLVIREMRRHQRYLEKRMEQLRREARRLIAKDPELDCRFRLMVTVPGIAETSALQILGELAVLPDSLDARQWVAFGGLDPSQFTSGTSVEKRPRISRGGSRHLRRALYMPALVALRREPHLRTFYQRLVNRGKARLQALVAVMRKLLHALFAMFRSHQTYDGAKLCSGELASCA

SEQ ID NO: 345790 - protein, 363 aa, unidentified
MTSMTTTTSHVTGGVDTHGQTHHCAALDSVGRQLGDREFPTTPAGYRALVSWLQAFGHLERVGVEGTGTYGAGLTRQLRAAGVTVVEVDRPDRKARRAQGKSDPLDAYSAARAALARKATGVPKTRDGRVEAVRMLRVARSSAVKARSQATNQLKALLVTAPAELREQLRTLSNTKLITTCARLRPAGDIADPEHAIKTALRRLARRYQYLSEEISAADTELRTLVTAAAPRLIALPGVGTAVAGQILITAGDNPDRLHSEAAFAHLCGVAPIPASSGRTHRHRLNRGGDRRANNALYIVVLGRLRYDSRTRAYAARRTTEGLSKPEIIRCLKRYVAREIFTVLTARAAGDQSHTAQAMSTAA

SEQ ID NO: 345791 - protein, 362 aa, unidentified
MRIIGCDLHARQQTLAMLDTTTGEVVKMTLTHEGNNVREFYSTLPRPVRVGIEATGSMQWFVNLMEELGIECQVGNPAVIRAAEPRKQKHDRRDADLILTLLVENRFPAIWLPSKELQDLRALLRHRHQWVRMRTRIQNALQAIALANGLRRGPSLWSRDGQNTIASLPLAPHTAHRRSELQAMYVKFESDIEKLNRRVEEQAGQRSGARLLMTHPGVGPITALATDVFLGDPRRFTDGKALASYVGIIPREYSSGGRQKFGGLSKQGNPLLRFLWGEAGAHAVRRDPELQRFYRRKLVQKGLGKARVAVARKLGIRLWIMLRNEINYNEFCRRGQKEQNSGVACAGMPGTRYGATSHRPVD

SEQ ID NO: 345792 - protein, 414 aa, unidentified
MKPCLFVGVDIHKNSHTAAVLDGYFEVLATIDFANNQEGFCHLDLKLKKLAGGRSLTFGLEDSHGLGSFLAQYLVNKDYPVLEINPVSTDRARRHTVARDKSDTMDAIAIAKTLIRERANLNPVRINKNSIALKEMAGYRQMLVRESTRIKNRLHVALFNQYNGILGQFGSLFGKCALAFFARYPDPVMLKGVTLSTLTGFLKANSKGRYKSEEARAILSNPDNSIATTLASTRAHIIESHAERLIQIQQELKKIEGILEDLIEASSYSCLTSIPGIDTATAAKIISGVMDIARFSSSSKLAKFCGIAPTEKSSGRKEKYQKSKYGNKSLYTTIYFMALAHISRTRNGRDKNPISRAYYLKKISEGKTKKEAITCLARRLVDLIYAVMRDRSIYNFSKSRFTKQQGSTLNTAVA

SEQ ID NO: 345793 - protein, 394 aa, unidentified
MRYVGIDIGSEHHVVTIVDEAGQVLQTATQCAEDAAGYERLRELLGGSADTLIAMEATGHYWKNVFAMLAAEGFAIALLNPMRTNRFAQEELERTKTDAVDALNIARFAAQKRPAATRLPDQATDELRELVRHRDRLVQDFGDRTRQLHRLVDLGFPEFARHVRHLDSTLATTILRAYPTAEAFHGLAVGRLSRIRYGGRHVVGPELARTLIEAARISVGRHHGPAYRLQVQHCCEDLDLLRMRLRAIDDDIERTLTENEVGTLLTTIDGIGPTTAARIIAEVGDPADFLSPASLAAYIGVVPALRKSGKRQSQRGGISRVGNARLRAALWMPTLTAVRRNPWLKAYYDRLVARGKPRKVAMVAALHKLLAAIHSVARRRQPFVPFLRTEAIAP

SEQ ID NO: 345794 - protein, 351 aa, unidentified
MNYIGVDYHKKYSYMVVKNEDGRVEGRGTVNNTKEEVQQFLEPYRPGMAVVEATRNWGLIYDWLDEVLDDVALAHPLKVKAIAEARIKTDKISADILADLLRADLLPRAYAPSKQTRELKNVLRQRMFFVRVQTMVKNRIYDVLDRHPEVVSQAPEASDLFGSAGMQWLGQTALPGEDNKLLISELGLLKFLKEEISQSNGTVKKLAKKDGRARQLQSIPGIGPFFSVLILYEIDDISRFRDEKKLCAYAGLVPSTHASGGKVFHGKITKTGSKWLRWAAIEAAQTAVRSNSEFNAYYQRIKIRKGTNAAKVATARRLLTIVYRLLRQGRFYERREANTRKIVTPAALVMD

SEQ ID NO: 345795 - protein, 337 aa, unidentified
MPRRDVMESSVVIGIDVSKGSAVIAVHPSGERWTSETASTEIDGLVTRLQTHRPQLIVMEATGGYERPLAAACAAVSLPVAIVNPRQVRAFAQAMGRTAKTDGIDAGVLALFGARLQPPSRAIPDAETQALAALVTRRRQLLEMLGAERRRLAQAPPTGPITRDLRNHIRWLERRVDDVDDEIGTAIQQSAMWRVQEDLLRTVPGIGPTTARTLLAELPELGQLDRRAIAALVGVAPFNCDSGQHRGQRHIWGGRASVRASLYMAALVASRHNPILAAFYRRLRALGKAPKVALIAVARKLLTILNAMIKHQSRWNPKAASTPASTSEPARGAAVLA

SEQ ID NO: 345796 - protein, 348 aa, unidentified
MRCYQQQHRFYAGVDLHARTLYVHVLDRKGKTVFEQDLPADPQAFLTAIRPYRKDLVIGVECMFAWYWLADLCADEGIPFALGHALAMKHIHQGKAKSDKIDAGKLAAMLRGGLFPLAYAYPKAKRQTRDLLRRRSFFVRQRAQLLAHVVNTNTQFNLPPLAKKLSYAANRTPELLDRFTDPSTRLMVAADLALIDHYDERIAELERYLVPNAKVDDPVTFGLLRTVPGIGPILGLILLYEIDDIRRFPEAGNFLSYARLVRCQHSSAGKVTGSGPKKMGNAHLKWAFSEAACLVIRAVPAVKSWMQRQEKKKGKRKALAILEARLGRTVYHLWRKQVPFDLQRFLKG

SEQ ID NO: 345797 - protein, 402 aa, unidentified
MPEQQPILTRWIGLDIHKAYFVAVGVNAEKRTVFGPHKVPNEQLEDWIAKHLLPTDAVVMEMTTNTYLFYDTLVPYVGSVIAVHPPNVLLVTGVKVKTDKKAALTLAQLHAAGMLTGIWIPPVEVREMRAVIAQRGKMVRLQTQAKNRLTSLLHRTHRERPAQPFKPEQKAWWESLPISTIEKYIVASDLETLAFAEKQIKTIEEVLRQEAARDERVPLLIQLPGIAMLTALTILAAIGPIERFEDASHLVGYAGLGASVHDSGQMHATGHITKAGRRDLRGAMVDAANAAVRHHPYWKKEFERLEYRLGRSKAIVAIARRLLVAVWHILTNEAADRHADATSVAASMYKLAYEIKVSNLPKGVSAKSFARQQLDRLGIGQTMDVLPWGGKKVKLPPSQLNT

SEQ ID NO: 345798 - protein, 526 aa, unidentified
MSEVSLIRQTKYRGIITEAGSLTFPPWEPAEPLLAKPPGKSVSPFGGDLCFGWLGSPRLYLYKPLGCVSAFWKWMPAGKDKTMQYQKVLKMLECIPYLSVGLDVGADFTWMSIMLPNGTLAGKPFKIVHSDPQSRELAVTKIKEAQEAYSLKSRCFLESTGIYHIPLLCFLRDKGFDCSVINPIITKNSTNMNIRKLHNDKFDSKKAAKVGLDASLKTSIVPDDAVIDLRNLVRDYYYFKDLQSAVVLKLHAELKVSFPAYLNVFSKITTQTSLKLLEAYPLAADMLAAPKDELVESIRQTARFGEKYAVSKYEAICAAAKDAAVFGRALPSNALRIRLYIKTYREYQEHLGSILKELHKAVEKLEGTPVYDRILLLQSLRGVGFLSSVVLIAEMGSFDLFPSPKKLYAYFGLDPAVKQSGKFNADKVHMSKRGSSLARRILHMVALNNLKVDKGTKTPVNPVIHSYYADKCKNKKKNVAVGAVMHKICNIIFAMLRDNKPFEIITPEEHCERYLETHPDKAQNAA

SEQ ID NO: 345799 - protein, 353 aa, unidentified
MPVKTNTPPQTQTQEPIHQIKLGVDWHAAYYSVVRMCDGLSPQPAQRFTPASFLAFVQKQLTLADQVFVVYEAGPGGFHLHRQLTALGATVFVVHPVKLDPRHKNVVTDKTDARELTLNLDRYLRGNLRAMSVVRVPTQAEEQRRALSRQREQLRRERQRLAAQGRSLCLTQGIRLHGDWWSQLLALPDWLVPRLDVWRKLILAVEEQLDALTKQVEALAPKERPKGLGPLTLGMLIAELCDWSRFNNRKQIGSYTGLCGGVSSSGLSHCDLSITKAGNARLRWSLVELAWRMVFFQPQSKAVQRWKHILLNPKAAARQKKRAIVALARQLAVDLWRWQTGRITPQQLGWVMV

SEQ ID NO: 345800 - protein, 316 aa, unidentified
MFTLGFDVAKDHIDVALVNKAGTAKQSWQTQNSVAAITELLNEVHTKHVKLQAGCEATGYYHLPVVQACVQVGIACYVLNPLLTKQFTKSTVRGRKTDVDDAVSIARLVLRGEGSLVVLDNRSLAQCYVRLATKVGQQKQALGLQARFFLGLHETLGIAMGSPFNESLAALTELVTYLRTMATQLVDARSVQLLQSLPGIGPQIATTLLAEIGSIQRFPGPKQLVAFTGLDPRVRQSGTVLNRHTKLTKRGAPELRRVLFLAANIARQRDPELHAYYQKKRAEGRTYTAATVATARKLIHRIYAVLQRGTPYVKSS

SEQ ID NO: 345801 - protein, 348 aa, unidentified
MTPITLDPNHSYCGIDLHARLLYVCIIDNTGLILVHKKIKDDPEALLKLLKPYIGDIVVGVECMHCWYWVADFCKEHTIDFILGHALYMKAIHGGKAKNDKIDSYKIAKLIRGGNFPLAYVYDKDMRATRDLLRRRTKIVRHGADLKAHVANTASQYNLPAHNVNLKNVCDREKMRYYFPDPVVQRSINLNMAILDCYHSELKPLEHYIEQMAKQHNPVHLNILQTINGIGRILALTIIYEIGDINRFSSVQKFASYSRLVKCKAESAGKTYGTQGNKIGNAHLKWAFSEAAVLLLRHNHNANKYLEKLQKRMSKAKALSALAHKLGRCVYYMLKKETVFDEAKFLKS

SEQ ID NO: 345802 - protein, 376 aa, unidentified
MERGSLMLNTTTFVGLDVHARSIKAVALDAMTGEVRSATFGYDAAAVAEWVGSLDPAAKCVYESGVTGFDLQKKLTALGVDCVVGAVSKMIKPSADRKRKNDRNDAEFLARMLSVGNVVEVWVPDDECEAARDLVRALDDAREDLKRCKQRLSKFLLRHGLVFSETNAKGQRKKNWTAAHWAWIRSISFPEKADDDVLAYYIDATRQAMEDKKRLERLVEAEASKPRWKKRVDSLRCLKGVDTMTAADIVFEAGEFSRFKSARSFAAWLGLTPSEHSSGESVRQGGITKAGNKHLRRVLVESAWHYLGCSPHSKDLAKGQAPDPGARRHAAKGVRRLVGRRAAMLERGVHKNKANVATARELACWCWAIGCMVESA

SEQ ID NO: 345803 - protein, 400 aa, unidentified
MYKNFLGIDISKDSFDFCFTDESEKVLHKDHYLMDIDNFTNLANYLASFSNDEILIVMEATGLYHLNLLSFFLEQGLNVSVVNPLFIHAFTKSMTIRKTKTDAKDAHIISLFAKRNGATLKLSHFNDLESIKPIVREKEKLIKSMSAIKTDMKSIVNQVFPEMLKNTNIFLKSSLNLLLQAPSKRVIRNLKEKKIAKLLSLDNTKGSKPKITANEILSLAKNSIGINNPSLEKILISKINQMSFIQTQIDEYNEIIEKFVDEYHSDDIDKLTSISGVGKTTASSFIIEVGDISNFATHKQLTAYIGTDPAIYQSGTSVNVKGSISKRGNLHLRRAIWHMARAATVWNETLKAYYDKKRSEGKTFKQSVIAVANKLIRIIFSMLKNNTKFETNYQTQGVSI

SEQ ID NO: 345804 - protein, 362 aa, unidentified
MLYLGCDVHKNYTTISFVDETGNCKGTKSFFNNIDELKHLLSLFPEEEFSAVLEAGLNWGVIYDMLDSLSEVKSVSLAHPPRVKAIASAKIKTDKIDSKILGQLLRTDLIPEVWVPCKEIRILKDIVRSRAFVVKIKTMIKNRIHDILRKSHINPPEVKDIFGKYGRMWLEDIELSDKRADKLLRYHLKLKDTFEEMEIELKKWINKEMRSNEDLKLVKAIPGIGDVFGPIIVLEIDNINRFPDPPHLHSYSGLVPSTHVSGNMSYHGRLIRGNRWLRWAFIEGAHTSVRISPYFREHYTRIKRRAGTQAASVASGRKLATIVYKVLKDKRPYIEEYKIKNNKGRLPSVGISGGISSRSLLE

SEQ ID NO: 345805 - protein, 309 aa, unidentified
MDICVVGIDVAKAGLDVHVLPAGEAFAVGRDAAGIDELIERLRPLAPAMVAVEATGGLESVVAAGLGAAGLPVVVVNPAQVRAFAQALGKRAKTDPIDAAVIARFVQATRPTIRPLADAETTALADLIARRRQIIQMITAEGQREKRASKRMKKSIQRLKKALQKELTDIDREIDDSVRGSPLWRHNEDLMVSVPGIGPAIARTLIAELPELGKLDRRQVAALAGLAPFTRQSGQWRGKAFIAAGRAAVRSPLFMGAMVAVKHNPILKAFYERLIAAGKPKMVALIAVARKLLTILNAIVRDQKPWQPA

SEQ ID NO: 345806 - protein, 334 aa, unidentified
MENVALIGIALGKHSFHLHCQDKSGKALQRKKFTRTNLMQFLATCPSTVVVMEACAGAHFMARRISDIGHEAKLISPQFVRPFVKSNKNDFVDAEAICEAASRPSMWFVQPRTEVQQAMRALHRVRESLIRDKVKTTNQINGFLLEFGISLPAGDTVIKRLPLVLVEHEIPEYLSRLLMKLHAHYLYLVEQITELESELNQSIKTDDATQRIMTIPGVGPITASLLSSQLGDGKQFSCSRDFAASTGLVPRQYSTGGKSTLLGISKRGDKNLRRLLVQCARSFMMRLEHQQGRLAEWVREQLSKKHSNVVACALANKLARIAWAITTNHNAYQA

SEQ ID NO: 345807 - protein, 348 aa, unidentified
MNATIVAVDLAKNIFELAVADADWRIAQRQRLTRAKFLGFFVQRAPCQVVMEACGSAHFWARRIRSLGHTVRLLPAHYVKPYVRRSKTDRADAGALIEAARCAEIREVPVKTVEAQQVQSLHRLRSQWMSTRQRYVSTLRGILREFGFAIPLGVNTAKTQIGAAIADPGSEVPVALRATLAQMLQEIRFLEQKILDVEHQLNALTRADVRVQQLRQIPGIGALTSTALPAVVGDIQRFPSARHFASWLGLTPSERSSAERRRLGKISKQGDTYLRTLLVHGARSTLLAAHRAERAGHCLDRLRRWALDCERQRGHNKATVALANRLARIVWATWKYERTFDGNWSAAA

SEQ ID NO: 345808 - protein, 394 aa, unidentified
MRFAGIDIASETHVLAIVAADGTVAVKPTAFAEDDLGYQNALTLLGTPGEVLVSMEATGHYWKNLFAVLVAAGHAVALLNPLRTHRFAGVDLERTKTDAIDALAIARFAAQKRPPTTPLPDALAEELRELVQLRQRLMQDFGDRVRQLHRLVDLGFPEFTRYVRTLDSELATAILRDYPTAAAFRGVSARRLAAVRYDGRHQVGPNLARTLIDAARRSVGQHHSATYRLQIRYACDDLDTLRGRLRTLDRDLDGKLRQHEVGRLLTSIDGIGPHTAARVIATVGNPAHFRSGSALAAYVGTIPALKQSGKRQSLRGGHTPIGNAQLRAALWMPTLSAVRCNPWLRAHYQRLIARGKLPKVALLACMRKLLLVIYSVAKHGQPFAPRLQPPQAAT

SEQ ID NO: 345809 - protein, 372 aa, unidentified
MVERWGVVGCDAHKQTLTVAAVDAAGSDVKVASFSNDPDGFGAIVAWLGGLGMEVIRVGVEGSSSWGRHLSVSLATAGYDVREVPPTRTTDRRHRRRRPKTDREDALAVARETLADSTLPPAKPTLDVSEAQGELTVVCERRRSLIRRRQRLLNEAEGLLNKLPPELIAGMPKQVAPRLRKVARLDHTLLALSPSLAEMLDWLAELAADLDQWEARIGELEDRLPALLDSCGSTLAEEFGIGVVSASELVAAVGKPSRFKTEGGFARWCGVAPVAVSSGEGDGQPIRHRLDLLGNRQVNRILYTMSVTQARHLPSAKEFLARKRAEGKSKKEARRAHKRQLAKRVIRRMWADQRRLGALSQSSQPTPSIRVA

SEQ ID NO: 345810 - protein, 337 aa, unidentified
MKLYCGIDLHSSNSVIAVLDEQDRPVYEKRLDNDLDEILEALKPFKDEIVGCVVESTYNWYWLVDGLMEAGYRVHLAHAGALPQYAGLKYSNDITDAGYLAQLLRLGILPTGYIYPKQERALRDLLRRRLLLVRQKTLHHLSLQSLIARHSGQRLNANAIKKLEQEHLSYYLDSPILLGGEITHQARCWLDGAIARIERELQKHIQPRQDYRLLQSMPGVGPALGTTIALETGTIARFPSAGNYASYARCVKSEKISNGKYKGQGNKKNGNKYLAWAFMEAAHYSAIWSPQIKQYYQRKQAKAHVLVAKKAVANKLARACYHMLKRGEPFDVKRAFG

SEQ ID NO: 345811 - protein, 358 aa, unidentified
MTTTTAKTATAAGPILAIDLGKYKCVACVYRTATEHTFQTIDTSRTEVARLIERTRPAVVVVEACSLAGWVHDLCGELGVLCKVANTGAEAWKYKHAKRKTDRDDALRLAQLYALGQLPEVVVPVKATREWRALIAHRQALVTQRVAAQNRIRSILVGQGLPAPRGAKAWSVSGLAGIGQFARPLAECDSEELWRGLLDLALTAYRQAEELVAVAEAKLDAIGKADARVRLLDSMPGLGPRTAEAVVAHLDDPRRFRSGKQVAAYGGLVPQQYQSGEDDRRGRITKRGPAVLRKLLVQCAWAMIRYNPWARAVYVRLSRGQARKKQAVVALARKILVRCWAMLRDGVPWRVDAVAAAS

SEQ ID NO: 345812 - protein, 454 aa, unidentified
MEQKQKKISMEIVNPHAAGIDIGSRSHWVAVGQQPEDIKEFGVYNEDLLALADWLALHEIKTVAMESTGTYWQSLYAVLIQKGFQVILCNGKFTKNIKGRKTDVQDCQWIQKLHTIGLLTGSFLPDEQTEQLRTYCRHRSNLIDMAANTQKKMQKYLRLLNLRLDVVVNDICGQTGMAIIHAICAGEVQPEKLAALRHFNCRKPEEEIARALQSNGRKDYLFALQQELDMYKTLQQKIDACDVEIKILLVQAINQDDEKKQHTIEKKPHKRVNKNDPKNIDLNLTGYQYFEGVDLLAIEGFSHSTLLTLMSEVGPEGIKKFPTAKHFVSWMRLSPNNKISGGKVLSNKIPKGSNLLKLAFRNSANAIGNLKSSTPLADFFKRINFRKGRVAAISATARKLAVIIWNMVVKHVPYVNPEGYLFLDQKRKLHAAKRIKKQMQNFGLSPADIGITTA

SEQ ID NO: 345813 - protein, 379 aa, unidentified
MKTNSDTTTKLYVGFDVHKEKTSLAIADPGATGEIRSYGEVATTQIALERTLRKIAKARGVALAEIHVCYEAGGCGMWIARMLVRLKVQCTVVAPSLIPSKAGDQVKTDKRDAIKLVRLLRAGELTAVHIPDETDEAIRDLCRARVDAIDDLRRVKNRLLAMLRRLGFRYTGKTTWTEAHKRYLRNLRLPFACHCIIMEELIGQIDQLVARIERFEGHMELMCAEWVKKPVVEAIMTLRGFRTIAAMTVVSEIGDFVRFTHPKQLMSYLGLTPGEYSSGGKRKQGSITKCGNSHLRWMLVECATHYQAEPRVSSALSKRQEGQPRWLKEISWKAQNRLHLRFTKLRQRLMHHNKIKVTVARELTGVLWEIGVKMQTQTA

SEQ ID NO: 345814 - protein, 335 aa, unidentified
MKSQEIKYVGIDCGKKTLEVIRIGDNSLHQRQQFSTTENGISNLLNWLNPNDVVGLEAGSQSFRIAKSILNKGIQVIVLNPGDLATIYQSLKKTDKEDSLKIARLIQRFPIEELPVVPIPNDEEEDNRRLCSEQENWTRQLTQSKNRLHSLFTQAGLTHITKKHLRTKANRETSVTLLPSRYQKEAERILKVLDLVEQNLKLIEEEIKEALKKNKAYNSNNHVYAWVITSLAIMSYMGDCKRFSSAKQAAYYVGLVPRVDISGDSAYYGRIVNRGCHSIRRVIVQAAWSLVRCQHGGKIKEFYQRLYPKKPEFGITNAKAIVAEIPKELERKARS

SEQ ID NO: 345815 - protein, 355 aa, unidentified
MSGEKYIGLDIHQATISVAVVDSQGKVVMESILETKASTLLEFLAGLRGSLFVTFEEGTWAAWLYDLLKPHVTEVLVCNPRKIPLLKQGNKSDKIDARKLAERLRLHDLKPVYHGETGIRMLRELARSYLTVVKDLSRVMNRLKALYRSWGIPCGGRDVYYTRHRREWLEKIPEAGTRRRAEQLYQQLDMLQPLRLQARRELLAESRKHAITAKLRKIPSLGPIRSALAVALIQTPHRFRSKRQLWTYSGLGLETRDSGEYHYVRGQVRRRKKQATIRGLNKDYNHDLKSLFKGAATRASVKPGPFQEFYQRALAKGIKPTMVRLTLARKIAAITLTLWKKGEDFDINKLNSQAA

SEQ ID NO: 345816 - protein, 412 aa, unidentified
MNPQNNIVAGIDVHKRILVVVVLHSSAPERDHATARFGATHMERQKLLEFLRFHQVSHVAMESTAQYWRPVWMDLEDEFPLTLAQARSTHAPRGRKQDLSDARRIARRLLSGDLTASYVPGPEQREWRLLSRTRVGMLESVVRLRNQIEVLLEQAQIKLSSVVSDVLGLSGRRILRALLEGVHDPVQLAALAHHRIRTSKEDLADALNGRLTPSQQLVLKLYLEQIEQIERHMVEVEKALAQAEAQHQDAIERLCEMPGVSVRSAQHVIAEIGPRAEAFASSGKLASWVGVCPGRNESAGVSTSNRSPKGNSMMRRILSQIAWASIASKGSEGQRRYRKWVGRLGPQKAAWAVAHYQLRVMWNILHQGVRFLQPDTANLDQKSLLHRAKRVLADLKRLGYAVTITPPPVPGV

SEQ ID NO: 345817 - protein, 360 aa, unidentified
MKRFPEFPELLAEVLYVTILFCLGVDVSKNSLAVTLIDQQEKIIWSNRSIPNTQSGFIKLVEQVLRHAVKKSDGQDFAIAVGMEATGVYGEQLAHFLHENNHEGHIIPYVLNPASVRSYSKACMEANKNDPTDARVIASFLSVAIARGQVSPWKAPSEEERTLRALSRRREELVHLLTSEKNRLEKLSNMASPSEEVVKSVQEHIQYLEAAITNIAENICDHINTYPTLKKNAEFLRSIPGIGEVSTATVLGEAGDLSKFEGIKQFTSFVGIAPMEYTSGSSVNKRSRISRRGNTRIRHCLYMATMIAVRVNPVLREFYRRLLERGKGKKVALIASMRKLLHLIWGVLKNQRMFEPQYCS

SEQ ID NO: 345818 - protein, 361 aa, unidentified
MTKGSTGMRAASAQDYIGLDLSDKTATYVVLSAGGEVVQNGKLKLSQTGLQRALGTRPPAQIAIEVGGHSPWVSRTLTQMGYEVTVANPRQVKLISHGQKKSDLLDAENLARLLQYDRRMLRPINHRGEATQADLALLRSRDVLVRARTRLINSARSMVKAVGGRLPRCSTDSFHHKVSDDVPALLKPALQPMLEAIAGITEQIRAMTWRLEKLADERYEETKVLRQIKGVGPLTSLGFVLTLEEAQRFGKSRSVGAFLGLTPRQHDSGESQPQLRITKAGDPFLRRLLVQSAQYMLGPFGADCDLRRWGLKLAGSGKNKIRRNKAVVAVARKLAVLMHRLWLTGEAYEPLHQAMLKEKAA

SEQ ID NO: 345819 - protein, 340 aa, unidentified
MEQIIGIDLAKRVFQLHLVSQQGRIKANKVITREKLMAFIVQQPPSRIVMEACGSANYWARQFRQYGHEVKQISPQYVAPFRMGNKNDKNDAIAIVEADSRPGMRYVPAKSLTQQDMQCLHRVRQRLMKNRTALINQIRGLGLEYGIAMPEGAHKVMSCLPDYLEDADNELTAMSRQLFQELLFELKAQQQRLKELDERLEHLSAQNEETCRLQSLPGVGVLGASALTIALGDSSEFSNGRHFASYLGLVPKEHSSGGKVKLLGITKRGDAYLRGLLIHGARSVVYRIGKLADSQCNGLQRWLKGVIARSGVNKAVVALANKNARMAWALVNKKTVYVPS

SEQ ID NO: 345820 - protein, 342 aa, unidentified
MELRLCSLNGMLQMAPTSAPYEWIGIDVGSKQLDVYDKVHQRHRCYGNDAAGIAQLCQDLSNRAHCAIVCEASGGYEQAVAHGLSEQGFRVSVVNGQRVRCFAKATGTLAKTDKIDAVKLAEFGALFAPKATILASAAQQQLQDCVHRRQQLVDDLAREKNRRKQLKSPRRRWMAQEVEAHIEWLEKRIKQLDEQIEQLSTQQQQWREDKALLTSVKGIGPVVSTGLLAYLPELGQCGNKQIAALVGLAPFNRDSGQYRGKRSTWGGRAMVRSLLFMATMVAIRHNPPVKAYYQHLLSQGKAKKVALVACARKLLVCLNAMLKQRTPWQDERYSAHFVRAEA

SEQ ID NO: 345821 - protein, 361 aa, unidentified
MVKRGHRCTGPKHQEKRSMDYFAGLDVSVKDTSVCIVDSTGKIVREVKVASEPDALLAALRNPAYDFKRIGLEAGPLSQWLFSALAEAELPVICVETRHMRAVLKAQINKTDRNDARGIAQMMRVGLYRPVHVKTLRSQKLRMLLTHRKLLQAKAIAVENDLRATLRNFGFKVGVVGRVKFETRIKELVESFPDLVALVEPLLVVRRVLREQIAILHRRVLAAVRDDEVCRRLMTVPGVGPVVALTYRATVDVPARFRKSKSVGAVFGLTPARDQSGERDRPGAISRCGDEMMRTTLYEAAQVMLLRSAKWSWLKAWAMKIAKHRGMKKAIVALARRLAVIMHRIWTDGSEFRWTRGAAAV

SEQ ID NO: 345822 - protein, 391 aa, unidentified
MPMYFVGIDISKYKHDCCIISAADQQIVSKFTVKNDKDGFEHLLTTLNSLSNPEDIKIGFESTAHYALNLELFLENAHHSFMEVNPVLIKEYKKSTTLRRTKTDSVDCESIARWLITVEYKPHSKGFYHAYSLKSLTRLRDRLIRQRSFYLVKITNVLDHTFPEFKPFFNERLSKTALYLLENYGSAEKMARMNSASYDKLRCISRGKFSIQQFLRLKELAANTVGVNNSIFDLELNTLLTLYKSLSDEINTLETEIIKLIEEVHPHYMSIPGIGPISSAVIYAEYGDISNFSNPGQMLAFAGIEPGINDSGTESHGGRMVKHGSSQLRYVLLNACLPLIRFDLTFATYYEKKRAEGKKHRVAITHVAKKLIRVIYALERQDVDFNAQKLR

SEQ ID NO: 345823 - protein, 398 aa, unidentified
MTRKNTLKSLPTDTEFRVVGLDLAKSDVSVAAIPVDDNTPSLVDRMTYADLLDWAGKISPTLFAMEPCNGYSLLCLQLENLGHEIKVISGSTVSMWINTHLSGQKTDLNDAIALARLAVSDAELTPIRHKSITEIRIQTVQAVRQQLMSQRSKSIVSFKALAQQWGIPCAAGHRNLKKLRESIEAKVDLITRPVANAMLFLLDAVKSLDRQIGQLNQTLQELVMSDERGRLLQSVLGVGTQISARVITVVGNVERFNSPRSLVAYVGVAPRNFITGHKNLTKKKHGNCPDLSHKGQGKISRRGDKLLRSLFIQGAACLYMQFCKDQLPECQLKRWILKQLARQKPYGKLIVSLAAKLIRIVWAVLTYREKFNIQKAGMTRSMWSEMALETPLNKEVPA

SEQ ID NO: 345824 - protein, 473 aa, unidentified
MTKNSVRYVGLDVHKRIVEACFIDEKGNVVHRERFVLNRQILATFATNVLRPTDQVAFEATTNCWAVADALRPHVAKIVVSNPMATKAIAQAKVKTDKVDALVLAQLLRCDYLPEVWQPDEETRRLRELTGRRATLVGQRTMMRNRIHSVLAMRLIEEPKKPRLFSPKGLEWLAKVELDEQGRMLIDSDLRQLAFLQQEIDLLDAELARRAYKRDPVKLLMTLPGVDVATANALLAAWGDHTRFPDADHAVSYLGLVPSTKWSADKCYHGPITKRGNSQARSMLVEAAQHLGTHPGPLGNFFRKLSRQKNRNVAVVAGAKKLAMIAWRMLATNEPYRYAIPRSTEAKLAKLRVKATGERRKTGPCQGVKYTAKLPGVPGGSRQIKSLAAVYEVEGLPPPKPLAPGELRTVRKAGASKFVAEIAKTHRVPRCSGQKAAVATATTQRTSKKPAKTKATTTRRPGGKKGLKTVASD

SEQ ID NO: 345825 - protein, 406 aa, unidentified
MLFVGDDWAEDHHDVEVQDEAGRRLGRARLPEGVAGVARFHELVGEYLGEDAGPQEVAVGIETDRGPWVQALLAAGYAVYAVNPRQAARYRERHGTSGAKSDAGDAHALADMVRTDRHQLRAVAGDSEQVQAVKLVARAHQTLVWERQRQVLRLRSTLLEFFPAALEAFGDLAAPDTLELLAKAPDPVSAARLSKAQVTAALRRARRRNVEGKAARIVGVLRSPQLGQPPAVAAAYAAIVRSLVRMITAASEETAVMEDQVSECFGRARDAEVLLSQPGLGKILAARVLGEFGDDPDRYASAKARKNYAGTSPVTRASGKKKTVLARFIRNTRLADALHQQAFCALTASPGARAYYDELRARGQGHHAALRQLSNRLVGILHGCLKTGTRYNEHTAWSHHSQQPAA

SEQ ID NO: 345826 - protein, 340 aa, unidentified
MNTMTLLGIGIGKHSFHLHGQDAKGHQVLRKKTNRGQLLSTLAQLPACTVVMESCGGAHWLARQIGTLGHEVKLIAPQYVKPFVKGNKNDFIDAEAICEAASRPAMRFCSIKTAEQQTLSALHRVRDSLIGHRTVAINQIHGFLLEFGISLPIGTAALHHVPMLLDNPQHSVPLRLKGLVMRLYRQIQQLDQEIKDIESDLKQQLKEDDAGSRLQSIPGIGPITASALLADIGDVSNYRSARDFSASLGLVPKQHSTGGKTVLLGITKRGDKHIRRLLVQGARAIMQHIDGRDDALGPWVRELLTRRHSNIVACALANKLARIVWAVLAKGGQYDPHPNA

SEQ ID NO: 345827 - protein, 362 aa, unidentified
MSQSFQSFIGVDLHKCTVTLAAVDPGGEKIAQLTISTKSVGKIADWLGALPRPSHMAVEACPFVEWFIDRFRPCVDHIDIADATELANRRGKRRKTDRNDSLDIAKRLARGECPLGFIADRELMQLRKLGRHWRLLSRLLSRTKHSMKSMLNAANIRGPKFDGASAQRWFLANGHLLAPVQQEAFADFIDILNLVERQRERLRRQINVAWESERFAAIVLRLCTVPGISQIWATIITAEIGPFDRFPNADALEFWAGLTADLKESAGRTQSGHITKAGSATLRWALGKAALTLCQSDARQEATRQRLIARIGRPKANVAMARRLLRILHAMMRDGKAYEAGPRRDRTAAANKARLKRKNKAA

SEQ ID NO: 345828 - protein, 348 aa, unidentified
MVADSLDVVIGVDTHRDAHALALAAAPSGALLLEAVVEASADGYRDAFAFAQAHARGRRAWAIEGTGCYGAGLARFLLARGERVLEVDRPRRERRPGRGKSDALDALRAACSLLAREPLASPRRAGRREALRALLTTRESAVGARRCALNQLRALIVSCPEPLRAELRPLTRARLLRLLRAKRPRRQTDPQLRGTLLAMQLLAVRIEALTLEERTLKQEILPLARELAPQLLAEPGVGPITAASILLAWSHKGRLRNEAAFARLAGAPPIPASSGKVVRHRLDRGGDRKLNRALHTIILTRRRTDPDTIAYIQRRISEGKSDRDAVRCLKRYLARSLFRQLEAMPQPA

SEQ ID NO: 345829 - protein, 412 aa, unidentified
MQDILTCAMGLDVHRDIIVACLVKGVVDAEPEAETRTFSTLIPEMQKLRDWVIESECRNIAMESTGIYWQPIYEMLESCFDGEISILVVNARHMKNVPGRKTDMKDAQWIATLLRAGLLKGSFIPDKAFRELRHLTRYRKSVVHDITAQKNRIDKFLQSSGFRFTAFLSDTFGASGRNIIRHLIEHGIIDREALDKCLKTKTRNRIDEILVALNGSLSEHQRRFLNMVFQHLEDLEAHKHTVEDEITEEVLKHTDALNLLCSIPGIDVTAAAAIIAEIGTDMSSFPDSQHICSWAGLSPGNNESAGKRKSVHINKGNPYLKSMLCEVAWIMASHRKLYLSGWYWKVKQRKGAKRATIALARKILSIIYTMLKTGTPYNEECFEQRRLRCERKRANRLVNELQKLGYVVVAPD

SEQ ID NO: 345830 - protein, 340 aa, unidentified
MAITTIGLDLAKSVFQAHGIDESGTTVLVKKLHRKQMVPFFSKLPPCLIAVEACGTAHYWARTLAAMGHEVRLIPPSYVKAYVKRGKSDALDAEAICEAVQRPTMRFVPVKTIEQQGILMTHRARSLLVRQRTMLANALRAHLAELGHVANPGIGNLAKLAEQVMADRDAMPSYARTALEILIRQIMAVSAEIAELDQQLATWHTESEASRRLATIPGLGIVTATAIAATVTDAEQFSSGRQFAAWLGLTPQQHSTGGKTRLGGISKQGDRYLRRLLVVGATAVMRHVKDKPTPMADWIRKLSEKKPFRLVSVALANKLARIAWVVLTRKEAYHPYANLT

SEQ ID NO: 345831 - protein, 331 aa, unidentified
MYNYIGIDVSKQSLKISDETKEYDVPNEKGLKTLKKLFRKNYGKDWKETRLIYEPTGPYSNYLREFVFKHKIRIYEMNPKKSANFAKALGNRSKTDDIDAKMLYKFHVLLKEEDFRIPEIDKVVEQLGAYVSSYRIIQKTRTMLSNHLQSREYENGIDPKLKESIKKEMEKLKQIEEALEKEMEAFGRDNPEIKEDFENLLSIKGIGVISVTALLYLFRKYPDANRNEITALAGLDPVKRQSGSSINGGRKISKAGDSSLRKILYVSCLSSIRYNDRIRVFYEHLITNHKKPKVALIACMRKILLIAHQIYVKKSEYKPLYIDNKSLCSSY

SEQ ID NO: 345832 - protein, 411 aa, unidentified
MDRIYDNCCGIDVHKKLIVACFRCGKKQDVREFGATTRELISLADWLKEGGCEMVAMESTASYWKPLYNILESSDLNAMVVNARHMKAVPGRKTDVKDAEWIADLLQHGLLQPSYIPDKDQRELRELVRYRKSLVGERTRELNRLQKMLEGANIKLSGTVSDINGKSARSILEYLLTGEPIDEAKYDEMYNQKVIAHNLKATREQIIDDLNGVMSSLQRRMMKELLIHLDELNIHIRNLDDEIDNFMKPEEKQASQAIQDVTGIGNTSAQAIISVIGTDMERFPTDKHISSWAGLCPGDNESAKKRKSGKTRKGNSLLRTTLITCAHAAVKNKKSYFHAQFMRISAHRGTRRAYVAVAHSMLIAIYHILKDGVVFKDLGADYYNQFNKERKINAYLKKLKALGWEAPVVAA

SEQ ID NO: 345833 - protein, 389 aa, unidentified
MKIFVGIDLAKLNHFAAAISSDGEILIEPFKFTNDADGFQLLVSKLESFDKNSIIIGLESTAHYGDNLVRYLVAEFYQVCVLNPIKTCQMRKNNVRKTKTDKVDTFVIAKTLMMQDDLRFITFFDLDMMDLKALGRFRQKTIKQRTRLKIQLTTYVDQVFPEIQYFFKSSLHQNAVYALLKEAPSPKEIASMHMTHLANLLKVNSHGHFTKEQAKELRVLAQKSVGANDSAISIQITQTIQQIELLDSQLEKIEAEMTDIMKFNDSVIMTIPGIGYINGGMILGEIGDIHRFSNPNKLLAFAGLDPSVYQSGNFQAKTTRMSKRGSRVLRYALVNAAWNVVRNNATFKAYYDAKRSEGRSHYNALGHCAGKLVRVIWKMLTDEVEFNLE

SEQ ID NO: 345834 - protein, 351 aa, unidentified
MIIIGVDYHPSFQQIAFMDEKTGEYGERQLNHSNGEAEKFYRELQHRGVHARVGMEATGHALWLERLLAELGVELWIGDPAEIKTKRVRKKKTDREDARLMLRLLLENRFPKIWVPSPENRDLRQLLWHRHRLVQMRTRIMNQLQAVAMNEGYRWKKKLFSEKGRALLEKLSLAPWASRRRKELLELLDQLDPKIAELTAAAEQEAKKRPEVLLLMTHPGVGPLTGLVYALVIGTPERFPCGKQIGSYTGLVPCEDSSAGRQRLGHINKQGNSLLRFLLVEASQAAVRCNPDWRRRYVHLRMRREKRIAKVAMARKLAVRLYWMWRNNWRYSQLVEFGSNVGKLGTVHGVK

SEQ ID NO: 345835 - protein, 352 aa, unidentified
MIIIGVDFHPEFQQIASVDTETGEFQERRLAHREEAETFYRALAGQKVRVGMEASGHARWFERLVAELQFELWIGDAAEIRTKRVRKQKTDRQDAQLILRLLLEDRFPQIWVPSWENRDLRQLLWHRHRMVQARTRIMNQLQAVALNEGLRCKKRLWREHGRQQLESFRLAPWASRRRRDLLELLDRLNPTIAELSQAIEQEVEKCPEAQRLRTHPGVGALTALAFVLIIGRTERFHCGKQVASYLGLVPLEESSGNRRRLGHITKQGSSMLRFLLVEAAQVTVRSVPEWRSKYLHLMMRRGRKTAKVAMARRLAVRLYWMWRKRWDYEQMKKFGSHAGQPGNRDGVQSNTE

SEQ ID NO: 345836 - protein, 343 aa, unidentified
MKDTIIGVDLAKRVFQVHGASMLTGHVRFRKKLTREQFRQFMAEQPSCVVVFEACGSASYWAREMQALGHEAKLIAPQYVRPFVKRQKNDAADAEAIVIAARQPEMRFVAPKTAEQQVKAVLFRGRERLVHQHTELVNALRAVLYEYGHVFPAGLAHLKRIEAVVEDSDCDLPELVIAECRDLLAQITEKTERIDAKTRKLKELAAETDTARRLQTMPGVGPLTALAVEAFAPDMAQFKCGRDFAAWLGLVPRQHSTGGKARLGRISKAGQTDIRRLLIIGAMTRIMGRARHKVPAESWIGRMLTRKAKMLVGIALANKMARQIWAMLTKNEDYRDPALGTAT

SEQ ID NO: 345837 - protein, 309 aa, unidentified
MTIHHTYIGCDIAKHVLDFFDPSTRRPVRIDNEAAALGGFVATLDPATCFVVFEATGSHDRLLRHILAEAGIAAARINPTMVRRFAQARGRLAKTDPLDARTLSEMGAMFQPAPDKPPCADRERLAAFARRRDQIVEIRARQWRHLGEAFDPALIADIEAFIAQLDDRIVTLEAEIARQINSIDALARQAERLVSAPGVGPVTALTLIAHMPELGHASPKAIAALAGLAPLNDDSGLRRAKRAIRGGRSRVRKALYMAALGAIRAAPRFKAFYTAIAARSGSKKLAIIAVARKLLTVLNAMQRQQKQYA

SEQ ID NO: 345838 - protein, 428 aa, unidentified
MSYRIAGIDVHKKMLAVVVSDVEIESEYQFERRMFSSNPEQLRSLAAWLVEQKAEEIVMESTAQYWKPVWETLERYWKPLCEKREGARRRSGTLHLAQALSNRGRRGRKRDFVDAERLVKRLVARELTLSFVPDAEQRLWRTVTRKKYQLRRDLVRIHNQLEALLEEAHIKLSSLVSDLLGVSARRMLKALADGETNPAALAALAHERLRATPEQLCDALGACTELNPVYRRLLKMTLEHLQILEQQIGQLDQELATLLHPHQDAVERLAEVPGFAVDSAQQIIAEVGPAAATFPSEKCLSSWVGACPGEEESAGVNYSHRSPKGNRHMRRLLNQTANAAVKAKGSIFEIIYRRCVPRLGHNQAIGVIAHRQCRLIWLILHQGTRYEERGPAVTKRSRYQRTWRMIRQLRNLGYRIELPNPDASQAQA

SEQ ID NO: 345839 - protein, 375 aa, unidentified
MKEASIIGLDLSKRSFQAHGALADGSVAFRKKLTREKVLGFLAEQPRCTVAMEACGSAHHWGRAIRDAGHEVRLIPPAYVKPFVKRQKNDAADAEAIAEAASRPTMRFVAVKTEEQQGRAMLFRTRDLLVRQRTQLINALRGQLSEHGVVAPQGPANVAILAQAIDDFPSLPLLVVELARVYLDQIDGLSEKVAELEKAIACEVKRGAVTRRLQTMPGVGPITAMAIETFAPPMEVFRRGRDFAAWLGLVPVQHSTGGKQVLGKTSKMGQRDIRRLLISGAMVIVRWACRKGAREGTWLHRMLGRKPRMLVAIALANKMARSIWAMLTKGEDYRVPVAATLLSTIRLSGQGNVGRVRRSRNVRANDRSDPGQEMQ

SEQ ID NO: 345840 - protein, 344 aa, unidentified
MKNRNVLALDLAKTVIQICKISNDGELIYNKAVSPNKLRQILAKEKESIVAMEGCGSCHYWSRLSEQYGHDTRVIAPKKVKAFLQGHKTDANDAVAIAIAATQFGMKFSQIKSEEQQTLQTLEVSRKLISNELTSLGNHIRAYMYEYGITSSKGKKGLRECVTDVLDTEDKRLPTCLKGTLNMLWQRYKQTAEQLKMAEKEKAALVKQLEPCKRLLDLESVGVVSAALLYASIGNGKSFKNGRDASVYVGVTPKQYSSGGKTYLMGIDKRGGDKALRAALFQGAFSVIHKLPEKPRTTKQAWLIKLVARVGVKRACIALANKTVRTAWALLSKEQVYKATPIAI

SEQ ID NO: 345841 - protein, 344 aa, unidentified
MKLFIGLDVSLAKTAVCIVSEHGKIVKEAEVGSDPAALTQFALEQQGEIAMIGMEAGPLSQWLHRGLTEAGLEVVLMETRQVKGALKAMPIKTDRRDAEGIARLLHLGWFRPVHCKSVSAQEIRALLGARKSIQQGVIALEMSLRGLLRNFGLKVGAISKGRFDARIQELVASNTTLVAATEPMLRARATLRHELARLERHVRSLAQDDPTCRLLMTMPAVGAVVALTFKSAVDDPARFSSSKKVGPWVGLTPSRQQSGERDVTGGITEAGDAHLRRALCQAATVMMNRGRGSWLRTWASRVAKRRGTKRAMVALARRIGVILHRMWLDGRNFRWEGAPEPIHA

SEQ ID NO: 345842 - protein, 409 aa, unidentified
MVHARCAGLDISKRDAKVCVRIAGAGRRKTVETVTTWGSMTSQILALRDHLIAERITCAVMEATSDYWKPFYYLLEDAGFDVLLVNARHVKNLPGRKTDVADATWLAQLGAHGLVRASFVPPEPIRHLRDLTRARTAITRERSREIQRLEKLLEDAGIKLSAVASDILGVSGRAMLESLIGGNRDPAALADLAKRRLRSKIPALTEALTGRFTEHHAFLARVHLDLVDQHTAAINHITTRIEATIKPFHWFRDLICTIPGISILTADVIIAETGADMTRFPTAGHLASWAGTTPGHNESAGKVKSSQTRPGNPYLQGALGAAAMSCAQNPGTYLGARYRRIASRRGPQKANVAIQHSMLIAIWHMGTNGCIYDDPGADYFNRLHPERAKKRAISQLEAMGYNVTLTHAS

SEQ ID NO: 345843 - protein, 409 aa, unidentified
MSKLFVGIDVSSRKNVIHFMQPDGSKYSSFSVDNNFNGAKLLVRSIIAALVKLKLQSVVIGLESTSVYGDNLIFFLRESSELAKFQPDIHILNPKQVKKFKDAYPDLPKNDPVDAYIIADALRFGRITNKLYTDDYRYQALKTLTRARFFAVQNLTKEKQRFMNYLFLKFSSLAQDKVFSDSFGASALSLYAEFDSVEELAAMNLNELTDFIRKTGKNRFPDPDAVAKAIQTAVRSSYRLPKTIVDSVNQVLALSIISMRSLKAQIKSFDKAIELQLQSIPNTLTSVKGIGLVFSAGIIAEVGDIKRFSSQASLAKYAGLVWTQHQSGNYQAQNTRLINSGNRFLKYYLTEAAYSLLRCDAEFKRYYSLKKSEVNRGQVKRALALTARKLVRLVFALLKDNKLYIAPEV

SEQ ID NO: 345844 - protein, 420 aa, unidentified
MKTNDYAAYLALDWGDSQHAFALQMADNQNIEKGHFGAQPEEIHDWLKELGGRCGHARVACAIEAGGDALVSALLEHKWIEVFPINAAMSARFRKALIPSGAKDDVPDANVLLTLLVRHGDQLKPLQLDSAQTRELAALVLARRGAVDRRSQLGNQLRAVLKGFFPQALMLVGDELHGIMALDFLERWPDLDTLQRARPATVQSFYLQHRVRRPELIKARLDLLARAQALTKDTAIIGPAVLQVQMLTSMIRTLQRHIARFDESIAEQFAVHAESSLFRQLPGAGPQLAPRLLVAFGDNRERYPDAPSLQKYAGLAPVKEKSGRQLWVHWRWTAPVFVRQTFVEWAGQTVVYCGWAGAFYARQKRAGKGHHAIIRALAFKWIRVLWHCWKHQEAYDETRYLAALRQRRSPLIEDLDQATT

SEQ ID NO: 345845 - protein, 368 aa, unidentified
MAQYYVGLDVHSRQSVFVIEDAAGQVVGQGEVPTTPEGLQQLQTQHRLPAGTPVALETGTVAFFVARHLRRLGLEPVVVDAQEVRLKAHRPTQKSDRRDAYELCEGLRRDIYRILVHVPPPAVSALRDTLSRRRHFVRLQTAEINAVKRLLRAAGLGHLSRALRTEVGWGKLLAAVAPQPDLRAFVEHHRAAWRCAGEQVAALEHALGAQQRAFARDLERLETAPGVGPIVAATTLAVFSEVTRFPSAKHAASYAGLVPSTYQSGTRDAHGRITKRGSAELRAMLCEAAQHARRPTHPLHPYFTKLCAKRGYKMAVIAVAHRLARILFAMLRDGTDFDVHRLGIAVGPFTRTTVDAYRLKRLKRAHRA

SEQ ID NO: 345846 - protein, 365 aa, unidentified
MQNHSIVWVGMDTDTKKNQIALYRGLETEPVEFEVGMDGQGQKRLIERLRREDGEVRCVYEAGPCGYQLYRKLREAGIHCDVIAPSLTPQKPGDRVKTNRRDARNLGRLYRAGELTVISVPNEQQEAVRDLTRAREDVREDLTRRQHRLNRFLYRYGHHYSDGDNWTKKHWAWIRKIRFEDTNVQVILEESIRAIEQSLEQLKTYDAKIEQNARRPEYASKVARYQALRGVKIVTAMTLTTEVWDMRQYATAPQFMGSTGLVPSERSTGDRQRRGRITKAGNAHLRRVLVEAAWHYRYRSLAGPAIKKRRRQQPAAVVSIAERAEQRLNRKFRRLVDQYNKNSAIAAVAVARELAGFIWAIGREE

SEQ ID NO: 345847 - protein, 412 aa, unidentified
MQDVLECCMGLDVHRDTIVACLLRGAIGAIPECEVRTFGTLAHELAELRDWILESDCRTIAMESTGIYWQPIYELLEPCFNETIDLLVVNARHMKNVPGKKTDVRDAEWIATLLRAGLLKGSFIPEKTFRELRHFTRYRKKITSDITSQKNRINKFLHSSGFRLSMFLSDIFGASGRNIMRHLVAHGSVDRDALDTCLKTKTRKRLEEILVSVNGTLSMHQREFLSMMLGYLEQIEDHKKQVENAIDAEILKHTEALSLLCSIPGIDLTSAAAIIAEIGTDMDAFPTAQHLCSWAGLAPGNNESAGKRKSVHIGKGNNYLKSMLCEVSWVISSKRQLYLSGWYWRIKQRKGAKRAVVALARKLLSIIYTMLKTGEPFNEDCFEQRRKQCEQKRASRMIHELTKLGFRVEAIT

SEQ ID NO: 345848 - protein, 406 aa, unidentified
MDVVYSHVCGLDVHKKNVVACIMTPKGKEIRTFETMTDDLILLMDWIKGAGCTHVAMESTGAYWKPIYNLLELEGIETLVVNAQHIKNVPGRKTDVKDAEWIAGLLRHGLLKGSFIPKREQRELRELIRYRRSLIEERAREVSRIQKVLEGANIKLSTVVSNVLGKSGRAMIEALISGETNPDNLSELAKRKLKSKKEPLKRALNGLVGNHQKLMLSAQLRHIDYLDEEIGRLDEEIKRRMLPFENELTLLDTIPGVARRTAETIAAEIGVNMDQFPSAAHLCSWAGLCPGQNESAGKRLSGKTRKGNKKLRSTLVEAARAAARTKETYLSSQYHRIAARRGSNRAAIAVAHSILSMVYYILKRKQPYIELGPTYYEERKRNTIIKQSIRKLESLGVTVSIDSTAS

SEQ ID NO: 345849 - protein, 427 aa, unidentified
MKSNTQNAKIEAITEKTLVLGIDVGSETHYARAFDYRGVEYSKKPFKFSNTEAGFVTFKAWVLDIKEKHGKDKVIPGMEPTGHYWFNLGKFLQDNEMKPVLVNPHHVKKSKELDDNNPTKNDRKDPKVIAGLVREGRYMIPYLPEGVYADLRTASNIRFQLQAELTRIQNRISRWFNIYFPEYKTVYGKPDAKSGMLILKAAPLPEDILTLGIDGVNQIWRDAKLRAVGKARAKTLIEAAEHSVGSKEGAVSARMEIRMLLEDYESRNIRLQEVMTLIEGLIKQIPMAEKLLEIKGVGIRTVSGFLAEVGDISRFNNPKELQKLAGLALVENSSGKHKGETTISRRGRKRLRYLLFEVAMSLVAKNPEFRELHNYYTTRRLNPLKKMQSLMAIAAKLIRVFYAMLTKGVDYDPKKMVSDIKRPAVYL

SEQ ID NO: 345850 - protein, 410 aa, unidentified
MELLHRRCCGLDVHKETVVACLRLVSDGKVTTEVRTFQTTTADLLRLSEWLAANECTHVAMEATGVYWKPVWHILDDGDFKLVLANAAHVKNVPGRKTDVNDAMWLAELLAHGLIRASFVPDAQTQEMRNLLRTRKQLVREQSSHVLRVQKTLEDANIKLDSVLTDLMGKSGRAMIEALIAGETNPAKLASLADRRVKASPEEFRDALRGRVTKHHRFLLRLHLNQIDALDAAMATLDAQVEANLGPFRTAVELIMSIPGFKNLGAHVIVSEIGIDMSRFPSAAHLISWACICPRNDESAGKRRSNRVRKGGTWLKTMLVQCGWAAVKKKGSYLQAQFYRIKARRGPKKAIMAVVASILTAIYHMLKDGTMYKDLGSNHFDRRSTDQQKKRLVKRLADLGYVAELKPLAA

SEQ ID NO: 345851 - protein, 352 aa, unidentified
MEKTTRRLRKAQATIGLDLGDKRHTFCVLDTGGEVVNKGSMRNERNELAKLASAYPGALVVMEAGMHSPWTSRFLDSLGMEVVVANPRKTRTISQSERKSDERDALVLARLGRVDRNLLSPIVHGSEETQHDLLQIKLRDSLVRARVALVNSVRFTLKSLGYRVSNPSSERFHKLVVEELPESVRALIVHSVASIAELTARIKALEISIARLASEKYPQTIYLQQINGVGPITSLYLVLKIENPQRFTRTRNIGAFVGLGPKRDQSGETDKELRISKCGDRYLRRLLVSAAQHILGPFGTESALRDYGLRLAQDGTAKAKKRAVVAVARKLAVLLLTLWKSRQPYEPFPTMA

SEQ ID NO: 345852 - protein, 344 aa, unidentified
MKEVSIIGVDLAKQVFQLHGATVEGEVVYRKKLSRKQFLTFMQAHPRCCVAMEACATAHYWARTLRDLGHDVRMIAPKFVKPFVKNQKNDMADAEAIVEAATRPTMRFVEVKTPEQQGLGMIFRLRDLLIGQRTQTINALRGHLAEFGVVAGKGRENVVKLQSALETEEIAAELPVSVRHMAKLCFDQIADLSCRIKELDDQISEASKRSRFSARLQKMPGIGPVTAMAMAAFAPPMENFRRGRDFSAWLGLVPRQHSSGGKQRLGRTSKSGQRDIRRLLIIGAMAVISGTRVRPPAETSWLGRILARKPRMLAAIALANKMARMLWAMITKDEEFRGGPLMAH

SEQ ID NO: 345853 - protein, 442 aa, unidentified
MEVIYERVAGLDVHKDTVVACLRTHLGRTAERECRSFGTTTDELLALRDWLAAAGCQLAAMEATGVYWMPIYKILADGDLTLLVANAAHIKGVSGRKTDMNDAMWIADLAACGLIKASFVPEEGVHEMRTLMRTRKQLVREQTSHAQRIQKTLTEANIRLDSVISDIMGLNGRRMIEAMIGGLRDPRKLAALADRRLKATPKQLYDALHGRLTDHHRFLLKLHLTQWDALDLSVQEIDREVDARLTQMQASRPADDPELAVADEHVKDEEVTADKARFPELIDLLLTIPGVAKVSALTILSEIGPDMSRFPTAGHLVAWAGMCPGQNESAGKKRGSRLRKGAPWLKTMLVQCAWAATRAKTSYYRAQFYRLRARRGPQKAICAVAASILAAIYHMIKNGTPHHDLGVDYFERRAPETKAKRLTAQLKKLGYQVTLTPIPKAA

SEQ ID NO: 345854 - protein, 451 aa, unidentified
MPRGESAPDLCSVFRAPVQGSAEITVARMLERGEGMTDQRQWYAGVDWASESHHVFLTDGGGRKIGERTFKHGGEGLAEMAAWLMATSGAVEGSQIRVAIEVPHGPVVETLIERGFKVHAINPKQMDRFRDRFTLAGAKDDSRDAEVMASALRTDPRCFRLLAVADPVVIELREWSRIAEDLGAARNRLTNRLREQLWRYFPAILELENDLGAEWLLDLWETVPTPDKAARIRDATIAKLLKRNRIRRFDATHVLDVLRKPPVQVAAGTTEAASAHVATLIARIRLVNRQLKEAHHRLDALTARLIPTEEAEPGQRKQHDVEILASLPGVGRIVLVTLLAEAFDALQRRDYAALRSLTGVAPVTKRSGKSCIVVRRQACHDRLANAMYHWARVAVQHDAKSRAKYAALRGRGHSHGRALRSVADRLLNVACAMLKNGTTFNPSLAAQQPSC

SEQ ID NO: 345855 - protein, 437 aa, unidentified
MSERAVVVELQVEAEQVARVAAIDIAKASAVVCTRLPAERGGRREQRVWEVAAYTGAIEELADHLVCQSVELVVMEATCTYWKPYFYLLEARGLRCWLVNARDVKNVPGRPKSDKLDAVWLAKLAERGMLRASFVPPKPVRQLRDLTRLRKTLTEDRTRYRQRIEKVLEDAQIKLSAVVSDLFGVSGRAILDALVGGQRSPAVLAELSRGSLRGRKSSLIEALTGQFEEHHAFVIGLLLEDHDRLGAQIARLSARIEQAIERIEAGPSDGGGSGHPGLVERLDEIAGVGRVCAETILAEIGVDMSVFPTPGHLASWAKLTPRTIQSGAKNTHGPAGAGNRWLKGALGEAASAAAHTKTFLGARYRRIAKRAPAKKAIVAVSRNILEIAWVLINDPEARYTDLGADWHDRHVNRTRKTRQHVRELEHLGYSVTLAPAD

SEQ ID NO: 345856 - protein, 353 aa, unidentified
MDIIGLDLHKRESQLCIGAEDGAIREQRIATSRERFTAVLGNRPRARILLEAATESEWVAQHLEALGHEVIVADPNFAPMYATRSRRVKTDKRDARTLYEAAQQGTYRPAHRLSAARRHVRAELAVRDTLVRSRTRCLALAKALVRRDGLRVASGTSRLVMRRIQELPLSAGLEAELAPLVAVVTPLTTQIAAADARLAAIAAADGEMERLRTMPMIGPVTACAVVATADDITRFASAHEFEAYFGLVPSERSSGEKQRRGAITKTGNPRVRWLLIEAAWRILHSKRADTLALRTWARGVAARRGQHVAVVALARRLAGILYAMWRDGVPYDASKIPIPTARGRGPVSVDGTT

SEQ ID NO: 345857 - protein, 310 aa, unidentified
MEDYIGLDVSMKETAVSIRREGKRVWRGRCASDPKVVAELVRKRAPAAKRVVFETGPLSVWFYHALRAEGLPAICIDARHANAALDMAANKTDANDADGLAHLGEVGFFREVRVKGFDSMLTRTLVAARTRLVRITTELSNQIRGLMKTFGLLVPAGKGSTFERNVRNLLVDQDGLTPIVLPMLDAWRSMRVRAAELGRQLVAGARQNRACQILMSNPGVGAITATSFVTAIEEPDNFKKSRSVGAWLSLTTRRDQSGEVDYDGHISRRGDRHLRGLLYEAATVILTRSCADSSLRWSDGVTALRIAFSL

SEQ ID NO: 345858 - protein, 395 aa, unidentified
MFIVGIDVAKRSHEVCMITSDGQTVQRPFSIRNNCTGYNLMLEKIRKHTNIKSQIVFAMESTAHYWLALFTRLRKDGYHVILLNPIQTSAMRDMFIRKIKTDAKDSFIIAELIRFGRYAESNVAQDRLLALKELCRNRFYLVDMAGDLKRKLIALIDRVFPEYEAQFDTIFCKSSVAVLKKYPTPQKLSNAHLDKLTELLWNSSNGHFGEWKARELKELARNSFGVEDCDGAYSTLILLMLDQIQSLSGKADALEKEISQLFQSFDTSVTTIPGVGPIIGAVILSEVGDISRFSSADKLAAYIGVDPSVNQSGEFQAAHAHMSKRGSPYLRRCIWMASQVAVQRDPMFRAYYEKKAAEGLKYMTIIGHVTRKMTAVVFAILRDHKVYEPVLPTAA

SEQ ID NO: 345859 - protein, 382 aa, unidentified
MKVTYQTCCGVDVHKSFLVATIVKTTGGIEPSYQKKRFSTFNNSILEFKQWLLDNDCHDVCMESTGKYWVPVFTLLEDDINVVIANPKWVKAVKGNKDDTKDSKWIGDLFRLGLVRGSYVPCKKIRILREYTRYRYKLISCRSSEKNRYQNALTVCNVALDSVVSDIFGKSSTSIIDYLLEQSGTSINHEEIASKLLRSLKSKEDAVIESVEGYQMTDAQKYRMRLVRAHMDYITAEIGTDMSQFSSSKRLCCWAGLTPGSNESAGKKKSVRITRAGVYLKPALVQCAHAAVKSDKSPYYKKKYDSLVKRRGKKRAIIAIARMILTAIYQMMSTGEQWNPSDLYKIDMPVALVEKQKAKAIKQAKKLLQREGLLPPDEPLAS

SEQ ID NO: 345860 - protein, 353 aa, unidentified
MKKLFIGIDFAKEKFDAAIIEACGLKEFGNREYGTFTNDKKGYRQFFKWVKTNADKSVENEWLFCGEDTGSCSLGLSKWLYGKGLDIWIENAYSIKHSSGIQRVKSDKADSSMIAEYAWRHQDKAVLFEPLSESLSQLREVFLYRHKLVQQHIAMDVRKQDKEAAEPSKAISFIKRKSKHLMSEIDNAIKECDLMIDRIIESDAELKENYAIITSIKGVARQNGACLLIFTNNFRRFDLDARKIACYYGVAPFGKDSGTSIHSPAKTSHFANKLIKSLLGQAAHCAKKFNPEIREYYNRLIGCGKKPQVALNNVKNKLIRIIVALVRKKVYYDPKTYMFYNAKFTDVKKMLNS

SEQ ID NO: 345861 - protein, 357 aa, unidentified
METAYDGRQVVGMDLHRRRSVLVRMSEDGRRLGVARITNSPAELRREIARAGECPRVVLEGTYGWYWAADTLAGAGAEVHLAHPLGVKAFTYRRVKNDERDAADLADLLRMGRLPEAWIAPAEVRELRELTRYRARLVGLRTSCRNQVHGVLGKLGVPVTCSDVFGAAGSVWLDQLGLLQPYAGKVTSLRHLAGELTTEITMLSEVIADLLAGHRGYQVIQQLPGIGPVLAAVIVAEIGEVSRFKTAAQLCSWAGLTPRHRESDTKVTRGHITKQGSRLLRWALIEAIQHAPADSLPGAVRQRIIARRGKQAKNIAKVAAARRLLTLVYYGMRDGQVRCLAPTPGSSPPAAPQPQAA

SEQ ID NO: 345862 - protein, 358 aa, unidentified
MADKVTEAAVVGGVDTHKDLHVAAVVDQNNKVLGTRYFATTRQGYRQMLAWMTSFGALKRIGVECTGTYGSGLLRYLQNAGLEVLEVTAPDRMERRKRGKSDTIDAECAAHAAFSGIRTVTPKTRNGMIESLRVLKTCRKTAISARRVALQIIHSNIISAPDELREQLRNMTRMQLIRTLGSWRPDASEYRNVTNVYRISLKSLARRYLELHDEIADLDVMIAAIVDELAPELIKCNAIGYESASQLLITAGDNPQRLRSESGFAALCGVSPVPVSSGKTNRYRLNRGGDRAANSALHIIAIGRLRTDDKTKEYVARRVAEGHTKMEAIRCLKRYISREVYTLLRNQNKRVNSIPIMA

SEQ ID NO: 345863 - protein, 340 aa, unidentified
MKTLYAGIDLHSNNSVIVVTDAEDNVVYRKRLRNELDALLDALWPFSDSLRGVVVESTYNWYWLVDGLMDHGYRVHLANTGAIQQYSGLKYANDASDAHWLANLLRLDILPEGYIYPKEERPVRDLARKRSGLVRQSSANILSIKNLLARNTGRSMSASGVKRLTDEDVDTLLAGEDLALAVKSTLAVLRCIQEQIALLEQTILKRVRLRDEFRNLLSVRGIGDVLALTIMLETGDIRRFETVGDFASYARCVGSAHLSNGKKKGKGNTKNGNKYLGWAFIEAANFAIRYDETIQRYYQRKCAEGKHLLVAKKSVAHKLARACYHILRDQTVFDVARAFA

SEQ ID NO: 345864 - protein, 455 aa, unidentified
MAQRQMRGRSSGQWSTINPHAAGLDVGATFHVVAVAPDRDEQPVRTFGTFSGDLHRLADWLQRVGITTVAMESTGVYWIPAFEILEARGIAVVLVNARHVKHVPGRKSDVNDAQWLQQLHQYGLLRGSFRPREEVTRLRAYLRHRERLVEYAAAHIQHMQKALMQMNVQVHHVVSDITGVTGMRIIRAIVSGIQAPETLAEFRDARCTASMDTIRAALMGNYRPEHVFALRHALELYDVHQDKIAECDTEIETVLRTLNAERPIPEAPLPAVRHAKSRNEPNFDARPALYTLLGADLTQIHGFGPYTILRLVAECGDDMSKWPSAKHFTSWLSLAPGNKVSGGRLLSSKTRRSANRAAVLLRIAAVNVGRTQTALGAFYRRLAARIGKAKAVTATARKLAVLFYNALRFGLAYADPGASYYEARYRQRVLDNLRRRAQQMGFTLLPTPASHGGVS

SEQ ID NO: 345865 - protein, 414 aa, unidentified
MELLHERCAALDIGKKDLKACVRTPSPKGKRSRSQDIRTFATTTNALLELRDWLLAERVSLVVLEATGDYWRGAFYLLEDELNVMLVNAAHAKGLPGRKTDVCDAAWLCQLGECGLLRASFVPPEPIRQLRDLTRYRTTLTAERSREAQRLEKELEDAGIKLSAVATDILGVSGRAMLAALIDGERDPRALAELAKARMRPKIPQLVQALNGNFGEHHAFLCRLHLQRIDQLTMAIGELSERIEEQMRPFARQLEQLATIPGVGQSVAEVIIAETGADMSRFRTAAHLASWAGVCPGHHESAGKRRSGKTRHGNRWLSGALGTAAMAAARTKHTTYLGARYQRLAPRLGKTKAIVAIQHSILTAVWHMFTDDVDYADLGGDYFARLDPERAMRRIVRQANALGFTVLFEPIQAA

SEQ ID NO: 345866 - protein, 415 aa, unidentified
MEKQRNKVCGADIHKRFLVATILSRDGCKIKDRFGMNVEDLLKFKDWVIRNDCEEVAVESTGIYWIPIYTILEDKVRVIIANAHKIKHTPGRKTDVSDSEWIAELCLNGMIEPSRIFPKHDRELRSLTRAREGYVNNRTQMKNRIHKELESSCIKLSSVLADVFGKSGRHILDCLLEGKSVDETLSEIKSKRIRNKDALLREALSNSLNTTQCILIRTYLDMIDSIQIKIEELDRQIMSKIMRRKDELAIAMSIPGIGFVSGAAILAEIGNCEDFKTSEQLAAYCGLTPSVYQSADKLITGSITKHGSKHIRRMLIQVAHIIYGSRDSTLKRFFLRIKGKKGSKIAAVALARKVICILHHLLINGEKYEDNGIRKDKPVKIDKTCFPIEMTLQEMIETIVKAGYEVTRMRSGEYG

SEQ ID NO: 345867 - protein, 354 aa, unidentified
MPRKSKGTVAVLGIDIGKNVFHLIGLDKRGAIVLRQKLSRGQLEARLVNMPPCLIGMEACVGAHHLSRKLKALGHDPRLMPAKYVKAFLKGNKNDFRDAEAIAEAVQRPTMRFVATKTAEQLDLQALHRVRSRLVSERTAIANEIRAFLLDRGIAVAKGLHRLRAALPGILATRTDVLSPRLLHTIEDLIGDWRRLDERIDTVSLEIEVLAQEDAGCERLMTVPGIGPIISSATVAAIGTGDVFSKGRDFGAWLGLVPKQISTGDRTILGKISKRGNRYLRMLFVQAARVVLVRPANWERYGLKPWIEAAAKRLHHNVLAIALANKLARIAWSVLHHGRNFEVRKMSEATSQSA

SEQ ID NO: 345868 - protein, 312 aa, unidentified
MAELSFGGIDVSKDRLDVLVLPEGVCFSVCNDTPGWAELIARLRPLAVSAIGLEPSGGYERGIIRALLAAGLSVRRINPNKLRQFARARGVLAKNDRLDARLIAEYVAIMPTRVLQRDDAIERLAEIVTMRRQLCDEHVAAMNQATHLEDAMLRRISKRRLLRIEADILLLDKRLAELVAADPRLAHRYQLLISMPGVGPTLAHTLLATLPELGQIDRKQIAALVGLAPYDFDSGKLKGHRCIYGGRMPVRNVLYMAALSASRYNPALKAFSNRLAAAGKKSKVIIVAVMRKMIITLNAMLRDNTEWHPAAA

SEQ ID NO: 345869 - protein, 347 aa, unidentified
MEYLGIDVHKSESQICRLTELGEIIEQRVATRADRFAVVLGALPRARILIEASTESEWVARCLEELGHEVIVADPNFAPMYASRSRRVKTDRRDAQALMDACRLGAYRASHRTSETQRRVRTLLAVRDNLVRTRVRQVQLIRALLRREGLRPRSGQVSSFAKRMDELDTPAWLREILAPVRAVMDALNREMVTVEQSIAHIVQDDPVVQRLCTAPGIGPVTAVAFVSTLDQVQRFEGAHKVQAYIGLVPSEFSSGERQQRGAITKTGNTRLRWLMVEAAWSVMRSRHPRTEDLRRWAQAIAARRGQRIAIVALGRKLAGILFAMWRDETEFGRKATASRAPEQACVA

SEQ ID NO: 345870 - protein, 353 aa, unidentified
MEQFIGCDAHKKFSVFASINEKGEYGWTSRVGHNLEVFRGFLKDLPSRSKIALETSGCYYWIVDEMERAGHVPLLAHALTAKRRMEGRHKTNERDAQGLAMLLRNGTLPEVWIPPAELRDQREMLRWRMCLSRMRARVKNRIHGVLQRYNIDIAVSDLFGDGGRVKLLARVGELPPYSGQSLLDQLQMVDTIETEISECEQVLQQMLYPSLDRDLLDSLPCVGKILSSVMALEIGDVRRFRGSDHLASYAGLVPAARESADWKRKDRCPRACNVYLKWAYVEAANLISIHRGRWSERHVVQLYERVKQSTKMHGKATMAVARHLAEASYWMLKKQEVYQEPNSKRHVLSSTHG

SEQ ID NO: 345871 - protein, 416 aa, unidentified
MNAAGIDVSSRKSTVAVLRPFGEVVHMPFDVVHDTKGLTALAEKLKALDGETRVVMEHTGRYYEPVAKALHEAGLYVSAVNPLLIKEYGGNSLRRVKTDKADAIKIARYALDNWTDLRDYTPMDTIRYDLKTLNRQFQLASKQRTASSNNLIALLEQSFPGIRKCFESPVRSNGTQKWVDFAYTFWHIDCVRKQSLNAFSDRYRKWCKRHGYFFKQDNAEEVYSLAKNAVVLVPKSDVTKVLVQEAASQLTSISRSVETYRAEMARLAAMLPEYPVVMEMYGVGKSFGPQLMAEIGDVRRFERKQSLVAFAGIDPMPNQSGEKNVRSNKSSKRGSPYLRRTLFNVMSIYLKCAPADEPVYRFLDQKRSEGKPFYVYMTAASNKFLRRYYAKVRDYLATLENLPPVDMDSTGLKESN

SEQ ID NO: 345872 - protein, 394 aa, unidentified
MNNFFIGIDVAKDSSSAQGIDGKGRSCFSLSFSMDSDGFSELLKTITEYCKDLSGVIVALESTACYHINLFSFLTAKDINTIVINPLLIANFAKLSLRKTKTDKKDAMTIAQFLLIHRDAISQLSVSQDLQELRDIARERESLCHMISAQKTEIKRLLHITFPELGNICNVTTKVMLDFIQEYPSARLVKAAKPKTIERALKRKGVGNKLTYTATDLIHAARASVATISPAKELIMKGKVTTLKHLEQRRDELAKALTEYCKSVLIEDLEIITSISGIDTDTATTFLAEMGSIKNYASYKKLIAFAGIDPTVYQSGKFEGTSRISKRGNRHLRRVIWLMTVSVIQHNITFRRYFLKKKKEGQAFKKAVFATAHKLIRVIFTMLAKRTPFREICA

SEQ ID NO: 345873 - protein, 291 aa, unidentified
MNDIFVGIDVAQDHCDLYVYPLAEKGTFEICGMADVIARLRDLQPAMIVMEATGGLEIPVAAELVAADLTVTVVNPRQVRDFARALGILAKTDAIDARVLALFAEKVRPTSRPLPDARMRALRELVTRRQQLVEMRTMESNRRRMLRSERASTSIKLMLDTIENEIHRLDLEIKKHIPKSPIWQKKADLLKSVPGIGNTTAPLLVVALPELGKLNRRQIASLVGLAPMNRDSGTLRGHRTIIGGRRMVRTALYMPTICAIRFNPIIKRFYERLRTAGKPSKVAITACIENC

SEQ ID NO: 345874 - protein, 386 aa, unidentified
MKLVGIDIAKYEHAAFIMEASTGESLCDPFFFKNNKEGFKKLYTELNKYSKNELLIGMEDTGHYNFAIESSLLAEGYKVALINPITTKSLRKASLKSVKSDKEDALLITKALLDKAYYRIISIQDETLKEAKELTRYRTQLTLEMNRKKNVLQRHIDIVFPEFNTLFNNEYTITYLNILRKYSDAYTIAHTDIRSLRKCFKYCNSFSAEELKELASNSVGIHDVSISFIIQSVISSIDLINSQIEELDKKIEELAITQASSITSIPGISIITGTSILAELGDISKYSNAGKVIKFAGVNPYISESGKFSADKTAITKKGSKYLRTTLYRVIIPVIRHNPAFNNYYHLKRNQGKGHLCALGHCVRKLLRIIYHLETNNLSFDINSLK

SEQ ID NO: 345875 - protein, 416 aa, unidentified
MKLFVGLDISSEKIDACFMTDDSNLSILNRLSVANDLNGASEIKALILKHHAEVSFEQIVIGMESTSLYSFHPAMFFQEDADLNALPTVVTVENPFKIKQYSRVFDEDKTDTNDAMRIADYLRIQRFTTSPIKEEKYMALQRLTRTRYQLVTELVTVKQHFLENLTYKCNTLSKELKSESTGIFSATIVHLMTENYSLDELANLPLEDFVQLIQNVGRSNFKNPEKLVKTIQRAIKNSYQLPRLMNESIDIILSTLVVQMRSLQQSIKQIDKGIEKLVEIIPEYQCLTSVPGIGKVYAAGILAEVGQIERFDDQAKVAKYAGLSWKVKQSGNYQSEVTPLTKQGNHYLRYYLVEAANSVKNHLPEYTAFYKKKYTETPINKHRRAIVLTARKFVRLVDALLRNHQLYTPPKSVLKE

SEQ ID NO: 345876 - protein, 445 aa, unidentified
MDVVFLRCAGLDVHKKSITACRIVPDPTGQETEGIAELRTFGTMTLELLALADWLTEASITHVAMESTGEYWTPVYNLLEGTFTVFLVNAAHVKNVPGRKTDKADARWLAKLMRFGLLQASFIPPQGQRDVRDLTRYRTKLVQERVREVNRLQGVLERANIKLASVASDIMGVSGRAMLAALIAGKADPATMADLAKRRMRAKLPLLEQALTGVVRDHHRQLLAMQLAHIDFLDEQIAALNTTIATALRALSADASLSPQPLPRATASSALPLTGSTPLTFTRAVELLDTIPGVDQRGAEVIVTEIGIDMSRFETAPRLAAWAGVAPGNDESAGKQRSGKTRKGNRSLRAILTQLAHAAVRTKGTYLSALYQRLAARRGKQRAIIAVAHSMMRSVFHMLSRNESYRELGANYFDERRRHYTVDRLTRRIEHLGYRVHLEPVASVA

SEQ ID NO: 345877 - protein, 452 aa, unidentified
MEEPQEVQDEEYERVWERVAAVDVAKASGVVCTRVPDEARPGRRRTKVWTVTATLSAVTELADHLRCHQIEVVTLESTSDYWRIWWVVLEAAGLTVQLVNARSVKNVPGRAKTDKKDAVWLAKLTERGMLRPSFVPPYDIRRLREFTRLRADLVHERTRYWARLEKLLERALIKISAVASSLDTDSCRAMIEALIAGQRNPKALADLAIGRMRPKRAALAEALDGRFEDHHGELARILLDQIDALTGQIDQLTARITELIAAIPAAQGIDADGATGPGAGTGPGAPVLPAVMRLDEITGCGVIAAQAIIAEIGLDMAVFGTPGRLVSWAKRCPQTRQSGTKNSTGKAGKGNPYLNGVLGEIAASAGRTDTFLGERYRRLARRRGKRKAIVAVARSILVIIFHLLADPEARFHDLGPGYYDTHIDRQRKIRNHIRQLEALGLDVTTAPRHDAA

SEQ ID NO: 345878 - protein, 468 aa, unidentified
MKRKSRGAKCQKGSPFDGELKLIEADAAAIDVGSRSHWVAVNPQRDREAVREFGAFTTDLMRLADWLEQCAVKSVVMEATGVYWVVLYELLESRGLKVYVVDAHTVRHLPGRSKSDVKDCQWLRRLHSYGLLRGSFRPPAQIRQLRNYLRSCTKIVEAAAQQQLRMQKALTLMNIQLHHVISDISGLTGLSIVRAIVGGERDPKQLAKLRDPRIRASKETIEKSLQGHWQEELLFDLKMALESYDHFQGQIAAYDEQIRRELQEVPSKVDVLDEPLPAARPKVCRKRPGMSREEQLDLRVELYRISGVDLTRIDGIGLQTAQKVFFEIGTDVNPWPDEEAFSSWLGLSPNHRISGGKVLKRGSRKVVNPLSIALRLAARTLRNSQSALGANFRRLIAKIGMPKAITAMARKLAVLIYRMLKYGTQYVDKGMEHYEAKYRETKLQYLRSQAAKLGMTLVANEPALTAAC

SEQ ID NO: 345879 - protein, 428 aa, unidentified
MQQGDGIRLEQFRQLKKEVRSSDGHLIVGIDVGKDRHHAFFRTVTGSTLLKRLVFENSYEGFDRLLNQVEVLRLENGLRGVVFGMEPTGNYHKPLGEFLIRRLAQVVLVSNVAAKENRKSLDGRWDKHDKKDAANVADLVSQGKFLFYEYPEPGIKELRVLLALKRKLKRQEHGYRVRIRNHLVAKYFPELDRYFDQSEKYSLAIVRWCLDPRSLSEWEFEEFVKMVAPGKRGGEQSHRLRTILETARHSIGCEMGSGAEFEAKVMVEELRHIREAIADTDRKIKAHCEGFAEYEFLLSIPGFGPDVSSRVLGAIGDPFRFENGRQVLKLAGFDLNAERSGKNADTAQPVISKKGKADLRYALYQAALIASVKNRDFMVYYTHQLRGREREPGIKTKRRVKLAAKLLLIAWTLMKKKEPFNPDYLKLE

SEQ ID NO: 345880 - protein, 356 aa, unidentified
MTKNKTLSFEGETIYCGVDIHKKNWKVNIRNLHMELEHFSQNADPDCLASHVQKRYPGANIKVAYEAGFSGFWPCRKLQAAGIDCIVINAADVPTSDKQKKQKNDTVDARKIAKQLSINNLDAVYVPTLCEQNDRSLVRVREQLVADQTRCKNRIRHLLHFNGLKVADGIDKEKYWTLAFIKALEELDCADTSLRTTLNLLLAELKDIRKKVLEATTAVRKLAATNLYKEDVELLRSICGIGPTNAMVIRTELENISRFKCFDHLCSYVGFVPSTDDSGDTKATRGITQRCNNRLRTALVESSWMLISKDPAMLMKYSAYCKRMDKNKAIIRIGKHLLSRIKYVLTKREKYEACVV

SEQ ID NO: 345881 - protein, 387 aa, unidentified
MSCSTDHPDRDATATRPHDATVLVSLELSRRAWLVTSLAPGSEKLSKHVLAAGDGHGLLAFLAELKAKAERQALGPVAIVTIQEAGLDGFWLHRLLENNGIASHVVEPASIAVPRRHRRAKTDAIDGEILIRVLAAWRRGEPRVCAMVRPPSPEEEDRRRLSRERDQLLQERIRHTNRIRGLLFGQGIGDFDPLRKDRRERLDALVTGDGRPLPATLKAELRREITRLELVITQLAEVEQARDRLVEVLADGAAQPAAALLGLKGIGPAIAVRLWLEGLFRPFENRRQVAAYAGLAPSPWQSGGMDREQGIAKSGNPRLRHAMVELAWLWLRHQPDSALSVWFRNRVGAARGRVRRVAIVALARKLLVALWRYAVHGVLPEGAVLKA

SEQ ID NO: 345882 - protein, 408 aa, unidentified
MELTPMHKRVIALDVHQAKITACAVVEQDDGRVEVIKRDFGAFKRDRRALAQWALQLRPELVVMESTGVYWKSPFAALETVGIVAWVVNARHVKAVPGRKTDMADAQWLATLARAGLLRASFIPPRDLRELRLVARQRQKLVGAASAEKNRLHKVLVDAGVRLNVLVNDIHGQSARAMVKALLQDKPLHEVLELKGRLRASREELFEALSTEHLSATHRFVADEILQHIEQIEQRIARMDQYLLGGLQPWQAQLNLLQTLPGVDLIGAAMLLVEIGSDMAAFGSAERLASWVGICPGNNESAGKRKSGRIRRGNAWVRRLLCEFAQAAARTRCAFKDKFQALAIRKGHRKSVVALAHKILRTVYAMLSSGTHYQDRIVDYEALNVARNAPRWLKMLQKHGFIASPAAA

SEQ ID NO: 345883 - protein, 390 aa, unidentified
MLKYCVGIDVSKTELQCCISVIDQLQKVTVKASAKFTNTKTGFPRLHQWISSRHKSKEVPLVVVMEATGIYYEQIAMYLSDQHYALSVVLPNKAKKYLQSTGLKSKNDKIDAQGLSRMGAAQCLALWQPMDSYCYQLRELTRQHQRLQELKTTVNNQLHASAAGMYQNNLVIHQLEALLITFEEQLHALAAAIDQHLADKEEVKQKVDHICKIKGVGTLTVAVLLAETNGFALFENSRQLVSYAGYDVVENQSGNHRGKTKISKKGNSHIRRALHMPAFCVVSYEQPPFIGLFNRTFKRHGQKMKSYVAVQKKLLVIIYALWKTNSAYELNYQHTKDQPTGEKEQVLSSLPGLAQADPAAHKNSASLQAQPALHKVNLLSNNRSLLPLCQ

SEQ ID NO: 345884 - protein, 369 aa, unidentified
MVEHTLFLGLDVHKKTISVATVEGTAGGEVRFYGTIENTPDALRKLGKKLSQDGRQLHACYEAGPCGYNVQRHLTRLGHRCDVVAPSLIPRKAGERVKTDRRDAMMLAQTLRAGQLTEVWVPDQAHEAMRDLVRLRSQAMRDLRKTRQHLLSFLLRHERISPYGHWTKMHRRWLGELTFAHPAQHLALEEMLQRIQRAEELCDRLKQAIGELAPQWSLAPVVQALQALRGVSLITAAVLVAEIGNFQRFDSPRQLMAYLGLNPSEHSSGATVRRGAITKTGNGLARTSLVEAAWTYRFPARITQIIRDRMKELPEPIRAVAWKAQVRLSARYRSLIARGKSAPIAVVAIARELVGFIWAIARMVEPKFA

SEQ ID NO: 345885 - protein, 391 aa, unidentified
MSMYFVGIDISKYKHDCCIISAADQQIVSKFTVKNDKDGFEHLLTTLNSLSNPEDIKIGFESTAHYALNLELFLENAHHSFMEVNPVLIKEYKKSTTLRRTKTDSVDCESIARWLMTVEYKPHSKGFYHSYSLKSLTRLRDRLIRQRSFYLVKITNVLDHTFPEFKPFFNERLSKTAIYLLENYGSAEKMAHMNSASYDKLRCASRSKFSIQQFLRLKELAANTVGVNNSIFDIELNSLLTLYNSLCKEIKTLEAEITKLIEEVHPHYMSIPGIGPISAAVIYAEYGDISNFSNPGQMLAFAGIEPGINDSGTESHGGRMVKHGSSQLRYVLLNACLPLIRFDITFATYYAKKRAEGKKHRVAITHVAKKLIRVIYALERQDVDFNVQKLR

SEQ ID NO: 345886 - protein, 375 aa, unidentified
MEGAPMLDTTTFIGLDVHARSIKAVSLDVMTGEVRAATFGYDAGAVAEWVRSVDPEARCVYESGVTGFDLQKRLSGLGVDCVVGAVSKMIKPSADRRRKNDRNDAEFLARMLSVGNVVEVWVPDDECEAARDLTRALEDARDDLSRSKQRLSKFLLRHGLVFDERTPTGRRKGNWTRAHWSWIESIRFAEGADNDVLAYYVDAVRRAAEEKARLEGLVEAEARKPRWRKRVDSLRCLKGVDTASAADLVFEAGEFSRFRNARSFAAWVGLTPSEHSSGESDRRGAITKAGNKHLRKTLVEAAWHYLTCSGRPKDLAKGQAPDRGARRHAAKGVRRLVERREALLARGVHGNKANVATARELACWVWAVGLMAEEA

SEQ ID NO: 345887 - protein, 334 aa, unidentified
MEKVTTLGIDLAKSVFSLHGVDGAGRVVLRRTVRRDQLLGAVAGLSPCLIGMEACSGAHEWGRRFQGLGHTVRLMAPKFVAPYRKSGKNDGNDAEAICEAVTRPSMRFVPVKSLEQQSLLAMHRVRQGFVVERTATINRLRGLLTEFGVVLPLRSITVRRQAAAAAEGLPDLARRAIGDLLEQLRVLDERVGGYDREIEAQAKLCEPAQRLMKIRGIGPTTALAIVATVGNAREFKNGRQFAAWIGLTPSQYSTGGKPRLGHISKRGDAYLRNLLVQGARSVLNSAGRHQDRMSRWILELQPRRGYYRTLVAIANKNARIAWALLAKGESLRSA

SEQ ID NO: 345888 - protein, 387 aa, unidentified
MPQSNDLSRSLAALDQDSTLIAVIEMSQSTWLVAGIVPGINRQPLKKLAADETALLQLLDRWRDEATKTGRTIDRIAVAYEAGRDGFWLARWLRGRGIEAYVIHPTSVAVSREHRRAKTDRLDTELLKRAFLGWLRGEPRHCSMAKIPTPEEEDAKRPNRERENLVSERTRIVNRMKSPLARLGLRGFKPTLRKAAEGLDRLRTAEGVPLLPNTLAELRRDIARRRFVIDQIREIEAARLTRLEQHPELASHAMVRLLARVIGIGIETADMLVHEILSRNLRDRKAVARYAGLTGSPDESGARRREKGLARAGNARVRRGMIQLAWRFLMFQKNSALAQWYRRQTADSRGTSRKTMIVALARKLLVALWQLVTTGEMPEGVVLRAAA

SEQ ID NO: 345889 - protein, 343 aa, unidentified
MQAVTTIGLDIAKSVFQVHGIDATGNVVIRRQLKRRHVLAFFQKLSPCLVGIEACATSHHWSRELKALGHIVRLMPPAYVKPYVKRQKNDAADAEAICEAVTRKNMRFVETKTPEQQSCLMLHRSRHLFIRQQTAVINAIRAHLAEFGVVAPVGRKGVADLLDIVADPSDRRLPEVARACLAALGVQLRLLKAQILEFDRRIMAWHRSNETSKRLDEIPGVGPALATALVASVADPKAFRSARNFSAWIGLVPKQHSSGGKDRLGSISKQGDRYLRSLFTAGALAVIRYAKIHGTKHRPWLTALLARRPTKVAAIALANKIARMAWAMMAKGERYREPAALAA

SEQ ID NO: 345890 - protein, 328 aa, unidentified
MHFIGTDVSKLTLDLAYFAQQRTDWSRPCKLSNNPQGWDTLILWVQNQTQALREDICIVMEATGVYHLKVAAYLSREGLNVVIVNPQRASQYAKSQNQQNKSDKLDARALQQYGSQLKKYHLFIPDTPEISQLKALLSRMHQLGKDLRRERNRLEKCAFQEGGSFARTSIKRTIKFNLSEQQRTQQKIDQLIKQNRALKHNQKLLCSIKGIGKLTSQWLLPLLSTQRFKSARETAAFLGLVPCHKSSGTSLKTRGRLSGRGDANLRSRMYMPAVCAITHDPAMKAFYQQLVLKGKAPKVAITAVMRKLVHVCYGVIKHQSPYMENYAA

SEQ ID NO: 345891 - protein, 346 aa, unidentified
MKIMALDLSKFKSVGCVYEAESGEHGYRRVSTTPTALHDLLVEEEPDRVVIEVSSVSGWVSDLVRALGIELQVVNTNGEAWRWRSVKQKHDQADALKLARLSAMNQLELVHVPAPEIRQWRAVIKYRQHLVGRRTDIKNHVRELLVREGVILPRGRKCWSQAGCAGLEEMARSWEEVEISELWRGELQSEMQQLQVIQERLREVEAKLETLAAADERVALLRTIPGVGPRLAEAMVALIDDPHRFRRARDVGAYLGLVPRQYQSGEMNRLCRITKRGSKLLRSLLVEVSWVSLRYNPWLRSLYERMHRGSKTRKKIAIVAVARHLAIYCWAMLRDGTTWRQPCSNQ

SEQ ID NO: 345892 - protein, 349 aa, unidentified
MLADEVDYVLGVDTHRDEHVMAVVTAPTGAVVAGAATAANAYGYRELLRVAEQHAPGRRAWAIEGTGSYGAGLSRYLHARGETVLEVSRIPRGERRLRGKDDALDAARTARAALASDTLALPRRGERREALRLLLVARRSAVDVRREALTQLRAVIVTAPERLRQELCRLPEGKLLDRCSRFRRTNSAGADELATRIVLRSLARRVRTATVEADELEREILAHVRALAATLLDEPGVGPIVAAQLIVAWSHHGRLRSEACFARLAGVAPVPASSGQTTRHRLSRGGDRQLNRALHTIVLHRRHHDPTTRDYIARRIAEGKSRRDATRLLKRYLARHLYRLLQQQEPLMT

SEQ ID NO: 345893 - protein, 419 aa, unidentified
MNYVGFDWASRAHDVTVLDEAGGVLDRWAFPHSETGWVTTLDRLARHGSAAEVPVIIERTCGLIVDRLLAAGHPVVPVHPTAFYAARPRWGASGAKSDPGDSYKLADYLRTDGHRLRRLTPTDPGLHELQALVRLRDDQVRARTAATNQLTAILDTYWPGPKQLFMSLASQIALAFLTDYPTPTSAAHLGEARMAAFCRRHAYRGGKSPAELLSRLRAAPVAPVGLPPATLAAMVTAQVTLLKTLQTVISDVERLIAVRVVAHPRSNLFENLPGVGMINLAQLLAEVGPILDRVDSAEQAATECGAAPVTRSSGQTRGVYFRWAANTRARKAITSFAHNARMQDDWAAALYADARARGKRNPHATRIVARAWLRVIWACWTSGQPYNLDRHHSSRFLHRCHPAGAQARSRWSPPPEERS

SEQ ID NO: 345894 - protein, 338 aa, unidentified
MKLYGAIDLHSNNNVTVLIDEQDKVVYEKRLANDLGLIAQQLAAYQSSLEGIVIESTYNWYWLVDGLMDKGHQIHLANTAAIQQYEGLKHTDDTSDARWLAHILRLGILPEGYIYPKEERAVRDLLRKRGQLVRQRTANLLSIQNLMTRNTGSSMNSNRIKTLEPQQVDELLAEGDRALAVKANVAMVQCANGQIEILERTVRDRVKLRPEFCFLKTVPGIGQTLALTIMLETGDIGRFAGVGNYASYCRCVGSQKLSNGKKKGKGNTKNGNKYLSWAFVEAANFAIRFSSRINSFYQRKKAKSHGVVAIKAVAHKLCRACYYIMKNRVAFDVTKAFA

SEQ ID NO: 345895 - protein, 501 aa, unidentified
MGRLVPEADYCAVWRALAFEWVFPVGEVCPFKSAFGRGVARRTKTMSNTLPVLDPLAAFVDVGSEQMHVSIAGGPPEIFGATTGELHRLRDWLKERGARSVAMEATGVYWLPLYGVLEAAGLRVLMVNGKQTRNVPGRKTDMQDCQWGATLHAHGLLRAGFVPPAHIRQLQDYLRLRQDHLTLAASHVQHMQKALERMNVKLHDVISNLVGRSGLAMVEAILVGERDPKRLLQLCDVQIQNRKAERLKEALRGTWSEEHLFALQQALESWRHYQDQIQACDQQIKLVLERLEASLTPPPGPPSQTEATNPAPAKPKKQPGINAPAIEGLGGLLVRLWGGKDLTVLPACTSYSMLQLIGEIGLDLGQWPSAKHFTAWLGLAPGSYQSGKRRRGVGRKRNRAGRLICVIVRSLARSKDTALGGFYRRMAARRGGLVAIIATARKLAVLVWQAMVRGLAYVEEGLRAYETRVLETKHRTLKRLARQLGVTLLPTVPEPASATAQ

SEQ ID NO: 345896 - protein, 391 aa, unidentified
MFYIGVDIAKKNHEASIIDSNGKLVSESFSFSNSIRGLEKFQKFISSFSIDSNNCIIGMEATGHYWLSLYSFLIDLDFSCVVINPIQSDAFRKMYIRQTKNDSVDSFVIAQIFRFGEFSVSHFSDEDTFALRNLSRFRFALVDEASDWKRKLVAILDQVFPEYSSIFSNIYGVASKELLSKYPLPEDMISIPADELAKMLSKCSRGRFGIDKAKEIQEKASNSFGVKFALKSFSFQIKQIIAQISFLEDQIFEIEDEISSMINSLCPVITSITGIGDVLGAAIFSEIGDISRFERANQLVAYAGLDVAVKQSGNFNATDTKISKRGSPYLRRAIWLAACVAAFKDPALSVYYQKLRQRGKAHGTAIGAVARKLTNIIFAVLRDNKVYIPNI

SEQ ID NO: 345897 - protein, 464 aa, unidentified
MTAGKQLWRNRKEKKEWARRLQSEDPGLEVVHPHAAGIDVGNSTHYVAVRPDRDPEPVRRFECFTADLHRLADWLQSCGVKTVAMQSTGVYWIPLYEILEEHGLEVYLVNARHTKNLPGRKSDVQESQWLLKLHTYGLLNNSFQPVSEIRVLRTYWRQRGEHVRGAATCIQRMQKALTQMNVQLANVISDISGLTGQAILRAIVAGERNPLKLAMLSDPRVHASHEEIAKSLEGNWRPELLFVLHQEVDMYDTYQKRIAECDQRLQKHLASFTRPLPIQPPTQKLKTKKPAAKNAPRFDLSSELQRVTGVDLTRIDGIDVMVAQTLLSEVGLDMSRWITESHFASWLGLCPDNRISGDKVLSRGTRRVVNRAATALRQAANTLMRSRSYLGAQYRRLRTKLGAPKAITAMAHRLARLVYRMLKYGQTYVDKGTEYYEERFRQQQIQLLRKRAAKLGLQVAEIHA

SEQ ID NO: 345898 - protein, 387 aa, unidentified
MAEITRVLFALIVRVGVDLAKNVIQVHAVDRAGRRLVSRPIKRDQFLAWCAQLPAGCLVAMEACSGAHHWGRRLCAMGLDARLIAASFVSPYRMEGKSGKNDMTDAAAICEAASRPTMRFVPIKTCEQQAVMSLHRVREGLKEERTACINRIRGVLAEHGLVFDKSPKVLRAELADVIEDASNEMTGLARLVVQCTLEHWRELDEHMKWCDQQIGAHVRGSDDAKRAAKITGIGEIGASAFIAGVGDFKQFKGGHQFGAWLGIVPSQNSSGGKASLGRITKRGDDYLRTLLIQGAKSAVMSAGKRDDPTSRWLQQLVARVGWQKACVAMANKNARILWAVMTREQGFDPQHVSQKPQAKCKQHAPPVPLVPSPAQAAAPPQPVACPT

SEQ ID NO: 345899 - protein, 366 aa, unidentified
MFHKLNSAATLIQRTTTEAPRDHMYYIGLDVHKRTISYCVKDAAGHVHQEGKIGSTRCELDAWIKTVPQPRMMAMEATIFTGWIYDHLLPHAEKIKVAHPLMLRAIAAAKKKNDKIDAAKIADCLRCDFLPECHMASTAIRDRRRTLRYRSLLVKQMVQMKNRVSGLLLETGVSYNKSRLHNVGYFADLMSTNEEVNESIRPLLKISREHIVRVQRLDYALVSWLERDPLLQERLRRLRTVPGVGPITALTWALEIGDFTRFRSIKQAISYCGLCGEERSSADKVMRMPLSKQRNKHIQRVLIEAAKLAPRECHELAMVRERELQKGNPNRATLAVARKMVSYMLAVERRKQDFVPAENFKCTAAV

SEQ ID NO: 345900 - protein, 369 aa, unidentified
MNKLAKFVGLDVHKDSIAVAVAEGGPLETPRSLGRIAHDLPRLLKMLGRLGEPEDLHVAYEAGPTGYGLCRALRERGIECLVAAPSKIPVRSGDRVKTDRRDAEKLARYLRSGELVGVAVPDQQSEALRDFLRLREDTVWALQKARQQLAGFLLRHGRHFEGRSHWTHAHFAWIRAQRFEIEAQRRVLEHYLAEVIRVRERLDQLTSELVELIESLPQSALFRNLQALRGVSTIVAATVVAEIGDLRRFARAGQLMSFVGLTPSERSSGNEVRRGAITKAGNPHVRRVLVEAAWSQRLRPAKSLHLLKRWKEVPLEIQDVAWKAQLRLSQRYRRMVARGKSVQHTIVAIARELTGFIWAIGQIAPQCAK

SEQ ID NO: 345901 - protein, 379 aa, unidentified
MYRILKIGIDVHTTNFTLCALESKFGEEDVVLANITVGPDHKNVLDFIRRIKEKMDPRGNDKIDVECGYEAGCLGYSLYQVLTSCKQKCTILAPTTMHSEKGPRIKTDRRDAKLIAQCLSNGGYHAVHIPTAEDNAVKEYVRMRDDHKIALKKLKQQTNALCIRFGFFYDGTKWTGMHLKWLRTLELPETIREALNEYLATYDELTAKIARYDQRIQEIANQEQYREKVRKLECFLGIKTHTALSLIVETGDFIRFRKGNVYAAYLGLAPGEHSSAESGGKLGITKAGNSHLRCLLIEAAGGICKGQIGKKSKDLIARQVGNPPDVIAYADKANTRLRSKYYRLTRHGKKRNVAVAAVARELACFVWGMMTNNIHGNAA

SEQ ID NO: 345902 - protein, 427 aa, unidentified
MEEVTGEPLYRDRVCGIDIGKAEMYATIRVPSDKDPARRAQETRGFATTKRGVLALADWLRCWQVPCAVMEATGDYWKGPFCRLEADGLECVLADARQVKNLPGRPKRDPSDSRWLATCFERGAVTSCFVATPEFRIIREHTRYRRDLTGERTREKQRAEKLLESAAIKLSSVVSDLHGVTGRDIMDHLIAGERDPRVLAQLARARARRKIAELEAALEGAEFFTPGLAALLARMLARIDRLDADIGELTAVIEALLGPYEEQLQQAGSMPGWGRRSAEDAIAETGVDMGRFPAGGHLASWAGRTPLDNQSGSRKGKAKSKKGNRYLGAVTGETAVSAGRTQTREGARYRRLSRRRGKAKACVAVGNTQMKVYHKLLSSPGMRYEDLGPDYYDNRASARRQLRALEKRARELGYTLVPDLTGCPEVA

SEQ ID NO: 345903 - protein, 329 aa, unidentified
MGNVTTIGIDLAKHSFSVHGVDAAGAVVLRKSVCRARLMELLALQPPCLIGLEACSGAHEWARRLRQFGHQVKLMAPRFVAPYRKNGKNDGNDAEAICEAVSRPSMRFIPIKTPEQQSVLCLHRVRQGFLEERTATINRLRGLLAEFGFVLPQSTAVVRRDVHALLEQLPPHAARALRDLLQHIRLLDARVQEYARSIEAHAREDRATQLAVKRQGIGPITASAIVASVGNLREFKNGRQFSAWLGLVPRQHSTGGKQRLGHITGRGDPYLRTLLVMGARSVLQRAVGKDDPLSRWALAVRARRGYHRACIAVAAKNARVLWAMLSHDA

SEQ ID NO: 345904 - protein, 373 aa, unidentified
MVHSNEAFVGFDTSKLRHAVAIADHGRTGEVRFLGEIENTAAATAKLVRKLAAKYERLTFCYEAGPTGYGLHRQIKSLGHECVVVAPSLIPKRPGDRVKTNRRDAVGLARLLRANELTAVWVPDGSHEAMRDLTRARETAMLDLRSKRQQVSALLLRQGRSYPDNKKTWTKAHLSWLASQKFDYPERRLVFEETMLAVRQAQERLERLEQAIRAAVPDWSLAEVVTGLMAMRGLDLISAATLLAEIGDLSRFRTPQQLMAYLGLVPSEESTGDTIKRGPITKAGNRRARRMLVECSWSYQHPPRVGAVKQHKVDAAPPAVREIAWKAQCRLYRRYRALIRKGKLKTVVITAIARELAGFIWAISREIAPAAAK

SEQ ID NO: 345905 - protein, 414 aa, unidentified
MLKIVYPICCGMDVHKSFVVACIASTNEQGVTTYKSKRFSTFTGDLRQCADWLSENNCKDVRMESTGKYWIPVYNILESTCNIVLAHPKYVKAIRGKKTDKRDAKWIADIFKHDLVAGSFIPPADIRQLRDLVRYRWKLTNFTTGEKNRAQNCLTVSNFKLDDVFSDVFGKAASAITDRILENPAEKITDVSCFRTKGMKATNEQVLAAVDGEMCEEQAEKLRIIRSHMDNLELCKANLESLILTTAEKYLPQLGLVMTVPGIQSFAAIGIISEIGVDMSVFPTSKHLCSWAGLMPQNNESAGKKKTTRISRAGAYIKPLLVQCALSAIRAKQFPEIRNRYLALRKRRGHKKAIIAIARMLLTAIYNMLKKNEPYNPELYRKDDRPPAHREVSVEEAIFILQRQGYLVAAPSTT

SEQ ID NO: 345906 - protein, 311 aa, unidentified
MSSSVGIDVSSATLAVHIRPEGVNFSVSNDLKGFQLLVEKLGGYAVSMVLLEATGGYECNVLKALQDADFPVCRINPSRARDFAKSMGKRAKTDPIDAAVLAHLAEVMPPRPCQVMTPERALLRELLMQRDRFVQQRDDDKRRLKQAQAPSVCLRLEQHIAYLKGEIRALEQEIAQQAAALPDDRVKQLTQVKGIGLITAGKLVALLPELGQVDKKEIAALVGVAPFNRDSGKQSGKRSIWGGRAQVRRALYMACWVVIRHNKDFCERYKALRAQGKCAKVAVVACMRVLIVRLNAMLRTGTPWKEQIAHS

SEQ ID NO: 345907 - protein, 346 aa, unidentified
MEHYVGLDVSLKLTAICIIDRTGKIEREGVVASDPEAIAAFIKLHAPHVVRIGLETGATSTWLWTELNKMGLPVICIDARHAKAALKMQINKSDRNDAVGIARIMQCGWYKEVRVKDLDSHATKALLVSRALLVKIKRDVENQIRGLLKNLGLVIGRAKMNTFAARAAELAGDRPELAVAVDPLLKAREAVEQQIVDLHRKVLRLARNNAQVRRFMTAPGVGPVTALCFLATIDDPARFKRSRSVGAYAGLTARRYASGEIDWTGRISKCGDKMLRSYLYEAANVLLTRVAKWSALKAWGVRLAKRSGLRKAKVAVARKLAVILHRMWIEGTEFKWSSKEAANQPA

SEQ ID NO: 345908 - protein, 280 aa, unidentified
MTSQFAGIDVGKDSLTGNLYGQDVVKDYPNTSRGIQRLSAWLQKHEVHLVVMEATGGYEKMASRQLERAGLAVAVVNPTYVRRFAQGMGTLAKTDPIDARMIAWYASVKQPKPRPPRSEAAEALSACVDRRDQLVAMRTMEKNRLGSAAAYVQPSITAHIQSIDEQIKQMEVEIDHLIDQEEEWQSRIACMTSCKGVGKVTAVTLLAEMPELGHEKREQIAALAGVAPMNRDSGRKSGRRKTRGGRSKLRRVLFMAAMSAAKFNPVIHAFYQRLIEKGKT

SEQ ID NO: 345909 - protein, 332 aa, unidentified
MRYIGVDLHTTQITVCYLTENGEHTILCEIERFISGLSLSDEIAVEATGNTRWFVEQVSTACGRVVLVNPRQFDVVKNSVKKTDRNDAINLAVFLKADMLPEVRAKKEEADKVQSLVGTRTKLVRLKTRLVNKIHALSVSNGRKLKKTSLASEKGLERVLEEEWTEVERIELDIIIEQIRSLKAGIKKLDTAIETESEKLKGYRNLVSISGIGSLSAGILLSVIGEVKDFANADKLASYFGIVPRVSNSNETVNHGRITKHGSKTGRTTLVQCSLAAIRKNDYLKRYYEQVKTRRGHGKAKIALARKYLKIIYSTLTNNWVFADFNNFELAE

SEQ ID NO: 345910 - protein, 388 aa, unidentified
MNNFDAFVGLDVHKDTITVAVADSERSGEVRALGAIPHETAAINRMVKKLAAKSGALSFAYEAGPCGYGLHRHLIGLGHACEVVAPSRTPVQPGKRRVKNDTIDALNLARLHRAGELTYIWTPDATHEAMQDLVKARRIASHQVRKARQRISCFLLKHGRRYERKKWGSRHRVWLADLQFGHVATQFAFQSYINEEEQAAARRTQVDGQIESLMSDWVLAPIVRELTALRGIDTVIASAVVAEVGDFARFDNPRRLMSYFGLVPGEFSSGASIRPRGITKAGSSDVRALLFEAAWLYRLKPKVGQWCQRRRKNLPVGRSKSRPVWCAPWSVRPSYGKHVPRRIGRQANSVGITVCRISCVNGFGLGDSFHRSFPRCSHDGSTGRVEPL

SEQ ID NO: 345911 - protein, 353 aa, unidentified
MKESTASVPVQTIGIDLGDQTSTYVVLDSRGKALRGGVIPTTASALEDCFGDGCGSRVVLEASTQSTWVARRLESLGHEVFVANPRRVHLISKSARKTDRNDADTLARLGRIDPELLHPVWLRDEKCLAVRAGLRARKQLVRTRTRLITLIRSECKVHGVRLSTCSSQVFARKARPAIPEILRPALLPALDALEALGQQIREYDAQVERLCREDFPQTTVLRQVRGVGALVALSFVVAIGDPTRFEDSRQVGAYVGLVPRTYQSGQSNPSLRITKEGDRDLRSLLVSAATHITRRSSPDSALKRLGRRIANRGNPRDRARGRIAVARKLAVLLHRLWLTGEVYEPLRAVPAQG

SEQ ID NO: 345912 - protein, 341 aa, unidentified
MKQFIRIGVDLAKNYFQIHALSSEGAPAIKRKVTRRKMREFFSQIAPCCVGMEACASAHYWARELKAMGHNVLLMPPAYTKPYVKRGKNDAVDAEAICEAVSRPGMRFVPIKTAEQQATLMLHKTRELLVKQRTMSVNAVRSHLAEFGIVVAKGIGRVEELLELAEADATLPNATVMAVQVLGRQIEALDRGIEDLEKEIAKAHARSEMSQSLSEIPGIGKLVASVIAASVPDPSVFGSGRHFAAWLGLTPRQNSTGGKQSLGAITKAGNRYIRKLLVLGATSLLNVVSKRKGGLRDWIVGLLAKKPARLVTVALANKLARIIWAMMKNGECFRTEMFAKA

SEQ ID NO: 345913 - protein, 374 aa, unidentified
MVHSSEAFVGIDTSKLRHAVAIADGGRTGEVRFLGEIENTAAATAKLVRKLAAKYERVTFCYEAGPTGYGLHRQIKSLGHECVVVAPSLIPKRPGDKVKTNRRDAVGLARLLRANELTPVWVPDGRHEAMRDLTRARETAMLELRSKRQQVSALLLRQGRSYPESKKTWSKAHTSWLASQKFDYPEQRLVFEEMMLALRQAQERLERLEQAIRAAVPDWSLAEVVTGLMAMRGLDLISAATFLAEIGDLSRFQTSQQLMAYLGLVPSEESSGDTIKRGSITKAGNRRARRMLVECSWSYQHPPRVGIVKQHKVDAAPPAVREIAWKAQCRLYRRYRALIRKGKLKTVVITAIARELAGFIWAVSRQIAPLAAAK

SEQ ID NO: 345914 - protein, 348 aa, unidentified
MQISTIGIDLAKNVFQVHGVDASDKPVLKKQFRRGQVIEFFGKLPPCLVGMEACATSHQWARELKKLGHDVRLMPPSYVKAYVKRGKNDAADAAAICEAVRRPSMRYVPIKSTEQQSALMLHRARDLLIRQRTQLINAIRAHLAELGLVAQKGREGLQQLMRTAADADDEALPSDARFACQAIAAQLQAVQMQIAGLDKRMHQAHRANPASKRLETIPGFGVIVSTAVVATMTDPKAFKTGREFAAWIGLVPRQNSTGGKDRLGSISKQGDRYLRRLLVLGALSVVRRARTRPDKYPWVVAMLGRRPAKVVAVALANKMARIAWAILAKGETYRAPVHTSSGAIAASA

SEQ ID NO: 345915 - protein, 453 aa, unidentified
MVLRVRNLRIVLTPVKCVMWQSMAPDFTKELFPMKVVFSTCCGVDVHKTFLVATIIKTTSGVEPSYQKKRFSTFNNSILQFKEWLVKNQCRDVCMESTGKYRIPVFNLLEDEINVTIANPKWVKAVKGNKDDTKDSKWIGDLFRLGLVPGSYIPCKPIRILREFTRYRYKLTSCRTSEKNRYQNALTVCNVALDSVVSDIFGKSATSVIDYLIEQPDNSINHEEIASRLLRSLKKKSDSVIESIEGYQMTDSQKYRMRLIRAHLDYITSTINDIDTMLDSLIAPYENAVQLLCTIPGVDRNSAITVISEIDTDMTPFSNSKRLCCWAGLTPGSNESAGKKKSVRITRAGVYLKPALVQVAHAAVKSDKSPYYKQKYERIMKRRGKKRAIIAIARMILTAIYQMLSTGEAWNQTDLFKIDMPEPMKEKQKEKAIKQAMKLLIREGKISESQLAS

SEQ ID NO: 345916 - protein, 355 aa, unidentified
MNEIKYIGMDVHQTSTSIVVLNAAGRVVTSAVVETRAQALLAFIQGQPGTLHLTFEEGTYSAWLYDLLLPHVSRLVVCDPRHNALLQAGSKDDPIDARKLAELLRLNALRPVYHGHHSLDTLKELSRSYTTLVQDGTRAMNRLKALYRSRAIPCPGTKVYSPSYRASYIDQLKPPGVHQRAELLYQHLDVLSLLRRQARRALLAESRKHRVSRLLRPVPGLGPVRIAVLLARVQTPFRFRNKRLFWAYVGLGLVTRISAQFALVNGQLQRSGKAPAIRGLNPNHQRELKEIFKSAATAAVQRPGPWQQFYQQRVDAGRKPELVRLTVARKLAAVTLHLWKKGERYDAKSLKSTAV

SEQ ID NO: 345917 - protein, 403 aa, unidentified
MSSNGAPVMAASVVAVDVGKNTAALSITSADRQRLFGPAGFVMTAPALAAVLQRVRAVLPAGPVKVGVEAAGHYHRPLLGSGVWPVGWEVLEVSPARVAEQRRVQGRRRVKTDAIDLEAITELVLAGHGVPVTARAAAVTELIGWAMHRGRRVQTRTATKNQLLAQLDRCFPGLTVVLPDVLGTKVGRLVAAEFADPDRLAALGVARFVRFAANRGLRVRWSTADRLVAAAGAALPCSEAQVARQVLADDLVLLACLDAQIVAAEARLAQLLPDTPFAPLITVPGWGTIRAANYGAAVGDPRRWLGARQLYRASGLSPAQYESAGKRHDGSISREGSVALRRALIDLGIGLWHADPAARRYGQQLRARGKKGGVIGCAMAHRANKIAYAMVRDQSSYDPDRWA

SEQ ID NO: 345918 - protein, 480 aa, unidentified
MRERSGEQRVEEVTDEPLYRDRVCGIDIGKAGLVATIRVPSDRDPARRMQETRSFGTTKREVLALADWLRCWQVPAVVMEATGDYWKGPFYRLEAEGFDCVLADAKQVKNLPGRPKRDPADSRWLAACFERGAITSCFVATPEFRIIRLHTRYRRDLTEERTREKQRAEKLLESAAIKVSSVLTDLHGVTGRDIMDHLIAGERNPKVLAQLARAAARRKISQLEEALDGAEFFTEDHAALLKVMLERIDRLSADIDDLSQVIEQLLAPYEEQLQQAESMPGWGRRAAQDAVAETGVDMTRFRTGGHLVSWAGRAPQDHQSGKRKGRAKAKKGNRYLGAITGETAVAAGRTQTREGARHRRLARRRGTAKACVATGNTQLKVYHKLLSNPRAERARGELRATGETARKRDLSSLDTLTPQERRVARLVAAGASNKDAAAQLFLSSRTVEYHLGKVFTKLGVASRVELARLPLDPVLTAQSA

SEQ ID NO: 345919 - protein, 462 aa, unidentified
MAERREDESRSEEARQIEGLPVVRAQVGGIDLGSQRHWVCAPGLEGRGREIADFGATTPELQRMLEWLKVRQVESVAMESTGVYWIAPQEVLEAGGLEVLLVDTRQLARVPGRNKKTDPSDCEWIQRLHSCGLLTGAFRPPEQVGMLRTLVRDKANLVAEAGDWVRRMQKSLDQMNVRVHRAVSDLDGVTGLAIVRAIVAGERDARKLAQLRDRRCQKSEAEIAEQLSGHWREDHLFSLRQSLKMYEATQERIAAYEQEILRKLREMTPEERAGQTAPAVKNPHKANAIRKRGEEPRRQAWYRMSGVDATQIDAIGVGTIEVVLSEYGPDLSCFPTEKQFISHATLAPHVPRSGGKVVKKKKRYSASTRVAAALRMAALALRHSPTALGAYYRSLARRIGGDVAVFATARKLATLIYRLLRWGQPYIDEGAQAFEERYRQQRIRSLTAKAKELGYQLLPATT

SEQ ID NO: 345920 - protein, 345 aa, unidentified
MKYYAGLDVSIKETSICILDETGKVCRETKVMSHPEDIIQALNCPALRLERIGLEAGPLSQWLFSCLAEAGLPVVCIETRQAKAFLKAQVNKSDRNDARGIAQMMRVNLFRPVHVKTLTSQKRRALLTARKLLQEKAIALENDIRGVLRNFGLKVGVVGAVKFEERICELVEGERELAEIMTCLLAARRTLREQAAKLHRMLLSIVRDDDVCRRLMTIPGIGPVVSLAFVATIDIPARFKNSRSVGPALGLTPILNQSGESSRIGRISQCGDAMMRALLYEAAHVMLTRTIKWSWLKAWAMNVAKRRGKQKAVVALARRLAVVMHRMWSDGTTFRWTRQQEQHTA

SEQ ID NO: 345921 - protein, 343 aa, unidentified
MYFIGVDHHKQASQMTVLDQEGRELKSGRVPNLRKKVELFLKEYHPFTAVIEAGRSSYVMADLLRELGGEVKMANALQVKAIAHARIKTDKRDSRTLAHLLRADLIPEIYQRGEANRQAQRVLRARAYWVSKQTEIKNKIQSLLAQQKEEIRIEVDKRTGGLFSGRGIEFVLRLPLEGPDKMVLDDLVQGYQETQAHIKTSDGRVQALYGTIEEASRIDTIPGFATTLSVLVAVEIADIHRFSSPAHLHSYAGVIPSTYASGERMYHGRITKQGSAWLRWAALEAVYPAIKKDLGLRVLYTRLAKRKGPNAAKIAVARRLLTIIYRILTENRTYLPDRNRSAA

SEQ ID NO: 345922 - protein, 322 aa, unidentified
MSVSNQRCAGIDVSKGTLDIAISNIASQFTVPNGTDGFTQIIGELKRNETRLILMEATGGLESGVACYLQSEGFDVVVINPRQARDFARAMGYLAKTDRIDARVLLQMSEVINQHPEREKYIRPLPDAQRQILAAMVVRRRQLTVMLTAERNRLHPSHPQSYESIRSIISALKSELARIQGEMSIHINSHFSELSDLLSAVKGVGAATVAVLLAEVPELGSLSRREISALIGVAPVNRDSGTMRGRRTVFGGRASVRTALYMSALVGTRHNPVIKEFYTRLVAAGKPKKVALTACIRKLLTILNAMLKKNEAWDPMYHQHAS

SEQ ID NO: 345923 - protein, 386 aa, unidentified
MQTPNDLSQSRIVLKQDTTLIAVIEMSLSSWLVAGIVPGVKRQPLKKLPVDESALLKLLNRWREEAEKAGRKIERIAVAFEAGRDGFWLARWLRARGIEAHVIHASSVAVSREHRRAKTDRLDTELLKRAFLGWLRGERDHCKMVAIPTTKDEDAKRPNRERESLVGEQTRIVNRMKAALSRLGIRGFNPKLKKAAERLEDLRTPEGEPIPPNTLAELRRDMQRRRLVSDQIRQIEDARLERIEHAPNDGPHAMVRLLARVIGVGIETADMLVQEVLSRNMRDRRAVARYAGLTGSPDESGTRRREKGLARSGNARVRRGMIQLAWRFLMFQKDSALAQWFRARTENARGTRKTMIVALARKLLIALWRLVREGVVPDGVVLRPAQ

SEQ ID NO: 345924 - protein, 368 aa, unidentified
MKALPHLLHYMWSSRMSYIIGCDAHKHYSQFAVYEGDQTRGKQVRVEHERGAIREFLSEFPEGTRVALESIGNWYWIVDEMEQAGCKPLLAHPAKAKAMMGNVNKTDKLDARGLAMLLRNGTLPTVWIAPSQVRDERELPRTRMALCKIRVALKNRIHASLAKYNLSLPTESDIFAPKWNSQLNQVIEQLPAETQKCLQQELELLDKVQGQIDAMEDRMKVCISLTPSMQLLKTVPGVGDILAIVIGTEIGLIERFSSAEQLASYAGTVPAVKSSGGKVRYGHTPKESNHYLKWAFVEAANGPAQYAKKPHWQHRHVTRLYERVKLRKGHSVAVGAVARHLAEATFWILNKNEPYREPTHQKVLPKQA

SEQ ID NO: 345925 - protein, 411 aa, unidentified
MQATPTSSTYAGIDWSWQHHAVCVVDQGGVRVAEATVPHSRSGLERIVAMLRGHGVARVGIERGDGPVVEHLLRHRLEVVVISSRQVKSLRLRHGAAGNKDDRFDAFVLADALRTDAGRWVVVRPDSEETVALRMLVRARVDLVGHRIAVHNQLLAVLQHNFPGAIGLFSQLDIPISLRFLRRFPSEARAAWLTASGGELRMAHWLKAASYSGRHTARDLVDHLTEAAQGRTTGAAAAASEVIVLALVEILARLREQQDALEARIGQALLAHPDGPIFASLPRAGTIRAATLLAEIGDCRARYPDPGALAAAAGVAPSTRQSGKHRNVTYRRACNKHLRAALVDWAQDTPRANAWAADTYRRARARGCRHPHAARILAQGWTPILWRCWTDHVPYDPAKHGRLTDLQHQAA

SEQ ID NO: 345926 - protein, 420 aa, unidentified
MRAIGIDVHRDFCEVAISEGGRLRSAGRVPSTPEALELLGASLSDDDEVALEATGNALAIARILEGHVARVVVASARELHAISGAKAKTDRRDARTLAKLLAAGMFAGTWLPGEEVRALRRRLAQRAQLVRARSRLKNEVQAALMRNLVGAPSATDLFGAAGRRWLADLVLPADERETLDSCLRTIAFLDGEVERFEVAIARYAMHSVEIRRLVTIPGVGLISAATLVAVVDDVHRFRSARKLVGYLGLDPRVRQSGSTPARMGHISKEGRLPPEQRSARPPTRRCARPGLCVPSASGWRPRRGRQVAIVAVARKLATIAWRLLTSGEDYVYANPGQVRLKWRRVELLAGEPSQKGRRTGVSLASQHERELALAAERAYQRLVADRQAAGSRRKGAGAAPGRAPDGSSLRPGSAAGSAAQ

SEQ ID NO: 345927 - protein, 378 aa, unidentified
MAQPGWPPELGRRSIGSVPIEALRAVWRSKIAIGTSSGPEWLNELKVRITREGSTKMAKHTTICAGIDTGKRKLDVAIEGHREQLQVENTPEGHEVLMAWLRQHRVKRVGIEASGGYEQPVVAELRRKRFVVVVFQPAQVRAYAKFHLQRAKNDKIDAALIAACTTAVRKIHAAPDPRLLPFAEQLTMIDQINEDTARLKNRIESCRNARINKLWQEDIARLEQREKAELKTLVASIRKHPDLAKRLELINSVDGIGLPTAVAILVRLPEIGRITREQAVALAGLAPYDDDSGEQVGVRHIEGGRKRLRRALYTASLAASFRWNRQLIQLYQRLTAAGKEHKRALVACARKMLIFANTVVARGTPWCDEPPVGSLSVS

SEQ ID NO: 345928 - protein, 356 aa, unidentified
MSSTMTYVGLDVHARSTHVAALDVVSGELHRARFGGSSEQVIAWLQTLPSPLRGCYEAGRTGFALHRAAEAAGLQLEVVAPSKTPRAPGDRVKSDRKDAELLARLLLAGQLSPIAVPSPALEAARHLARAREQVRLDLMRCRHRVSKLLLLQGRVYERSARPCSKNEQQRFAEAATELAYLDCLAAVDGLVTRKAALDERLSRLARAGEWWPTVARLRCFRGIDTLTAFVLSLEIGDFTRFARPAKLVGWLGLVPSLDQSGESRRQGAITKTGSGYARRLLVGAAWHNLRPPGGGAALAERRAGQPDHVVQIALRAQPRLHRLYQRLRARGKPPNLSTVAVARELACFLWAAAVAE

SEQ ID NO: 345929 - protein, 344 aa, unidentified
MTVDYYVGIDVSLEASSICVVDASGKIIKEAKVLSEPEALIAWFKALPFTLARIGLEAGPLSQWLYAGLKDAGFAAELLETRHVRDAFKAMPVKTDRNDARGIAQLMRLGWFRPVHCKSAPAQETRALLTARKLVQAKLYDVQMSLRGILRGFGLKVGRTTPVGFAVRIRELTEHHPALSAIGKALLAVHEVLLRELNGFEKQVRKQARCDSRVRLVMTAPGVGAIVGLTYVAAIDDPGRFSSSKTVGAHFGMTPKKYQSGETDVTGRISKSGDKGVRAVLYEAAHIILTMPVKGGALKSWAAKLAKRAGMQRAKVALARKLAVILHRMLADSAPFDAAKAAAA

SEQ ID NO: 345930 - protein, 308 aa, unidentified
MIAQNYVGCDISKQWLDFFDETSGRLRRIDNQADAIAAYVAGLDPSRDFVVMEATGVHDRLLRHALAKAGVPFSRHNPAHTHHYSKSTRRRAKTDPLDARMLSDYGRRYNPEAEPAPREEVERLQSLAGHRDHLVEMRAALKKHLAEAFDEIVIADLEETISFLDTRIKAFESQIAEVIRQNQDTARDHALMVSVPGVSKVGALSLLALLPELGQRSPKAIAALAGLAPFDNKSGKLNRRSHIQGGRSRVRRALYMAALTAIRTCERFKTFYTALAARSGSKKLAIIAVARKLLVVLNAIMRDKIAFA

SEQ ID NO: 345931 - protein, 367 aa, unidentified
MKKVSTAATKQSRNVSQQRLTIGVDLGDRNSCYCVLDEAGRIQLEQRVRTTAKALQEVFDAMPRSRVALEIGTHSPWISRLLSKLGHEVIVANARKVRLIGENRKKDDRLDAQTLARLARIDPQLLCPVKHRSAQAQADLMMIRARASLVRVRTGLVNAARGLAKSYGERLLGCNVRNMNPEKAEGLSPELQRALEPLLAAIEEVSARICEYNDRIEALAQTSYPQVALLKQIKGVGTLIALTFLLTLEDPHRFRKSRDVGCYLGLQPGRRQSGKSDPQMHITKEGDPYLRTLLVQGAQHILGPFGIDCDLRRRGLKLAERGGRNGKKRAIVATARKLAVLLHHLWVSGEVYEPLHNSSPMSNAAAA

SEQ ID NO: 345932 - protein, 416 aa, unidentified
MRTLTSKLADIQADVLLVGVDLAEVNVGVAITYEARQVGRIRFEHNRAGYDRFISWQEQMKGRVGARQVLVGMEPTNHYWQLLAAELERRGIAYRLVNPYTVKKHREGDQLDRAKNDQRDGFTIADLLRTGKFTFTQRQEGSYAELRGYSNRYHQLRRQIARTKIQLRQAVAQTFPELGEAFKDLTGQTAAAMLHNQASAHQIGQLSETAFLQAVRADYQGSRFQWQKLGQAYALAQSSVGLVETEALQLAIGGHLQLLTLLEAQLTTVCAALLDTFLALPEAKALLSLGIGAVSAALLLAEIGDPAAFTNARQLVKLAGIQPSPNQSGKKTNSPTPISRKGRPRLRTILYFACLRLVQTDVAFAAYYQHLQQRPQNPLSRVQALVVLMHKLLHIAWSLIRHQSTYDPALWRSARS

SEQ ID NO: 345933 - protein, 372 aa, unidentified
MKYKGSFDLHATNCVLAIIDDKGNKVYKKKLPNSIIAIKETLKPFKQKIDGIVIESTFNWYWLVDSLEEEGYTIHLANTSAVKQYEGLKYTNDYDDAFHLANLLRLKILPEGYIYPKEERAVRDLLRKRMSLVRQRTANILSLQNLYNRYTGQKISCNAIKTMQLDSLKNVFKTEHVVYSAQTTLYIIKYLSIRIEEIEKKVMQSTKLKEEFNKLLTIPGVGKILGLTIALETGDIKRFQKVGNYSSYCRCVQSIRFSNEKKKGENNRKNGNKYLAWAFIEAANYAIRYYPEVKQFYQRKLAATNKIVAIKAIAHKLARAAYFVMKDKVDFCMERAFGPVKIKVASANHFQGLDIKPTDLIGKLMQPKISND

SEQ ID NO: 345934 - protein, 410 aa, unidentified
MEVLYPHCAGLDVHKDSVVACVRHMADSRVTTVVKTFKTTTQELMALSDWLSAEGATHIVMEATGVYWKPVWHILSDGEFVLVLANAAHVKNVPGRKTDVNDATWLADLMAHGLIRASFVPDEPTQQMRDLLRTRKQMVRERSAHIQRIQKTLEDANIKLDSVVTDILGLSGRRILSALVAGQTMPQALASLAHRRIHASVDELESALRGRVTRHHRFLLKLHLDQIDAFDAAIASIDKEVDTNVEPFRAAIELLSTIPGISALSAQVLVSEIGIDMSRFETAGHLISWAGLCPKNDESAGKRRSTRMKKGAPWLKTTLIQCAWAASRTKGSYLQAQYHRLRSRRGSKKTIGAVAASMLTAAYHMLKDGTFYQDLGPNHFDDQAKGKHVLRLVNRLHNLGFDVQITPLAA

SEQ ID NO: 345935 - protein, 342 aa, unidentified
MHFYCGIDLSARDSHLCVIDDHQSILLQQKVSNELPRLLDLLTPFRPNLQIVVESTFNWYWLVDGLTDLGFDVCLAHTLGLFMITAAKVKTDRRDAFTLAKLLRAGVIPKAYIYPAQTRPVRDLLRRRLHVVRLRAHEYGSLRQLLLREGILSSSRNEIKQAEEEDLQEWFSHPLVVLNASQQLERIELLTRQIADLEQTILGLTKENGDYKRLLTIPGIGKILALTIHYEVGEISRFANERQFSSYCRVIPGVAQSGTVNRRGRGSKQGNHYLKNAFSQAAVAAVRNYPKIRRCYEKQLQRHRGGARKLVAYNLIAHKLAVAVYHLLKKEGEYREELLFGK

SEQ ID NO: 345936 - protein, 418 aa, unidentified
MFKIFRKKCCGLDVHKTWIYACIGITDSFKRTEYKQARFSSFTKGLQELCLWLAKYNCIDVCMESTGKYWIPVFNVLEKNNIFVTLSHPKYTKPQKGNKTDRKDAKWICDLYMCGMVKPSFIPPADIRQLRDLVRYRFKLTCMITGEKNRAHNCLTVSNLKLDDVFSDIFGKSSRSITEQILQHPGEVFDVAPFVDSRCKTPIEEIQAAVDGAISHEQAVKLRQCLKHIDELEMHKAEIEREIFRLSQKYESVLDLIRTIPGFDKNPLTAIQVLSEIGADMSVFPTAKNLVSWAGCCPRNDQSSRKIKSTRISRAGSYFKPVLVQIANALIKSKKHPEFTTRYRRIKARRGHKKAIIAICRMILTAIWHILTDLKPYTPEGFLESRPVNKEKVLTISQALNLIKQRGYIIKDDVGPVT

SEQ ID NO: 345937 - protein, 304 aa, unidentified
MMIIGCDYHPSWQQICWLDTVTGETGEKKLEHASGEAEKFYRGLPGPALIGMESTGNCQWFVEMAAALGHDVWIGDAAKIRAAEVRQQKHDRRDAALILKLLLEGRFPRIWTPSREEKDLRQLLIHRYKRVRIRAQVKTELQHLAMNQGVTKKRKLWSKAGEKALRELPLKPWASRRREDLFRIREMLNGQIGLLDQAVVEAAEKNEKARLLMTQPGVGPITSMAFVLTMGDVSRFQRGKQVASYLGLIPREYSSGGHQRFGSISKQGNRFLRMLLGRLHKEQCGVIRDFGMSICIAATRKRKG

SEQ ID NO: 345938 - protein, 356 aa, unidentified
MSHDVKYIGMDVHKEAIVIAVLNESGKLVMESVIETKASSILQFLHGLRGELQVTWEEGTWAAWLYDLLQPQVQHIVVCNPRRNALLKEGSKSDKVDARKLADLLRTGMLRPVYHGENGLRTLRELGRSYQTISKDLTRVMNRLKALYRGWGIPCAGTQVYAARCREEWLSKIPQAGVRRRAELLYQQLDGLQALRRNVRPEFLAESRKHKAAKLLRQIPCIGPIRAARLIALMQTPHRFRSKRQLWTYSGLGIETHDSAQYRFVRGQLQLSKKPQQIRGLNRNHNHEMKEIFKSAATRASCGRGPFYDFYAALLAKGMKPEMARLTLARKIAAITLTLWKKEERFDVEQLKTQAA

SEQ ID NO: 345939 - protein, 358 aa, unidentified
MPTVADRVDAVLAVDTHADTHTAVLVSARGIELGQVQVAASDAGHQQLIDWVFEHAPGPRLLAGLEGTASYGARLARALGTVDLSVVELEQPTRRVRRGRGKTDRIDALLGADALLAMDADTLPAPRAGGDREALRLLLICRTSMTEEVNAKTNSLVHLLRTGSDAEHHIAASTLTISALRELAEREVPDHDTDHDTLTVVRARQIHRLAHALLTLREELAANKADINTLLAQLAPALTDTIGIGPISAAQAVLAFSHPGRIHSAPAFAALAGASPLPASSGRTTRHRLNRGGDRQLNRALHTIALTRIRHDPRTRAYVARRTAEGKTPREIRRILKNYIARELYKTLNRTMTPLDNT

SEQ ID NO: 345940 - protein, 359 aa, unidentified
MQRNKISFTGQKIYIGIDVHAKTWEVCVLTDSGYKERHPQQASAKTLFDFLKKHFPDGEYHAVYESGFSGFSTYYALKEYGINCVVTHAADVPTTQYEEVMKTDKVDAAKLARSLRSGDIRPIYIREKENIDDRSVIRIRKTIQKQLSGYKARVKHLLHCNGVEIPERFARPGTHWSRAFIKWLKEDVVLLSSSRLSLDLLVKQVETIRQTLLDATKSIRRLAQTDRYRNNYELLMSIPGIGVSVAMCILTEIYDVKRFRNENQFASYLGLIPTCHNSGEKTASGEKTFRGNKHLGPMIIEAAWIAIYRDYGLGMAYARYKQSMKPQEAIVKIARKMSNIIFSVLKNSRKYEPYRWDKE

SEQ ID NO: 345941 - protein, 395 aa, unidentified
MYSLLVGIDVSKDFFATAGIDSEGKQSFSRSCSMDSNGFGDFLKTIRSHCEDLSRVMVAMESTGCYHINLFSFLTSQGIRTMVVNPLLIANFAKLSLRKTKTDKKDAMTIARFLMDHHEEVSHLSLSQDHQDLRDLSRERESLCHLMAATKVEIKRVLRTVFPELESIGNLYTGAMLRFLQQYPSARLVRGAKSRAIAKALKGPYVGNKLTFSAEDILRAAKTSIGTVSPAKEIILQGKIATLLHLQERLDEMTKLLTDLCKATRVDDLKILRSIKGVGPKTAAPFLAEMGEVQNYASHKKLIAFTGIDPSLHESGNYIGMSKLSKRGNRHLRRAVYLMTVAVASKNPFFKAYFLRRKREGLPPQKALFATAHKLIRVIFAMLTQRTYFKPKEVI

SEQ ID NO: 345942 - protein, 388 aa, unidentified
MPQSNDLSRSLVALKQDSTVISVIELSLSSWLVAGFVPGIERHPLKKLRADEQALLRLLHRWRDEATKVGRNINRIAVAYEAGRDGFWLARWLQAHGVEAYVIHASSIAVSREHRRAKTDRLDTDHLKRAFIGWLRGEPDHCHMAAIPTLEQEDAKRPTRERENLVGEQTRLINRIKSCLVRFGIRGFKSKLRKAAERLEALRTPDGVALPPNTLAELRRDLARLRFVRDQIKTIEVARLQRLKNKAPKEGSHAMVCLLVRVIGIGVETADMLVHEVLSRNLRDRRAVARYAGLTGSPDESGKRRREKGLARAGNARVRRGMIQLAWRFLQFQKDSTLAQWYRAQTADARGGTRKTMIVALARKLLIALWRLVISGEIPNGVILRPAV

SEQ ID NO: 345943 - protein, 439 aa, unidentified
MPTPSLPVLDTTAAAIDVGSEQLHVSIAGGPPKVFDTTTGQLYALRDYLLEQGVGSVAMEATGIYWLCPYEVLEKAGLQVVVVNGKYVKNLPGRKTDMSDCQWQATLHAHGLLKPGFVPPEHIRRLQDYLRVRTDHITMAGAHEQHMQKALERMNLKIHNVISDLTGMSGRKMIEAILAGQRHPLALIALCDVQIQKKKVQQLRAALEGTWKAEHLFALRQAYELWQFYQKKIAECDQAIQEVLQQTVGPEDPQNPAPPAHKRGGVNAPQITGLHGLLFRLCGGKDPTQLPGVADYVLLQLVSEVGTDLAKNWKTEKHFTAWMGVAPGSHQSGKRRRSQPRSRNRAGRLFCVIARSVGRAVDKGLGGFYRRLKGRKGGLVANLALARKLAELFWRFMVHGITYVEQGLKNYEAKVAQTELRILEKLARKHNLTLTQKSS

SEQ ID NO: 345944 - protein, 355 aa, unidentified
MQSNKISFKGQNIYVGIDVHLKTWRVTTLTESGYKYSFAQHADAKELFDRLNKKFPEAHFKSAYEAGFCGFSVHYALTGLGFENVVVHAADIPTTGKEKALKTDAVDSEKIAWSLKRDELKGIYIKDKRYMDDTNLIRLRQRFIIDLSRQKNRTKHLLYTQGVTYPERFRKNGTHWSRNFMKWLRDEVVLLSDEKRTLMLLCDQVEHIRKDILAVTREIRRLSTTDKYKENYSLLTTVPGFGIVTSMSMLTEFDNNLMRFPNERKFVAILGLIPTCHNSGEKKVSGEKIHRGNKQLGPLIIEASWIAIQRDYKLGCYYTNCCQSMKPQKAIIKVARKLACKAYAVMKTKKPYVLS

SEQ ID NO: 345945 - protein, 405 aa, unidentified
MNAVGIDVSKGKSTVTIRRPGNEVLLPPCDFPHTQSCINGLIEQIKSLDGETKVCMEHTGRYYEPVASWLSDAGIFVSAVNPILIKEFGDDSLRTPKTDKADAKKIARYTLDRWANLKQYNHMDEIRNQLKTMNRQFGFYMNHKTAMKNNLIALLDQTYPGANDFFDSPARSDGSQKWVDFVYTYWHVDCVRGRSPEAFAQHYQDWCRRKGYNFSASKAETIYSRSSDLIAVFPKDNTTKMLIRQAVAMLNAASATVESLRQKMDETASALPEYPVVMAMHGVGPTLGPQLMAEIGDVTRFTHREALTAFAGVDPGSRQSGKHEQKSVRTSKKGSPNLRKTLFQIMAGLIKRSPADDPVYAFMDKKRAQGKPYYVYMTAGANKFLRIYYGRVKEYLSTDTEADNV

SEQ ID NO: 345946 - protein, 360 aa, unidentified
MNRNANHSMSAGQIIGTMNGLQVFGLDIAKQVFQVHTVDMRTGEIINEQIKRAKVLEHFANRVPCVIGIEACGGANYWARELRALGHNVKLIPAANVRPFVTGNKTDATDARGIWLAIQQPGVKFVAVKTVEQQATLTLHRQRDQLVKMRLMQTNALRGLLYEFGATFAKGTAALFKEVQATLEVLQSQLPQMVADSLREQVERIKVIGEDIAKIEKRLRVQLTGDKNMQRVLAIPGVGTLTATAVIATMGEASAFKSGREFCAWLGLVPKQTGSGGKVRLGHISKRGDKYVRTLLIHGARAALCRAKEPSAWLVALKERRPTNVAIVAQAAKMARTIWAVTAKEQEYQRGHQSVRPAMA

SEQ ID NO: 345947 - protein, 353 aa, unidentified
MNNDKYVALDVHKASIVYAIRDASGKIISTGVIETKAQTVRDFVRGLSGTIHLTFEEGTQSAWLYDLLKPLVAECIVCDPRRNKLLESGSKSDDIDVAKLSELLYLKRLRAVYHGHEGTRALKELAHNYDALVKDSTRVKNRLKAIFRGRGISYEGDELYDCQEQQVWLAKLNECGSRERARQLYEQLVQLQAWVSAARQQMVRESRKHKSRKVLQQISTLGEISVAQLIATVDTPFRFRSKRQFWTYCGLAVVRHTSADYLFEQGELRRRVKPGPTRGLNHNYNRRLKKVFKTAAQTGSRKGPFKPFYDRLLARGLNPELAQVTLARKIAAVTLSLWKKGESFDRKKLGKPA

SEQ ID NO: 345948 - protein, 360 aa, unidentified
MSFNGTSVGLDVHALSVVAHAVDEETGRVERARLCPDHREILAWLHRLRGPVRVAYEAGPTGFGLARALAEAEIDCTVAAPSKLIRPAGDRVKTDARDAAHLTRLLRLGEITAVTVPEREVEAARDLVRAREDARADLMRVRHRLSKLLLRQGRVYSGGQAWTGVHEIWLRRQRFDDPHTTAAFNHHFDAVLNATAARDRLDEQIVEVAALPRFADTVNRVGCLRGISALTGLALTVEIGDWTRFTGASIGAYVGLVPTEYSSGASRVQGPITKAGNAHVRRLLIEAAWHHRAPYRNPGPTMRARWAKVAPALKARGHAGNRRLHQQWGRFNERKKPHVVANVAIARELAGWCWSLATLT

SEQ ID NO: 345949 - protein, 346 aa, unidentified
MRYSTTVGVDLAKNVIQISVMSSRGKEISNRSLTRKKFAEFLGKQKASLVAFESCGTAHHWARVAERHGHEARIIPAKAVAPFRQGHKTDSNDALAVAEAARRPNIKEAPMKTVEQQGLQAIHRSRELLNQESTALSNHLRGLLMEFGIVIPRGYASLMKAIPEILEDGENELPDLYRPTLHRMYNRLLELREDIGAMTHEVERLAKSHPICSKLMALEGIGPIGAMLLYATMGSGSAFSGSREFAAYLGLAPRQYSSGGKTNIVGLSKKIGNKRLRSVLILGARAYVYRLNEPRSSKDRWLKAIIERNGECRAAIALANKNVRTAWAMVTRGTEYQRRAQLEMAA

SEQ ID NO: 345950 - protein, 401 aa, unidentified
MNAVGIDVSKGKSMIAIMRPLGEVVATPFEVGHTATELNELAKFILKISGETRVVMEYTGVYFEPIASALYDAGLTVCVVHAQLIHNYGNNTIRKIKTDKADAIKIANYALDNWSKLKPYTPIDEVRRQLKAYSRQYRKFNKLKTMLKNNFIALTDSTFPVVNELFTSPPRKSDGHEKWLDFAMKFWHAECVCSLSQKAFTERYKKWCHKAGYYFLESKAEEIYAASCGHIGLLPKDEHTEQLVQQTIIQLTNICSSLSVIENKMTELAGLLPEYPVVMEFRGVGRILGPQIMAEVGDVLRFEKKESLVCFAGLEAPPYESGKFESHNRTISKKGSPHLRAALFQVMDCLLKTQPVNDPVFQFIDRKRSEGKHYYSYMCAGSAKFLRIYYARVKEYLTALE

SEQ ID NO: 345951 - protein, 344 aa, unidentified
MQISILGVDIGKNSFSVVGVDGQGAVILRRTMRRQTLIDFVEKLPRCVIAMEACCGAHHLGRLFAAAGHEVRLMSPEYVRPYVKAQKNDDRDAEGIAEAASRPTMRFVDLKSQEQLDIQTLHRVRSRLVAERTTLINQLRAILLERGVVFPAGRVKFESALDDLIAGGNDVLSPRIRSLILGLRDEWRRLDQKIETLNTEFVALAKQNSAMRRLTSIPGIGVLNATALVAAIGDAGSFQHARDLGAWLGLVPRQFTTGGKARLLGITKRGNTYLRTLLVHGARAAMHTLSQSDTPIGQWLRAMLSRGVARNVVIVALANKLARIAWAVLRKGLPYERSYGVAVN

SEQ ID NO: 345952 - protein, 402 aa, unidentified
MNPVIGLDISKEESHGQAFLARGKPFRGTFHFEHTRDGLANLHQVLKDVESASKQRPLLILEATGHYQSPVVQFLEEHHYVYIVINPLISNRLRKSQLRKVKTDAADAYLLGELYYKEEFEPFKKRGVQLLNLRYLTRQYDSLSKMCVQTKLQFQAVLDQVFPAYKGVFGAMYSGVSLRFLSEFPTSYSVLQTDENTLKAKMKELLSSKRGRSEDWINQRIQRLLDAAKQNPFQQTMYASHLINLKVLITLILQYQEHLTELEQNIDALAEEIEEYELIQSIPGIGHKIAATILSEIGEVDRFDHPKKLVAFAGIDPSVFASGKFTATRNRITKRGSRQLRYALVMAVQCGLIRSRNTRLKEFYERKRSEGKPHKVALVACANKLVHWLHAILKSKKAFRLA

SEQ ID NO: 345953 - protein, 356 aa, unidentified
MNKRSKLNFSGQPIYIGLDVHKKSWSVSIFTKQGEYKSFSQTPKTETLMKYLQHHFPGGEYLSVYEAGYCGFWIHDQLREKGIQNIVANPADIPTQDKERRNKRDRVDCRKLARGLRSGDIKGIYIPPRWKLEDRSLIRTRLSMGRKQGRCKNQIKSMLLFYGVDIPEQREMGHWSRRFIRWIEGIRMQRASGDVALKIHVEELCHLRQIIAKLNRAILALSRTEEYQGWVSLLRTVPGISTLTAMIVLLELGEINRFPSLDQLCTYVGLIPDIQGSGEKEHVGGMTQRGHSYLRWLLVEASWVAVRKDPAMMEAFNEYCKRMKKSKAIIRIARKLLNRIRYVLKNQAEYVPSVIE

SEQ ID NO: 345954 - protein, 316 aa, unidentified
MGNLINTINIGIDVAKDELVIFFDGDQSSISIINNQSALTELAQVWQSFPQLQRIVIEASGGYETLAVSILANFKLPVSLVNPKRVRDFAKGLGKLAKTDRIDAALLAVFGQMTLPALYQLPSPEQAQLAELVARRQQLVLMKATEQTREKQAAAAIKPSITRHLQWLETEIQSIDTDLQQKIKDHQPFQQLDERLQSVPGIGPATSAMLLAELPELGKISAKEIAALVGLAPYAADSGRHRGQRRIRGGRRQVRKSLYMATIAAIRCNRTINQFYQRLKEHGKPTKVAIIAAARKLLCFLNAIARDDKSWSPVSI

SEQ ID NO: 345955 - protein, 316 aa, unidentified
MTTQTETFIGIDISKATLDVAIWQSEQYRKFSNDAKGMQILIEWLSVLTPTLIVLEATGGYERLAVADLVFAGFPVAVVNPKRVRDFARSTGLLAKTDKLDSHVLAHFAAAVRPTVRPLHSKEEERLAALVSRRRQLIEMLTMEKNRLSNSHSTMRTHIQTHINWLIDEQRTLEAEIDQFIQGTPLWKEKDELLRSVPGVGNATSITILAELPELGTINRQEIAALVGVAPINKDSGIKSGKRRVFGGRGSVRSVLYMAALSATRFNSTIKIFFNRLIKAGKPFKVAITACMRKLLTILNAIIRQHQPWIEPLKVV

SEQ ID NO: 345956 - protein, 415 aa, unidentified
MALKIVYKICCGIDVHKTFVVACIASTDKQGVTSYESHRFSTYTKGLKDLLQWLLARNCKDVCMESTGKYWIPIYNILEKECSIVLAHPKYVKAIRGKKTDRKDAKWIADLFKHDLVAGSFMPPADIRQLRDLMRYRFKLTCFKSSEKNRLQNCLTVSNIQLGNVVSDTFGKSAQAILDKILENPEDTSFDLEPLVFKSLKRKLPELRDAINGYITPEQAGKLKVIKAHYENLESRKAELEELILALAVPYQQELAILQTAPGISSDFTAIGIISEIGTNMEAFPSAKHLCSWAGLTPTSNESAGKKKSVRVSKAGCYIKPLLVQCANAVVKSSKHPEIRNRYLRIKKRRGHKKAIIAIARMLLTALYHMLKNGENYNAELYRKSDLPPVDREITVEQAILIARNQGYKIKSATA

SEQ ID NO: 345957 - protein, 346 aa, unidentified
MTVTVDLAKDIFEVLDPRGPVTARRRLSRLQFERFLASLPPSTEVVMEACGTAHHWGRRCDALGLVPVLLPTPYVRPYVRRNKTDRTDAEALFEARRCGGILPVPVKTADQQALQSLHRVRAQWQSTRIARMNVVRGLLREYGLPLRAGAVTLHRAVPGLLEPTAVVPLPALLRETLRTLVEEIRDLEDRLKKVDGQLHAIAEADPVAKRLQTVPGVGVLVATAMVGSVPHIHAFRRGRHFASWLGLTPREASSGLRQWRGGISKRGDVYLRALLTHGARSVLFNAHRRARAHADRLTPIQRWVLAIAARRGYNKAVSALANKLARIIWAVWRRDMDFSAARPAAA

SEQ ID NO: 345958 - protein, 403 aa, unidentified
MNAVGIDVSKGKSTVAILRPQGLVVASPYNVPHTGSDLKELTRAIKKLRGETRVVMEATGNYYEPIARFLHEQGIFVSVVNPMLVSDFGGNTLRRPKTDKKDAVKLALYALTYWLDLKQYEPQEDLRKSLKMLNRQYQFAVKQQTMLNNNLISQLDLTFPGINKLFTSPAKEQDGHLKWVDFVSEFPHCDCVAKLTPSVFKKKYCRWCEKSGYHYRGSKADEIHAFAREAVSAVPASDAIALIIKQAASILNAALENAAALHHEMKHIAEMLPEYETVMSMYGVGDKTGPQLMAEIGDTRRFHSRRAITAYFGYDSENDDSGQHISKSNPITKKGNSALRRTLFMIMIALIQNQPEDNPVYQFLDKKRSEGKHYYCYMTAAANKFLRIYYAKVNEVLNALPTG

SEQ ID NO: 345959 - protein, 317 aa, unidentified
MYKVIGIDVSKATLDGCFLDGSQKESFVVSNTQQGFKKIALKAKGALVVMEASEPYYLQLSNYLHTHGIEVSVVNPLVIKRFSQMNLQRAKTDKKDAETIANYGRIYDPKRWSPNSKNTNSIGQLHSAMELLDKQIRQLKGQQEAFDNSGELASLLRKELKSKVNFLVKKKQKISLEVERLAEQEFGEITSIPGIGKKTAIMLNVITDGFTKFEHHKQLTAYIGFSPRVYQSGTSVKGKWHICKMGNAQIRKLLYLCSWTAKFCNKACREMYERLKEKGKPERVIKIAIANKLLKEAFAIGKFQMNYSENHGDNICF

SEQ ID NO: 345960 - protein, 345 aa, unidentified
MIVLGADMHKGSHSLAAVAAGSGELLGDKVVKVGQPGFAAALAWARELEAERVWALEDCRHVSGSFERFLLVNGERVVRVATRLMAGERRSSRERGKSDLIDAIAVARAALREGVERLPVAQLAGVELDIRLLVDHRERLVRMRTALNNDLLWHLHDLWPEQTLPGGALLSQKWTARLGRRLARAEQTARVRIARDELRQLRELSRSIDALEREISGLVAEVAPQLLTEPGFGPLTAAKLIGEIAGAQRFATDAKLARASGVAPIPVSSGKTNRHRLDRGGNRQINTAIHRIAVTRARCHPETRDYIERKRSEGKTNREAIRCLKRHLTRRIWHLLQPPHPAPIS

SEQ ID NO: 345961 - protein, 350 aa, unidentified
MFIIGCDLHTRYQQIALLDKETGEVVERRLQHDNGEARAFYARLPEPAIVGIEATFSAPWFERLLAEFRHQLWVGDAARIRAQVVRAQKTDQRDAAHLLTLLVTDRFPRLWIPSPRERDLRQLLRHRLKLVGMRTAVKNQLQFLAIGQGICRRRKLWNAPSRAELESLDLPPWTRRRCQELLKMLDQLEAAIAPLDEAVAAEAGCPAAARLMTHPGVGPVTALAFVLTLGPVERFRRSRQVVSYLGLNPREHSSGGRQRLGGISKQGNVMVRWLLVEAAQTAARLDPELRRAYQRLKFRRTASIAKVAIARKLAVRLYWILRQQIDYAQLVRMSGSPSSGVVPQEAGSET

SEQ ID NO: 345962 - protein, 386 aa, unidentified
MRGETFIPRDYDVFAGLDVDKRSISVTFSNHQGFISSLHMPYSAEHLIKHVRKHFGDQKVAFAYEAGPTGYGLYDGIVAQGYRCLIAAPAMIPRAPGQRVKTNRLDGVSLSENLRGGQLKSIHVPTPIYRELRHLVQLRDTVMSEVVATKQRIKSLLLFEGLDFPTAPAGSQWSLKVKRQLQKLTCSKGVRFKLDELLDSLEFLEKKVVKSTREIHRFCNDDPELLQCIQYMMSVSGIGWIVASQLLARIGNWREIQNVRQLAGFLGLVPTEHSTGDRIRRGSITHSGDGRLRSKLIQASWSAIRQDGELRDFYRSVCRTHARHLGPRVAIVAVARKLSARIAVVLMQQRPYVVRKKVDSAPLTQEETVPQGTTRRLGEPGETDNS

SEQ ID NO: 345963 - protein, 329 aa, unidentified
MSVNRQGRDTVAAARPNAGIDVSKEHLDAAWADRVERVSNDADGWDALAANLKADGVDVVALEASGGYEKGVACALQLAGLQVVVLNAKQARDFAKAMGQLAKTDEVDAQVLKQFAAVIARHPQRERFIRALPEAKRSYLAALVTRRRQLLDMHRAEFNRLELAHEAAKPSLRAVLRALDKQLGSVDHDIDQYLRQHFKDAAKLLDSVKGVGDVTVSTLIALLGELGQLPRRQIAKLVGVAPLACDSGKRRGARSISGGRKEVRSVLYMATISAMRHNPVIRAFHERLIAQGKPPKVAIVACMRKLLTILNAMMRDGTAWDESNHRLNA

SEQ ID NO: 345964 - protein, 480 aa, unidentified
MTEQHSNIPEMSKHYRRQRGKPLPKHLEVLHPDAAGIDLGATHHYVSIPEQRGEETVRRFGCYTPQLEEMAQWLTHSGVKTVVMEATGVYWMPVFRVLESHGLEVLLVNPRHVKYVPGRKTDVADCQWLRQLHTYGLLRGAFVPPQDVAVMRTYWRQRKELVECASREILHMQKTLTQMNVHLHVVLSDITGVSGMKILRAIVDGQHDPVELAKLANAQVKSSRDEIAQALSGHYTAEHLFVLKQALELFDVFQSKIRDCDEQLATYLSRFETKATAQTLPPHPKRSKRTRRKNEPHFELRAELWRITGVDFSRIDGVDSMVAFTVLSEIGFDVNAFPTEDEFVSWLGLCPNNAITGGKVKRRRTRRVFNRAADALRIAAQTLWHGKSYLGAYYRRFAARLGAPKAITATAHKLARIIYRALKYGQEYIDKGQQHLEEEHRERSMKALVKRAKEYGYMLVHNETGECLPYENKGLTQCVS

SEQ ID NO: 345965 - protein, 402 aa, unidentified
MNCVGIDVSKGKSMIAVMRPFGEVVVSPFEVCHTASELSELARLLKSLDGETRVVMESTGNYHAPVAWLLHDAGLYVSVVNAMLVHDYGNNSLRRAKTDKKDAVKLANYGLDHWLTLPRYVPEEDTRLMLKSCYRQYQQYSKVRTMLKNNLISLLDTAFPDANRLFTSPPRADGSEKWVDFVAAFWHCECVCGLSEKAFTAKYQKWCKKHGYNFSEDKALDIYASACGHFGVMPKTDTAKLLVEQAISQLQTTSSALAALKQEMQSLAASLPEYPVVMGMFGVGPTLGPQLLAEIGDVRRFHSKKALVAFAGIDSPPYQSGQMDVHSRSISKRGSASLRRTLFLVMSVILQRAPMNEPIYQFMNKKRSEGKPYRVYMMASANKFLRIYYASVKAYLDSLEHN

SEQ ID NO: 345966 - protein, 321 aa, unidentified
METWVGLDISKSTFDVGWITEDGEFCHLKLDNNVQGFRKLLDSVPADAKFVMEATGNYHLRCALALNNAGRHVSVANPIAVKRLIQSDLRRCKNDKADSFYIARYGMEKRPAAWKPPSKAALQARELIVLMDAVQSSLGKLRNNEESFKQNDLKNDIARRYCKRMIKQLEKELDDLEAELEKVACAEWGEEIEILDSIPGVGKSTACHLMAKVEDFNRFKNSRQLISWMGMSPFNSQSGSSLNKHGGITKMGCSRLRTRLYMCTLSASCKGKGLAMKKRLEEKGKAKKVIFVALINQILRTAYALVTKGVKYNPNFLQSTP

SEQ ID NO: 345967 - protein, 421 aa, unidentified
MEPIVERCCGLDVHQATVVACVLVGGAHQKPKKEVRTFGTKTRELMEMRDWLRDNGCTHVGMEATGIYWKPVYAVLEDAFDLIVGNAHHIKNVPGRKTDVKDSEWIADLLRHGLIARSFVPPKPIRELRDLLRYRRKLVESRTAERNRLQKLLETANIKLASVASDVFGISGMAMLKALVRGDSTPQEMAQLAKRRLRQKLAELELALEGRVEEHHRFVLEMQLARLEQLDEHIAKLDERIDSKLAPYREQHVRLAKIPGVDRILAAVLIAELGTDMSVFKSGAHLAAWAGVCPGNNESAGKRKRADTRKGNVHLMTALVEAAHGASRTKGSYFKDKFFRIKARRGYLRAAVAIAHKILRAVYTMLSTGAEYRDLGAAYLDVIDAKRVTGNLVRRLQRLGYEVTIAARLPQALPAPPEPAG

SEQ ID NO: 345968 - protein, 482 aa, unidentified
MIKSVGIDLAGTGEHKVRCMDEGAQLCDGFDFQTTPEGLAKLEERIFQDGANPVIVFEPTGLAWFAVAVYLRARHPECRLVRTQARNVVALRKYLHRSSKSDKVDSITLAKMPFIDPERLNEVYLPPAKMNAILRLARQRRRLESDIAARKTRIISIIDGYLPGVRPAFSKLWSPQGREFLRTHLNPLPVVSDGEKALHCFLTQAKSRGKKDAVESHQVYLACQNAANIYELSRSTGSIDDDFFAALQEEIGRELKLMEVEEAESESITQRLNDLYQELHPSDNLRTIPGVGEQTAPVFLAIVGDPARFHSQSAFANFNGVVPDSRQSADKEAKGLRMTKAGPAIMKWALYQSGQIGRRYDPQLAWVYHRQMVYHGKNHKQAMGAVMSHIGARILAVLQENKPYELRDIQGRAITWDEARKLILTNYQVPEEIKRERRRRKTADNSTKPRRKQREMVTHRAHEAATAPQPVVATASPRNKFN

SEQ ID NO: 345969 - protein, 319 aa, unidentified
MSYLHFFGIDVSKDHIDVAQYETKAIKAAKPKRYPNSGEGFAAFIADNKKALPESFVVLEATGGYETALLKALCERDLAVHRATPLQAKHFIRSLGKIAKTDKLDALALARYGFERHATLPLFVPKSPEMQALSDLLMRRADYIAMRKAEMNRVQHPRYASTKGDVEKHLAYVNEQIRLIEKQVKALVKASTELKKKLDTLTGVKGIGEQTAFVLLGLMPELGELTRRQAASLAGCAPHARDSGKMRGYRQVWGGRHTIKTALFMASLSACRSNPHLAVFYKRLVLDGKKKMVALNAVMRKLIVILNAKLRDSKNLSPA

SEQ ID NO: 345970 - protein, 315 aa, unidentified
MSLETRIAVGIDVSKRYLDVFHAGAEIHHQFANEPKGLVALIAWLRTMPAFDLVVLEASGGYEMVCWQALCAASIPTARVNPKRPRDFARAAGILAKTDRLDARVLARYGAVMQVQPTQPKSADLQEMEDWLIRRKQLVDMRVAESNRRRMASKAIQKRIDLHLRQLQREIDSIDQTLAERVQQTPAGQAKIALLDELKGVGPNTCAWLIAGVPELGQLNRRQIAALIGVAPVAHESGQYKGKRRIHGGRSSVRTALYLATLSAVRHDARMKAFYQRLVEAGKPKKVALVASMRKLLTIINAIFRTGEAYRVAST

SEQ ID NO: 345971 - protein, 338 aa, unidentified
MSIVAVGIDLAKNVFAVHGVSASGKSELVKPDVKRNKLLELIASLPPCLIGMEACSGAHYWAREFQKFGHTVRIMAPKFVAPYRLGGKHTKNDAADAAAICEAVTRPQMRFVPIKTVDQQSHLFIHRAHQGYVAERTALINRVRGLLSELGIILPQSYKAFKLGVHQVLEDLPGYCNLVIGDMLSEIAHLDERIEKDATLIAKIAKEDVQSRRLMQLCGVGPTTATAIVASIGNGHDFKNGRQFSAWLGLVPRQNSSGGKAKLGRITKAGDGYLRSLLVLGARSLLLKASNKTDPVNRWALQLKERRGYGKAVVAIAAKNARMCWAALNLGDGFKVPA

SEQ ID NO: 345972 - protein, 333 aa, unidentified
MSKFKHFLGIDVSKEYFDAVVILDGNKEKPIHSQFVNNYKGIKSLCKWLKEQGATFENTLICLEHTGMYGKLLIKHLMIEKFSLWVEMSLKIIRSIGVQRGKNDKVDAERIAYYAMKNVEEAVIFNAPRKEIDKIRNLLSLREKLVTTKASLLRNVKELKSFDLEVAKLWEKLQKSTIKGIDSDLKNIEKQLDKIINEDENLFRVFTVATSVTGIGKVTALFLICFTNEFTMYTTPRQLACYAGVVPFEHTSGKSVRSKPKVHYMANKKLKKQLHMCALSAITSDPELKHYFNRKVEEGKNKMLVINNVRNKLVHRVCSCVRENKIFEKRQVA

SEQ ID NO: 345973 - protein, 338 aa, unidentified
MNIVFLGIDLAKNVFQLCGLNQAGKPVYTKRTGRKELLQTLANIPACLIGIEASTGAFYWQREFEKLGHKVKVISPQYVKPFVRGQKNDGNDAQAIAVALMQPTMQFVPPKSPKQQDIQALHRARQRIVNHRTATACQIRGLLLDRGIPIGSAVSRARRAIPLILEDAENGLSSRMRRTIAELYDLFNDLGRRIHFFDKEIETVFRQSEACQRIAKVKGIGTETATAVVAAIGKGTEFKNGRHFAAWLGLVPRQHSSGDRQVLMNMTKKGDRHLRTLFIHGTRAVVRVATNNNDGHMNQWVNQLKERRGFNKTTVAVANKNARIIWSMLRNDTGYQVV

SEQ ID NO: 345974 - protein, 406 aa, unidentified
MRSIGLDIHRDFCEVAIAEGGEVRSPGRIEMTPAALELFAGSLASTDQVALEVSGNAWEVARIIRPHVAKLVVVSPADTGIRAARAKTDRLDARALARLLAAGSLQSVWVPDDHTRAMRRRLQRRRKLLVVRTKAKNEIHAALMRRLVRKPAVSDLFGKRGRRWLESLELPDEEQETVEGCLRQLDFCESEIAAIEKRIATEALRSPEIRRLMTAPGVNVICAATFMAAVGDIHRFGDRRKLVGYLGLDPKVRQSGLSATARGRISKQGSASGRHALVEASWSVVKAPGPMHSYYQRIRARRGGQVAIVATSRKLACLFWCLLTREEDYAYAQPSLTAKKLRRLELTAGAPKRAGGAGIWSTNKAMREAEQALARQAEAAYERTVADWQRQQRRRKGADATTGRAI

SEQ ID NO: 345975 - protein, 335 aa, unidentified
MEFEFFIGIDVSKGELDFAVQQGRQLLFHREISNDGAAIGAFFKELQGMADFSVGRAIFCMEHTGIYNNHLLQVLHKKGAHICLEASTQIKNSLGNIRGKNDKIDAIRIAGYAFDQQHKLRLWQPKRAVVQQLSHLSATRARLIDVKKQLKVPLKEHAAFSTARVNRQSQGICAHTLKALDADIARADQAIDELIKGDAELSRLFGLITSVSGVGKVTAAQVIITTNEFRNINDPKKFACYSGVAPFTDDSGKIIKKARVSHMANKTMKTLLHLSAIVSIQYNADLKLFYQRKVTEDKKNKMSVINAIRNKLILRIFACVNQNRPYEKIYQKSLA

SEQ ID NO: 345976 - protein, 410 aa, unidentified
MELVALHNRVVALDVHQAEINSCAIIADEDGMRVEERAFETFKRGLRALVDWCLKIKPEVVVMESTGIYWKSAHAWLERAGLNCMVVNAHHVKNVPGRKTDMADARWLATLARAGLLKPSFVPPEKLRRLRLVSRQRQKLVNMLTAEKNRLGKVLADAGVRLGVVVSDLNGKSARAMIAALIAGATPEEALQCADQRLKAPREQIAAALDGDITVEHRFVLQAILGHIDYLETEIRDFDAQLIAALDSPEEKNALVLLQTIPGVDLVGAAMLLVEIGTTMTVFATPSHLASWAGLCPGNNRTAGKRNRERMRKGNTYVRRLLCEFVQAARKTQSMFQAKHRALAITRGFKRALMACAHKMLRIIWAMLTRNQPYRDATVDYQALSVRKNAPRWIRTLKRYGYLPASAATR

SEQ ID NO: 345977 - protein, 369 aa, unidentified
MQRKEISFKGQKVFIGIDVHKDSWRVAIAPEVGVVKGHSQKPSARELLDFLKRYYPDGEYHAVYESGFSGFSTYYALQDVGIDCIVIHAADVPTTQYEETMKTDKVDAAKLVRSLKSGLLTGIYIHKRDDIDARSVVRLRKTIQKQLGSYKSRVKHLLHSNGVTFPERFSTPGSHWSKVFIRWLKEEVVLLSATRISLDLLIVQVEAIRKTLLMATRNVRELSRSERYRHGCELLTSIPGVGVNVAMTLLTEIGDINRFHNEKEFASYLGLVPTSHSSGGKVAHGEKTFRGNKYLGPQIVEASWVSIYSDRGLGCAYFNYKKRTKPQEAIVRVARKLSNIIFSVLKTGQKYKPYEWDEQQKHTDLQATS

SEQ ID NO: 345978 - protein, 401 aa, unidentified
MNAVGIDVSKGKSMVCVMRPFGEVVLEPFEVLHTAQNLNDLAGKLKALDGETRVVLEATGNYHKPVAFVLHDAGLFVSVVNPVLIHDYDNNSLRRVKTDKKDAVKIANYTLDKWTRLRQYLPEDDTRLALKNCYRQYQQAVAIRTMLKNNLISFLDLTFPDANKLFTSPAKNNGCEKWVDFIGDFWHSECVSCLSEDAFAKKYLKWCQKHSYNFTRSKSDEIYACAVNAASLPKSPTAKLLIQQQVAQLKAVAKSVAAFQQEMLRLSQQLPEFDTVMEMYGVGPSLGPQLMAEIGDVRRFSSKKSLIAFAGIEPQPNDSGKVVGNDKGISKVGSAVLRRTLFLIMTVILQTQPQDEPVYNFMDKKRSEGKPYKVYMMASANKFLRIYYARVKAVMDSASSN

SEQ ID NO: 345979 - protein, 350 aa, unidentified
MIIIGCDYHPSFQQIAFVDTDTGEFQERQLQHREQAEKFYRDLAAQGMEVRVGMEASGHARWFERLLAELQFELWMGDAAEISSRRVRKQKTDRQDAQLILRLMLKDDFPQIWVPSWENRDLRQLLWHRHRMVQARTRMMNQLQAVALNEGLRCKKKLWREAGREQLEAFPLAPWASQRRGDLLELLDRLNPTIAKLTQAIEEEVEKCPAARRLQTHPGVGPLTALAFVLIIGRADRFQCGKQIASYLGLVPLEKSSGNQRRLGHITKQGNSLLRFLLVEAAQVTARSLPEWRSKYVHLTLRRGRKIAKVAMARRLAVRMYWMLRKGWDYGQLTKFGSHAGKPGSGDGVK

SEQ ID NO: 345980 - protein, 335 aa, unidentified
MRHFIGCDAHKRYSLFVAVDEAGETKPAVRVNHDRESYRTFLRGLPSSSPIAVETVGNWYWIVDEMQQAGHQPRLAHARKAKLMMGQLDKTDKLDARGLATLLRNGTLPEVWIPSRETRDQRELLRLRMTLVGIETRLKNRVHAILAKYALRLDVTDVFSQKGRRLVLEHLKDLPEETRQVVRQHLELLESTEKQKKITEQRLQTIIQQRNDVDLLRTLPGVGWILATVMALEIGDIQRFNRAPELASYAGTVPRVHSSGGKTRYGPVHPDVNRYLKWALIEAGNRLYKRVRTGKGHAKAVTAVARHLAEAAFWVLKRQQPYKEPQGCRVSSTHR

SEQ ID NO: 345981 - protein, 325 aa, unidentified
MKTPLPVVGLDVSKATLAVCHQPGAQVQHLEVPNAPAGFRELVRRCGARRLYVLEATGTYYLAVAYHLAAAGAEVAVVNPLVVRRFIQMHLGKGKSDRKDAQWLLRFGQQQAPARWQPEEQILVECRQLQQAAELLIRQQTMVSNALEALLHQPLVCPEAQRQLRLTLRRLEQQVQQLEAELLTRVEQRYAAELPLLCSIPGIGRKTAARLLLFAGGFARLDNHRQLIAKAGLCPHEYTSGTSVRGQTRINKMGGGLIRSKLYLCSWSACRANHACKALYERLVSKGKHKKVALIAVCNKLLKQAFAIVKSGRPYQADFAQKFDP

SEQ ID NO: 345982 - protein, 349 aa, unidentified
MNKKLFVGIDFSKETFDAAILKVSEESSIDLRIIGNEQFKNDVPGCKRFVKWLNKTCALSGDYSSVLVGGEDTGNYSTTLPKQLYVLGIDCSLQNAYSIKCGSGKIVRDKTDKMDAEKIAYYFYRFRDQIRLYKPLSKDMESLERLYSYRYGQVRESARLQCQIKEYEHILKSEPNDETLKFMIQRLEEQERFLKEEIKTIEAKMVEMIEADEELNEIHECLLSIPGVGKITSLLLIVVTRGFTRFDNPKQLACFLGVSPHPNQSGTSVQNGNHRSWFADPYFASLLHMTALTASIHNPKFKAYDERLKSKGKPKLLIMNNIKNKLLTVAFTIATRRTKFYSDYEAKRA

SEQ ID NO: 345983 - protein, 337 aa, unidentified
MGEVNIIGLDLAKSVFQAHGVDGSGAVLFKRRLRRDQVLAFFAQWPACVVAMEACAGAHHWGRAIGALGHEVRLIPPAYVKPFVKRQKTDAADAEAICEAAQRPSMRFVAVKSETQQAAATVFRARDLLVRQRTQIINALRGHLAEYGLVAPRGPAHVARLKVFLEEGRVPAEALGPLELLMTCLETLGVKIADLDRQLAARAKADEQTRRLMTLPGVGPVTATALLALAPPREGFRKGRDFAAWAGLTPRQHSSGDRITMGRTSKMGDRTLRRLLIIGAQAVVRWQARGVPADPWLARMLARKPRQLVAVALAGRMARIAWAMMRDGTDYRASAPA

SEQ ID NO: 345984 - protein, 410 aa, unidentified
MRYYLGVDWADQMHAVWVVEENGTKAAARTVPHTAEGLSEWGRELDEWRAQGLELWAAIERREGRVVDFLLDHGVVVYPVNPKALDRARDRFRQSGAKSDPFDARVLADFLRTDHPHLQALQPSSAAAQELKLLTEDYQQQIRQQTRLINQLTATLKAYYPRALEIAELPTALAREFLQAYPTPEAVAALTPRQWQRWARAHRLSETRTRALWHVLQQPQLPVPAHVVRAKARLMRSLVAQLTLGVAAVAEYRAAIEDFFARMPAAQWARTLPIGKHGITAPTLWARLGDAPGRWESFRHLQAQAGTVPVTKRSGKQQRVIQFRFACDKALRYVIDHVAFLSLHSSVWARAYYDQQRARGHSHRQALRALAAKWLKIIFVMWERQVPYDEQYHLATMTRQQLRHCQKQIA

SEQ ID NO: 345985 - protein, 341 aa, unidentified
MKEFIRIGVDLAKNYFQIHALAGEGAPAVTRKMTRVKMREFFSQIEPCLVGMEACGTAHYWARELKAMGHEVLLMPPAYTKPYVKRGKNDAVDADAICEAMSRPGMRFVPIKSAEQQATLMLHKTRELLVKQRTMSVNALRGHLSEFGIVAAKGIGRVDELLDLAESDATLPNAARASVKVLAQALKGLDKAIDDLEKEISGAHAQNEMSRLLDKVPGIGKLIASVIAASVPDPSVFKSGRDFAAWLGLTPRQNSSGGKQTLGGITKQGNRYIRKMLVLGATSLLNVVGKRKGALRDWIVGLLAKKPARLVTVALANKLARILWAMMKTGECFRTEMFAKA

SEQ ID NO: 345986 - protein, 310 aa, unidentified
MQNICGVDVSKDWLDAFIGPDSFKRFANTPDGIDQLANFARTGAAALVVMESSGGVERMAFQMLWAGDIPCALVNPRGVRDFAKAMGRLEKTDRIDAQVIAHFAATRKIKPTPLPSAQQQHLAALSARMRQVTSDLVVQKQRLHSVQSDVARQGIVEIIGVLKRQSKELSAAIATLIANDPVWAALDTAFRSVKGVADRTVATLIADLPEIGTLSNKQIAKLVGLAPLADDSGKRQGKRHTRGGRSSVRSLLFLIGDIARKYDQSLTDFRDRLLAAGKPKMVVRIALAHKLLVRLNAKARETRAAIAQQG

SEQ ID NO: 345987 - protein, 354 aa, unidentified
MKFYVGLDVALEETSLCFVDGEGHTVREVTVITEPAAIRSAVEGYADRLGRVGVEASSLGIWLCRELQPAGLPIIVVEARHMRVSLSTMRNKTDRNDARGLVQMMRLGWYRTVHVKNIDMQKMRTLLASRKLVKRKLIDIENHIRGALRACGLLVGAVARGAYEARVRALLERSDPILIMTIEAMLDARRAILEGYDRLHRALLQVVQHDAICGRLMTVPSVGPVAALSFKVGVDDPRRFARSRTVGAHFGLAPRRHQSGTSIDYEGRISKQVDVAVREVLCEAAASLLAAGQEMVGIASVGPADRQTIEHVVRNHRGRAEARKHSAPNVDQRDRLARRIRRQVTQRLRLRPAQ

SEQ ID NO: 345988 - protein, 348 aa, unidentified
MQFNCINGSKSKTMKKNYTHFIGIDVSKLTLDVCLLAGEETFIHSIFNNNEKGIKQLLKWITSQKVDLYQCLFCLEHTGIYAMPVSCKLGELNCEFALVPAIEIQRSIGLKRGKSDKADSLAIARYAMLRQHNIRLYRLPEEKLLRLKLLLSQRQSLVQHKLQFELAAKEYKGYIDEKFMKEITRQNQSLKKSVIAKIKETESLIEQLINSDEEMKRVYDLLQTIPGIGPQTALQLITSTRCFTAFDNSRQFACYAGIAPFEYRSGTSIKGRNKVSPFANKQIKALLNLAALNAKKSDRQLLDYFERKLKEGKNKMLILNNIRNKIVARIFATVKRGTPYVRTINYAA

SEQ ID NO: 345989 - protein, 341 aa, unidentified
MNTRLISIDLAKDVFQICALNQRGKVVTNKRVNRRQLWLQLARYAPTEVVMEACYSAHYWGRVIEAMGHTVHLIPPQHVKPFVRGNKNDANDAVAIAEAAQRPKMRFVPVKNLAQQDIQMLHRIRQRHVWERTALVNQMRGLLSEYGIRVSPGWRRLQGIVPYLLEDAENELTAVGRQCIARLQDELTVINARIKEDEQALLALVADNEDYQHLLQVPGFGPIVASALVAAVGNAHAFSNARELPAWLGLTPRQIASGPHSRMVGISKRRNRYLRTLLIHGARTVVNWCQRKTDPLSLWVKKLIERRGRHKAIVALVHKLARFAWAILARKEPYRPPAIVV

SEQ ID NO: 345990 - protein, 419 aa, unidentified
MAFKILRKNCCGLDIHKTWIFACIGITDSNGRTEYKQARFSSFSNGLRDLADWLAKYSCSDVCMESTGKYWIPVFNILEKTCWVTLAHPKYTKPQKGNKTDRKDAKWICDLYMCGMVKPSFIPPPDIRQLRDLMRYRVKLTNMLTGEKNRAQNCLTVSNLKLDDVFSDVFGKSSRSIIQYILEHPGEQFDVTPFIHRRCKHPVEEIQAAVDGVVSREQAAKLKECLLHIDQLNAHRERIEAEILRLAEPYPYQLELIRTVPGFAAAPLTAVALISEIGVDMSVFPSAKHLASWAGCCPRNDQSNKKVKSTRISRAGCYLKPLLVQIANAVIKSDRHPECRERYRRIKPRRGHKKAIIAVCRMLLTAIWNVLSKLEPYSAKGYLADKLTEHSVVISKAEGLALLRKRGYIFKDELAVESG

SEQ ID NO: 345991 - protein, 359 aa, unidentified
MKYFIGLDVSKATTAVCILDQIGNVVREHELMTDPDHIAGFLEGCNYEIDSIALETGSMTHALCEGLMDHGYKVKPLDARQVSAFLKAKTHKNDRNDARIIADLCRIGNLQPVHHKSQKALEIKTVLKARKQLVSTLGDIKNTTRGLLKHHGLKLSGSTRGLDAFISAVREAITDVRMPVKEAFEELLKALESIKERISKMEKLVNDLDKAHKEITDLLKSCDGIGTLTALSFIAEIDDPNRFTEGRDVGAYIGCVPTLYESGERSVRGRISKTGPEQLRSLLFEASLVLLTRTKRWSHLKAWGMKIAKKKGMKKASIAVARKLSIILWRMWKDGKPFHHSLKEAKELEMKAKNLKKAS

SEQ ID NO: 345992 - protein, 331 aa, unidentified
MHFNYYLGVDVSKETLDAAIYPCKDRKADFLHISNDTKGLNEVVKWLRSRKVKMDELLICAEHTGVYTNNLIAFTDKKSIAFCLESPLAIKKSLGIARGKNDIVDASRIAEYAYMYREKLKLYQKPSKTILQLQHLLTERRQYVKQRTSLLAIKSELGKYDTTKSKARRDAAILRLQKVIEEIETQMKNTIAEDADVKQNYDLVSSVMGIGLINAVSTIVYTKNFHSFDTPRQYACYIGVAPFDNTSGTSIKGQTKVSPLCRSQQKAELSMAARSAIVNDPWIKKYYQRKMKEKGGARSMHGLVLNAVKFKLIMRMFAVVKSGEPYKVLNY

SEQ ID NO: 345993 - protein, 347 aa, unidentified
MNTTSKMVVGVDTAKNVFQLYAVDTTTGEIICKQLKRSQFLLWFVNRAPCLIGMEACGGSQHWARSLQELGHEVKLMTGKMVKAFVCGNKSDAADARAIYLATQQPAVKAVAVKTEAQQAALAMHRIRQQLVKTRTAQINALRGLLTEYGEVFAVGRTAFNAGMKTALARLADRLPAPLIDTLRDQWQEIDRLDERIARIEAALLMWLRQDRGATAIAAVPGVGLLTATAAVATIGDAKAFRSGREFAAWIGLVPAHTGTGGKVKLLGISKRGDTYLRTLLIHGARAVLYRAKAPSTWLQNISQRRPPNVVIVALANKIARTIWALLAHERAYEKEYVSQPFTTVST

SEQ ID NO: 345994 - protein, 389 aa, unidentified
MFYVGIDVASEKHDCCILNEKKKIIRSFSFLNSPVGFQSLLSALSGIQPDEIKIGLEATGIYSENLSVFLRRKGFNVTTINPLLLKKHQCATTLRKTKTDKADAKGIALFIAEEGFQPDLPVSYHIQELKSLTRARFSFVQDRSTLKNKVKRLVVLLFPELLEQFSDIFGASATALLKQYPSAEKLAACHTDALAALLRKSSRGRFGRAKAAYLKQLAKCSIGNHSPARVMELKMLLARIDLLSEQIKDYDKQIKIIMDELDSPVLTIPGIGYTLGATIIAEVGNISRFSSPAKLLAFAGLEPSIYQSGKFVPASGRMVKRGSPFLRWALLQAAGYVPNYSSTFALYREKKLSEGKSAAVARSHVAKKLVRIIHSLMTHSTAFSDQLTA

SEQ ID NO: 345995 - protein, 312 aa, unidentified
MFYAGIDAHMKSSTIWIVDRKGRKVSSSTVMTSAEGFAAGLGRWVRRGLKAAVEASGITPWVCQLLKDLGVRVVVVNPNRVRLIAESRKKADRVDAETLAELLRLGGLPEVHQPSLEARRLRTELSVRRQLVRQRTGLINQARGLLRGWGVMLPVRFFQSRGGWKDLQAKRLPEYLRSLLETMKGVYEQLTQAIRQVEMTLKQREHSDERVARLETIPGVGRVSALTLVAAVDKIARFGRAKQLTAYNGIVPTVRSSGEREQQGSITRQGRSEVRAVWIQAAHSLVRSRHLAPDLCKNGFGKWHGAEGCGPR

SEQ ID NO: 345996 - protein, 314 aa, unidentified
MDNEVYYVRCAGIDVHKKLLVVCLRIENKSETRKFGTLTQDIRKMVEWLKSNGCQMAAMESSGSYWKPIYNIFEQEGLPVMVCNAYHIKNVPGRKTDVNDAQWIAKCLSQGMLNPSFVPDREQRELRDMTRFRKSQIEERARNINRLQKFLEGANIKLDSWLSDIEGKSATQLLELVIGKPDFTVDDVAKRMHGKMKSTADELFLSLEGYMTPIQREFFTHIMTVIREQTCQIEKTDAMIQRSLNEDYKAATKALDTIPGIGRISAEQILAETGTDMSHFKNQHSLSKWAGVCPGNNESAGKKKAVKPSQVIKR

SEQ ID NO: 345997 - protein, 549 aa, unidentified
MKLCLSIVEEKSKLSCAAVVGREGRLIIGALCPSRSLVSGVSVFNIGDIFILQSGYDPVKEMAAVPAPLRPQLLAQSPVDKTRKRDPIISHLQKQSQRTTQNSISNLPQHLQHININAAGIDIGSDRHLVAVPEGRDTVSVREFATFTADLHAIADWLEQCGITTVAMEATGVYWIPLYEILEQRGFEVYLVDARRVKNVSGRKSDVLDCQWVQELHTYGLLAKAFRPAEEVCVLRGYMRQKEMLVQTAAMHIQHMQKALQQMNLLLQNVVSDITGVTGMKILKAIISGERNPQVLVKERDPRCRNSTETIAKSLVGNYRPEHLFALRQAVELYEVYQTKIADCETAIVAYLEQQEHHTEDEPPAPQKPVSARERMRGGSDIRTKLYKMTGVDLFAVPGLAADTLLTLASEVGLDISPWQSEKNFTSWLALCPGTKRSGRRVLSSKTRPSANRAAQAFRMAAATQARANTALGAFYRRIRARSGGREAITATAHKIARIFYAMLKTGTEYVEIGQAAYEQKFKERRLRSLKQQATAFGYQLTPIAARSF

SEQ ID NO: 345998 - protein, 355 aa, unidentified
MDDLKYIGMDVHSATTTIAVQDSRGRLVMEATVATQAAALSDFLRGLRGRLWLTFEEGNWAAWLTQVLTPQVEKLIVCNPRRNASLKQGNKSDPLDARELAHLLQANLLKPVYHEADGAPTLQELARAYTTCVSDTTRVMNRIKARYRARGILCSGSRVYRPRFRQAWFEQLTDPGARQRVELLYAQLDLLQELRKRARQALRTEARRDPAYALLRTVPGIGPVRAALLLALLRTPFRFRTKRQLWTYAGLGLVTRDTGQYQIVGGQIIRRQRPARVRGLNPQHNRELKEIFKSAALAATRPSSLLYAFYQQRLDQGMRPHLARLTLARKIASLTLTLWKKGERFNAHALTSQAE

SEQ ID NO: 345999 - protein, 346 aa, unidentified
MKITTIGIDLAKEVFQIHGVDDHGKTVLRKQLRRNKMTNFFANLEPCLIGMEACGSSHHWARKLGEFGHTVKLMSPQFVKPYVKTNKHDMADAEAICEAVSRPNMRFVPIKNVEQQAILSVHRARQGLVKARTAQANQIRGLLSEFGIVIPQGIHSITKQVPGILEDAENGLPGTMRHLLKRLNDHLKELGRQVEELELQIKLWHKENEASQKLEAIPGIGPITASAIVATVGNATEYKNGRQLAAWLGLVPKQCSSGGKQLLLGISKRGDTYLRTLLIHGARTVIRFAENKAEPENWLRKLITRRNKNIAAVALANKNARIIWALLAKGTTYRPNHITAAVATKV

SEQ ID NO: 346000 - protein, 356 aa, unidentified
MEGERFVGIDLGKRTYEACAISRGGSLERWNGKTDDVGRERLAARLCHDDVVGVEAGSTAFHIARRLQTVSGVRVVVLNPGKLAIIYASMKKTDKEDALKIARLLETMPEEYLPLVPLPTEAEEDMRRLASSQMFLKKERTRLINRLHALFVAAGRTTVTKKDLARDESRRSTVETLSGVYAELAGRLVAILAEVEQQIAELDQSIRKALIDRREQAALLMSIPGVGPVATMTFLGYIGDGSRFATASQVSYYAGLVPRIDMSCDTCRLGHITKSGNPAIRRAMIQSAWTAIRSPLGNPFKDVFERIAATRGRGIALVAVGRRILELMYTLITRGEFYKYCSPVERQRKLRYYKVA

SEQ ID NO: 346001 - protein, 330 aa, unidentified
MLNILLMKHEKTILGIDVSKDELVIFDNSTKRITLLANTETALESAVSEFGWVPGDYLIGIESTGDFGLLVMKFFIKQGFRVIMLNPIVTKRFIKSTIRNKKTDKSDAEAIATMISAGEGQIVTKKDLEIAKKTLIRLEQKITAMAANLKRLQHSLELKVASGIDLKNAQDEISSLIKEMEKTSQNLWQMAKEEKVNRQEQIIASHPGCGEKLSAIISTEAGDIKRFPSASQLKAYAGIDPRVIQSGTMDKRGKMTKRGNPVLRHALFIAAFVASNHDPELKEYYQKKRAEGKSHVHAVCTVARKLCERIYATVTQDRFYEVKEPSKLST

SEQ ID NO: 346002 - protein, 350 aa, unidentified
MMIIGCDLHTRYQQIAMLDTDTGELVERRLEHESGEAQAFYAGLSGEVRVGIEATGHTHWFEAMLAELGHQLWMGDAAKIRASVIRKQKTDVRDAEHLLNLLREGRFPQIWRPSPAERDLRQLVWHRQKLVWMRGAVKNQLHALAMGEGVCRKKKLFTAKGRKELEGLALGPWASYRRQELLRMFDELAAATAQLDAAVEQAAKDQPLAVRLMTHPGVGPVTSLAFVLIIGPVERFEHSKQVVSYLGLNPQEHSSGGKQRLGSISKQGNPMMRSLLVEAGHTAARFDPALKRMYQRLKFRRGASVAKVAVARKLAVRMYWMLRSTADYAQLVRMQGSPWATLVENSPSLG

SEQ ID NO: 346003 - protein, 363 aa, unidentified
MPSIALERSDVIAGVDTHKDEHVAVALDGLGGIIAEPLFVEANNDGYRQLLDWATGLGDIHAFGVEGCGSYGSGLAKFLRRHDQLVREVARPPRRGERRASGKSDTIDAEHAARVVLSGDGTATPKLADGQVEAIRVLKIARNTAVKAHTTAMITLKAVLVTAPDDLREQLEPLTDHQLILTCADLDLCGDIADPAVAIRHSLASLARRYLELHEEIRIHSNHLKQLVAAAAPQMLERFGVGFDTAAEMLITAGYNTDRVRSEAAFAKLCGACPIPAGSGKTSGRHRLNRGGNRQANAALYRVVIVRMRWHPPTIAYVERRTGEGLTKKDIIRCLKRFVARELYQLLPEPSTREKPRSRLDDL

SEQ ID NO: 346004 - protein, 271 aa, unidentified
MDHFAGLDVSVKETSVCIVDDTGKIVREVKAASEPDALLPVLTNPTYHFKRIGLEAGPLSQWLFSALAEAGLPVICVETRHMRAVLKAQINKTDRNDARGIAQMMRAGLYRPVHVKTLRSQKLRMLLTHRKLLQSKAIAVDNDLRGTLRNFGLKVGVVGKVRFEARIKELVENLPDLALLVEPLLVVRRVLREQLGILHRRLLAIVRDDEVCRRLMTTPGVGPVVALTYRAVDVPARFRKSKSVGAVFGLTCAKYQSGESERSGRISRCGE

SEQ ID NO: 346005 - protein, 340 aa, unidentified
MKDTVIGVDLAKNIFQIHGASHTGEVTFRKKLRRQQFMQFMATQPPALVVLEACGSAHYWARELAGAGHEVRLIAPQYVKPFVKRQKNDAADAEAIVIAARQPEMRFVEPRTQAQQARSVLFRSRERLVHQRTELVNALRAVLYEFGLVVPQGIAHIKRIEALLDEAVLPELVRQECLDLLQQISEQSVRIDARTKKIRMLAQESENACRLQSMPGVGPLTALAVEAFAPDLSTFRRGRDFAAWLGLVPRQFSSGGKERLGKISKAGQADIRRLLIMGAMTQVNWVSRKGPAPGSWLARMLARKPRMLVAIALANRMARGIWAMATKQEDYRDPALSVAV

SEQ ID NO: 346006 - protein, 417 aa, unidentified
MKKHNNSRKKSEATSKRAKSRRPVPQDTKEVLAEPVGELWGKLDRKVAAGSTREREEHQRGELRPNVDRLTVGVDLGDQGSHYCILGLEGETLAEGQLRTTQEDFATFFQGLNAARVVVEVGTHSAWVQEVICGCGHEVLVANPRLMDGSKRRKRKNDRIDANKLARLGRVDPESLYPIQHRSREVRQDLVMLRARDALVAARTEIINTTRGLVKSMGTRLPKCSSRSFAQKGEEAVAVEMREALLPLVRVAATLSADIKEYDKKIEELGREKYGHTTLLRQVKGVGPITALAYVLTLENPERFTKSRDVGPYLGLVPKQEDSGESQPQLGISKAGDTMVRKLLVGSAQYILGPFGPDTDLRRYGLRLCERGGKNAKKRAAVAVARKLAVLLHRLWVSGEVYQPLHNAMSAPIAAAA

SEQ ID NO: 346007 - protein, 341 aa, unidentified
MEQATTIGLDIAKHVFQVHGADAAGHVLFRKRITRVKLLSFLAAQTRCVVAMEACAGAHYWAREIAKLGHQVRLIAPAYVKPFIKRQKNDAADAEAICEAAQRPSMRFVPVKTEEQQANGIVFRARDLLVRQRTQCVNALRGHLMEYGYVFPKGITHVEALVALVEDLQSSLPDSVRVILKLLVDTFTALEAQISALDAEINQRSKSDPTARRLMTIPGVGPITSTAITALVPAAEGFPAGRDFAAWLGLTPLQKSTGGKQKLGAVSKRGERTIRRLLIIGASAVVQQASRRGAPKGSWLAQMLARKPKMLVTVALANKMARIIWALLVKGGTYRTPIAAA

SEQ ID NO: 346008 - protein, 334 aa, unidentified
MEGPIVSIDVSNGNSHYMCFIKNNKRFGKVKKIDHDIEGFKRLLEDIQKLEAETNEKVCAVFEATGVYTKPLERFLSKKRFLSKNSIKTYMINPLESARKRKEEIHNKKTDKLDPISISKVYYDKEEMMELKKKDETYNWLRKKNRLYEDQLNHLRKYKVTFQNQLSICFPGYLDLFKDGYSDIPMTILKKYPHPDLLKNKKAETVARYLEKNTCHTHKVSLEYALKIIEFAKKTYPGCEKDDVEVEIFKILLDKVIETQRECEKTLNEMITVASTLEEYRYILSIDGIGTNLAARIIAEIGDIEEFESREALVAYAGLDPHIYISQETRMENI

SEQ ID NO: 346009 - protein, 364 aa, unidentified
MYDFTTTVAVGLDVHARSIRLAAVRADELLEERTLPYDEEAVERAVRRWPGVRCCYEAGPTGFGLQRFLVERGIDCQVVAPGLVPQRPGDRVKTDSRDARKLARLLAGGLLEPIHVPTPELEAARDLVRAREDARLDRMRDRHRLSKFCLRHGRRLPTSSWTVARRKWLAEQRFEFAARQQTFDTYVHAVDLVDARIQQLERAIRETAEQEPWRALVARLRCLRGIDTLTALAIVTEIGDFARFKTAEELMAFVGLVPSERSSGEQRRQGSITKVGNAHVRRLLVESAWHARRRPTVGYELARRQRGQDAVVIERAWRCQQRLHSRWQRMAGRGKPQQKIVVACARELAGFVWAIATEQPLRTS

SEQ ID NO: 346010 - protein, 381 aa, unidentified
MRDKTFIPRDYDVFAGLDVDKKSIAATFSSHQGFIRSLGMPYKVEDLLNHVRNHFAAQKVAFVYEAGPTGYGLYDGLVAQGYTCLIAAPSMIPRAPGQRVKTNRLDSKALSESLRGGQLKSIHVPSPLYRELRHLSQLRDTFVSEMMGMKQRIKSLLLMEGIEFPPAPTGSQWSFIVKAKLRKLACSNTVRFKLDQLLDSLEFSEKRVLKTTQEIRRFCRSDPELSQCIKYLMTIPGIGWIVASQLLARIGDWREIKNVRQLAGFLGLAPTEHSTGDKTDRGSITHIGAGRLRSKLIQGSWSAIRQDGELREFFRSVCQRHPRKVAPRVAIVAVARKLSVRISVVLMKQRPYVVREKVHSAPLTQEETRPQGTTRRRREPG

SEQ ID NO: 346011 - protein, 341 aa, unidentified
MGEYIGLDVSMKDTAISVRRDGKRVWRGKCASDPEVIARAVSKHASDPERIIFETGPLAVWFFHALQAEDLPAICVDARHAKAALDMAPNKTDANDADGLAHLAEVGFYREVRVKGFESMLTRTLVAARTKLVRIKTDISNQIRGLMKTFGLVIPGGKGSSFDANVLEKLADHHDLAAIIMPLLEAWRGVRLRAAELTRRLIRDARQSEACQLLMSIPGVGVVTASAFATAVENPVNFRRSRSVGAWLGLTTRRYQSGEVDHGGRISRRGDNQVRSLLYEAALVILTRSTAQSTLRDWGLGLKERIGFKRAAVAVARKLAVIMHAMLKSGELFDRAAGAAA

SEQ ID NO: 346012 - protein, 435 aa, unidentified
MEEVTDEPLYRDRVCGIDIGKAGMVATIRVPSDKDPARRAAETRSFGTTKKEVLALADWMRSWQVPAVVMEATGDYWKGPFYRLEAEGFDCVLADAKQVKHLPGRPKRDPADSRWLAACFERGAVTSCFVATPEFRVIRLHTRYRRDLTEERTREKQRAEKLLESAAVKLSSVVTDLHGVTGRDIMDHLIAGERNPKVLAQLARARARRKISELEEALEGAEFFTPEHAALLAAMLARIDRVNQEIARLSEVIEQLLAPYEEQLQQAESQPGWGRRAAQDAVAETGIDMTRFATGGHLASWGGRTPLDNQSGTRNGRSKSKKGNRYLGGLLGETAVAAGKTQTREGARYRRLARRRGKAKACVAVGNTQLKVYHKLLSNPGMRYQDLGPDYYERRREVSRQISHHVGKLGALGFEVTLCRIPAPEPGGTTGSQTA

SEQ ID NO: 346013 - protein, 383 aa, unidentified
MARQRISDDAAGFADLVELATHGDSPTDPIPVAIETSRGLLVACLRTTGRPVFAINPLAVARYRQRHSVARKKSDHGDALVLANILRTDLAAHRPLPADSELVRAIGVLARAQQDAVWDRTLAHNRLRSLLREFYPAILAAMAGKRGGLLRPEARAILATAPTPSAAARLSLAQLRSLLTHTGRRRGIDAEARRLRGVLRATYLHQPPLVEEAMGRQALGLLRQLDAACTSAEELAAATIAQFATHPDAELITSHPGLGPLTGARVLGELGDDRSRFADARAVKAYAGAAPVTRASGKSHQVMHRRVKNQRLAAAGYVWAFSALTASPGARAHYDRHRAAGDGHIAAQRNLFNRLLGCLHHCLQTRTPYNEQAAFPTQTATAA

SEQ ID NO: 346014 - protein, 347 aa, unidentified
MNFYNNIHPYYCGIDLHARSLYVCILNQNGETCLHKEITASPDKLHHLLEPYIGNIVVGVECMHCWYWVADFCEDIGVDFILGHALYMKAIHGGKAKNDRIDSFKIANLIRGGNFPQAYVYPKAMRATRDLLRRRMKIVRHGADLKAHVVNTTSQYNLPSNKVNLKNKVAREQLRETFSEQSVQKNIDLDMVILDCYAKQLSKVEWYIQQQAKQHKPNHFHLLKSVWGIGPILALTIIYEIGDIDRFESVQKFASYARLVKCKAESAGKTYGTQGNKIGNAHLKWAFSEAAVLYLRGNEKAQKYLLKLQKRMSKAKALSALAHKLGRCVYFMLKNESVFDEKRFLTG

SEQ ID NO: 346015 - protein, 360 aa, unidentified
MRTEITKDSFIGQSFYVGIDSHKKSWKVTILGEQYEHKTMSQNPDPNLLASYLKRNFPGANYHAVYEAGFSGFESCRKLNQLGVNCIVIHPADVPTSQKEKLQKTDKADSRKLARSLRSNELEAVHIPDPELEADRALVRQRYRLMKDVSRTKNRVKSLLFQFGLQIPDRFTSAQTRHWSKIYINWLKGIEIDKQSLRQVLDNYIKIGEGQRSDLLLLNKQVRSLSLNEKYRNNYKLLLSVPGIGLMTAMTFLVQIGDVCRFERLDDLCNYIGLVPKMYGSGERMQVGKMIKRGRKELKIMLIEASWEAIRIDPALMLKFNELSKRMHKNKAIVRIARKMLSRIRFVLHNQRSYELSVVK

SEQ ID NO: 346016 - protein, 414 aa, unidentified
MDVLHERCAGLDISKKDAKACVRTPSSKRRGAFTTETTTWASTTNAVLDLRDHLLAARVTLVVIEATSDYWKPFYYVLTEGLNVILVNARQVKNLPGRKTDVSDAAWLAQLGAHGLVRPSFVPPQPVRELRDLTRARTTATRERSRVVQRLEKLLEDTGIKLSAVASDIMGVSGRAMLEALIRGEQDPQILADLAKRRLRNKIPELTEALTGRFREHHAFLTRLHLDQYDQLTTMIDQLSERIEEAMAPFRGALDLLDTIPGINQPTAEVIIAETGGDMSQFASAKHPASWAGVCPGHHESAGRTKNTKVRPGNPYLKGALGLAAFGAVRTKDTYLAARYKRLTARRGPLRALVAVEHSIITAIWHMLTDHVPYCELGGTYFTQRDPERATRRAVTALNQLGYTVTLNPLESVA

SEQ ID NO: 346017 - protein, 393 aa, unidentified
MICVGIDVAKDKHDCFILSSEGEVLADVFTIPNNRDGFETLLQRIRSCALPADKIKVGLEATGHYSYNILGFLLDCGLATYVINPLHTNLYRKSLSLRKTKTDRIDARTIAAMLMSDVNLKSYTDTAYHNEELKSLTRYRFDKVRQRAKLKQSVSRLVNILFPELETIVPTLHMASVYALLSEFPGAQQIADTHLTHLKTLLDDASKGRYDREKAVEIREAARRSIGSRMPAKSLELRHTIQLIRELDREIAEVEDSIEEIMNSIQSPITTIPGMGLRMGAMILAEVGDFANFDSPDKILAYAGLSPSTYESGKLSLAGAYSHMEKRGSRYLRYAIFNATKYVCHWDSTFAAYLAKKRAEGKHYNVAISHAAKKLVRVIYSLQKSGQAYQTAA

SEQ ID NO: 346018 - protein, 367 aa, unidentified
MHDRLKHLAIAHVKLSLFPYQSQLEEYGMKLFIGLDVSLAKTAVCVINEHGKIAKEAQVPSEPQAIVDFANTLEGAVAIIGLEAGPLSQWLHRGLADARLDVVLMETRQVKGALKAMPIKTDRRDAEGIARLLHLGWFRPVHCKSVSAQEVRALLSARKAIQQGMIALELSLRGLLRNFGLKVGTISRGQFDARIGELVEGNSMLQAASGPMLRARTSLRHELAGLERYVRLLAKDDAVCRLLMTMPGVGAVVALTFRSAVDDPARFSSSKKVGPWVGLTPSRNQSGERDVIGGITRAGDANLRRALCQAATVMIHRGRSTWLRSWAAQVAKRRGSKRAMVALARRIGTILHRMWKDGPSPDVEGWH

SEQ ID NO: 346019 - protein, 327 aa, unidentified
MRQHKSSTEKVKTSVAFDVCKATLDGHILVDGKVFSVPNADDGFDQIAAILTDYHISLVLMESTGGYEDAAACFFQSIGYDVVVVNPRHARRFAQSMGIMAKTDRIDAAVLAQFASVLDSLPDRERYIRPLTDETRKFLSRMVTRRRQIVELITAEKQHLSCADDYSRQSINMVLPFLQVQLKEINDDISRYVKKNFSYLSKVLSEIPGVGKQAVGVLIGDVPELGRIDSRQLSAVIGVAPFNHDSGKMRGRRFISGGRKQVRNVLYMGIISATRFNPVIKAFYERKLNEGKPKKVALIACMHKLLRIINAMVRDGTSFNPSLHTVS

SEQ ID NO: 346020 - protein, 339 aa, unidentified
MFLIGCDFHPSWQQVCWLNRTTGETEENKLVHAPGEVERFYRQFPAPARIGMESTGNCQWFVELVTALGHELWIGDAAKIRASDSRQQKHDKRDARLLLRLLMEQRFPRIWTPSSQQRDLRQLLVHRYKLVLLRMQAKNGLQHLALNQGLQKKRRLWSRAGQKLLSELPLRPWASRRREDLTSIVKLLDQQIQLAAQKDANARLLMTQPGVGPITSLAFVLTMGDISRFRRGKQVASYLGLIPREYSSGGHQRLGSISKQGNRFLRMLLVEAAQGAVRCDPQFRSEYLHRCHEKPKGVAKVAAARKLAIRLYWMLRTQKGYPEVVSIESSSRVPLVGAS

SEQ ID NO: 346021 - protein, 451 aa, unidentified
MSRPQVIDDEEHERVHDRVAAVDVAKDSGMVCTRTPHPSRPGTRQSTVWMVKARMNAIGKLGRQLKKDGIEIVTLESTSDYWRIWFFVLEACGLVVQLVNAAQARNLPGRPKTDKLDAMWLARLTEMGLLRASFVPPKEIRDLRDYTRARTRLVQERTRCWQRLEKLLEGALVKVSSVASKLTTVSAQDMIKALIAGQRDPQVLAGLARGRMKARHDDLVEALDGMFDAHHGELAQMLLDQIAFLDQRATQLTARITAAVAAMPAAWGVDGDGTTGPDAGAGPDAAVLPAVQRLAEIPGVSPGLARAIIAETGLDMSRFPTAAHLVSWAGLCPSARQSGPRTRAGKKGQGDKWLRGALGQAATGAARTDTFLGERYWRIARRRGKAKAQVAVARSILVIIWHLLADPAARFTDLGSGYYQARTDKDRKIKNHIRQIEALVGHPVTITPKAA

SEQ ID NO: 346022 - protein, 340 aa, unidentified
MRQLYVASDLHGNNNLVGIIDGEGKRIFKKKLPNDALLINDILKPFKEEIVGIVVESTYNWYWLVDALMEEGYKVHLANPAAIQQYSGLKHADDKHDAFWLAEMLRLGILPEGYIYPKEERPIRDLLRKRGHLVKLRTSLILSLENIISRNFGRKLPVNDVKGLRKDYVTPLFEGKEELALAGRVSKETIDFLTHQIRQIEGVVEKRITLKEQYRNLLTIHGVGKILGLTIMLETGPIGRFETVGDYTSYCRKVPSQWISNGKRKGSGNRKNGNKYLSWAYAEASDFARRFHPESRAYYNRKMQQSNPAVAHSALSHKLARAAYYIMRDQVAFRPEKLFG

SEQ ID NO: 346023 - protein, 426 aa, unidentified
MLKSQIQKIESITPEVMIVGIDVAKKKHWARIFDYRGLELTKGFSFKNNIEGFNRLVGKLSEIKEEKGLEKIIVGMEPTGHYWKALAWFLKEQGVTVVLVNPYHVKQVKELDDNTQTKNDPKDAMVIARLVKDGRFSYAYLPEGIYAELRVLSTMRQQIRAKLNSAKNALVSILDEYFPEFTEVFKNLDGKAAMHILYHYPFPQDVRELGVEGIVEEFKKATKRAVGQKRAEKLYEAAKRSVGVKEGLAAAKIKIRLCIEEIRFFKKQLEEVEREMAVRLQETGIGRYILSIPGIGIVTAAGILGEIGDPSRFESWKQIRKYAGLNLIEDSSGERKGKTRISKRGRAMLRNLLYQVAVVMVSKNKEIKALYTYLKTRRENPLEKKQALIVVAVKVIKIIFTLVKKKEEYDGKKVLGIFRERQIQAA

SEQ ID NO: 346024 - protein, 382 aa, unidentified
MSKSSTLYVGLDVHKDSIDIAVAQAGREGEVRHVGSIGGDLAALDKSLRKLISKGCALHVVYEAGPCGFVIWRHLNALGVACEVVAPSSIPKRSGERVKTDRRDAIMLARLSRAGELTAVRVPGAADEAVRDLVRAREDAVRECRNARHRLKALLLRNGIAYAGKSSWTAAHLRWLATCKMEHAAQQIGFQEYLHAITEATARIARLEQALRDSLGQWSLKPLVQALQALRGVQLIAAMTLVAELQDFMRFDNPRQLMAYVGLVPGEHSSGPKRRQGSITKAGNSMARRMLVEVAWHYQHSARVSPIIATRHDQLPMEVTNIAWKAQLRLNAKFKRLVARRVMKTKAVVAVARELAGFVWAIGQQVQSSGWQGIKVETATTA

SEQ ID NO: 346025 - protein, 374 aa, unidentified
MDILYPRCAGLDVHKDSVMACVFTPGAGAAANKEIRQFGTTTAELRRLAAWLRECAVTHAAMESTGVYWKPVFNILESSCELILVNARHVKQVPGRKTDKADCAWLASLLQHGLLEASFVPPLEVRQLRDLCRMRTTLVRECVQVGNRLRKVLEDANVKLDSVASDTLGVSGRMMIQALINGSADPVELAALARGRLRAKLPQLELALEGQVRAHHRFLLKQWMGLLSALEQHIAEVEEEIERQMPPFAWAAELLESVPGVQHTAACALIAEIGVDMDRFPTARHLASWAGLCPGNNASAGKSRSGKSHRGSRWVNDRDRLGRIAHQQELSRSPVQTGRRAPRKEACARRSRQRAAPIRLAHAHPAPALPRPRR

SEQ ID NO: 346026 - protein, 446 aa, unidentified
MAAVMIGVDPHKASHTAVVIGAAEEPLGELRVRACAAQAERLLAWAAAWPERTWAVEGAGGTGHLLAQQLLAAGERVLDVQPKLGARVRLLDAGDTNKNDPNDARSAAVAALRSAGVREVRPDDHAVVLKTWSKRYRDLGRTRTQVVCRLHAVLCDLVPGGLGRPIYASHAARILEQITPPDAVAAARCELAADFLEDLRRIDAQLRETRKKLATAVQAAGTCLTGLFGVGPVIAAAVIGDVRDVSRFPGRDHFAAYNGTAPIEVSSGPHKIYRLSRRGNRRLNHAIHMAAITQIHHRHRRGRAYYDKKLAEGKTPKEALRALKRQISNAIFACLQADARRAAARAQGPGGQQGNDSVASAAGLHPRHRLFGQATPGPGHHPTTAAGGPAPGPAHARGRAGHSPVVATLPPAPPQVQVERPQRSEDERPGGAARPRPHSAARKARG

SEQ ID NO: 346027 - protein, 449 aa, unidentified
MSKINNPANGLPVIHERAAGIDIGSRFHVVAVPTALSAEPVQTFQAFTADIQRMAAWLLSLSIETVVMESTGVYWVPVFEVLESAGIDVIVANARETRSVPGRKSDINDAQWLQRLHACGLLRASFRPGRDIAALRAYLRHRERLLDYAAAHIQHMQKALTFMNLQLHHVVQDITGATGMKIIRAIVKGERNPDVLTEFRDVRCKSSPETIRGALVGNYQPEHVFALTQSLALYDFYQVRIDECDQQIEQALEVLKADKPLPEQPIPKIRNRTKQPNAINFDVRKALFQLIGIDLTQIHGIGPFLALRLIAECGTDLSKWRTAKHFTSWLTLSPGCKISGGKVLSAHSRKSKNRLAAHLRLAAVTVGKTNTALGAFYRRLAARIGKAKAVTATARKIAILFYNAMRFGMNYSDPGADHYEQKYRERVIKQLHRRAAEFGFELHEVECVS

SEQ ID NO: 346028 - protein, 358 aa, unidentified
MFYLGIDQHARQLTISLRDESGDVVQRKQVSTKPGKALEFFEQLTRRCTDSGCGFWAIVEVCGFNDWLLEMLKNFRCDRIVLVQPEESGRRKTDRRDAAKLSEQLWLFRERIANGKPIDKLKVVTIPNSIQQQQRRLTTLRKDARAAHSRAINQIKHILRRHNLQHELPTKTFPTKAAVEWLATLQLPAADMIEMRQLRDDLIRYTQRTKELDDAIAELSAEDGDAKLLALTPGIAQFSSVALSSRIAGIERFKRPRALANYFGLTPGCRNSGEKNQRLGHITKAGSSMARWVLGHATKHILRTDPAMRAWFKKIKRKKGPGIARVAVMRRLATIIWHMLTKRKTYAEVRSLGIGLQE

SEQ ID NO: 346029 - protein, 420 aa, unidentified
MEVAQDDQEIIARVAALDIGKAEVVCCVRVPGVGPRARRMQEVRTYSTMTRSLLAMADWLTGLGVTRVVMEATGDYWRPPFYVLENSFEAWLVNAKDVRHLPGRPKTDRLDAVWLCKVAERQMLRPSFVPPPAFRELRDLTRYRVDLITTRTAEKQRVEKLLEDSLIMMSVVASDIFGMSGRDMMAALVAGERDPKVLAQMARGRMRAKTARLEEAFTGRFTDHHAFLLRTMLARIDGITADIDVVQTRIDEQIAPFAKAVTRLDEIPGVGVTTAQAIIAEIGLDMTRFPTPAHLASWARFAPGISESAGRKKGNSGTGKGNRYLARALGEAAVGVRRTDTFLGERYRRLAHRRGKKKAIVAVGRSILMIVWQLLSDDDARFIELGSDYYESRVNLNRRTRNHVRELQALGYKVTLEPAA

SEQ ID NO: 346030 - protein, 465 aa, unidentified
MTPRRDFIPKLYAPVPEPLEAAVDTALQVLNPYAAGIDIGEAEHWVAVPAHCDSQPVRRFATFSVDLHALATWLLACGITTVAMESTGIYWITLFELLESRGLEVVLIDPRQAKRAPGRPKSDVLDCQWLQRLHTYGLLSGAFRPDEQVCVLRAYLRQRQMLISCAAEHIQHMQKALQQMNLKLTQVVSDITGVTGMAIIKAILAGERDRLQLARLRDPRCKHAESDIAKALEGTWRAEHLFALRQALELYEFYQQQRLACDQQIEAHLHTFADQSDGQPLPKASKTKKPKANAPSFDARTLLYQMSGVDLTAIEGIEASTALVVLSEIGTDMSRWPSVKQFSSWLGLSPQHRISGGRVLSRRVRPGAQRAALALRLAANSLHRSQSAMGAFFRRIKARHGTPKAITATAHKLARLIYSLLKNGSAYVQKEMASYEAQYVERKVKSMAKQAMALGYELVPVSAEA

SEQ ID NO: 346031 - protein, 408 aa, unidentified
MTKFHVGVDVGRTHHVARVLDTSTGQMSRSFQISVGYEGFERFHRYLEGFSLDQQDFFVAIEATGAYHTALAGYLWDCGYTLTLVNPARSKSFRKAEGHVAKTDRVDAGVLCRMISGVNLRPAIPKPEEQERLRILTRWYFRLQQDRTKVLNRVSAAVDVVFPEFWQVFSKITQVTPRMVLRTYATPDELIRADTEVLACLMKSASHGRYRRKDAELLETLASRTVGIHTLYTPIAFQIRQALDQIDLIDQQIRELGPQIEQEFHAMGFTAEEFPVGGVITLATIVAHLPSPQSTPSLKSLHAFVGWCPRDRQSGQYKSSRPRMAKGCPPLRWALYGLSLACMSYATTYRVYITRRKAEGKIGGHILIIVGRKLLDRIWAIARTKSVFLPQKPAQLSEPGRTELVAIS

SEQ ID NO: 346032 - protein, 391 aa, unidentified
MIYVGIDVAKDKHDCFITNSDGEVLFKPFTISNNREGFENLFQRIESVSDDFTKVKVGLEATGHYSYNLLGFLLDKGLTTYVINPLHTNLYRKSLSLRKTKTDKVDSRTIATMMMSDMNLKSYSDTSYHNEELKSLTRYRFDKVKERAKLKSSVSRLVCILFPELEKLVPTLHMASVYALLFEFPSADAVANSHLTRLSNLLAESSKGRYGKDTAVMFREAARSSIGSHMPAKSLELKHTIKLIHELDAEIEEIENEIKSIMDEIHSPILTIPGISYRMGAMIIAEIGDFSRFDSPDKILAYAGMSPSTYQSGQLDNCYSHMEKRGSRYLRYALYNATKYVCHWDESFAVYLAKKRAEGKHYNVALSHATKKLVRTIYAMEKSGQPYQSVS

SEQ ID NO: 346033 - protein, 414 aa, unidentified
MFAVGVDVSNGRSMVAVLGARRSVVVQPHEVPHTADGFAELAARLHALDGEDRIVMEHTGRYYESFAMSMYRAGFFVSAVNPLAIKGYQEGISVRKVKTDKADALKIAQFAIDKWEILPHYTPMDTIRYDLKTLHRQFQLSSKTKTALNNNLIALLEQSYPGANRYFDSPVRPDGSQKWVDFATTFWHVDCVARVSRKAFVERYQKWCKRHGYNFSEAKAVEIHEDARQRFPLVPKSDTCKLMVREAVAQLNAVSRTVETYRAEMDRLASQPPEYETVMAMTGVGKSMGPQLIAEIGDLRRFAHQKSLVGFAGTDPIKDDSGDKVSDSKPSSKRGSPYLRRTLFVIMTILLQLQPPDDPVYQFLDKKRSEGKLYYVYMTAGMTKFLRIYYGKVRDCLKEKGLWEQPNVDEVNPV

SEQ ID NO: 346034 - protein, 375 aa, unidentified
MAEMAAWLTSVAGAEPSAIYVAIEIPHGPIVETLLERGFNVYAINPKQLDRFRDRFSPAGAKDDSRDAEVLCDALRTDMRAFRRLALAEPLVIELREWSRMTDDLNGERNRLCNRLREQLWRYFPAMLELEQDLGAEWFLDLWELVPTPDKAMRIRETSIARILKSRRIRRVSAPEVLTVLRKPPVTVAPGTIEAASAHIRVLSERLRVVNRQLKDAHRQLDRLCGLLAEPTESEPGPANEQRDAAILASLPGNGRIVLATLLAEGWEALQRRDYHALRTLCGAAPVTKRSGKSCIVTRRLACNPRLQNALYHWARVAVQHDPRSRAKYAALRLRGHGHARALRSVGDRLLNVACAMLRNGTQFNPSLESQKSAC

SEQ ID NO: 346035 - protein, 394 aa, unidentified
MAFKIFRKNCCGLDVHKTWIYACMGITDTNGRTEYKQARFSSFTKGLQKLADWLAKYDCNDVCMESTGKFWIPVFNILEKTCWVTLAYPKYTKPQKGNKTDHKDAKWICDLYMCDMVNPSFIPPPDIRQLRDLMRYRSKLTNIMTSEKNRALNCLTVSNLKLDDVFSDVFGKSSRSVIRYILEHPGETFQVAPFIDRRCKHPVEEIQAVIDGTISHQQAVKLRECLQHLDELEVHKTNVEKEILCLVQQYPYQLELLQTVPGFSGNIMTAIALISEIGADMSVFPSAKHLVSWAGCCPRNDQSSKKVKSTRISRAGVYLKPLLVQVAIQPFTANADKLSAAGALEIRCQICDGRFLSMWAALFIFLGCPLPPCPKNLHVHTGRIVILASVAWIF

SEQ ID NO: 346036 - protein, 421 aa, unidentified
MRGLRTKRVRTVKEGTLIATVDIGASTNTGYCTCADGRDMKVFKFGNAREGLEKFWHMVVAAQDRFECTEVVVGYESTGPYAEPLVHYLMDKPVNIVQVNPLHTKRLKEVNDNSPRKTDDKDPRVIADIIRLGRALSIVVPEGDAAYLRRLNNARERHIGERIALLNQMQQLVFLIFPEFKTVIARMAGKTVRLILKKYTTPEKIGSMDTHVLGEEMRKRSWGKLGMKDAERLIAAAQNTVGIKEGMAGIVLDIQHIIAQLEVVERFIGEIESEMALTLERIPCSARLLSIKGLGVNSVAGLIGEVGDFSKFRTQSEIMKLAGLDLYEVSSGKRKGEKRITKRGRSLMRKILCFAAIQMIGKHGIMHEYYERLTGRGTLKMRALVAVMRKLLRIIHAILRDDRDYVGQYCAPKRRVIKRAA

SEQ ID NO: 346037 - protein, 381 aa, unidentified
MNNSNMKRTGQTATPSVIRDRAKARVVPSLLPKSSNSCLGYPSPHVTQGRATLEPVQIIKEDCILEVSLIFVGIDVSKAQLDVAIRPTAQTVSMTNDKAGIKILVKHLEKLEPTLVVLESTGGLERQVMLALIGAEIPVVMANPRQVRDFAKATGQLAKTDRIDAAVLAHYADAIRPKPRPLPDELTLELRALTVRRRQIIDMIVAEKNHLATASKAIKKRITAHITYLEQELDRADQDLDRFIQKNPTWKDNQEILCSTPSIGPVSSRTLVAELPELGTLGRKQISALVGVAPFPHDSGTLKGRRTIWGGRASVRSALFMATLSATRFNSVIKDFYKRLKAKGKPSKVALVACMHKLLTILNAMIKNKTRWSETFSHQTT

SEQ ID NO: 346038 - protein, 370 aa, unidentified
MLDTTTFVGLDVHARSIKAVSLDVMTGEVRAATFGYDAGAVAEWIRSVGPGARCVYESGVTGFDLQKRLSGLGVDCVVGAVSKMIKPSADRRRKNDRNDAEFLARMLSVGNVVEVWVPDDECEAARDLTRALEDARDDLSRSKQRLSKFLLRHGLVFDERTPTGRRKGNWTRAHWSWIESIRFAEGADNDALAYYVDAVRRAAEEKARLEGLVEAEARKPRWRKRVDSLRCLKGVDTASAADLVFEAGEFSRFRNARSFAAWVGLTPSEHSSGESDRRGAITKAGNKHLRKTLVEAAWHYLTCSGRPKDLAKGQAPDPAARRHAAKGVRRLVERREALLARGVHGNKANVATARELACWVWAVGLMAEEA

SEQ ID NO: 346039 - protein, 369 aa, unidentified
MDHHSVAYVGFDTSKTKHAVAVAEGGREGEVRYLGEIEATPAAVERLLGKLAGKYKTLHVCYEAGPTGYGLYRHIRALGHACDVIAPSLVPKRPGERVKTNRRDAVTLARLLRAGELTAIWVPDEVHEAVRDLVRARDAAAQDLRHKRQQVLSFLLRHGRIFTGHRHWSRAHLRWLAGQAFDHPAQQIVFQDHVDAVADAQARLERLDHQLAELVPTWSMAPVVAACQAMRGVSFLVAVTFVAEIGDVRRFESPRQLMAFLGLVPCERSTGDTVRRGGLTLAGNRRVRRALVEGAWSYRHPARVTETIRVRLENLPKAVREIAWKAQVRLSARYRRLIAAGKKAPVAIAAIAREMAAFLWAIGRVVEPA

SEQ ID NO: 346040 - protein, 343 aa, unidentified
MYYIGLDIHKKTISYCVKDAAGCVHQEGKIGSTRRELDAWVRTLPQPRTMAMEATIFTGWIYDHLLPHAEAVKVAHPLMLRAIAAAKKKNDRIDAGKIADCLRCDFLPECHMAPTAIRERRRILRYRTLVMRQAVQMKNRISGLLMETGVSYNKLRLHRMGYFEQLLATSEEISDSIRPLLKLCREHIDRSIRMDAALLRSLEQDPLLSERLRRLRTVPGVGPITALTWALEIGDTSRFRTIKQAISYCGLCSAEKSSADKVMRTPISKQRNKHIQQVLVEAARLAPRYSEELALLYERERQRGNSNRATLAVARKLVTFMLAVERRQTDFVAAGEFRRTAAA

SEQ ID NO: 346041 - protein, 419 aa, unidentified
MSFKILKNNCCGLDVHKTWIYACIGITDSNGRTEYKQARFSSFTKGLQELCDWLVKYNCNDVCMESTGKYWIPVFNILEKNNLWVTLSHPKYTKPQKGNKTDRKDAKWICDLYMCGMVKPSFIPPADIRQLRDLVRYRFKLTCMITGEKNRAQNCLTVSNFKLDDVFSDVFGKSSRSITEQILQHPGETFDVAPFVDGRCKTPIEEIQAAVDGAISTEQAVKLRQCLNHIDELEKHQAEIEREIFRLSDKYESILNLIRTVPGFDKNPLTAIQVLSEIGGDMSVFPTAKNLVSWAGCCPRNDQSNHKIKSTRISRAGSYFKPVLVQVANALIKSKKHPEFTTRYRRIKARRGHKKAIIAICRMILTAIWHILTDLKPYTPEGFLESRPVNDSKVLTTSQALNLLKQRGYIIKDDIVPIT

SEQ ID NO: 346042 - protein, 345 aa, unidentified
MDVAAIGIDLGKSTFHLVALDQAGQIVLRRKLTRRKLVDLTATLPSTLIGMEACGGAHFLARLLREQGHDARIIPAQFVKPFVKSQKNDFLDAEAIAEAVQRPTMRFVPVKTEEQLDMQTLHRVRDRLVGCRTALINQVRAVLLERGLTFPKGRASMAHVVAELVAADTDEVTAATRELLALLWQEWQELQTRVEDLTARIEQAAAQDEVCRKLTAVPGIGPLTATALVSAVADGSMFRRARDLSAWLGLVPQQRSTGGKTKLLGISKRGNSYLRRLLVVGAQSARLHLNRERHPRLGGWLTRLEQRAYRNTVVVALANKLARTAWVILRQGRDYDPAFGLPVEA

SEQ ID NO: 346043 - protein, 419 aa, unidentified
MSFKIFRKNCCGLDVHKTWIYACIGITDSNGRTEYKQARFSSFTKGLQELCDWLVKYNCNDVCMESTGKYWIPVFNVLEKNNLWVTLSHPKYTKPQKGNKTDRKDAKWICDLYMCGMVKPSFIPPADIRQLRDLVRYRFKLTCMITGEKNRAQNCLTVSNFKLDDVFSDVFGKSSRSITEQILQHLGETFDVAPFVDGRCKTPIEEIQAAVDGAISTEQAVKLRQCLNHIDELEKHQAEIEREIFRLSDKYESVLNLIRTVPGFDKNPLTAIQVLSEIGGDMSVFPTAKNLVSWAGCCPRNDQSNHKIKSTRISRAGFYFKPVLVQVANALIKSKKHPEFTTRYRRIKARRGHKKAIIAICRMILTAIWHILTDLKPYTPEGFLESRPVNDSKVLTTSQALNLLKQRGYVIKDDTVPVT

SEQ ID NO: 346044 - protein, 343 aa, unidentified
MQAVTTIGLDIAKSVFQVHGIDAEGNVIVRRQLKRRHILAFFQKLPLCLVGIEACASSHHWSREIKALGHTVRLMPPAYVKPYVKRQKNDATDAEAICEAVRRPTMRFVETKTPEQQSCLTLHRTRHLFIRQQTAVINAIRAHLAEFGIVASVGRQGVDKLLDIVADARDTRLPEVARACLAALGNQLRMLKAQILNFDRMITAWHRSNETSKRLDALPGVGPALATALVASVADPKAFRSGRDFSAWVGLVPKQNSSGGKQKLGSISKQGDRYLRSLFTAGALAVIRYAKIHGTGHRPWLTALLARRPTKIAAIALANKIARMAWAMMARGERYREPVALAA

SEQ ID NO: 346045 - protein, 344 aa, unidentified
MDNHTQYLGFAGVDLAKKVMQIHFVTEDGEITDKSVKRAEFLDFFRNRGKCLIGMEACGSSQDWARKLEAMGHEVHLMSPKAVKPFVSGQKNDHNDAIGIYKAMFNGVRRVPVKSTEIRDLQTLRRIRSQVTKDKVKEINHVRGLLAEYGIVMGKSLNAFNKDISSALEILTERGDVSPLVAEELRTTVEAIKAKIERQKKLDQEIEQLARGCKNYENFLKTPGVGPFTAAMLCVLLCDPSIFANGRQFAAYIGLAPRSRGSGGKNYVTGIPSKFNCDSESRAVLVECAQAIARCKNKSLWVEEILRRKPKKVALIAIANKLARQVWAMANKGESFKQMAVLTA

SEQ ID NO: 346046 - protein, 315 aa, unidentified
MNTEKLVGVDTHKDTIACYCDGKFKEFKTNPNGFNQAIKWAGKAHWAIEGAYCFGRAFTAHLIKNGCEVYEINPLLTKNWRGALKVAAPKNDYGDAKVISIFAKTTNLEKISLETVKLKEKLSARISLVKHKTKTTNFIKMMYFTRGEQLPFKKLDTKKAINYLTSSDDLIISSNGKILKEIIEGIKVIEREIEKETPKKAKKLMELKGISFITASTIYAETKGKITTSSKLASYCGVAPIDCSSGKTTRMRNNRGGNRILNSVFYSLSIAQKRYNPISQEYYEKKISEGKTPRHARKCLARQLVNIVFNILKEN

SEQ ID NO: 346047 - protein, 340 aa, unidentified
MEDVAVVGIDLAKSVFQVHGIDAAGKLVLRRRLSRSKLLSFFTALPPCLIGMETCASANYWARELIALGHDVRLMPPQYVKPYVKRSKNDASDAEAICEAVTRPTMRFVGVKSTEQQSVLVLHRSRLVLTRQRTQLGNAIRAHLAEFGIVAPVGRQGFERLVGVIADRDDDRLPSPARSCLAMLVDQYRLVLDHLLETDRAIRAHSRASELGRRLQEIPGVGPLVASALLATVPDPQVFRTGRSLSAWLGLVPRQHSSGGKERLGGITKAGDTYLRKMLFVGAMAVIRHAERFGTRKPWLLKLLARRHPRSAAIALANKIGRVAWALMTSGERYREPAAA

SEQ ID NO: 346048 - protein, 357 aa, unidentified
MEVVFPRCAGLDVHRDTVAAAVRVQSSKGPAKVEVRTFTTTGGSLGPLADWLAENKVTIVGMESTGVDWKPVFHMLEDRFECWLLNAAHVRNVPGRKTDVADAVWLADLVAHGLVRASFVPPKPFRDLRDLTRARRTVVEEKTREVQRLEKLMQDAGVKLTSVASQLLGVSGRAILEKMIAGERNPEYRAELGRGRLRGKIPALTEALAGTFRSGHHGFLAAQLLARIDLCDEQIAELDQRIEVMIAPFVETVDRVTTIPGVGRVTAIVLLAEVGIDMSRFPTAGQLASWAGICPGNHTSGGKRLSGRTRHGNKWLRTSLTEAAWAAARSKNTYLIDAAKHLVEIHSIRHRRDVYHL

SEQ ID NO: 346049 - protein, 329 aa, unidentified
MSVHAQGREAVAAARPNAGIDVSKEHLDAAWADRAERVGNDAGGWDVLAAKFKADQVDVVVLEASGGYEKAVACALQADGLAVVVLNARQARDFAKAMGQLAKTDRVDAQVLKQFAGVIARHPQREHYVRALPEAQRSYVAALVTRRRQLIDMRRAESNRLELAHEAARPSLRAILRALDKQLAVVDHDIDQYVRQHFKNLAKLLDSVTGIGEVTISTFIGMLGELGQLPRRPIAKLVGVAPLACDSGKHRGARSIWGGRADVRSVLYMATVSAVTHNPVIREFYERLIGKGKPKKVALVACMRKLLTIANAMVRDGTNWDESKHSKPA

SEQ ID NO: 346050 - protein, 343 aa, unidentified
MKNHNTIGVDLAKNVIYVSVLSSRQKLLQSKEVTRSKFKQFLANQKPAMVAFEACATAHYWSRYAQSHGHTTKILPALSVAPFRQGHKTDKNDALAVAEAANRPNIKVAPYKTVNQQAVQSIQRSRELLVNDRTALSNHIRGILLEFGFAIRQGYSALYQHVPDILEDGENELPDSYRATLNMLYVRLRDLREDIDFMDKQIATVIKQNPACRQLTKMEGVGPISAILLFSSLGTGEAFNNGREYSAYLGLTPKQYSSGGKTNLVGISKHVANKRLRSILIQGARAYIHKAKLGNTVKDQWLLALIDRAGTGKAAVALANKNVRTAWALLTQGTEYQKTMLMV

SEQ ID NO: 346051 - protein, 398 aa, unidentified
MRITTKCQELDLPATQEHQATLYASLELSRSTWLITSLSPCSSKMSKHTIAGGNGPALLALLERLRAKASQLTGRPVNVVVIQEAGLDGFWVHRLLGADGIESYVVDPASIAVPRRRRRAKTDAIDGETMLRTLLAWKRGEPRVCSMVVPPTPGQEDRRRASRERVILLQERVRHVNRIKGLLAGQGVTHYDPLHKDRRTQLDVLQTGDGRPLPAHLKAELLRELTRIELVMQQIDAVEIERDAAATSELEGQQSPVALLGQLKAIGPQIGAVLYHEGLYRSSANRREVAAYAGLAPTPWRSGTIEREQGISKAGNPRLRHLMIELAWLWVRHQPDSALSGWFRSRVGNERGRMRRIAIVALERDMFKLSLHRPSPPPGHPCDYNSVGGRVGERAGAG

SEQ ID NO: 346052 - protein, 476 aa, unidentified
MKEHKEAKAKTKSEAVKPIREHEPDSAGIDIGAKEIWVAVPADRSDSPVRRFEGFTRDLMAIVQWLIQCGVRSVAMESTGVYWIPLYQLLEDAGLKVCLVNARHVKNVPGRKSDVRDCQWLQYLLSVGLLLGSFRPAQTICAARSVYRFRQNLLTTAAQYVQHAQAALDQMNIKLHHVIDDITGLTGQAIIAAILSGQRDPVQLAKWRDKRIQASESTIIKALEGDWRKEHLFVLQKAWDQSQQLQKQIQDCNEELLAYTRELEACTTIVQPARIMRLKTELMAAEPLNNQPAPKARKARKKTSKNQPEGPWPQELERFFGVDLTAIPGISVLTGLTLMTELGNDLSAFKTEHYFASWLCLCPDNETSAGKVLRRRTRRSQNRVRYALRMAASSLHRDKSYLGDKYRRLRARLGAPKAITAMAHQLARIIWTLVTRQVAFDLSVFAHHEKLNEQRRLKRLATTARQMGYQLTPLAA

SEQ ID NO: 346053 - protein, 371 aa, unidentified
MSELLAGAKPARLRVGVSPRPPWAQKPGTELGAAPTLAVPNPDSRLGLSPHSQGRVMDELSAVFVGIDVSKDRLDVHLRPTGDAFWVPRDAKGLDSLTGRLNDLPTALVVLEATGGFEATVAAALAGAGLPLCVVNPRQIRDFARAMGRLAKTDTLDAEVIALFAERVRPQARPLPEPERSHLAELVGRRRQIIEMIGMETNRRGHVVDKHLAKRLERHVLFLEKELAAVDHDIGQAIKTSPVWREAEALLKSVPGIGDVTARTLLAELPELGTIGRHQLAALVGVAPINRDSGLMRGRRTIAGGRSSVRNVLYMAALTAIRRRSPFRAFYDRLTSRGRPKKVALVAVMRKLLTTLNAIVRDRTPWQRLKA

SEQ ID NO: 346054 - protein, 343 aa, unidentified
MDHFAGLDVSVKETSVCIVDEMGKIVREVKVASEPEALLAVLANPAYHFKRIGLEAGPLSQWLYSALAEAGLPVICVETRHMRAVLKAQINKTDRNDARGMAQMMRVGLYRPVHVKTLRSQKLRMLLTHRKLLQSKAIAIDNDLRATLRNFGLKVGMVGAARFEARIKELIQNLPDLAVLVEPLLVVRRVLRQQLGILHRRLLAVVRDDAVCRRLMTVPGVGPVVALTYRATVDVPARFRKSKSVGAVFGLTCAKYQSGEIDRSGAISRCGDEMMRTMLYEAAQSMLFHSTRWSWLKAWAMQIARHRGMKKAIVALARRLAVIMHRIWVDGTEFRWTREVAAV

SEQ ID NO: 346055 - protein, 355 aa, unidentified
MNSEKYIGLDVHQATISIAVMDSTGKVVMESILETKAATILEFFEGLRGTLSVTFEEGTWAAWLYDLLKPHVAKLVVCNPRKNALLKDGNKSDRIDARKLAELLYLNKLSSVYHGETGIRMLRELARSYLTIVKDTARVMSRLKAVYRSWAIPCAGRDVYYRRHRDEWLGKITEAGVRRRTEQLYLQLDMLQHLRQQARRELLTESRRHPITAKLRQIPSLGPIRSALAVALIQTPNRFRTKRQLWAYSGLALETRTSGEYRYVKGQLQRSKKQISIRGLNKDHNHDLKGLFKGAATTASVRPGPFQDFYERSLAKGIKPTMVRLTLARKIAAITLTLWKKGENFDADKLKSQAA

SEQ ID NO: 346056 - protein, 331 aa, unidentified
MGKTSSSFCIMDAGRKIVREGKVRNGVADLDRAFDMYRGMRIVLEASTKAFWMADRLRELGHDPVVVDPGRTKAVGAALIKHDRLDARVLATLGVADVLAKVDAPSEAQRLARMPVVVRDGLVRCRVRLVTMVRSLLDSEGIELRGSALDRFAERVEELGDTVPEEIRAAIAPALEMIRELSERIAACGRQLAASMAADEDARRLMTAPGVGPVVAACFLFAVRDPQRFASGRQVGAYLGLVPSLYQSGQTHRRGRITKHGNRQARWALTLAANAVLRARKPSALRDWGLDLAARIGRNKAVVAVARKLAALLWAMWRNQREFEPRLVLAA

SEQ ID NO: 346057 - protein, 320 aa, unidentified
MMAQNDLVVAGIDVAKDKVDVCVRSLSLKRTFASTAEGRRELTSWLRRHKVGKAVMEASGGYEREWAKALRAAKIEVRIVDPKRVRSFAQSAGRLAKNDTIDAEMIAWFAETFDEARGQAYDAMREQLHQMVNARQALKDMQTKLESQGEHALPATVQRIHARIMKTIAVELVKIEAAISAMIQATPRFTELAEIIESVPGIGRTTSAALIAAMPELGQANNKIVAALLGVAPYDDDSGRRRGERHIKGGRRRTRNVFYMACLGAATQHNPVLKAFYDRLVAKGKEKKVALVACMRKLISILNIMIERRQKWDANRYAVS

SEQ ID NO: 346058 - protein, 427 aa, unidentified
MQSLKPIRMKPWKQITHFAGFDWARTHHAVLIVNSNGEIVADFEFEHTSEGWQRFVQQTAPWPDLAVAIETSQGAAVDQLLQLGYQVYPVNPVASESYRKRKAPSGTKTDHLDAWGLADALRVDGQGWKPLEPMDPLTQQLHLLCQDEVKLIEQRTMLVNQLQQALLEYYPAALQAFDDWTASFAWDFLVQFPTPEALVKAGPRRWQKFLHSHKLWRPETAQRRLAIFAQADKLKASDPIVAAKSQLALSLCQLLRTLEQQLKQYRQQIQTLFRNHPHHDLFGSLPGAGEVLAPRLLAAVGSDPARYGTHQVLQCLAGTAPVNYQSGQINRTRMRRACDKFMRHTVHLWADCFRRASAWGQTYYNQKRKQGMSHSCALRCLGQRLLKILFRMLTDRKPYDAELHALNQQKHGSWVLSLAPKPATPEL

SEQ ID NO: 346059 - protein, 431 aa, unidentified
MSERDYSKQVAKRQRIRDTTLVVGVDVGKAYNAVGFMNKEGKVLGNCAKVYNSREGFEQFMKMVEDLKARYGLKDVLIGMEPTGHYWRKLAYFAKEHGYEVRFIRTTALKHHRELDESASAKSDPRDALTITNITREGKYIDTVIEDGPLRQLRTLSKARERLLRYSVSAKNSLHAALDDYFPELHELFWSMGSRSLWAILERCPFPEDVRSIQVSTLKDLIVQSSRKKAGTLQKAKALYQAATKSIGLSPIGSADRYRVQMCLEEVKRTVRTLKGMDQQMKSMLQEIPAAPYLLSIPGIGALSAAVFLGELGNPAHFHNARQIVKYAGYDPQESDSGSWVSRKFISKKGRWLMRKYLFFMSMRVVVLTQYFKTYYERKLETKNRVGQLPRRKEILCAVAIKLIKVIFALLRDKRRFDDTRDTVMALSQAA

SEQ ID NO: 346060 - protein, 343 aa, unidentified
MIIGCDFHSGFQQIAIFDNQTGEIGEKKLLHPEQAAEFYRSQSGPVLVGMEAGAPCQWFRRLLSECGHELWVGDAAKIRAAEPRKQKTDRRDAELILKLMRQERFPRIWLPSEEERDVRQLLMDRHHRMRARTQVKNQLQALALNQGLQKGKKLWSEAGREQLRELPMMEHAARRRDDLLQRVGELDRQIAELDVLVRRQAEGRDDARRLMTHPGVGPQTALAMVLTLGEVGRFESAKKVGSYLGLIPGEYSSGNKQRLGHISKQGSSLMRFLLVEAGQTAARNDPQLRRAYARLAAKKSRAVAKVMVARRLAVRLYWMLRNDWTYAELARHAGEPESSCGAR

SEQ ID NO: 346061 - protein, 338 aa, unidentified
MYYGGIDAHKTYLTVVIVDKDGNEVHRDRRVPVADGEPLVAALEDFRPLEVVVETCPFWPWIYDKLASTEIGFHLAHASELEAIAKAKTKTDSVDAELLARMLATGLIPEAYPKPASQRELAYLIRHRATLARDRTRCCNRIHNQLQQRGLQMAREKLLREEGRRWLQEEAWRRLSPEQQQTVQTQLGFIDAIRPRIDRLDGRIKEEAQKHPGACLLQTIPGIGPYRSLLLVAEITPIARFPSPNHLVSYSGLAPTTRQSGTGDPRHGQIPRGANRWVRGELVSAIPTHLKATPDSHLSQYYQQLKERVGWATARVATARKLCRAIHAMLSTGEVWRG

SEQ ID NO: 346062 - protein, 412 aa, unidentified
MEVLYQTCCGLDVHLATVVACVRHPTKGGRRKSEVRTFGTTTRELLQLADWLTEHGVTYVAMESTGVLWKPVFNILEGSFAVILVNARHIKAVPGRKTDVKDCEWLAQLLEHGLLWASFIPPPFIPELRDLTRYRKTLIQQRAAEANRVQKLLESANIKLGLVATDILGASGRAMLQALVRGEREGTVLAELAKGTLRQKRARLAEALTGRFTAHHGLLLEEVLAHIAYLEATIARLSERIEAALQPYAEQVAHLQSIPRVDQTAAETIIAEIGLDMQQFPSAAHLASWAGICPGNYESAGKRKTGKTRKGNTWLKPVLTECGWGAGRARRTYLGVQYARLGQRRGKKKAVLAVGHSILVSVYHIVRNGVPYHDLGPEHFDRLATERLTRHYVHRLEQLGHRVTLAPEAEAV

SEQ ID NO: 346063 - protein, 338 aa, unidentified
MTSKISILAIDLAKGSFQVCAVGPDGRVIYNRALSRKRLATFLGEQPACVVAMEACATSHHWGRMAQSHGHEVRLVPAAYVKPFVKRQKNDRADAEAIAEAAIRPTMRFVAVKSAETQGRAVAFRTHQCLVRQRTQLINALRGHLAEFGLVAPKGPASLKLLENALADESSDLPDPVREMGAVYLEQIARLSDVIERLASELEDASKTDCELRRLCTIPGIGPVTAGAVAAFAPDLDTFDSGRNFAAWLGLVPRQRSTGGKARLGSVSKMGQTDIRRLLIVGAMSVIRWVVRKGGSSNRWLAALVARKPRMVAAVALANKMARMIWAMTTKQEDYRMA

SEQ ID NO: 346064 - protein, 377 aa, unidentified
MREKLRFLGLDVHAETIAVAVAEPDGEVRSLGTIANREDSIRKFIKKLGSPEQLRACYEAGPTGFVLYWQLTQLGVDCVVVAPSLVPKKPGDRVKTDRRDALKLARSHRSDDLTAVWVPDEGSEALRDLVRQREAAKQDQLRAKHRLTKFLLRTGRRPPQGMKAWTARYMEWLQQVRYTLPAQEATLVDCLNEVEHMSARVKRLEEAILEVVKLAPASVQEVIRGLQALRGIAHISAVTIAAELGNITSRFESARKLMGYSGAFPSEDSSGNRIRKGAITKTGNAHLRRIIVESAWSYRHRPWIGAKLRRRQEGVPAEITEIAWKAQNRLHKRYTKLMARGKEQRKTMTAVARELLGFIWAIGIKAEAMACKQQMAA

SEQ ID NO: 346065 - protein, 336 aa, unidentified
MRYIGVDLHTQQMTVCYLTDEGQSIKSYKLSEMGNFCEQLTVEDEIAVEATGNTRWFCEQVKMRVKRVWVVNPREFQVIRQSVKKTDERDAESLARFLRAGLLPEVRLKSELAERVQSLQQTREKLVSTRTALLNKVHSLLVASGRKAKKESLASTLGKQRILALEWSSSEQVELEVIFEQIESLTKSVKRLEIEIAAKGREFAGFENLVSIKGIGERSAALLLAVIGAVEDFADENKLASYFGIVPRVSNSADLVNHGRITKRGSKLGRTTLVQCTLVAVRYSPYLKSYYERLKARRGAGKAVIATARKFLGIIYHTLKNNWVFADFPNFVLAES

SEQ ID NO: 346066 - protein, 407 aa, unidentified
MSQILQRFVALDLHKKSVTIAAVFQDQEVAMKPRNVPLRRLHHWCRKNLRATDQVVMETGPNTWHSYDLVVGFVQRVAVADARKLRAMAGGAPKTDKRDALFPARLLATGMVPEVWVPPHHVREVRQLIAYRSRIVKRATAARNRLHSLLTRMHTSPPGGDPFGASNRTWWKRLDVSATQAMVVRQDLETLDSAESQIAEVNEHLAQLSIAEPWHDDTTFVMQLPGFGIVNTMTVLSAIGTIDRFPTPDHLVGYSGLGARISQSEDTVRTGRITKTGRRELRTALVQAAWTAVTTDNYWRDRFSGLERRIGAQKAVIAIARKLLVVIWHVLTRREAARHGDPQHTARKMFHWASKYRLATSARISRNELVHRELQRLGLGHLPITIRDGGWTLRFNVDAPAMPAATQ

SEQ ID NO: 346067 - protein, 460 aa, unidentified
MSPKRSKSRNGGKMPMVYSNAAAIDVGATMHMAAVRADRAPEPVRSFGTFTADLHRLVDWFTECGVETVVMESTSVYWIPIFELLDARGFTVVLVNARDAKHVPGRKTDVSDAQWLQRLHSFGLLRASFRPKGQIAELRAYVRQRERLLEYAASHIQHMQKALTEMNLQLHHVVADITGATGLRIIRAILAGERDPERLACLRHYSCHSSAETIAKALTGSYRAEHLFALEQALALYDAYHEKASACDARIETVLKELSIHRGQGHGPAPRASRRQNRTDQANALAFDVREALFALLGKDITTIDGLGPYLSLKLIAECGDDLSSWPSAKHFTSWLGLAPSNKVSGGKMLSSRTRRSGGRAAALLRLAAVTVGRTDTALGAFYRRLSARIGKAKAVTATARKIAVLFYNAVRYGMDYVDPGASSYETRYRTRVVNNLHRRAKAFGFVLQPLEPKVGAAVS

SEQ ID NO: 346068 - protein, 418 aa, unidentified
MGRLKIVYPICCGMDVHRDFVIACVASTNPQGVTSYASRRFSTFSGGLRDLRDWLAEQDCKDVCMESTGKYWFPVHNILEATCNVVVSHPKFVKAIKGKKTDKKDAQWIADLFKHDLVRGSFIPPEDIRQLRDLCRYWMKLTWCASGEKNRAQNCLTVSNFKLDSVFSNVFGKSASAIVSYMLEHPGEVFDVTPFVDGRCKSPIEEIQAAADGAFSPWQSEKLKVIRGHMNDLDRCKALVEDLILRLAEPYMHQVELLLTVPGVSEPMTAIRILAEIGADMTQFESSKHLCSWAGLTPQNNESAGKKKTTRIGKAGQYIKPLLIQCAMAASNPRSKLQPEILQKYQQLKKRRGTKKARVAIARRLLTAIYQILLKDEPYAPYAAPAKESIPESRVLTPDQALAMLRAKGYIIEASVAA

SEQ ID NO: 346069 - protein, 403 aa, unidentified
MTSCSYSAGIDWASQSHSVCVLDAAGRVELRLDIAHSQEGIERLIRQLKSFAGIAIAIERPSGLLVDALVEAGLRVVPIHPNVLKASRPRYRGAGKSDPGDAYMLADILRTDGHRFRALEPQSDEIRALRALVRTRDDLVAERVALANQLRSLLESFWPGAAEIFADIDSPIALAFAARYPTPQSAAHLGEKRLASFLAQHSYCGRRPVGMLLERLRAAPTGRADELEAEAKGELVRSLASILERLVAELAKLTARIEHTVANLADGQIIMSFPRSGRVCAAQILAELGSVRERFPNEAQLAAEAGVAPVTFESGKHRSVVFRFACNHRLRRALTCLADQTRHAHPWAADVYERARSRGCDHPHAIRILARAWVRVLWRAWFTRTPYQPHLHRSAAAFSATTG

SEQ ID NO: 346070 - protein, 380 aa, unidentified
MKKGSTAAAKQSSNFSQPKLAIGLDLGDSASWYCVLDEGGELRLEDKLSTTAKAMRDVFGRMPHSRVALETGVHSPWVSRLLSELGHEVIVAHARNVRLIGESRRKDDRLDAQTLARLARIDPRLLCPVKHRSAKAQADLTLIRARAGLVRARTALVNTARGLAKSYGERLRGCNVRNMNPEKAEGLSPELQTALQPLLAGIESLSERIREYNQRIEALAEQSYPEVALLKQVKGVGTLIALTFLLTLEDPQRFRKSRDVGCYLGLQPGRRNSGQREPQMHISKEGDPYLRTLLVQGAQHILGPFGPDCDLRRWGLKLAERGGKNGKKRAIIATARKLAVLLHRLWVSGEVYEPFHNSKLMMVTAAYDKNTPWERIKTSA

SEQ ID NO: 346071 - protein, 369 aa, unidentified
MTNALYVGLDVHRDTIAVAVAEEGRRGEIRFFGTIANKADSVLRLTKQLTASDKVPTFCYEAGPCGYGLHRHLTKLGFESAVVAPAMIPRKAGDRVKTDRRDAEMLARLWRAGELTPIWTPDEEQEAMRDLIRTRKQAMDAVKVAKQQLLSFLLRHGLRYENGSYWTKRHRRWLAELRRFRLTHQQLAFEELKRAVDQAEARVATLDQAVDEAVQTWRFAPVVDALRALRGVNTIIAATVVAEIGDMTRFENPRQLMAWLGLVPSEHSSGSTTRRGRLTKTGNALARTMLVEAGWSYRHPPKEGQPYLKRSAHLPQEIKDIGWKAQTRLCKRFRHLSNTGKPQPRVLAAIARELAGFVWDIARKTPLTA

SEQ ID NO: 346072 - protein, 409 aa, unidentified
MQYFVGLDWASREHAVCVVDGHGAVVAQFTVAHTAAGMTDLAARLAKVAPAAELRIAIERPTGLVVDILVEGKFAVVPIHPNAVKAARPRYSAAQGKTDLGDAYLLADLLRTDGHRFRTLTPLSDETKALRGLVRVRDDLVGQRVATANQLRCLLEQFWPGAAEIFADVDSPIALEFLDRYPTPQSAASLGEKRMAAFMARHSYSGRRTAAELVQRLRSAPPSVAGELEAEAKGECVRALVSVLRPLVVQLATLGAAIEHAVDAHPDGKVVTPLFRSGRICAAQLLAEIGDDRGRFVSADHLAAEGGAAPVTRESGKHRAVTFRWACNMHLRNALNTLADTTRHTNPWARSIYQRARDRGHEHPHAIRILARAWCRVIWTCWQQRTPYDPTKHRAARPFTLRLVDQEAA

SEQ ID NO: 346073 - protein, 414 aa, unidentified
MDIIHYRCAGIDIAKGDAKVAVRTVQSGRVEAKEEVKTFGSTTPQVLRLRDWLIDEQVTCVVMEATGDYWRTFYYLLEDAGFELLLANPRDVRNRPGHKSDVSDCKWLAELGALGLVGGSFVPPPPIRDLRALTRLRTRIARDRGIAAQRLEKVLEGASIKLSIVTKVTNVSSRLMLQGLAEGTVVEELVEMARGALRRKKAELADALTGQFTEHHALMVDILLNRIDSCNHDVEQLTERIDLLMQPYRRAHDLLLTIPGVSDNVADIIIAETGGDMAVFPDAKHLASWTGVAPGMNQSGARTKPAKTRPGNTYLQGALGIVAFAAAKTRKTYFSAQYRRITARRGPMKAMVAVENSVITAVWHMLTNDKEYVDPGPDYFTRRRPEAARTKAIQQLQNLGYQVTLTTPKEPVLS

SEQ ID NO: 346074 - protein, 346 aa, unidentified
MLYAGMDLSRKRLDFHLLDSEGATVEVGAAPPDADGLLGLTQRLDRHREPIQAAIESMNGARFVHDRLELAGWQVEIADAQKVKGLAPLACKTDRIDAWVLAELTRRDLVPAIWLPDPMVRAERERARWRLHLVRHRSSLKQRVHAVLLTHGKPCPVSDLFGARGRQLLARLGLPEPWQGTIEASLRLIDELDREISDCERELRRLGADHRYVPRLLTVPGIGWVLAYTIAAELGDISRFASPRKLAGYTGLCPRVYQSGERDLRGPLAKQGPKYLRWALVEAATHACTHPVYRDRYQHTKARIGKQRGAKVAQIDLARRLSEAIWHMLTRDQPFAPKGATDPLAA

SEQ ID NO: 346075 - protein, 323 aa, unidentified
MVASPVFVGIDVSKARLDVASTGSGEAWSVANASEGIAQLVQQLREVGPALVVMEATGGFEVPAAAALVAAEVPVVIANPRQVRDFAKSTGQLAKTDAIDAHILALFAERVRPQVRALPDEDARALDAIVGRRRQIIGMITAENNRLGFALPAVQKGIKKHIRWLERQLNDVDSDLDGLIRRSPVWQAKSDLLRDVPGVGPNLARTLIAELPELGRLSNKQIAALVGVAPLARDSGLFRGKRRVWGGRASVRSALYMSILSATKWNPVIRVFYQRLRNQGKPPKVAMVACMRKLLTILNAMIRDGREWDPSTPLEQLRLQHSC

SEQ ID NO: 346076 - protein, 368 aa, unidentified
MIVRIITYERSTLVNSEKYIGLDVHQATIVVAVMDSTGKLVMESILETKAATILQFFAGLRGTLSVTFEEGTWSAWLYDLLHSRVDKLVVCNPRKNALLKDGNKSDRIDARKLAELLRGNQLKPVYHGETGVRMLRELSRSYLTIVKDLSRVMNRLKAVYRSWAIPCAGRDVYYRRHRAQWLAKIREAGVRRRAERLYEQLDMLQHLRQQARRELLAESRKHAITAKLRQIPYLGPIRVALAVALIQTPHRFRTKRQLWAYSGLALETRTSAEYRFVEGQVRRSKKLLSIRGLNKDHNHDLKGLFKGAATMASVRPGPFQDFYTAALAKGIKPTMARLTLARKIAAITLTLWKKGENFDAEKLKSQAA

SEQ ID NO: 346077 - protein, 405 aa, unidentified
MSELGKDLVFAGVDTHKDTHTLCLLDHMGRAIGTFRFAADAKGCDALAGKIGGPATCAGVGVEGTGSYGAGLTRRLLELGYRVYEVMVPGRARRKPGRPKSDPADAEAAARQVLAGVDPSKPKDQSGRTEELRRLMIARDRLVQAASAMINAAKSPIVTAPEDLRRSLEGLSRKNLRSALSTLDPAAGGIVLALGSLGKAWDLQDREADAIEERMKRVLEANAPALLAIYGCGTVSAAALAVAGGGNPERLKSEAEFASLCGVAPLLASSGKTERHRLNRGGDRRANRALYQIAVTRMSYDQRTKDYVGKRKRDGKSKKEAIRCLKRYIAREVFRALRNPLEIKGPSWKDLRPARQALGITLVEAGKAPNVGFQKVSYAETGRLMNVRFLEEYDAWLKSQAKKAS

SEQ ID NO: 346078 - protein, 345 aa, unidentified
MKKGITIGMDLGDKKHQVCILNKTGKIITEEEVAGTRTAAVRFFKQYRGAVVAMETGPHSRWVSQIAAAAGLEVLVGNARKLRMIWQSRQKSDTRDAVMLARIARFDPALLCPIRHRGEQVQMDLEIIRARDLLVRERTQMVNHVRSVVKSMGERLAICSAESFGRKAKIPEALNEALKPMLEMIQELTKKIRAYDLIVKEAVANKYPETERLRQVGGVGPLTALAYVLTLEEPERFAKSRMAGAYLGLVPRLDQSGQIYKQLRITKHGDGYLRRLLVSSAHYILGPFGPDCDLRTFGLKLMQRGGKNAKKRAVVAVARKLAVLLHALWRNGAIYEPKRIQPLAA

SEQ ID NO: 346079 - protein, 372 aa, unidentified
MKTSLRYVGLDVHAETITVAVADRGGEVHAVGTIPNRPDPVAKMVRKLGPVERLRFCYEAGPCGYPLYWQLTRLGAACEVVAPTLVPTRAGDRIKTDRRDAEKLARCYRAGDLTPVWVPDAAHEALRDLLRAREAAKVDQLRARHRLGKFLLRHDRRRPAGTTAWTRRHRQWLATVSWDRPALEATFLDYLHEVDHAADRIARLEAAIDTTVAAAPAEMRAVIAALQTLRGIKQTTAATIVAEVGPLSRFRHPRQLMAYSGVIPRVRASGATVRRGSITKTGNAHLRRVLIESAWAYRYRPSCTGALKKRQIGQSEAVQALAWKAQHRLCGRYRRLAARGKMKPKIVTAVGRELLGFIWAIGVDVESTSTAV

SEQ ID NO: 346080 - protein, 343 aa, unidentified
MHIASIGIDLGKTNFHLVALGEHSKVAVRKKFSRKQLLAYTANLQASLIGLEACSGAHFIGTALRNQGHEVRLIPAQFVKPFLKSNKNDFLDAEAIAEAVARQNMRFVPIKTDDQLDLQAMHRVRDRLVHRRTAVINQIRGFLLERGLSFAKGPANLRNRMPAILEDAEQNITPRMRMLLDQIWQEWKRLENDIAIISDEIERISNEDEACQRLRQIPGIGPLVSTATVAAIGNGAAFNKGREFAAWLGLVPRQHSTGGHAKLYGISKRGNIYLRRMFIHGARAVLLRVKNKTGSFGPWVHQLELRAPRNKVIVAIANKLARIAWAVLSKQMDYRPTPVVATA

SEQ ID NO: 346081 - protein, 402 aa, unidentified
MKNTAARKRKQVPEGYLIIGVDPHKKKHAAVAITQDFTIHDRFKFDNTREGLEFLLRRIRIEMVKSNCRGVMFAIETGGHYWRNVAYYLDERDIPFRFINQYTLKRRREGKDLNRRKNDYRDSEVAAQLLCTGEFVESVIPQGVYAELRTAHNAYRRLVKERTRIINLVKGLLDGLFPEFTQVFKDPCGLTALSVLSTGSIPGVIAGMTGEEFVATIEAKHRGRLMRKKLMALHYAARSSIGIAAGAKSLSSEISFLAEKHEFIRGHICIIERTLVKLVNEAEEGKYLLSIRGLNYIAVAGLLAELGCFKSYRSAKQMIKLAGSNPTESESAGKKKSRTPMSKQGRPVLRYCAWTAVIPMLRFNSDFRAWAKQRRERPAHANPLGGREIVGAVLAAPVRVVN

SEQ ID NO: 346082 - protein, 421 aa, unidentified
MLILYQRCAAIDIGKDVIAVAVRLPGDGAEHRQTIKQTFKTFYGVLKHAARWLTEQQVTHVAMEATGIYSMPVYHALIEHGGFEKVLVCNAGHVRNVPGRKTDLSDAEWLVHLLECGLLRGSFIPPAQIKAARDVIRYRTKLTESRTSELQRLGNVLQDAGIKVDSVASTITTQSVRAMVEALIDGERRPLLLAELAKGRMRAKIPDLQRALEGRFDDHHALMCRLHLDHLDHLDEMIARLDTQIEDMMQPFRSQRELLTSIPGIGPFAAAAVISEAGADIAETFPSAGQFASWIGVCPGNHESAGKRHSGKPRKGNQHLQHVLVECAWAASRTPGYLQSLYRWHVRKFGGSRNPTAKNKAIVAVAHKLAIIIWHVLATGKPYTDLGADYLDRRVDPAKETRRLIARLQALGHTVTIEPAA

SEQ ID NO: 346083 - protein, 450 aa, unidentified
MSPLALDVVTKTDKTPVLGRMLSKYVGRKTSSIENGITKARNHSRQRGNIMRVVFGIDVSKASSEVAILVNGEKVHGYTIPNDAIGFNRLLGDLKTVHQPEIVFEATGVYSRRLQAFFEDNSYTYTRLNPLESKKQLDSLRVRKTDKIDAEKLAMSQFILNRKPSYVQEALYQELRDLSRFYQNLTEDIVCAKNRLHKVLQITFPELENILSAPTGEQYWNLVITFPCNSFVLESDDATLTAIIRQSTAKRISEKRVTYLVDKLTKLANQSYCAVKKTSPVIEEVKYYAGELLRLSEYRQGVLEEMVTLAQPLPEYEILLSIPGITETTATSIIGELGDIRRFHSANQINAFIGIDLRHYESGDFLAKEHITKRGNPYAIKVLFKCIHNIASAGYTNPCHIADFYEKRKRQSQVTSTKPHTIASIHRLIRTMYYLITHNKLYDYTSIQNR

SEQ ID NO: 346084 - protein, 345 aa, unidentified
MQPMYYIGLDVHKQKISYCVKDSSGKIYAEGWIPATRFDLDRWMKTLPQPWSAALEATMFSGWIYDHLKPHAAALKVAHPLMLRAIAAAKKKNDRIDANKICDCLRCDFLPECYLAPTAIRERRRTLRYRNLLVRQMVQMKIKISTLLMEAGVSYNKQRLHKAGYFRELLATNPDIDESLRVLLRQCREMVVRLGKMESALIHSLQQDRLLVERVERLMSIPAIGPITALTWALEVGEVQRISSIKKAISYCGLCGDEQRSANTAQRTPLSKQRNKHLQTTLIEAAKMAPRYSPTLALLYDREKQKGNANRATLAVARKLVAYLMAVDRGQTHFLVIDQETRTAA

SEQ ID NO: 346085 - protein, 399 aa, unidentified
MLEQAWAGVDVGKEHHHCVVIDAEGRRLLSRRVANDEAVLLALISDVTGLAGQVRWAVDISTGEAALLLALLAAHEQPVCYLSGHQVNRAAGGYRGSGKTDAKDAAIIADQARMRHDLAPIRLPEEVIVELRMLVARRRDLQSDRVRAVNRLHETLLTISPALEKALDLTNQGPLILLTGYQTPAAIGQLGVTELTEWLRARKVRRAGELATRAVAAANAQQIALPGEALAAHLAAQLAEGVIALDEQIKHTDKLIEGRFHRHPAAPVILSMPGIGFLLGAEFLAATGGDTAAFATPDRLAGYAGLARAPRDSGRISGNLYRPKRYNRQLQRVFYTSALISIRCCAESRTFYDRKRAAGKRHNQAVLALARRRVNVLWALLRDHRPYQASPPVSTAAVA

SEQ ID NO: 346086 - protein, 364 aa, unidentified
MYDSMTTVTVGLDVHARSIRVAAVRADELLEERTLPYDEEAVELVLRRWPVVRCCYEAGPTGFGLQRFLVERGIDCRVVAPGLVPQRPGDRVKTDSRDARKLARLLAGGLLEPIHVPSRELEAARDLVRAREDARLDRMRDRHRLSRFCLRHGRALPTSSWTVARRKWLREQRFQFAAQQQTFDSYVHTVDLVDARIQALERAIRETAEEEPWRRLVASLRCLRGIDTLTALALVAEIGDFDRFSSAEEFMAFVGLVPSEHSSGDQRRQGSITKVGNSHVRRLLVESAWHARRRPTVGYQLARRQRGQDAVVVERAWRCQQRLYQRWQRMAGRGKPQQKIVVACARELAGFVWAIATEQPLRST

SEQ ID NO: 346087 - protein, 331 aa, unidentified
MSMQQVPAHRRVVIGVDTHKYVHVAVAIDDLGTLLGHRSFAADSGGYIELIDWALGFGGKVTFGIEGTGSYGAGLASAVRRRDIGAIEVVRTDRRDRRLRGKSDTIDAENAARAVLAGQATAIPKSADGAVEMIRQVKVAKDIAVKARTAAMISLKQVIVNSPPELREELQPLSKMALINRCAGLRPGQVTTVLASSKYTLRAIARRWQQLNAEIAGHEKVLTQLTAQAAPELSAAFAVGPDTAAEMLIVAGDNPDRVRSEPAFAKLCGVAPIPASSGMTTRHRLNRGGHRQANAALYRVVIVRMQHHSRPRPTSPGAPLKAKPRLRSSAA

SEQ ID NO: 346088 - protein, 353 aa, unidentified
MLHAGLDLSRRRLDYCLLDEQGERVEVDAAPPDADGLRGLVDGVGRRHGPVVVRAAVVRAAVESMNGARFVHDTLERCGWEVEVADAQQVKGLGPLACKTDRIDAWVLAELSRRALVPAIWLPGFEQRQERERARWRLYLVGKRSSLKHRIHAQLLAFGHTCPVSDLFGAKGRKILACLDFPEPWRGGVLAAVAMIDDLDRQIAAIDRELKQLGADHRYIPLLKTVPGIAWVLSDTIAAEIGDIHRFSSPKKLVGYTGLCPRVYQSGGTDRRGPLTHAGPKYLRWALMEAALHACRHETYRDRYQRNKARLGKQRGAKVAQVDIARRLAEAIWHMLTRNQPFAPAGATRALAA

SEQ ID NO: 346089 - protein, 390 aa, unidentified
MERPMQKLNDLSRSLTALEPNGTLIAVIEMSLSSWLVAGIVPGVERQPLKKLAVDESALLKLLHRWREEAEKAGRRIERIAVAFEAGRDGFWLARWLKARGLEAYVIHASSVAVSREHRRAKTDRLDTELLKRSFLGWLRGERDHCKMVEIPTMQDEDAKRPNREHDSLIGERSRIVNRMKAALVRLGIRGFNPKLKRATTRLDGLHTPEGEPIPPNALAELRRDMERRRLVNNQIRQIEEERLERIEQAPCDGAHVMVRLLARVMGVGIETADMLVHEVLSRNMRDRRAVARYAGLTGSPDESGRKRREKGLARSGNARVRRGMIQLAWRFLLHQKNSALTKWFRSRTENARGTRKPMIVALARKLLIALWRLMREGIVPDGVVLRPAQ

SEQ ID NO: 346090 - protein, 419 aa, unidentified
MIAVGIDISKAKSTVAVIDSDGTVLASPFTMAHTQPEMEAFVTYLKGLGEPTTILMEYTGHYHYPVLKKLQDEGFPVCIVNPYQMKKYGDVEIHKAKTDKKDALRIAAYALEKSYKLVPYSSMEQKYEDLKFLSRQYSQRITYVAKLKVQLIALLDQTMPGITRILPLNSRNPEKCALLLFIKRFKSFDEIQRIGKARFLASYDVLAKKASERSASSKGLSIYELAVDSITTRGEDPYIWLSQNQCVDLLSATQNAADEIISQMRNIAETIPEYKVLRAMHGVGDRLGPIILAEIGDVHRFHSGKALNSYAGNDAPPYQSGQFESRNRHISKRGSSTLRKACYEVMQALKLTKPQDDPVYLFMLKKEQEGKPFNVAKMAGVNKFLRIYYASRLSLDSRLYSDNIIYRVKTTTVCAVIAS

SEQ ID NO: 346091 - protein, 341 aa, unidentified
MKEFSRIGVDLAKGFFQVHAVEREGTPAVTRKLGRAKFLGFFAAIAPCRIGMEACGSAHYWARELRAMGHEVALIAPIYVKPYLKRGKNDANDAAAVCEAMSRPEMRFVPVKSADQQTTLMLHKTRDLLVKQRTMTVNALRGHLSEFGLIAAKGIHRVKDLLALAETDERLPADARAATRILAADIGRLDASIDELEAKIAASSASHPVSRLLDEIPAFGPLIASAMVAFNPDPSAFRSASDFAASLGLTPRQHSSGGKERLGGITKAGNRYLRKMLVVGCTSVLRVAHKRKGALAEWIVSLRARKPERVVAVALANKLARIGWAMMSTGEGFRTELYSKA

SEQ ID NO: 346092 - protein, 374 aa, unidentified
MGNDSEAFVAFDSSKSRNAVAIAAAGRAGEIRFLGEIENSAAATAKLVRKLAGKHARLTFCYEAGPTGYGLYRQIEKLGHNCIVVAPSLIPKKPGDRVKTNRRDALNLVKLLRAGELTAVWVPDPRHEAMRDLTRARGAAVEDLRSKRQQVSSFLLRQELHYVGKKTWTKAHMSWLASLKLDHVEQRIAFEEALLAVRQAQERIERLEQAIRAAVPDWSLSEVVTALMAMRGFDLVAATAFLAEIGDLSRFQTPRELMAYLGLVPSEDSTGDTIKRGPITKAGNRRARRLLVECSWSYQHPPRVGKKKQEKVAAAPRPVREIAWKAQCRLSARYRALIRKGKHKTVAVTAVARELAGFIWAVSREVTTARPAAS

SEQ ID NO: 346093 - protein, 352 aa, unidentified
MVAEVVDAVVGVDTHRDTHQAEIASPAGVPIATTQIPNTSAGFTALLAWIAEHSPGPRILLAIEGSRSYGIGLTRAAAAAGLAVIEVGRPARTQRRGVGKSDPIDAHLAVLTALRLDADQLPTPRSDGDREALRILLGARAELVATATTQTNRLRALLLAGNDTDRQTARSRLTDTHLATLARRRLPPDASREQAIRHAEIRRLALALREGARQLSANRKQLRDLVTDLAPALLDRPGIGPICAAQAIVSYSHPGRVRNDAAFASLAGVCPVPASSGRTIRHRLSRGGDRALNRAIHTIALTRLRTCPRTRAYATRRRAEGKTTREIRRALKRYIARELYRQLTAAMTLDNT

SEQ ID NO: 346094 - protein, 346 aa, unidentified
MEVYIGLDVSLASTAICVLDEKGKIVTEARVASTPEALVGFLRKLPRGIAAIGLEAGPLSQWLHKGLTEAGFEAVLMETRQVKGALKAMPIKTDRRDAEGIARLLQMGWFRPVHCKTVSSQGMRALLTTRKSVQDAIIRMEISLRGVLRNFGLKLGPVSKGRYEARVRELVIGNAMLEAAAEPILSARTALRRELADLEKLVGNLARQDRACRLFMTMPGVGHVIALTFISAIDDPERFRRSKDVGPWVGLTPGRDQSGERDVVGRITKAGDAGLRAALYQAATVMLNIARPNWLKAWALRVAKLRGKKRATVALARRIGVVLHRMWRDGTEFRFTREEAMALRTA

SEQ ID NO: 346095 - protein, 327 aa, unidentified
MRQAKSLTEKAKTTVAFDVCKAALDVHIRVDGKAFQVPNTYEGFDQIALVLADYDVSLLLMESTGGYEDAAACNFQSLGYDVAVINPRHGRNFAMAMGKFAKTDRIDAAILADFAAVIDSRSDRARFIKPPTDEERKFLSQMVARRRQVVDLLSTEKQRLSHADDYAKQSINKVVAFIESQLDEINKDVSFYLKKNYSGLSKMLSEIPGIGELSVGLLVGDVPELGQIGNRQLSAVIGVAPFNHDSGKMRGKRCISGGRQNVRNVLFMGVMSATRYNPVIKAFYDRLINKGKPKRVAYIACVHKLLRIINAMVRDGTSFNPDLHAVS

SEQ ID NO: 346096 - protein, 340 aa, unidentified
MNEITTIGLDLAKNVFQVHGIDATGTTVLRKRVRRGQVLAFFASMPRCLVGMEACATAHYWARELKVLGHEVRLMPPQYVKAYVKRNKNDAADAEAICEAVKRPSMRFVPVKTAEQQAALLMHRGRELLVRQRTMLANALRGHLAEFGLIAAQGLHKVAGLIAIVRDDKDERVPDMARQALRVLAEQIDELETRIAAIEAQVMAWHKRNPVSQRLATIPGIGPIIATAIAATVAEPREFRSGREFAAWLGLVPRQNSTGGKARLGGISKRGDSYLRRLLVNGAHAVLLRSKAGKADPWLESLRTRKHRLVVAVALANKTARIAWAIMSRGDTYRRAAATA

SEQ ID NO: 346097 - protein, 354 aa, unidentified
MSQTPNTAIAVIGIDIGKNSFHVVGHDARGAIVLRQKWSRGQVEARLANIPPCLIGMEACVGAHHLSRKLASLGHDARLMPAKYVRPYSKGQKNDFNDADAIAEAVQRPTMKFVATKTAEQLDLQALHRVRERLVSQRTGTINQIRAFILERGIAVRQGIGFLRTELPTILATRTDALSPRMLRVIEELGVDWRRLDQRIDGLSGEIEALALQDQACSRLMTVPGIGPIISSAMVAAIGTGDVFSKGRDFGAWLGLVPKQISTGDRTILGKISRRGNRYLRVLFVQAAWVVLVRIKNWERYGLKSWIEAAKRRLHHNVLAIALANKLARIAWAVLAKGRAFELTRTDDAGVRPA

SEQ ID NO: 346098 - protein, 378 aa, unidentified
MNRIIKIGMDVHTTNYTLCIFEPSFEHNGTVHCITQVKPEVKNIIRVIETFKKKHENEELNIVCGYEAGCLGYSLYHELKEKGVECVILAPTTMKTEKGGRKLKNDYRDAKMIAECLAYGGYSAVHVPTELDNSVKEFIRMRDDIKENLKSIKQQIIAFLTRNGKQFEGKSFWTRKHIDWINTISFSEPLLQDTLKEYMIEYNHLCDRVETLDRQIEEISLKEEYVEKVQQLQCLIGIKTHTALSLIVETSDFNRFKKGNMYSAYLGLIPGDDSSGGHEKKLGITKAGNNHLRRLLVEAAQGYTRGRVGFKSKDLKSRQEKCSSEVVAYADKANERLRRKYYRMILRGKKYNVAKTAIARELACFIWGIMTDHIDLCN

SEQ ID NO: 346099 - protein, 337 aa, unidentified
MRFCGIDLHSNNSVVVVTDETDKVLLSQRCPNDLSTILTLLAPHRDELTGVVVESTYNWYWLVDGLMAEGYAVKLANTVAMKRYDGLKHSDDETDAAHLAHLLRLGILPTGYIHPPAERALRDLARKRVQLVRSRTQHVLAVENILARSTGSRPSAAAIKRLVPSDIGTLGLAADVALAVQANLAVIATLNLEIGRLEARLLEGAKLRPDYVRLKSIPGIGEVLAIVIMLETGDVTRFARVGNFASYARCVDSARYSNGKKKGEGNTKNGNAYLVWAFIEAANFARRFNDEARRFFERKKAKTNSIVATKALAHKLARASYHMLKEGQPFDVKRCFA

SEQ ID NO: 346100 - protein, 337 aa, unidentified
MEPEYVGIDLHRRRSVIVRMSPDGERLSTEKIDNNAMALAAAIAPAGPNPKVVVEACYGWYWAADVLAECGAELHLAHPLGMKGITSSRRVKNDVKDAVLLADLLRLGSLPEAWVAPPGLRELRELVRYRMKLVQLRSGLKAQVHAVMAKEGVLPTRTNMFGPGGQAQLDEMQLGDAYRIRIDSLRDLIDSFDEEVAGLEALIHDVLKDHSGYRAILEIDGVGRTFAAIFVAEIGDVTRFPGPRQLCSWAGLTPKHFESDTTLHRGGITKQGSPLVRWAAIEATGNRRGGPKLRADYHRIAQRRGTAKARVAVARKLLTLVYYGLRDGEIRCLAETG

SEQ ID NO: 346101 - protein, 313 aa, unidentified
MKKNSTVATRRKQIFKHKQLTIGMDLRDRFTYYCVLEEAGEVLVEQKLPTTRQAMKRVFGTMPKSRVALETGAHSPWVSRLLAALGHEVIVAHARNVRLIGESSRKDDRLDARMLARLARLDPRLLSPVQHRCAEAQVHLTVIRARAVLVGARTALVNAARGLAKSYGERLRKCGTQQVNRNSASALSAELRAALEPLLAEVESLNQRIAEYDRRIEQIATEVHPEVERLKQIKGVGTLIALTYVLTVGNPRRFRRSRDLGCYLGLRPGRRNSGSSQPQLHISKEGDRYLRTLMVQGAVWTRQRFAAMGIETG

SEQ ID NO: 346102 - protein, 345 aa, unidentified
MQESFYVGLDLGSSHCFQSIINSDGALCSARSFPTSEHHLRAAFANLQGDVRVHLEAGELSNWVASIIQPLVSEVVVSHPRSLAWIGKDSQKDDKVDARKLAELLRIGRVHRVFYQSDNSRQTFKYLVTHYEQLSREQARFKSKIKARLRTLGIIRKDSRLFSNNGQTVLLDEIESVSIKQMLTQSFAVLNQMLASFDSAKQAMIEFSQQFREVQLLQTAPGVGIITACRFVAYLQTPHRFSNKRKLWRFCRLGVTRRESNGKRLAHPRLDSAGVGSLKDVSRKVFEAARRTKSANSFKQFYEQSLANTKNAVHARLSTQRKILATLRAMWMSNQPFHNDLTEIG

SEQ ID NO: 346103 - protein, 293 aa, unidentified
MEANGARVIGVDTHKDSHSAAMLDQLGAVQAAVDVAANCGGYRRLLSWARARSGERIWVVEGTGSYGAGLAGFLSQRGEVVYEGDRPQRRAPGAAGKSDQLDAIRVAREALSRQHHAIPRRRGQREAIRVLATARGGAVGAYRQGLNQLYALVVTAPEPLRERLIRLKGEGLVRACRRLRSSGDLETSITAATLRRVGRRVAELEAEAAEYERQLTELVASSAPSLLAEPGLGALTAAQVLVSWSHAGRLRSESAFAALAGVAPVPASSGRLVRHRLNRQGDRQLNRASTSSP

SEQ ID NO: 346104 - protein, 343 aa, unidentified
MQAITTIGLDIAKSVFQVHGIDAEGNVVVRRQLKRRYVLTFFQKLPPCLVGIEACASSHHWSRELQALGHTVRLMPPAYVKPYVKRHKNDATDAEAICEAVTRPNMRFVATKTAEQQSCLTLHRTRHLFIRQQTSVINAIRAHLAEFGIVAPVGRHGVEQLLGIVSDASDKRLPDVARACVAALGAQLQRLKVQILEFDRMIRAWHRSSEVSRRLDDIPGVGPALATALVASVADPKMFRSGRDFSAWIGLVPKQNSSGGKDRLGNISKRGDRYLRSLFTTGALAVIRYAKIHGTKHRSWLTALLTRRPTKVAAIALANKIARMAWAMMARGERYKEPAALAA

SEQ ID NO: 346105 - protein, 342 aa, unidentified
MAVIGIDTHKRTLAACAVDPLGAALAERTFEEDPEGLAELVRWARRLAADGRIGVEGSASYGAPVARMLIAAGLEVREVPPHLSRWERARTRRAGKSDPGDALAIARVTLRERTLPPVRLADRTEELGLLVDAREELVQAQTRTRNRLHAHLVVLLPGYGRTAAQLVTTRQLDAIEALLAPLGGTRAALARGLLEDVRSLGRRAKELQLQIAGRVAGHPLLGLPGVGDITAAWLISEVGDVNRFGSPAAFAMLAGVAPIPASSGESQRMRLNRGGNRRLNRALYTIALVQAWHHPPARSYIARKRSEGMSWKEALRCLKHRIARPVFRLLQAGQTRWTAVAP

SEQ ID NO: 346106 - protein, 448 aa, unidentified
MEPQEIDDEEHEQVLERVAAVDVAKASGMVCTRVPHQSRPGKRRTRVWPVDATTNAVLELADHLVAEGVEKVTLESTSHYWRIWFYLLESAELDVQLVRAQDVKQAPGRPKSDKLDAVWLAKLTERGMLRPSFVPPAEIRRLRDYTRLRADLTCERTRHYSRLEKLLEDALIKVSAVASSLAAKSVRDMLEALIGGERDPKILASLARGRMRAKHDRLVQALAGRFDGHHGELARLLLDQIDTLSAQIGRLTTRTGELIAAIPPAQGIDADGTTGPAAGHGKNAPVLPAVDRLDEVTGIGSGGAQAIIAEIGLHMSVFPTAAHLVSWAKISPQTIQSGTRSRAGHTGKGNPYLRGLLGEAAAAAGKTDTFLGERYRRLVKRRGKLKALVAIARSILVIVWHLLDDPAARYHDLGAGYYASRVDKNRKMRNHVRQLEALGYTVTLTQAA

SEQ ID NO: 346107 - protein, 334 aa, unidentified
MARLGQEGRIQQRQIWHQGGVTLSIFAGIDVSKQHLQVGLAPGGENWEVTNDDPGIAAVVERLGKEAVSLVVVEATGGWELPVVAAAAAAGLPVVVCNPREVRDFARALKRLAKTDRLDAAVLAEYAQRVQPQVRPLVDAATQELQALVTRRRQLVGMLTAEKNRLGAAPPRICANIQANIDWLERCLAELNQDIEDTIRSSPMWRAKDRLLQSVPGVGPVLSMTLLASVPELGTLTRQQLAALVGVAPFNQDSGQFRGRRVIWGGRAAVRATLFMATVVAVRRNQVLQGFYARLRLAGKPPKLALTACMRKLLSILNAMARTNTPWQPRFIQA

SEQ ID NO: 346108 - protein, 360 aa, unidentified
MSKISKPAVGKKTSMDKPEMTMGIDVGDRYSHLCLLDEDGEVVERDRVRSTESAFRRHFEGASRLRIALECGTHSPWMSRLLKQFGHQVVIANARKIPTITESESKNDRNDAEQLARLAAFNPKLLSPLEHRSLARQQDLNLIQARAVLVKARTMIVNALRGLVKSAGGRLPTCSSKSFPDRAAGAVPPALTDVAGPLVEQIARLNVQIGAMDQQIEKLAAKYPEIGTLRSAPGVGPLVAAAYVLTLDRPNAVPSSRSAGAFLGLRPGQSQSGDSDPERRITRTGNTYLRCLLVQSAQYVLGRFGPDSALRRWGLKLAAGGAKRAKKRAIIAVARKLAVLLHSMWRSGQRFEPFPQPVQG

SEQ ID NO: 346109 - protein, 320 aa, unidentified
MAKQVEERILGVDVAKSWLDIYDAVSGESTRIDNNKAAVVAWLKARPDLFKVAVEATNRYHELFIEQAHAKGHQVFIIDAFRLSRYREAVGHRAKTDRCDAELLARYLQQEQAHLRVWEPRDPRQTRLWQLMKRRAMLVKTRVSLRQSLEDIGALDEAAKELIRHCDRLIRKVERELQMQAEQLDWQQDLDLARGIPGVGNTTSLALVAAFHRHRFRNADAFVAFLGLDVRVRDSGRHRGRRKLTKKGDPEVRRLLYNAAMSGCKQPHWKAYYRSLRDRGLSGTAALMALARKMVRVCFALLKMQVPFAPETTKTGCMAS

SEQ ID NO: 346110 - protein, 314 aa, unidentified
MSPAIFVGMDVSQETVDVAVQPGTAFQIANDEQGITGAVERPRALQPTLIVLEATGGLEVPLAGALAAVGLPAVVINPRQVRDFARATGQLAKTDRLDAQILVRFADAIRPPVRPVPDEQTQALAALVARRRQLIEMLTAEKNRLRLAARPIQKRVQAHVTWLEKELESTTADLTTTMRESPVWREQEEVLRSVPGVGPVLTTTLFANLPELGTLTRKEVAALAGVAPFPRDSGTLKGRRVIWGGRAHVRAALYMAALVATRRNPVIRTFYQRLCQAGKAKKLALTACMRKLLTILNAMLKRGTAGRGAASQSA

SEQ ID NO: 346111 - protein, 338 aa, unidentified
MRLYAGIDLHSTNSVVAVLNEKDNVVGRARLPNSLETVGAWLAPYRDALVGVVVESTYNWYWLVDGLVEQGYTLHLANTVAIQQYSGLKYRDDASDARWLAKLLHLGVLPEGYIYPRKERAIRDLLRKRTQLVRQRTSHLLSIQNLFSRTTGMCVNANRVKRLTPEAVDEVFEDGNVALAVKSNLRVMNCLQEQISEVEGAVYTQVRLRKRYKRLISVPGIGRILALTIMLETGDINRFDGVGNYVSYGRLVGSLHVSNGKRKGSGNTKNGNAFLCWAFIEAANFGIRYDQAIRRFYDRKKARTKRIVALKAVAHKLARACYHMIKEDVEFDVGRAFA

SEQ ID NO: 346112 - protein, 363 aa, unidentified
MKKLQQRGKRFKGWSVGLDLHKGFIQYSVLDRRGNEVAHGRVDANRAGLLGVLEPWRAKGPVQVSLEACGCFLWVFDALAAALGRERVHVAQPAKLKAIANSQEKTDATDAWWLAYYLYEGRMPEAFVAEGALRELRISVREQRAVTSALADLKRRFRSLLAQGGEPLRKNAFETQVGQAEIEALLPRQSGMQGEALRRLWGRIKALRQERDEWAGLVDAQAQAFPEIGLLRSELAGVGPTLAPILWAELGSPKRFHSAKAYAKATGLTPGFRETGGKRQSLGMTRLGSPHVRWALTRAIIGCLRSRRGPGLAVKTWVETRWKRKPKKVTIVAAARKMAEAVWRLFEWGEAFDLRRVYGAAAG

SEQ ID NO: 346113 - protein, 351 aa, unidentified
MRKIAYLAMDVHSKHCVLGDMDYRGTFKGTKTFPTSEQNIIKALKAIKAKNKSLTLEEGNLAYWAAQVAAPYVTEVIPCDPKENALIYRGSKKNDKVDTQKLCRLLRLGELKRVYHPENDERAIFKAAAQHYMDLRDQQIALKQKIKAMYRHWGVIDVAGEALYSTAKRNDYFRQIKHLEIRNQVSRLYSVMDQTESMQERALKAMKQLGRKYPEIKQFKKIPGIGEILAHFFDAFIQTPHRFANKHQLWRYCRLGVTDRSSDGKPLGFKRLDRSGVSELKSLSYRAWMSALRSDNEVRQFYTTSLKRTFNRVHARLNTQRKIIATMYGMWKRGEPYNPNLFLDSSQSGAV

SEQ ID NO: 346114 - protein, 370 aa, unidentified
MLDTTTFVGLDVHARSIKAVSLDVMTGEVRAATFGYDAGAVAEWVLSVDPKARCVYESGVTGFDLQKRLSGLGVDCVVGAVSKMIKPSADRRRKNDRNDAEFLARMLSVGNVVEVWVPDDECEAARDLTRALEDARDDLSRSKQRLSKFLLRHGLAFDERTPTGRRKGNWTRAHWSWIESIEFAEKADEEVLAYYVDAVRRAAEEKARLEGLVGAEARKPRWRKRVDSLRCLKGVDTASAADLVFEAGEFSRFGNARSFASWVGLTPSEHSSGESDRRGAITKAGNKHLRKTLVEAAWHYLSCSARPKDPARGQAPDPGARRHAAKGVRRLVERREALLARGVHGSKANVATARELACWVWAVGLMAEEA

SEQ ID NO: 346115 - protein, 408 aa, unidentified
MQVLYPRCAGLDVHKDTVVACVRCVSEPEHHETRSFATTTRELLALGEWIASHGCSHVALEATGVYWRPVWHVLEGQVELVLANAHHIKNVPGRKTDVNDAMWIADLLAHGLIRSSFVPPQPIQELRDLTRTRKQVVREISQHSLRIQKVLEDANIKLGSVLSEVLGVSGRAMLGAIIEGERDPHKLADLAHGTARHKHDALVEALHGHIRPHHCTLLKLHLNLIIALEHTVAEVDAAVGKCLDPIHQRARLLTTMPGVRDTVAEVIVAEIGIDMTRFPTPGHLLSWATMCPRNDASAGKRRSTRLLKGNNWLKTALVTAAWAAVRTKTSYLRAQFLRLKARRGAKKAIIAVAASMLTAAYFILRDGVPYRDLGPNHFDRQQRGKTVRRLLRRLHDLGYNLPPQHQPV

SEQ ID NO: 346116 - protein, 366 aa, unidentified
MKKLSEPVRKVNSQSVGLDVHKMVTVYSVLDASGATVREGRIASRRGELEAFLNEVLEAGPTHVAFEASRSSHWVYGLVSDLVGKERTHVANAKEIRAIANSKRKNDQNDAWWLAYLTWEGRLPSSYVPEDEVLELRIATRERCAAVRHRTKIINRLKGHLAQIGEIVPSSSVRTKKAQLFLLEIAVATKGARGRALRSCLDELDYQNAAIEEWDELIQAISAELPAVQRIAEEIPGLGAVLASTVVAEAGDIQRFHSAKAFACATGLTPSDLSTSGKTIHGRISREGSPHLRWALTQAAMGCLRSRSGAGLAVGNWIRAKEKRMGIKAKARAAGGRKLAEAIWRLFHHGECFDPARPFGGKKKIA

SEQ ID NO: 346117 - protein, 418 aa, unidentified
MNVKTRRTKKQVNVENQAIKLLAKEELGRKIEVIKKELRSYTWRDLETNGKFAKNDKLSFITDDMLIAGCDIGSETHYIRAIDVRGRELSSGAFEFSNTSEGFANAKAWVLALAAKNDKKQIVLGLEPTGHYWFALAAWMISNGISVVQVNPYAVKQSKEIEDNSQLKDDRKDPKLIANLVKDGNYGMPYLPEKVYADMRRLSMFRDQLTEDRIRNINRLHRELKIYFPEYMDAFGKIDGAFTLEVLKVSAIPSDITALGAEGIKNIWHNEKLRGRGYSRANEIVSYAEKSVGLTDGIDAGREAVKWYAEQILKLVACSSGKHKGQTKISHRGRKRLRYWLFQAAKSAVSHADEFKQLHEYYTTRTNNPLKKMQSLVVIACKILRVIYTILKTGTTYDPQKLLEDIKRPTASHAPMAA

SEQ ID NO: 346118 - protein, 313 aa, unidentified
MSAPLYLGLDVAKDTVELASEPAGLHGQFATTAAGLAALVAQCQAQPVTLLVLEATGGYEAPVVAALAAAVLPVVVVNPRQVRDFAKALGQLAKTDRIDAQVLARFGARVQPIPRPLPTEATQALEALVVRRRQLLEMLHAERHRLTLARGRPVRDNLRRHIHWLERSLTDTEAEIAATIAASPLWRVQEDLLRSVPGVGPQLACTLLGQLPELGHLDRHQIAALVGVAPFACDSGQWRGSRHCWGGRAGVRRVLYMAALVGTRYNPVLRAFYQRLRQAGKPAKVAITACARKLLVILNAILRDHRPWIPAHA

SEQ ID NO: 346119 - protein, 430 aa, unidentified
MRTNCKVTQIGCDCHRTFSTITARDEDGLIVSRERLEHGDRAKLRKQLNSWPKGTPVILEGTFGWGWISDELLAAGLDPHLASSTKTAAWRKARGLAKSNRTDADLLSELWTQQPRWWEVWLAPPEVRDQREWLRYRMSLVATQTAVKNRIHAVMHRHGIIHGFSDLFGKAGRNFLNLLIVADDTRLPESGQQTLKGKLQLLDQLRRQIASATRAFRKQALGSPTTMRLRTLPGICWILSYTINAEIGDVGRFNGAKQLCSYSLLAPLANDSGLEPKEEEPSKGRRVGLVGRRTLKWAWIEAAHGAVRKGGRFRAIFDRYTDGGKRNRNRGYIVVAHELCRIAYVLLKKEVDYDPSSAPDRPGSKKKQEAAEKKAITRKPLNVESRKTEPRKTEPRKKEPTKVKPMKVRKTSKSRPGTGQPHRPMVAVVA

SEQ ID NO: 346120 - protein, 336 aa, unidentified
MDVIYPRCAGLDVHAETIVACALWEEDGHIQKDIQTFSTFSKGLGDLLEWLEDHGVTHVAMESTGVYWKPVFAFLEGYVDLTLANPQRIKNVPGRKTDVSDAEWIAKLLRHGLIEKSFVPPAPIRELRDFTRLRKKWVGQLSSEKNRIQKVLESSNVKLGSVLSDLFGVSGRNILARLLEKGYVDKDELDQCLRGRLKKKKQAVYDSLLGTLTEHELRLLRLLWKHVEELEQLIEEVDQHIDRLLEPYREEVELLMTMPGVKKQTAAVIIAEMGTDMSVFETPERAASWTGLSPGNHESAGKRKSTRTTKGNPHLRSALCEAACKILDGTHGKDFG

SEQ ID NO: 346121 - protein, 403 aa, unidentified
MPAISGIDWASEWHDVRVSDRAGQLLAEQRFAHDEAGLLALIGLLLEHQVACVAIERPDGLLVGRLLAAGLRVLAIHPNQVAAARERFRAAAGKSDRFDAFVLCELARTDQHRFAALAPSSDETTALRVLVRTREDLVEIRVHLANQLRAQLDASWPGAAAIFADVDSPIGLAFLARYPSVGDTRGLGPKRLQSFLARHAYSGRRTPEELLERLHGAPIAVLGDLQGEAHRAAVCGLVAALTPIVEQISQLTSHISGAVRQHPDGPIFLSFFKNPKSVVCAAGLLAEIGDNRARYPTAASLAADAGQAPVAKESGKRRHATFRWACDTRLRNHFGVLADSTRHWHPWANDVYTRATNRGCEHAHATRILGRAWTRILWRCWQSHQPYNPTQHGNLTQLLQLKG

SEQ ID NO: 346122 - protein, 421 aa, unidentified
MQVVYPRCAAIDVAKKEIAVCVRTPGEAPGGRRTQVRKYKTFYGVLKEMCAWLAECRVTHVAMESTGIYSNPVYYALAESGDFEVIKCNAAHVKNVPGRKTDAADCVWLAELLECGLLRGSCIPVQKIAELRDLTRYRAKLVGSRTSEIQRLQKTLEDAGIKIDSVASDIMGVSSRDMIEALIDGERRGAVLAGLARGVLRSKIPDLSMALTGRFNDHHALMCRLHLRHVDELTELIDTVEKQIGVMLVPFRAERDLLMTIPGIGPAAAAVIISEIGADMSFFPDADHLASWAGLAPANNESGGRRRPAGTRHGNQHLATVLIESAWACSRTKTRPGAQYHRLVRRFGGHRNPRAKKKAAVAVAHTLILIIHCVLDRKVPYQELGDDFYTRRQDPERYKDKLIARLAKLGYTVTVEPAQAA

SEQ ID NO: 346123 - protein, 320 aa, unidentified
MSQNTTAIMNQTIAPVYAGLDIAKATLQLQLQNRSYDLSNTPSGHAQLVKRLATIPGVHVICEATGGYERSVVAALQAASLPVSVINPARVRQFARASGELAKTDPIDATMLMAFGQAFAPEATPPRDASEIKIAALVSRRAQLLELRVAETQRADSCAEPSLKKLFTKWLSQIEKQITKVEALIEELIAGQTTLANQVHRLDEITGVARITAITVLASMPELGQLNRRRAAALAGLSPYNRDSGQWAGKRHIAGGRTEVRRALYMAALSASRRNSILKTFYDRLIAAGKPAKVALTAVMRKLIILMNHLLKNPNFSLAH

SEQ ID NO: 346124 - protein, 405 aa, unidentified
MNYFLGIDIAKTNHVASLINNNGDVVIRAIKFTNSNEGFDKLLSTIQNKLCDLSNIEISMEATGHYWLSLYSALTDNNFNVSVYNPYQIKSYRGAYNNRKQKNDIIDSIIIADYLRVFGSNDSKLPEDNLLSLKQLTRFRANIVANVSSLKVQVIGLLDKVFPEYKKLFCDTFGNTSKQLLLNCPTPDDIINISTTKLANLLSKNSKGRFNKDTALHIKEVAKSSFGIKFTTDACSFEIKQLINQIVFLESQIDAVSKEIKELYNKLDSHLLSVPGIGDNLAPIILAPVILAEIGDINNFDKPSKLIAFAGTDPSENQSGNKLSSNDKTSKRGSPYLRHAIYTASLVAISNEPELRAYYDKKISEGKHHFVALAGISRKLLTIIYYILKEDRDYIRYDNIKDKLN

SEQ ID NO: 346125 - protein, 418 aa, unidentified
MTATHSIAPTLLVAIDISKHRHEVLIGIPGKKRRRRITVTNTLDDFQRLSAVLASYDLPVRIGFEATGNYHRTLAHHLGRAGFELKLVSSVGLARTREALHNSWDKNDPKDAQVILHMLEIGAVQFFHDPMVVGTSDIQELSKTHEIVSRSKTELWHRILTHYLPLYFPEAERFHRSSRTDWFLAFLEKYPSPHMITAVSRNAFIADAWDVVGRKVSKELLLSDIYATAVGSVGLPVHSDSDAVRMFRLVLAEGRSLVRQRDQIEARAVELLSGLPDYQLLTTIPGIGPINAMTILAEAGDLRRFRHHRQFLKFCGMDLATVQSGMFRGQSRISKYGNARLRRTLWMAGQTAVLKRTNSFRDKFERYISKDRHNAHLRRKAYTAIAAKMARTVHAVVMHGEPYRPFFEGVSPGGRTSL

SEQ ID NO: 346126 - protein, 365 aa, unidentified
MAIQSGKDQVVIAVDPHKASWTAAAVDASLQPLASIRVPVSRDGYRALRRFARQWPIAGWAVEGAGGVGAPLTRRLRADGIEVIDVPAKLATRVRVLSIGHGRKNDDADALSVGVAALTSRTLNTAETDAETTALRAVVEHRDDLVKTRTQTVNRLHVVLTNLLPGGAGRNLGADHAAELLRGVRPRDATGKTLRALAMDLVSEVRQLDRRIAKAATDIQTAVTASATTLTDLHGLGALTAGKILGRVGDVGRFRSAAAFASYTGTAPIEVSSGDVVRHRLSRAGDRQLNFCLHVMAITHVRQDTPGRAYYLRKRSEGKSHNEAMRCLKRRLSDIVYRQLIGDAVKQKAGPGGHSGAALSSRAAS

SEQ ID NO: 346127 - protein, 387 aa, unidentified
MTVQSQVPTFIPRQYEIFAGLDVDKHSIAVTFTDHTRLLKSLRLPYSSEQLLNYTRKHFPDRRLAFVYEAGPTGFGLYDDLRASGHPCLVVAPSMVPTAPGQRVKTNRLDSKKLSEGLRGGQLRSIHVPSPTYRQLRHLVQLRDTHVRQLTATKCRIKALLLYEGIAFPEAPAGGQWSARVLRQLEALPCAEAVRFKVNHLIGTLHFHFLSAAAVQKQIRRFCQNDPELRQVIGLLTSLPGVGWIVAAHLIARLGDWREITSVRQIAAFLGLVSSEHSTGDQENRGAITRSGDSRLRNKLIQSAWTTIGKDPELRAFYRRIYQRHPKKLAARKAIVAVARKLTTRIYAVLKQQRPFVLRPDSSSAPLTAEETAGPRGRLDAAQNEQK

SEQ ID NO: 346128 - protein, 369 aa, unidentified
MTDLMLFVGLDVHKKTISVAMVEGAAGAAVRFYGTIANTPDSVRTLCRKLSRDAQQLYFCYEAGPCGYGVQRQLTRLGHRCDVVAPALIPRKVGDRVKTDRRDAMMLAQTLRAGQLTAVWVPDEAHEAMRDLIRLRAQAMRDLRKARQQLLSFLLRHGRSSPYGHWTKMHRRWLGELVFAHPAQHLALEEMLQRVERAEALCDRLKQAILELVPQWSLAPVVQAIQALRGVSLIVAAAIVAEVGCFSRFESPRALMAYLGLNPSEHSSGATIRRGAITKTGNTLARTCLVEAAWTYRFPPRVSQIIRDRLKKLPEPIRAVAWKAQVRLSARYRKLIAAGKPAPKVVVAIARELVGFIWAIARMVEPKFT

SEQ ID NO: 346129 - protein, 400 aa, unidentified
MNAVGIDVSKGKSMVTILRPFGEIVSSPFEIKHTSSDIHSLIKLIHSIEGESRVVMEHTGRYYEALAHQLSAADLFVSAVNPKLVKDFNNDSLRKIKSDKADSVKIARYALDKWQSLEPYSITDELRAQLKVMNRQFHFYVKQKTAMKNNLIGLIDQTYPNANTYFNSPTRSEKWVDFVSTYWHVDCIRKMSLNAFVEHYQNWCKRKKYAFNKSKAEEIYTKTKELVPVFPKNEITKHIIRQAVDQLNSTSVTVETIRTLMNETASKLPEYSIVMQFKGIGPSLGPQLMAEIGDVTRFTHKGALTAFAGVDPGVNESGSYAQKSVPTSKRGSSNLRKTLFQVMDVLIKTMPQDDPVYQFMDRKRTQGKPYYVYMTAGANKFLRIYYGRVKEYLSVLPDPS

SEQ ID NO: 346130 - protein, 400 aa, unidentified
MNAVGIDVSKGKSTVAVMRPFGEVVASPYDVGHTESELKELARFLKSLPGETRVLMEYTGHYYEPIAQYLHEAGIFVSVVNAILTHDYSGNSLRKVKTDKIDAVKLANMAIDRWLQLVEYVPEDEIRQTLKICNRQYNQYNKLKTMLKNNLIALLDQTFPDVNKLFTSPSRKSDGHEKWVDFALKFWHSECVCGISEKQFKDKYERWCKRNGYNYSAYKAEDIYAEACGNVGLLPMCESTKVLVTQAITQLQAIEETLVAIKREMQKLASTLPEYDTVMALYGVGEVLGPQLIAEIGDVSRFKSKKSLIAFAGIDSPADQSGQVDNKSKAITKRGSASLRKTLFQVMTVILQNSPEDEPVYTYLNKKRSEGKPYRVYMIAAANKFLRIYYARTKLALVNT

SEQ ID NO: 346131 - protein, 385 aa, unidentified
MTIVTDTTAQIDRLYVALDLSKASWVAVLTSLGEEKLRTHRIDARTDHALGELVALIERHRAALAKRLGRPVRVVSCYEAGPDGFWLHRALTAQGIDNLVLDPASLRVDRRIRRAKTDRIDAEMLVRALMAWARGDRQACRPVRVPPPEQEDARRLGRERERLLAEKTAHTNRIQNVLATLGVRGFAPLRASWSHRLAALRDWAGQALPAQLSAEIAREVERLHVVVAQLATITRAIENRVRAEAKVEAPSRSAPGQITRLVSIGPIGADTLGREVLWRDFANRRQIANYVGITATPDESGQSSREQGISKAGNRRARKILVELAWLWLKHQPDSALTTWFNERTTGAHRRMRRIMIVALARKLLIALWRFLTTGLVPHGARLKA

SEQ ID NO: 346132 - protein, 356 aa, unidentified
MAIAIGIDVHKKTSTFFAYGEDGEPLEEFNKRFKRVASNRDGYTEVLVWLGNTDCDFLMENSTKTHDVYWILQGLGYKNLYVAHSVDLKRITKSSKKTDQFDAEKLATYMRVKQQNIDQFRTCYICTPEDMRIRRLCRIAKQELFDMGRIRRRIRSHLLLTGREWMGGLNTKWECEALMNEDDPGLRHLGRQLNECRLRRDAAEEAVVKAIKGNEKMFPIYEKLKEIPNFGDITAAYLAAVIVDIDRFENPKKLAAYLGIVPRMRDSGETENHCGLTRSGDPAARWLLIQATFRLVNSSAPDSQLKAFFAEKNGGSIEERKEADTSGLLKRPALVATANKLIHIIFALLTHPDRHW

SEQ ID NO: 346133 - protein, 337 aa, unidentified
MGLYCGIDLHSNNHVLTVIDEADRRVYERRLPNELAITKAALEPYRAELVAVAVESTFNWYWLVDGLMEAGYAVRLVNTAAVRQYEGLKHTDDEHDAFWLAHLMRLGILPTGYIYPKSERGLRDLARQRMRLVQHRSSLITSVQNQVWRSTAVRLRSDTIKGRGKQPWPEISDPDLVSSIKAGRAAIDTLTVQIERLEKLLLKRVGPSPQFRMLKTVTGIGPILGMTIALEVGDIGRFAGVGEFASYCRCVDSRRLSNGKKKGEANRKCGNRYLAWAFMEAAHFAIRILPAAKRFYERKRRQRHALLAVKALAHKLARACFYVLRDQVPFAPERLFV

SEQ ID NO: 346134 - protein, 342 aa, unidentified
MDEYVGLDVSREDTCFCVMDAEGKVLAQGKALSDPGSLFEALREHSLCPERIVLETGTLSSWLARGLRDRGLTVEVIDARQGHAVMKLQHDKTDKNDAHLLADLARTGFYRSVSVGSEAFQLQRILVKARRHLVCQRRDTENAIRGFLCALGLRFPRGSGKLAARVRDALDARPDLKPMIEPLLASVEALKAEIKRLDEEVMAEAKVSPASRLLMTMPGIGPVTAMAYAATIGDATRFARSRDVGAYVGLTSRRFQSGEVDYSGRISKMGDNLLRSLLYEAANSLLTIVRRPHPLKDWARRIKKRSSHKKACVALARKLAVIMHRMLITGEAFRWPQIQAAV

SEQ ID NO: 346135 - protein, 400 aa, unidentified
MKEFNAEQVGVEMASALKAVQEANEECYAVYVGLDVHKETIAVAIARAGREEPEYRGEIAHTRKAVAKLIERLSREFDGQVLLFCYEAGPCGYGLYRHILEAGHACEVVAPSLIPKKVGERVKTDRRDALKLARYLRAGDLTAVWVPDEEQEAMRDLCRARADMKSQERKAQQQLNAFVLRHAHHWPANKKRWTETHFNWLQELKFAHDWQQVVLQEYIEAVKAATARVADMMDQMERVLPQWRLAPVVNSLMALRGIDKLSAMTLLAELGDISRFHSPRQLMAYLGLVPGEHSSGARRRQGSITLTGNRHARRTLIESAWSYRFPARQTAHLRRKATNASDEAKAIGWRAQKRLCGRYRTLTQAGKNTKLVCVAIARELVGFIWDIVRQQMPQVKAATT

SEQ ID NO: 346136 - protein, 336 aa, unidentified
MKLYCGIDLHSNNHYVSVIDQDNNRLMEKRLSNDLSKTLTLFGPYKDDLQGIAIESTFNWYWLVDGLMDAGYSVSLVNTTAVKQYEGLKHTDDQYDAYWLAHLMRLGILPTGYIYPKEQRSLRDLMRKRMQLVQCRTAHLISAQAQYWRSTGLRLRSQDIKKCPDNLLSGISDQNLFLSIQSNLEVIALLNKQIEMIEESILLQCKNIAEYKQLQTVFGIGKILALTITLETGDIHRFQKVGNYTSYCRCVDSKKTSNGKKKGSGNKKCGNKYLAWAFMEAANYALRFYEPANRFYQRKLSKRNVIVARKALAHKLARASYYVMRDHVQFKPELLF

SEQ ID NO: 346137 - protein, 422 aa, unidentified
MSEQEAMAYSVYVGIDWADSKHDVCIQSKSSDEREFAVVRHRPEAIDTWVKGLYRQYGGPIAIAVELSKGPIVSALQKYDFIDIFPINPATLAKYREAFQPSRAKDDPTDAELALDILLRHPEHFKVLKPQSAKMRALATMVEQRRRLVNDRGRITNRLRCALKQYYPQVLEWFEHIDTPLFCAFLKRWPTLTQAKRARANTLKRFFHEHHMYREAVLDSRRQAIKAASPLTLDEAVIVPYRMQVLVLVEQLELMFKAIDQFDDEIAKLASQHPDYALFEPLPGAGPSLTPRLMVAFGEQRERFSSAADIQKLSGIAPVTERSGQKHWVHWRLQCPTFMRQTFVEWAAQTINKSYWAGIYYRQQRDKGSTYQAAVRSLAFKWIRILYRCWQTGVAYDESRYLKTLERRGSPLVKRQKMVESA

SEQ ID NO: 346138 - protein, 346 aa, unidentified
MSQYVGLDVSLKEVSICVVDADGAVVLRATLPTEPDEVAGFIAENAPRAERVVHESGILATWLTRELEKRGVPIICIDARMAHKALSARLNKSDKADAEGLAQLARTGWFTQVHIRSEASDRVRALVGARERLIRMRKDLEAHVRGVLKTFGIRMGPVHRAQYRRGFRDQLAEAGADDPVLGLMAETMNPIHETLCASAEALADELMTIARESRLARRLMTVPGVGPVTALSFIATVDDSNRFRRSSDVGAFLGLTPRRYQSGEIDRSGRISKCGDADMRRLLVSAAATLITQVRRFSRLKSWAVRLSARKGFKKAAVATARKLAVILHTIWRDGTEFEWTKEATN

SEQ ID NO: 346139 - protein, 338 aa, unidentified
METYAGIDLHSSNNFVGVINNNDKILYGKRHTNRLGDVLRALDPFKGSLKGVVVESTFNWYWLVDGLQEHGYQVHLANPSAIKQYEGLKHTDDQWDSFWLAHMYRLGILPQGYIYPKEYRAVRDLFRRRLLYVKQRTSHILSLQSMISRNLGLKMSNNEIKKLRPKDAEELFSCSNLAFMAYNNIAAIQFLKKIILNIEKKAESQVKMRKEFLQLRTIPGIGNILGLTIMLEVGDIGRFPEVGDYSSYCRCVDSNRLSNGKKKGENNKKNGNKYLAWAYVEAAQFARRYCVKAQSFYQSKAAKTKPVVATKALSNKLSRASYYIMRDQVAFDEDKLFC

SEQ ID NO: 346140 - protein, 365 aa, unidentified
MPSVSHLAPTYLGLDVHKDTISVAILAPDRDGLDVDRIPHDEASVRRLVGRLGDPRWLRACYEAGPTGYDLARLLHRMHVCCEVIAPSLIPKAPGDKVKTDKRDCRRLARLHRAGELVAIRVPTVREEAVRDLCRARADMVIDRTRARHRLGMFLLRHGRPWRGGNAWTLTHERWLLAQHFEEPALAATYAHYRAVLAGRDAQLEAIGADLAGWYDRAPFADAVHRLAAYRGITRLGALTLASEVCDWRRFPRAAAFAGFCGLVPSEYSSGSTTRRGHITKTGNAHLRAQLVESAWSYQHRPAVGADLRERQQGLDPQVAARAWAAQLRLCGRFRRLAARKDSKNVVVTAIARELTGFLWAEMAA

SEQ ID NO: 346141 - protein, 439 aa, unidentified
MPAPKDDVSVTVGVDTHLDEHVAVALDHMGRRLGVLTVPTTKAGYAKLLRWAETLGELHRVGIEGAGSFGTGLARFLRASGAEVLEVGRPKRRDEHRSGKSDPIDAELAARAVLAGTAIGEAKNTEETVEMVRVLHAARRSAVKARAHAAKQLKALLVTAPDDLRDELRGLSTAKLVRRAAGFRPGDTTEDVAAATKFALRSIARRYRTLSEEIRELDGHLTRLVTETAPALVAVHGVGIDTAATLLVAVGQDPRRLKSEAAFAHMCGVAPIPASSGKVVRYRLNRRGNRDANRALHVVAAERMSRDERTRAYAERCTAEGKSKRETMRCLKRYIARELYGVLLSTVVPGDFAKNRATPPRSEGRQNTFAGRKRRKGEKPGTGCNPQVVASFPTRTYPSGGGGTTGRDGPRSQASGDQGPSTTRALALAKVCRNAFSGA

SEQ ID NO: 346142 - protein, 411 aa, unidentified
MEAIIEKCCGLDVHQATVVACVLVGEGKKRAKKEVRTFRTIGRDLRALRDWLTELGVTHVGMESTGVYWLPVFRVLEGSFELIIGNAQHIKNVPGRKTDVKDSEWLAHLVRCGLIRPSFVPPLPIRELRELTRYRRSLMNDQARIRNRVQKLLETAGIKLASVASDVFGLSGRAMLRALADGETNPTVLAQLAQSTLRRKLPALVEAFEGNFEDHHRFLLRFQLDRLDELERAMTSLDEHIDCKLQPYQAELELLMKIPGFSRVTAASFIAETGGDMSVFPTSRHLAAWTGIAPGNNETGGKRRPAGMRKGNYHLVTTLVQAALGAARTKGSYYKDKYWRLRARRGPMRALVAIAHKLLLAAYEVLRHRQPFVDLGDQYLTRRSQTDATRKHVRRLEALGFNVALTPRDVT

SEQ ID NO: 346143 - protein, 340 aa, unidentified
MSDLRTVGLDLAKNTFFAVALSDGGKRLWRKKLSRTQVLRTFAEQQVCRIAMEACAGAHYWSRKLQELGHEVVLLPAHHVKGYLRGQKNDYNDAEAIAEACLHGRLRPVRPKTLEQQEMQSLHRMRKLLVAERTALVNHVRGLLAEYGVVIAQGRARFGREMPFVLEDAENDLTPRMRELLARQLQRYRALDEELSWYDQQIKEQVRQDAVCRQLMTVPAFGPVVSSVFRGWIGDGKQFRRGRDASAALGIVPRQYSTGGKPTLLGITKKGDKELRSLVIHGARAVVKHAHKKDDPLSRWIQRLLQRRGTNKAVVALANKLVRIAWAIVTRGEVYRVQPA

SEQ ID NO: 346144 - protein, 346 aa, unidentified
MMIIGCDYHPSWQQICWVDTATGETGERKLEHASGEAEKYYRGLSGAALIGMESTGNCQWFVEMTTAAGHDLWTGDAAKIRACDVRAQKHDRRDAALILKLLLEGRFPRIWTPSGEEKDLRQLLIHRYKLVRIRAQVKNELQHLAMNQGITKKRRLWSKAGEKVLRELPLKPWTSRRREDLFRVREMLSAQIDLLDQAVVEVAEKNEKARLLMTQPGVVPITSMAFVLTMGDVSRFQRGKQVASYLGLIPREYSSGGHQRFGSISKQGNWFMRMLLVEAAQNAVRYDPGFRNEYLHRCHNKAKGVAKVAAARKLAIRLYWMLRTNTGYPGVVRVESSSRVPLVSAS

SEQ ID NO: 346145 - protein, 412 aa, unidentified
MEVYCGIDWAEDHHDIALADRNGNLLARRRVSDDAAGLAVLLALLCEHGDTPDEQIPVAIETPRGLLTACLRATGRSIYPINPMSVARYRDRHSVAGRKSDHGDAVVLANVLRTDLHAHRPLPADSELAQAIAVLARAQQDAVWARTAAHNKLRSHLREYYPAFLAAFGDLKGGITRPEARAILAAAPAPAAAATLTLTQLKALLKRAGRHRGIDTDATRLRQAFRAPQMRQLPLVEQAMGRQTLALLGQLNAACAAADDLEQATIESFNQHPDAEIITSFPGLGPLTGARVLAETGDDRSRFADAKGLKAYAGAAPITRASGKTTAVLHRRVKNQRLAAAGYLWAFSALTASPGARAHYDRRKDAGDRHAAAQRNLFGRLLGCLHHCLITGQHYDEATAFPAATEQSRRAA

SEQ ID NO: 346146 - protein, 369 aa, unidentified
MNERITHVAMDDSKRKIIAGILRPEATEPELRSIPNEPRHLRRFFERLQREGRVVACSEAGPSGYDLYRQLTALDVPCQVIAPALTPRRPGDRIKTDRRDAAKLVRLFRAGELTPIHVPDEASEAVRDLVRCREDVQEDLRRWRHRLLKFLARHGRVYRDGRNWSQRHWAWLRTQRFTLPALDRTAQEYRWTVEQLLARVADLDREIAAFAETAPYREPVGWLRCFRGIDTLAAMTLLVEIGDFQRFRTPRELMAYLGLVPSEASSGDREQRGSITKAGNTHARRILVEACWHARHPPRLGPALARRSQGQPPAVRAQAWRAQQRLHRRYRHLVGHGKRPPVAVVACARELVGFVWAALTQPVPAQAAA

SEQ ID NO: 346147 - protein, 339 aa, unidentified
MKSTVVGIDIAKRVFQVHWVDDQSGEILSVQLKRDKFLEHFANRASCVIGMEACGGSQHWARELQKLGHEIKLLPARAVKPFVARNKNDRTDARAIWTAMQQPGLRTVAVKSEGQQAILALHRMRSQLVKFRTAQINGLRGLLTEYGEVMPLGRAVIRRDAAAAIGRLSERLPAVVIDTMRDQFNRLEQLDQEVRTIEHRLRLWHKDDEASRRIADIPGVGLLTATAAVATIGNARVFKSGREFAAWVGLVPRQHGTGGRVRLLGISKRGDAYLRTLLTHGARAVITSGKHPPDWALRIVERRRKNVAVVALANKMARTIWALLAHGREYQAQYARTAA

SEQ ID NO: 346148 - protein, 413 aa, unidentified
MSVTDVPAPPRPTAGVDWAKDDHAVAIVAPDGEQTHRFSITHDAAGLRSLVKRLLAAGVNEVGIERPDGPVVDALRQAGLTVYVIPPGQLKNLRSRYGSAGNKDDRFDAYVLADVVRTDRRRLRPLLVDAPATTALRQTVRARRDLVAHRVAVANQLRAHLQICFPGAVGLFADIDSDISLRFLQRFPTQDRAGWLSPKRWAAWLSSVGYSGRTLPDTLHTRLRDAPAGTTGPAGDTAATVTAAFVAVLRAITAQIEALAAQIAEQLQLHPDQLIFTSLPRSGCVRAARLLAEIGDARGRFPTADSLACLAGVAPSTRQSGKVEVVSFRWGADKQLRDAICDFAGDSRHANPWAADLYQRARARGHDHPHAVRVLARAWVDIIWACWTTNTPYDPDQHRALQRILNQDQPKAA

SEQ ID NO: 346149 - protein, 337 aa, unidentified
MKYCGIDLHSNNSVVIVSDDEDRIVFQKRLANDLGQIRGALEPYREELLGVVIESTYNWYWVVDGLMDAGYRVHLAHPSAIKKYEGLKHSGDFADAAYLAQLLRLGLLAEGYIYPRGQRAVRDLARKRLQLVRYRTAQILSIENILIRQTGARMKGGAVKRLTAEQVDELGFAPDVALAVQANRAVSQALGQQIEALERRLKQRVSLRPEYRLLQSVPGMGEILATTIMLETGCIDRFARVGNFSSYCRCVDSVRESNGRKKGEGNVRNGNKYLAWAFIEAANFALRCCVQAKRFYERKKSKTNRVLALKALAHKLARACYYILRNQEPFDVSRCFG

SEQ ID NO: 346150 - protein, 347 aa, unidentified
MSHYIGCDAHKKYSVFTAIDSDCRVMLTEQVAHDKGGFRQFLSSLPVDSPIAVESTGNWYWIIDEMEKAGHRPFLAHAGKSKLMMGQINKTDKLDARGLALLLRNGTLPSVWIPSGELRDQRELPRMRMELVRMRTSLKNRIHATFAKYGIQMAGASDLFGAGGRKQIEKKLGELPPETRYSVRQELKLLDQVQEQIDVAEKRIREIITVTPAIKLLMSLPGVGPILGTVIALEIGAVARFPGASHLASYAGTVPRVNSSGGRTRHGRVRPDVNHYLKWAFVEAANVVVLNQSRMSHRHVVHLYRRVRERRGHGKAIVAVARHLAEASYWMLRKNEPYQEPVSSTQG

SEQ ID NO: 346151 - protein, 345 aa, unidentified
MDEAYDGRQVVGMDLHRRRSVLVRMSMDGRKLETVRITNSPGALRAVLARCGERPLVVLEATYGWYWAADVLAAAGAEVRLAHPLGVRAFSYRRVKNDERDAADLADLLRAGLLPEAWIAPPEVRALREVVRYRHKLVGQRTSCKDQVHAVLAKLGVPVTHSDVFGTGGGLWLDQLVLPEPYAAKVASLRALIGVLDGEIARLGQRAAGVLGADPGYAALRELPGIGPVLAAVIIAEIGDVTRFRRAGQLCSWAGLTPRHYESDTKVIRGHVSKQGSKMLRWALVEAIQHQPAGTRPRQARDAIIARRGKEARNIAKTAAARVLLTQVFYALRDGHVRSAGRPAA

SEQ ID NO: 346152 - protein, 348 aa, unidentified
MNQYIGLDGHDKSCTFVVLSEKGKVKRKAVVPTEEKALLEFVKSIPGRRHLCIEEGTQSQWFFEIFSGHVHDLAIVQGRKRPGNKDDARDARSLAERFRIRDLGPRICKAPDSMVAMKDLVRSYEMLNTDLVRVKNRIKHLYRSRGLAYSDATCPYCTGRGYCKKPGFHQILELLRKQQERLEPLKAEAQKAMVTEGNRHPITRILKTAPGFGPVRSAELLSIVISPYRFRTSRQFWCYCGLAIVQRSSADWIPTADGKWRWGPSTQSRGLNRNFNRMAKAIFKGAAMTVITSMPKDPLRADYDRLLAHGTKPNLARLTLARKIAALVLAMWKNQEVYDPGKHRLNSI

SEQ ID NO: 346153 - protein, 412 aa, unidentified
MEIIHPRCAGLDISKKDAKVCLRINGVGRRKTSETVTTFGATTRQIMAMRDHLAAQQVTCVVMEATGDYWKPFYYLLEDLPGVEVMLVNARHVKNLPGRKTDVADATWLAQLGAHGLVRGSFVPPEPIRQLRDLTRTRTAVTRERTREIQRLEKLLEDAGIKLSSVAADLNGASSRAMLGALLAGETDPAAMAELAKKRMRVKIPQLTEALYGRFTSHHAFLTRMHLNLIDQHTAAIEQLTDRIEVVIEPFRRVRDLICTIPGIGGFTADVVVAETGADMTRFPTAQHLASWAGTTPGNNESAGKVKSRRTRPGNPYLQGALGTAAMSISHTRDTYLAAKYRRIATRRGPLRANVAVQRALLVAIWNIATTHTAYHDPGGDYFTRLNPQKARNNAVRQLEAMGYHVTLDQAS

SEQ ID NO: 346154 - protein, 388 aa, unidentified
MEQFSTLHVGLDVHKDSIEIATADPGREGEVRHVGSIGGELAALDRALRKLISKGRPLHVVYEAGPCGFVIWRHLTAQGLSCEVVAPSSIPRRTGDRLVKTDRRDAMLLARLSRSGDLTAVRVPGPADEAVRDLVRAREDAVREQRNARHRLKALLLRNGQPYAGKTAWTAAHLRWLSKLKLEHPAQQIGFQEYLHAITEATARIARLEQALRDTLPQWNLAAMVQALQALRGVQLIAAMTLVAELQDFLRFENPRQLMAYVGLVPGEHSSGAKRRQGSITKAGNSVARRMLVEVAWHYQHSPRVSPIIAARHDGLPKEITDIAWKAQLRLNAKFKRLVARRVMKTKAVVAVARELAGFVWAIGQQVQTSGWQAIQTEAQGSAAPATA

SEQ ID NO: 346155 - protein, 324 aa, unidentified
MIAGIDTHKDTLAVAVVDDSGRLVAGGDVPNTERGFAQLVDMFTAHHVQRVGIEGSGSFGRAVAVHLALCWQSGQPVAVVEVPTLMTSRERHGQLGKGKTDPVDALAIARITTREQQLPPVRLTVGAAADLRALLDYREDLVRERGALVNRAHAELGGLRPGYQQQIPILTTRARVRAAVDLLGDDGSIRATLCRRRLERVIAIDAETAELKRQITGLVAAADTTLTDLYGVGPLVAARFLAEVVDIRRYPNRNAFASANGTAPLPASSGRTVRHRFNPGGNRQLNRSLYTIALTQIRGDTEGRAYYERKRAAPASPNAKPSAA

SEQ ID NO: 346156 - protein, 441 aa, unidentified
MAMRKRDDEVVFPNAAGIDVGASSHWVAVPQHATDDPVREFGAMTDDLNAMADWLLACGVDTVALESTGVYWIPVFEVLEQRGLKVWLVDARQMKYVPGRKSDVQDCQWLQKLMSLGFLRAAWRPIGEVCVVRAVARQRDVLLADQASWVQRMQKALVQMNIQLTEVLTDVMGMTGQSIIRDIVAGERDPKALARHRNRRVKASAEEITKALTGNWRDEHLFVLRQALAMYDDIAGHLAECDRKLQALLSELGQRNVDLGKVPRAGTKSRTEFDARQILANWAGVDLTRINGLGLTVVMKILSELGPDLSRFETVKHFCSWLGLCPGTKISGGKVLSAKTKRSANRVRQALKMAAMSLSHSDSALGAFYRRLCSRMDKPRANTAVAHKLARMVYYMLTRGEAFVDKGQQHYEEQQRQRSIAALKRRATALGFEISAASVPA

SEQ ID NO: 346157 - protein, 389 aa, unidentified
MDVITEKCCGIDVHQKQITLTTLIGRADQKPRKNSRRYGTTSPELRQCANWLLEKEVEVVLMESTGQYWRPVWQILEPYGFKMVLCNPRIIKNIPGKKTDQKDSEWIAELARLGLVAASFIPPRPIQELRESTRTRKSLTETATSIKNKIHNILQRSNIKLTTYVTDIFGSSGQKLLALLIQGKPINLQTVSKCMHAKLKAKPEMIVAALDGSLSPSDRQILKIELALLADVQQAIHALELLIEEQLQPLEELYLRLQTIPGISKHIAQIVIAEVGTDVSPFPTAHHLASWAGLCPGNYESAGQSKSSHILHGNVYLKTALVTAALGAKRQTCSGLKDFFYRLKGHMSAQKAVVALAHKLLRITYAMIETGSSYQEYRKDQRAKALVGQ

SEQ ID NO: 346158 - protein, 321 aa, unidentified
MQSYHLGIDVAKVKLDCALRLADGKFKHKVVENNQKGFALLSDWLSKHDASGAHVCMEATGVYWEAVAEYLANRGMTVSVINPAQIKAFGTSRLVRTKTDKVDAKLIADFCFERHPAPWQAPSPSEQALRALVLRLDSLQTMKTQEGNRLEVARDIVKADIVSHIAWLDKEIESLIKKIHDHLNNDPDMRNKQELLDSIPGLGERTIALLLAFSMHPGRFANARQAAAFAGLDPRQHESGSSVKGKPRMSKVGHSILRKALYMPAMVTLYKTAWGRAFRERLAASGKPPKLIIGAMMRKLVQVAYGVLKSGNSFNPALQNA

SEQ ID NO: 346159 - protein, 331 aa, unidentified
MMDVYYAGIDVSARTLDSALALPDMPVRQGHFANTPSGHRQLIKWLTKGGRSVRVCLEATGLYSLGVALALHEHRHCEVMVVNPKAIKHYAQARQQRAKTDVLDAQLMLDYGQRLPFVPWQPPAPEILHLQAITRRISQLKVESTRERNRLHADAYRTGMTDLIKRDIQVNIRHLERRRVRLEAEGRALVLDAPSLCAPFQRLLSIPGIGETSALRLLAELAVLPAEMKPPQWVAHAGLDPRPHESGSSVLSPRRITKAGNKYLRAALYMPALTAIRHQVNIKALYDKLVAAGKKPRQAITAVMRKLLHAIWGVWKYDQNFDGQKFYKIAA

SEQ ID NO: 346160 - protein, 415 aa, unidentified
MPSQRTTGNIGVDVGAQNHTINILDAKGDALYGPAAVPNDLRGLSMLEARLDELAIRAGIRRWVAGIESTTFGVEPLLTKFLLDHGCDLRLLTPREVQAQRYLDTRKGAKSDKNDSIALARLVFRGIGSPYKALTSKEKKLRGLIEERALLKRNRTSERRKAVSVMSENYRVNRKTAGNIIDTKTGVLFLRRHQYPPDVRGTDVNAFISEVKSTIAGTYRSVLKHLYEVCSDVWSQSYSPLLGTDPFLLYYLDKMAQSDREIATLTEQVGLILADNNDYKLLRTIPGIGKETGSVIQSRIPDIRRFSHWKKLERFSGLDLVQDTSGPHEGRAKISKHGDPLLRKAVFDSVGAAIRLRGAPENNGLRTRYQSILRRRGSTAETRRKAQIKLAVRQLRIIWAVIHRGEPYVEEERSA

SEQ ID NO: 346161 - protein, 412 aa, unidentified
MSNPLLGGIDVHRKTNTVCLMDRQGREIGPRFTVDNNRPGTEAFIQQVAQQVVAGNFDAIQIAAEATGWYWWHFFRTLDQDPFLNQWPLELYPFNPRLTANFKKTYVDLDHRDPIDAFVAADRLRLGRDLPAPFHYEERYFPLRLLTRYRYHVVHNLAREKAHCLAILYLKASEYTRLEPFANLFGAASRAVLQEFASIEEIAAIPFDKLVEFIDCQGKRRFPDPTENARKLKRMARDSYPLPEALQQPINLLLGLSLHHITFLEGQGKRLDTAIAERLELIPHTLDTIPGFGPVFSGGIISEIGGVERFDYDQAKVAKFAGFKWRKHQSAEFEADESRLTRTGNRYLRYYFCEAANAVRMRDVEYAAYYERKYHEVRQHQHKRAIVLTARKLVRLVVRLLTTNQPYRPRRR

SEQ ID NO: 346162 - protein, 362 aa, unidentified
MEKVHFTNLAERHSIPLEVAMTEIKYCVGVDIASSTFTVAVGEMPWKVLLKPHTFENAEEGYQALFEWLIQHHLSVADTVACMEATGVYSEGLAYFLYVKGYRVAVQSPLEVKRTFKPYGPKSDAVDSLQIAEYACRHTDKLSFWKPRSEILEQVKALLAVREQFVSQNVAHKNALQAIQRKVVRTPFAEQAYLQLIEQLKQQIQAIDTEVRRLIENDPTFKEMLLLLLSVPGVGLLLAAHFILLAQFSLEYKLLASFLGIAPNEHSSGTSVYKHATSRHFGPPAIRKLLYLAACSVCTHRPQFRTYLARKTKQGKPARLVLNNVENKLIRIMCAVLQSKTAFIENYHSVQPLALQKSLTTS

SEQ ID NO: 346163 - protein, 485 aa, unidentified
MTKRRMSTFERLESGRLNRKQRRALGRQVAAADPGLTIVHSNAGGIDVGNESHYVAVPPDRDPKPVREFGCWTAALNQMAEWLKSCQIDTVAMQATGVYWIALYDVLEQHGIRVVLVNAQHTKNVPGRKTDVQECQWLMKLHTYGLLRDSFRLAQEMEGVRTIWRLRDRHVKEAGRAVQHMQKALTKMNIQLANVLSDINGLSGQEIIAAILQGERDPWKLADLKDYRVKASREEVARSLEGNWRADVLFELQQAVDSYQFAHRQMKECDGKLEGYLASLPARMLDIPGQSEGAPAATSKKKPKKVKKPTGNQPHLELEAELKRICGVDLTSIDGIDVMTALTIVSEIGTDMSRFQDENHLASWLGLTPAKDITGGKTIGRAKRKVKNRVAVALRTAATTLLKSDSYLGARYRNLRRQLPSFAAAVKAMGRYLAVLIYRLLTQGEAWVDRGATRFERRRTEQELASLNFRARAKGFKLIPITDAS

SEQ ID NO: 346164 - protein, 336 aa, unidentified
MEITTIGLDLAKHVFQVHGVDVVGTVIEKRRLRRGQVLSYFANLPPCRVGLEACATAHFWARELCRLGHDVRLIPPQYVKAYLKRGENDAADAAAICEAVTRPSMRFVPIKSEEQQAVLVMHRSRDLLVRQRTQLINALRGHLAEFGLIEAQGPSHIRRLLESMRADRTVPDLAREILDLMAATLDAVDAQIGSIEVRITAWHKANPTSQRLATIPGIGPLIASAITATVADPASFRSGREFAAWLGLTPRQKSTGGKQRLGRITRKGDQYLRRLLIIGAQTVLLRSKAAKANPWIQALLARCARLKVAVALANKTARIVWAVMMRGDRYRQVAVA

SEQ ID NO: 346165 - protein, 307 aa, unidentified
MSISTPVAVDVSKATLEIKSRIFACVVSNDKEGLKELIKKLKPLKSPIIVCEATGGYERLLIATMHAKEISVCRLNPSRVRSFARSEGVLAKTDKLDAEIILRFAEEKRIRSLSSPDPVREKLRNLLNRRSQMVSMTTEEKNRLQNHPQDLHSSIKRVLKYLEKEIERIEAKIDGLIASDKNLNTQVKCLKNIVGVGDICTLNVLAYLGEIEQLGRNQLVALAGLAPYNRDSGFFRGKRKIIGGRGKVRTVLYMATQSAAVHNPVIREYVGGLRERGKPYKVAIVAGMRKLLIHMQSELKKLNLEVA

SEQ ID NO: 346166 - protein, 475 aa, unidentified
MATRQEVKAEAKPNRKQRREQHRRIWTDKPGLDVVHPDAAGIDIGNNEHYVAIAPGRSEEPVRKSSCFTHQLRELAQFLKAHGIRSVAMQSTGVYWIPLYDVLEEEGFEVYLVNARDTKNLPGRKSDVQESQWLLKLHTYGLLRNSFRPTSEIRVLRTYWRQRGEHVQTAGECVQRMQKSLTQMNLQLANVISDIMGVTGQKILRAILAGERDADKLAAMRNERIQASREEIAASLTGNWRPELLFALQQAIDRYDFCQRQIAECDQKIKQHLGALPARAKETGSAVEPSPQKKKRAGGNSPSFALDKELVRITGVDFTRIDGINVMTAQAILSEVGLDMSKWKTEAHFASWLGLCPNNSVTGGKVLRRGTRKIVNRAATAFRIAASTLRRSDSYLGAQFRRFRTRLGAPKAITAMAHKLAVLFYRMLRYGQEYLDRGQQFYQVKYRQQQIALLNRRAAQLGLVVTPATSQAVSA

SEQ ID NO: 346167 - protein, 348 aa, unidentified
MLTIGIDPHKHTHSGVAVDPLGVQIAQRTVTARREGFGQLLEWARKLDSERVWVLEDVRHVSGSLERFLIDRGETVVRLPPRLMANARRGVRERGKSDPIDALAIARAALREGIDTLPTARLAGTELEIRLLALHRERLIDTRTRLINELRWQLHDLWPDWEIPKRVLVHPAWQTKIARRLGRAETGVRVQIARDMIGRIRELTRTIAQLYEQLASLVKKAAPPLLAERGLGVLIAAKLIGEIAGIDRFTSDAQLARISGCAPIPVSSGRTDRHRLDPGGNRQLNHAFHMLALCKLLHDPRTAVYMAKQRKNGKTNREAIRSLKRHLVRRVYYLLHDPDRVPTTICLT

SEQ ID NO: 346168 - protein, 343 aa, unidentified
METLYVAADIAKQSFTSAYWSEKQAKYWQAYANEPTGYEAFAQQVQAAQSASGAEQVHLILEPTGGYELGLALFAYEQGWLVTKPNPQDLRAWATGMGYRAKNDKIDAMMLAEYGGRNEPDPQELVPQAVRELDYYLRRLDELKRDRQAERNRLDTAKQKPDTPRPLLDNIERSLERLQEQMAEIEAAIATLLKRSPELRHQRRLLLSVPGIGAKNSLPILVLCYRFHALTCGKGTKKQLAAFLGVDSQTYVSGTSVRGSVAISKRGSRMGRAFLYMGALGGIRGHNVLRLFYQQMLARGKAKKVALVACSRKILTWAWAVFTSASPFDPTRFSHLEPSPSLP

SEQ ID NO: 346169 - protein, 402 aa, unidentified
MIEHYDSVDVFVGVDVGKGEHHAVAHDRDGNVLFDKALPNDEAKLRDVIGKLKKHGQVLFVVDQPATIGALPVAVAQAENVLVGYLPGLAMRRIADLHPGEAKTDARDAAIIAQAARTLPHALRSIQLPDEQVAELSMLCGFDDDIVGQIVATSNRVRGLLTQIHPALERVLGPHLDHPAVLDLLQKYPSPALMKTAGTIRLENRLIKRAPRMGHRLAAEIMQALSEQTVVVVGTNAATTVLPRLAEQLATLRRQRDEIAVEVEKLVDAHPLHPVLISMPGVGIRTAARLLTEVSGKQFATAGHLASYAGLAPVTRRSGSSIRGEHSSRRGNKVLKRALFLSAFAALHDQTSRAYYDRKIAEGKKHNQALLALARRRCNVLYAMMRDGTLYQNEPKKHAITT

SEQ ID NO: 346170 - protein, 407 aa, unidentified
MEVVIERACGMDVHKDNITACILTPEGKEIHTFSTKTVFLLKLVDWIKQHNCTHVAMESTSVYWKPIVNLLEAEDIEFLVVNAQHMKAVPGRKTDVKDAEWIAKLLRHGLLKACYIPDRNQRELRELVRYRRSIIEERARQINRIQKVLEGANIKLGSVVSDVLGVSARDMLDAIAEGEEDPEKLANFARRSMKKKKDELELALKGYIQSHQRLMLKTILRHIDFLTEEIEMLDQEVANRVRTNQEDVERLDSIPGIATRMAEQILAEIGTDIKKQFPSAAHMCSWAGLVPGQNESAGKRKSAKTKKGNKYLRSALTEAAHSVKGSKNYLGALYRRTASRKGKKRAGIVVAHAMLRISYYLLTRKEMYVDLGEDYFDKQRQQSIVRHSLRRLESLGYTVTLQESEAS

SEQ ID NO: 346171 - protein, 341 aa, unidentified
MDIAVLGIDLGKNSCSVVGLDGSGKVVLRRRMQRKTIVGLASKLSPCIIAMEACCGAHHLGRVFSAQAHTVRLMSPEYVRPYVKAQKNDDRDAEAIAEAATRPTMRFVALKSEEQLDMQTLHRARDQAVRERTSLMNQLRAVLLERGVIVPQGRARLRVRVNDILRQGTEALSSRIRLLIEEMLTRWQALDERISTFDSEFATEVKQNEAARRLTSIPGIGALNATALVAAVGDAETFTRGRDLAAWLGLVPRQATTGGKPRLLGITKRGSKYLRKMLIQGARAALPTLSRGNTRLGQWLRGLLARAHSNTVVVALAAKMARIVWALLRYGTTFEPRAIAA

SEQ ID NO: 346172 - protein, 401 aa, unidentified
MPRQGFIGLDVAKDTFTAAFLIVDALSGQILHEQIATFSYDHPGWQRFLATWEPLHADFWWIGLEASGPYSALLEAHLLRLHRPNISLHRLSPLQVRDFARARSRRRTKTDRLDACTIALFLRQPLTVQALPAPLQDHTPLRALAHLDQHLAQELTRTQNQVRQLLHFLFPELERAYARFPKALRILLRHFPSAPAIAQAPLQDLHALLPPRHRLDLEALQALARASFGLHDPIRAQTLQLLLDRWAFLETLRARCFAALQQAVRQHHPQAWRLLRTIPGIGPRLAALFLALTGPLDRFPDRKALIAYAGLDVTLHQSGRFAGRCRLSKRGDPLLRHVLYLIAAALKRYTRRFAQAFAYYRHQGRAVRETLVILSRKALGMLYHLLRHQVPFQDLPQPAPV

SEQ ID NO: 346173 - protein, 312 aa, unidentified
MDAIVIGIDVSKDRLDIATHPSRDTFAVARNEEGLKDLIARLAPLSPQAVAVEATGGYETVVAATLSAAGLPVLVVNPAQVRAFARALGKRAKTDPIDAAVIAHFAAATKPDIRPLPDETTRLFAELLSRRAQIVQMIGAERQRQKRLTGRRQQNSIARLLLALQKELSSLEGDIDEAVRGSPAWREKEDLLASVPGIGPVIARTLIAEMPELGLLDRRQIAALAGLAPWTRQSGQWKGKSRIGGGRAVVRTALSMGALVAGRHNPVLKAFRDKLVAAGKPHKLAAIAVARKLLTILNAIIRDRTPWNPQIA

SEQ ID NO: 346174 - protein, 323 aa, unidentified
MKVLYERVAGIDVHKEMVKVAIRSPGGKPWTRKTEVLEFRTFYGVLQAMGRELRRRGVTHVVMEASGIYTDPVYYALAEQDFTEVAVINPAHAKALKGHKTDARDCARVAELFECGLLRGSYIPPSELREVRDLTRYRMKTVQARTSEIQRLGKALESAGIKLGSVASSITCQSATAMIEALIDGERRGGVLADLAIGRMRTAGKLADLSMALAGRFTGHHALLCRLHLDRIAVFDDAVDGLDKRIAGKAGRWQRETGLLTSVPGFGDVVAQAWLGEIGPAPHRHFASHEKLACWVTLCPGNNASASASTAGPGTPGPTSSRC

SEQ ID NO: 346175 - protein, 373 aa, unidentified
MPRYSTAFGMDVHLRSTTVCALDAETGEAVTRRFRGNPWGEVAEWMSGFPGPSLAAYESGYLGFAPQRELSGLGVDCVVAAVSRVPRSAADLSSKNDRNDAARMAKAILSHDISPVWVPSPEIEGLRDLAAAHDAATARLAAAKQRLLAFLARRGYAYGGTTPAGNPRRYWTYDFLRWLDKVRPADDGGIRALAALRNEVEAAAETRDDLLAEYRAAVAAGPLSAEVEALQSIKGCGFALAAAFASEVGDFSRFRSGRQVTSYFGLAPKQRSSADSVRLGGISGAGNALVRRLAVEGSWSYVQASHQPKLMPKGSGVPLEVRMHGRKGSERLLRRRGEMLARGMPQAKANAATAAELVRWLWALGAMCREATE

SEQ ID NO: 346176 - protein, 358 aa, unidentified
MDGSKGHPQMTGGLDLGDKYSYLCLIDSDSGEVIEEGRLRTTPESLRRRFASEPSLHIAIETGTHSPWVSRLLEECGHEVLVANSRKLRLIYANRRKTDEVDAENLARLARLDPKLLYPVEHRGQDSQTHMAIIRSRQALVDCRTQLVNHARGTVKSFGARLPKCPARSFHKRAKEHIPEALMPALEPILEQIGSLTERIRHYDRELEAIAKESYPETELLRQVEGVGPLTALTFVLTIEDPYRFEKSRSVGAYLGLVPATDRSGDRDPQKRISKEGDEMLRRLLVSGAHYILGPFGSDSDLRRHGEKIAARGGKNAKKRAVVAVARKLAVLLHSLWVSAEVYEPLRNAHRSSGGQAA

SEQ ID NO: 346177 - protein, 331 aa, unidentified
MVKKQIMTDKLSCCGIDVSHLTLDVTYQNNLGELFYLQVGNNNAGFKKLLEHTGQNCHFVMEATGVYYIRLAFFLDSLGCRLSVVNAMSIKRYIQMHLERNKTDKKDSRWICQYAIEQRPPFWEMPDSAYFECKQIYNTIREYAEQVKRFNNQLHSLKLLPFPSKETIKSIEKMKSYLEKEMDHLEVKLQVLLKKWQPEQYKSINSIKGLGKRATALLIIFTQGFKHTNNHRQLISFAGLSPTEYSSGTSIKGSNRIYKKGGKPIRDVLYMCAMNAKQTNEACKQLFDRLKANGKTGKQALIAVMNKLLKQVFAVVKNNSLYQPNYCSTLH

SEQ ID NO: 346178 - protein, 353 aa, unidentified
MSQVTTIGLDIAKSIFQVHGVDAAGRSVLRQRLSRRRVLEFFGKLPRCLVGIEACASSHYWARELMALGHEVKLMPAQYVKPYVKRGKNDVADAEAICEAVTRPTMRFVAVKTPEQQSIMMLHRVRLILMRQRTQLSNALRSHLAEFGIVSPIGREGLDRLLTIVADTDDGRVPAEARASLEMLAVQLAGVKAQILANDRRVIASARATEVGRRLLEVPGIGPVLASAFVASVADPAIFKSGRDLAAWIGLVPRQNSSGGKERLGRITKAGNRYLRQMLMVGAIAVIRYAQRNSARRPWLAQLMGRRPTKVAAIALANKTARTVWALMSSGERYRDPQAIQAAVLANGIETPH

SEQ ID NO: 346179 - protein, 348 aa, unidentified
METIGLDLHKRESQLAIQAEDGTITERRIVTSQERFTAVLGHRPRARILLEASTESEWVACHLEALGHEVIVADPNYAPMYATRSRRVKTDKRDARTLMDACGQGTYRRAHRLSAPRRHLRAELAVRDALVRTRTRYVALAKALVRRDGLRVPSSTAERVGDRVQALALPAPLAAELAPLLTLLPPLNATIAAVDHRLRALEQTEPIVALVMTAPGVGAVTASALVATLDDITRFPSAHQCEAYLGLVPGERSSGEQRRIGPITKAGNRRTRWLLVEAAWRILRAKDPESAALRAWTLRIAARRGKPIAVVALARRLAGIVYAMWRDGVPYDGRKIRAPHHARGAQAG

SEQ ID NO: 346180 - protein, 366 aa, unidentified
MKQVAFLGVDYHIKTITIAIYLAKEKKFYETIRLNNDDKTIKKYMKKLSTQFDLKMCYEASCSGYVFQRKMQALGYHCDVIAPSLIPRKPGDRRKNDTRDAKKLAQNYANDLLTIVHPPSREEESVRSLIRCRITMKESGKRVKQQINSFLLSQGCRWSKSKWTKQHHLWLSKLEMPNLYLQQVLDEYLGHLSYLESRLQHLEQQIEQIANSELYAPSVNKLRILRGIETLSAMVLIAEITDFRRFPSPRSLMAFLGLIPGENSSDDTRKDVSITKAGNIRCRNTLIEAVQHYVTKPRISVKMKQLLSGVDAHSAVIAQKCLYRLHKRYWALVMKGKARQKAIVAIAREFVGFIWALMQPVSCADA

SEQ ID NO: 346181 - protein, 344 aa, unidentified
MSKVTTVGIDLAKNTFVLFGLGPKGHSGWKRKVRRKQLLEQLVRLEPCTVALEACGSSHYWARQIRALGHQVELLPPQHVKGYLRGQKNDYNDAQAIAEASEHGRIRPVPIKEVEQQDDQILHKLRQGVSKDRVRISNQLRGLLAEYGVIMPQGIAALRRELPLALEDADNGLSERARQLLHRQYQRFLEVEQELAWYDQQVKQRSRQDETCRRLQAIPGVGEVVASLLKGWMGDGRQFRRGRDAGAALGLIPRQNSTGGKDVLLGISKRGDPYVRAQLVHGARAVVARADGKMDRLSRWIQRLKAERGFNKATVALANKLVRIAWVIIARGEHYQPSEQRLAV

SEQ ID NO: 346182 - protein, 313 aa, unidentified
MNQLEINIGIDTSQSQLDIGVLPSGKFFSVENNEEGVYDAVQRLKRLKPTRVLIESTGRLEMAFVVAAYNAKLPIVVCNAARVHEFAKASGQLAKTDKIDAFTIALFGQKMQPELTQVKPKELMKISDLLTTRAQLLTTSTMFKNRRKRMPTISHACYDAVLKTIKLQLNKVDRQLDKAIARVPEWQEKVDLLMSAHSVGKVLAYTLLSELPELGKMNRKQVAALVGVAPMNRDSGSKKGKRYIRGGRHKVRTVLFVSMMSAIQHHPKLKPMYQSMIEKGKPRKLALIACARKQLVMLNTMMKNGTAWDPELA

SEQ ID NO: 346183 - protein, 366 aa, unidentified
MSATTATTSTAAAAPGPILALDLGKYKSVACLYDPATAQARFDTLTTSRDELRKLFARHRPAVVVIEACALAGWVHDLRAALGLPCRVANTASEAWKFKHTKRKTDKDDALRLAQLQALGQLPTVVLPPKQTREWRALIACRQALVGRRCAAQNRARAVLVGQGLPAPRGAKAWSAAGLEGIARHAKPLAECAPDELWRGLLESALTEYRQARELIDQAEAKLDALAQADAGVRLLETIPGVGPRTAETVVAYLGEARRFETGKQVSAYGGLVPRQYQSGESDRRGRITRRGPALLRKLLVECAWVMLRYNAWARAVYQRLSRGQARKKQAIVALARKLLVRCWAMLRDGQPWRAEPPAKAEAAPA

SEQ ID NO: 346184 - protein, 322 aa, unidentified
MFLGIDVSKSTLDAALLKEGTKVRHKVFSNDAAGHAALIAWLNEQGADTVHACLEATGTWAQQAALALHQAGHIVSLVNPARTHAFGKSQLKRTKTDKADAILIAEFCRMHNPPVWTPQSPQVQQLQGLVRRLEHLEEMQKMEENRLSSGGLSPQVEESLQEHISYLAHQIEKTRRQIKDHIDQNPDLKSQSQLLESIPGIGATTAALLLAELGDISHFSNARQVAAFAGLVPRIRESGTSVRGRSRLSKVGSSRLRKSLYFPAITALRFNPLIKAFGLRLSVQGKSKMLIIGAAMRKLLHLVYGVLKSKKPFDPAFCSQNA

SEQ ID NO: 346185 - protein, 340 aa, unidentified
MGQVVTIGLDLAKSVFQVHGVDAAGGVVVRRQIRRSQLVAFFAKQPACLVGMEACASSHYWARELMALGHQVKLMPAQYVKPYVKRGKNDAADAEAICEAVTRPTMRFVAIKTPEQQSAMMLHRVRLVLCRQRTQLTNAMRAHLAEFGIVAPIGRLGMERLLGVIESTEDRRVPNDARTCLKMLAAQLTVVKEQILENDRRVIADARRTELGRRLMGIPGVGPVLASALVAAVADPAIFRSGRDLAAWIGLVPRQNSSGGKERLGSISKAGHRYLRQMLVVGAMAVVRQAARSAERRPWLTQLLTRRRPKVAAVALANKTARTIWAIMTSGERYREPLAA

SEQ ID NO: 346186 - protein, 381 aa, unidentified
MQIRSVGIDLGKTTFHFVALSAAGKVLLRKKFTQKQLITFTANMQTCLIGMEACSGAHFLGRVLREQGHNVKLIPAQFVKPFVKSNKNDFLDAEAIAEAVDRQNMRFVPIKTDDQLDLQAMHRVRDRLVARRTSVINQLRAFLLERGMVFAKTPFKLKQAMPEILENADANLTPRMRNLVRLLWSEWKDLEQQIVAMNLEVEQIASSDPACQRLRQIPGIGPLVATAIVAAIGNGAAFRKGREFSSWLGLVPRQHSTGGKARLFGISKRGNCYLRKLLVHGARSAVLRVKRERSPFGPWLDALERRSPVKVVITAAAQQAGSGCLGGSIERRRVPPTDSLDALLSRRGKDAFGLEAQNSAPTLPHHDDDYLEFSPRSALDS

SEQ ID NO: 346187 - protein, 349 aa, unidentified
MKIIGCDFHPGYQQIAMLDKNTGEVTEKRLTHSNEGEEAKKFYSELTGPVLVGLEASGQSQWFERCLAELGHELWIGDAAKIRASTERKQKTDRRDANLLLELLEQERFPCVWVPKPAERDVRQLLLHRAKLVRVRTQVKNQLQALALNQGVQRKRKLWTVAGRKQLESLPLLPWASRRRTDLLKLLDELGGSITALDSAVCQEASARPAVRRLMTHPGVGPMTALAFALTLGPAGRFRRGKQVASYFGLIPSEHSSGGKQRLGHISKQGSSFVRGLLVEAAQSAVRHEPQMRREYQRLAQRKCRALAKVAMARKLAVRLYWMLREEVDYAQLLQGSYAGPPESSRGRG

SEQ ID NO: 346188 - protein, 441 aa, unidentified
MGTPQDVEVENPTKEVIPIMKKRIYRRMPVNDFQPETISHADLGGKLVFAIDVAKVDMVAAIAAADGRVLQTICWKAPDQNLAVLSILRSFRAAGITVEAVMEPSGTYGDVLRHQLEKDGFPVFMVSGKRTYDAKEIFDGVPSLHDAKAAAIIARLHADGLSTRLAVEVPERRQLKAALAILDLYQERYLQLVHRLESWLARHWPELPTLLELTSSSLMALLARIGGPADVAAHPAEATKLLRGISHRLIADDDVAAIVASANSSVGVPLVGLERDALMAIAEDAYRAHRAFATAKTKVAQLADTTPAATLVPVVGHTTAAAVFAEVGDARSFHCTRAFLKAMGLNLKEKSSGTVHGQIKITKRGPSRVRQLLWLAIFRWIQKDPIANAWYQRKKQRDGGRASRAAVALMRKLAKGLYHVGRGGTFDSSKLFDTRRLQVAT

SEQ ID NO: 346189 - protein, 398 aa, unidentified
MIENRFSIGIDISADDFHVSLMLFDGKRYVIKGSRKFSNKHKGFVSFLEWTSKKTKGEEAIFVMEATGVYYEELAYYLHSEGKSVAVTLANKIKHYANSLNVKTKTDKVDAKTIAQFGLERRPDLWKPMSSELRNLRYLCRERLSLKKESTRIKNQLHALIYSHNPNAMVMDLKQQHIEFIDNAIEKVEKQIIALIDADKELKEGVRKLETIPSIRKLTIITVLCETNGFFGFNSIRQVVSYAGLDVKHHQSGKFAGKSKISKQGNVHIRQCLYMPALSATKHNEPMKQLYERIIERNPNVKRKGVVACMRKMLALVFVLWKKGEEFDPNYKWNGSDQKKEVENNEKNSSDKDITSGNDEKTSPLVLELEELKKKEVGITPTSQDKHRFKESKLSSCL

SEQ ID NO: 346190 - protein, 355 aa, unidentified
MDREKYIAMDVHQASISVAVRDAAGKLIVESIIETKAATILAFIRGIQGSLWITFEEGTSAAWLYDLLKPHVTKVIVCDPRKNALLNAGNKNDRVDARKLSDLLRAGLLTPVYHGESGVRTLRELCRGYLTINKDLTRVMNRLKALYRSWAIPCAGDKVYSPRHRNTWLEKLSEAGVRRRAEQLYQQLDALVQIRREARRELLAESQKHSATPLLRQIPRLGPIRVALLIALIQTPHRFRTKRQLWAYCGLALQTRASGEYRFTGGEPQHSKRLPALRGLNVNHNHDLKNVFKSAATHVSTSTDPLGDFYRSLLAKGMKPTMARLTLARKMAAIVLSVWKKGARFDPGELKQQAA

SEQ ID NO: 346191 - protein, 350 aa, unidentified
MSVDPAYKVVRSGALAKEAKWKGCRVVIDGVLGIDVSKNTLDASMSSCNKVRSKSFANSPDGWRHLLGWLIGQKIRRVHACLESTGRYSLGIACKLNEAGHVVSIVNPAQIRDFARTKLGRNKTDAVDASHIREYCELFKPAPWAPPSHAHRQLGELQTIRAGIVAGLTEWKNRKNSGMVDAVAQSLVDATISHFTSQLGAVEKAIAQAIDNDSDLRRKRDLLLSISGVGETLAGVVLAELPGPDVLRSSAEAVAYTGLNPRRHQSGTSIDRLTRISKIGNAVLRAALYMPAMSAMRYNPAIVALVTRLKAKGRLNPKQIVVAAMRKLLVLCFGVLKTGRPFDPALAMGC

SEQ ID NO: 346192 - protein, 385 aa, unidentified
MTMVMTVGVDAHKRSCTACTFEDQTKKELFEFPTTNPGLSSFTANVPEGSVVVIESSTTGKALSRIFSERYQVHMIAPPERKPSVKTNKRDAERIAKEDMLGYTRRCYVPSKYIEEMRYIVSRQMRIGEKISGVKSQIHSLLERNMLQSEFEDLSDIFGVEGLQRIANLRLPDQEIVELGMHLQELNLYALQHAQVETEVAKMAESDGDCCILMSHPGIAPFTALAMKARIGDVSRFPTKRHLSSYAGLVPEADNTGEHVSQHRHVKHGDDVLKYAFTCAVKGAVKAKAKTAVKHLYLKQIGKGKAPQKAEVAAARKLSWIVWAMLTSKQRYVEEDRYLTARKLRDMSSKARRDLSYAVHPGDILALAESLTSQAPILQRYPEER

SEQ ID NO: 346193 - protein, 331 aa, unidentified
MFPVGIDVSKNTLDLCMLYDGIKGRIKTRNIQNNTHSVENILRWLRLQHCGPEDVHVVMEATGVYHERLATELHDAGFYVSLANPHRSREFARGMGIMTKTDKVDAYMLACYAFLKNPHRWEPPAPEIRYLGALLRRRDVLLGDALREENRLEKYLSTDTPADIISSCMHMAQLLREEVSNIERQIKAHIKASPALRRDYTLLTSIKSVGPQLGMHMLVVLRSHDFSSAEQAAAFLGVVPIEKRSGTSVRSRPRMSKIGPPQLRAKLYMSALCGKIYNKRMRNIYDEMCLRGKPKMVAIGALMRKLVHWCYGVLKTGTVFNDEGLKQVLST

SEQ ID NO: 346194 - protein, 330 aa, unidentified
MRKDTEAGIDVSKDVLDVAARRDGARLETARFGNDAAGHRTLVRWLTTRSRTVRVVLESTGTYSLDVALALHRARGVAVMVANPRAVKQFTGALMQRSKTDLTAAAALREYAVRMPFVAWQPPAGEVLALRGMARRIAALVVERTRERNRLHAVQATAERVAVVVNDIEVNIRHLERRIELLTAEAVALVHEHAELARAFERLTSVPGIATHSAVQLLPELLVLPEDMTVRQWVAHAGLDPRACQSGTSVNKPARISKVGNAHIRRALFMPALVAVRHDPHVQAFFDKLVARGKKPIQAYVAVMRKLLHAIYGMFATETTFVGEKFHAVA

SEQ ID NO: 346195 - protein, 356 aa, unidentified
MQAKIKALVDDYDRFIGIDHHKRTSYLTVKDREGNTLKRGNIPTSKNALSLFLDDGENENGSASIAVFEAGRCYRPMYRWLSEMVETVVLAHPGGLKIVSDTVYKDDKLDSEKLADLLMLGMVPEAHVASDEAWDRRRVIRHRVLMVQMQTKVKNRIHSTIDLYPDAKPTRPEVSDIFGKLGMHWLQRLELPLQERKRLDELLDILDFFKKKVGASDALVRKIVREDKRCQLLKTIPGIGDFFAALIAAEVDDINRFPSSKHFVSSIGLVPGRDDSGDRERPGRMHKKGNSYLRWAVVEAAIPATRSNLALKNHYDRILARKGRKAGPNIAKVAVARKLAEIIYRILKDERPYEHR

SEQ ID NO: 346196 - protein, 350 aa, unidentified
MVILSIDLGKYSSVCCWHTHGKEPVYARIETSPSSLKEAMVREKVDKVVIEVCHLAGWISDLCQGLNLTLEVASTQDERWRWKRVKRKTDRIDALKLAKLCFDGELTLVHVPARPVRQWRGLVIHRHRLIERQTQIKNSIRALFESQGQRLPAGASQWKSRRFRELLKSYAMPLERCGMDQLWKGQLQGELLMLRMLMRQTAKVEAKLDQLAGADEQIERLLSIPGIGLRTAEMVKVMLDDPKRFKHARQVGSYSGLTPRQYESGLMQRNGKISKAGPALLRKLLIQVAWGMLRNNPRGKALFNRICKGHKTRRKLAAVAVGRHALVWCWGVLNGDQNWNWKPKEELLAG

SEQ ID NO: 346197 - protein, 388 aa, unidentified
MKEVTTIGLDLAKAVFQVHGVDAAGAVTLRRAVRRRQVLSFFTKLPPCLVGMEACATAHYWAREIAKLGHDVRLIPPAYAKAYVRRNKNDPADAEAICEAVSRPSMRFVAVKTEVQQAAAGIHKVREMLIKQRTMLINTLRGLMGEFGIVVAEGPRHVGELIAILADPADRRIPTPLHEGLLAIVETLRGIERRIEIVDQQIVGWGRDNATCRHLITIPGYGPILSSAMAAMTVNPAAFGSGRHFSASLGLVPRQDGTGGKVKLGPISKRGNGYLRRLLVNGAMSVLCSKRAKEDPWLVKLLETKERKVAACALANKMARIGWAVMVRQEDFRSRRHDQPCPDLGEPGAVLPALKTAARACGSGLRPVLTAAARGATHGPGRDEETTL

SEQ ID NO: 346198 - protein, 451 aa, unidentified
MPQRKQGRAAGWSTVHPDAAGIDVGATMHVVAVAADRDATPVRTFRSYTADLHALAAWLQSLGITTVAMESTGVYWIPLFEVLEARGLEVRLVNARAVKHVPGRKTDVQDAQWLQQLHQYGLLRGSFRPREQIVRLRAYVRERERLVGTAASHIQHMQKALTQMNVQLAQVVSDISGTTGLAIIRAIVAGERDPRVLATHRDPRCQASLEEIGEALTGHYQPEHVFALRLALARYEFDHAQMAECDREIAIVLRDLTAQRPTPALPLPPPRRRPRPKHAAGDVRAALYALLGVDVTQIEALGPETVLRLVAECGDDLRAWPSAKHFTSWLCLAPANKITGGRRLSSRTRKTASRAAALLRLAAVSVGRTQTALGAFYRRLAARVGKAKAVTATARKLAVLFYNTVRFGLAYRDPGVTAYEARYHQRVLRNLQRRAKDLGFRLVPETADEVS

SEQ ID NO: 346199 - protein, 335 aa, unidentified
MYYIGLDVHKKTISYCTKRVDGTVQAEGKLDSTRLALDAWLPGLPQPWTGALEATLFTGWIYDYLKPHAHALKVANPAMLQAIAVAKKKNDQVDARMIADLLRCNLLPQCYMAPSEFRERRRTLRYRNLLVRQNVQMKNRTAGLLMETGVAYNKQKLHGKAYFAQLRKSPEVPECIQPLLKIGRESIERIAKLDRALMKALKSDPLLVARVERLLTIPCVGEVTALTWVLEVGEVSRFSSVKDAVSYCGLCSAERSSAGVQKRMPISKQRNKHLQTVLIEAAKLSQHFNDDLTAVHEKALAKGNKNRATIAVARKIVAYLLAVDRREKHFLEGEE

SEQ ID NO: 346200 - protein, 348 aa, unidentified
MALTIVEDTRAVTGGVDTHADMHVAAALDPVGGLLGVGEFPATAAGYARLLGWLGGFGTVCLVGIEGTGSYGAGLARHVTAAGIRVVEVDRSDRQDRRRQGKSDPLDAVSAARAAQPGRARGAPKGRDGAAEAIRALMVAKRSARSERTQTINQARALIVTGPDDLRARFARHTAAGLVSELAALRPRPGATVGYATRIALRELGRRAEFLDGQLGRLDELIVPLVTARAPALLALHGVGPDTAALLLIAAGDHPHRLRSEAAWAHLCAVAPIPASSGKRTRHRLNPGGNREASHALWRIVITRMSSHAPTRAYVERRTKEGLSKKEIIRCLKRYAARQVYRHLRPAG

SEQ ID NO: 346201 - protein, 347 aa, unidentified
MRFYTRQHRHYCGIDLHARMMYLCVLDASGAVLLHKNIRSCPEEFLAAVASFRDDLVVGVECIFTWYWLADLCSEENIPFVLGHALYMKAIHGGKAKNDKIDALKIATLLRGGMMPMAYVYPRGMRSTRDLLRRRLYLVRKRGQLLAHIQNTHHQYNRPEPTRKIIYKANREGLVDHFHDPFVRKSIAIDLELVEHYDRLIRELELDLVRTAKVDDPQTFFRLSSVPGIGKILAMTLLYEIHDIARFPRVQEFASYARLVKCAKESSGKRLGTGGAKIGNVHLKWALSEAAVLFLHGNLRDQRFLQRLRQKHGRAKALSILAHKLGRTVYYMLQRQTAFDMNKFLTT

SEQ ID NO: 346202 - protein, 344 aa, unidentified
MDIMHYVGLDIHKKSISFCVKLADGTIVREGVLKATRPDLDRWMGTLPQPWTVAMEATMFTSWVYDHLRGHAAAVKVAHPLMLRAIAEAKRKNDRIDARKIADLLRVDLVPECYMAPQPIRELRRALRYRNLLVRQRTQTKNKVSGLLMEAGIEYNKQKLHQKRYFSELLKRQGAEQLPASLTPLLQLSRTTLDALGNMERQLLGGLERDGLLAERVQRLMSIPGVGPVTAITWALEIGEVERFRGSKQAVSYCGLCGAEDSSAGKQKRTPISKQRNHHLQSVLIEAAKLAPRHHPALAAVYEQEKKKGNCNRATLAVARKLVAYLLAVDRRKTGFLPAVAAVA

SEQ ID NO: 346203 - protein, 345 aa, unidentified
METMYYIGLDVHKRTISYCVKDVSGRVYAEGSVPATRFDLDRWMKTLPQPWTAAMEATMFSGWIYDHLKPHAAALKVAHPLMLRAIAAAKKKNDRIDANKICDCLRCDFLPECYIAPTAIRERRRTLRYRNLLVRQMVQMKTKISMLLMEAGVSYNKQRLHKAGYFRELLATNPDIDEGLCSLLRLCREMVVRLQKTESALVRSLERDSLLMDRVERLMTIPAVGPITALTWALEIGEVQRFSSIKKAVSYCGLCGDEQSSANRVQRTPLSKQRNKHLQTTLIEAAKMAPRYSPELAMLYDKEKQKGYANRATLAVARKLVAYLMAVDRGQRNFQVVETSNCVAA

SEQ ID NO: 346204 - protein, 429 aa, unidentified
MKIIYPRVCGIDVHKKFIVAVICISESVEPIYLKKRFSTFHNDLIRFREWLIQNDCQNVCLESTGKYYIPVYNVLESHISNIVVANPKWVRAVKGEKDDDKDAKWIADLFKFGIVRSSFIPQKDFRILRELTRYKYKLVNMRSSEKNRYQNALTSGNCKLDMVFTDVFGKSASNIIDLILSDNPYTDEDILSKVHKNCKASPDMILNSINGTDLTPVQKSRIELVNDHIKQLSSNIQRLDKLIDLMIEPYEDYISFLCQIPGVSRNSAIIILSEIGVDMNQFTSTRRLTSWAGLTPSSNQSAGKKKSVRISRAGVYLKPCLVEVAHAAVKDKNHPYYANKFNKISKRRGKKRAYIAIARKILVAAYHMLLTGEIWNPADLSEVETPVEQRIKYVKNNLKSDIKQLLDIGLTVEELTLMIQQNANIIATQ

SEQ ID NO: 346205 - protein, 335 aa, unidentified
MDNPDLCGIDVSAKELVVRVRREGLTEAERTFANTASGHEQLRRYVTRNRTAIRVCLESTGLYGLDIAILLQADTRIEVMMANPRAVKDFSRALMHRSKTDPMDALVLVEYAARMPYHPWQPPRQGVLQLTALARRIHALTEQATMEKNRLHAVSGTHTTLAVITRDLRRSITSIEAAIIKLTHAAHKLIASDELLRLRFELLQSVPGIGKVSALQLLGELSMVPADCDVRQWVAYAGLDPRQHQSGSSVQKKVGISKVGNRHIRRALFLPALSACTHNPHIKAFYARLQNDGKCKMVALIAAMRKMLHAIYGMFKHKLPFQGEKLFAASPTKPA

SEQ ID NO: 346206 - protein, 475 aa, unidentified
MGKGSGTTRGDRRRNARRERLRAILPRDGAVIGIDLAEDKQAIAVADHDVRVLARKTVKVKAFRLGEALDWAVAQARVKGFSHVAVACEPTGPRWLQVQRLCAERGLPLVCIQPLVSHIAREQQDYTTHKTDESDCVLIARLAIELHCYIPEELDETWAHLRHLGRRRVQLITAATASVQRVRDFLSVAWPTVTETCARPLESVTWLAALQAVTSRCGGDPGRLAGMGEEAFTALVRSAMAGWGARRACARICVRVFAALTDTEGVVASCRRGLLRRVADELGDLQRTRAQLRAAEADMVSALDELGLSRLGDIPGLTATGAAAILAETGDPRRYDSSSSLVKHAGLAPADNASGALSGQAHISRRGRPALRLAVWRAVWPMLRFNPVMAAKYQALTRAADAAARAAGVHHGARTRPATAAAAAARARHATARVACAASLLRWIYSMIVHGTSWDPAVAASTACQHPPASQPEAA

SEQ ID NO: 346207 - protein, 337 aa, unidentified
MEYCGIDLASKASAICVMDDQQQFKLELMCATDEEGFRQALNGWQNLRCVIEASPLSEWVAGILESLGHEVIVIDPRKAKALITSKKKTDKLDARNLARMAVTGWYTEVHRKSAEARLLRSHLIARKGLVTMQRQQNNRIRGLLRAHGMVLGQVKNSAFVSRVRTLVEQRCADLWSAIEPLLEHWVALRRSLAQMTKRIKQRAQRDPVCRLLMTVPGVGPLVSSAYVATIDDPARFARSDQVGAYVGLVSSVHQSGETEYRGRITKEGDGLLRWLLVEAAHVLLTRSGSNSALKAWGKRIERRKGAAKAKVAVARKLAVILHRMWLTNTPFQAHAAV

SEQ ID NO: 346208 - protein, 417 aa, unidentified
MNEFKDWQLHRAFGAVDWASEKHSVIVVDQNGKLIEDFQIEHSALGWKKFRQKLQPYGSIPFAIETSQGAVVEQLLEAGMMVYPLNPKSAQAYRQRKAPSGVKDDQLDAWSFADALRLDGQGWKALNPEEALIKELRLLCRDEVSLIEQRTAFVQQLRQALAEYYPAALEAFEDWTSVSAWMFLQRFATPQALEKAGRRQWQNFLHSRRLWGSDLGPRRMEIFTHASEFAGTIPTTNAKSLLALSLVQMLFALEKQLGLYRQKIQALFAQHPDHDLFGSLPGAGPKIAPRLLSEIGDDRQRFGGDAQALQCLGGTAPVTKRSGKYLKVQQRWACDKHLRHAIHLFAEQSLTRCVWADIYYQNHRKKGLSHANALRRLGHRWLKIIHKMWIDRTPYNPELHHRNQLKHGSWIFQLQTA

SEQ ID NO: 346209 - protein, 354 aa, unidentified
MACKITSLEATTTIGIDIGKNTFHLIGLDKQGAIVLRQKLSRRQVDSRLANMPPCLIGMEACVGAHHLGRHLKAFGHDTRLMPARYVRPYSKGPKNDFRDAEAIAEAVLRPTMKFVAIKTVEQLDLQGLHRIRERLVCQRTSVINQIRAFLLERGIAVRQGVRALRSEMSMILDMTDKLSPSMIRMIEDLCADWRYLDGRIESVSNEIEALSEQDDGAKRLMTVPGIGPVISTATVAAIGNGDVFSKGRDFGAWLGLVPRQMSTGGRTVLGPISKRGNRYLRMLFVQAARAVLLRPRSWEKHGLKSWIEAAARRLNRFKLAIALANKLARIAWGVLHGGRQFEVRSTTPISQIA

SEQ ID NO: 346210 - protein, 391 aa, unidentified
MTMYFVGIDISKYKHDCCIISAADQKVVSKFTFKNDKSGFEQLNLILNSLSTPADIKIGFESTAHYALNLELFLENANHSFMEVNPVLIKDFKKSQTLRRTKTDSIDCELIARWLMTVEYKPHSKGFYHAYSLKSLTRLRDRLVRQRSFYLVKITNVLDHTFPEFKPFFQERLSKTALYLLENYGSAEKMARMNSASYEKLRSISRGKFSPQQFIRLKELAANTVGVNNSIFDVELNRLLALYKSLVAEIKTLESEINRLVDEVHPHYMSIPGIGPISAAIIYAEYGDISNFSSPNQMLAFAGIEPSVHESGTEAYNGRMVKHGSSQLRYVLINCCLPLIRFDVTFATYYARKRSENKPHRVAITHVAKKLVRVIYALESQDIDFDPKKLR

SEQ ID NO: 346211 - protein, 405 aa, unidentified
MVQDYSGSFPKLLCYESVIKKRFDFRKGKDYLSVPYKHLTGSLPKKGSLMNRKMQDFIVKGKKVFIGLEDSKKTWKISARCEGMEIHYTAMPAKYAGLREYLFRKYPSCEITVIYEAGFKGFGLHDQLMSDGIRCIVTPPNKVTQEKDSRVKTDKIDARRLATVLEKGDYKACAVPDKERREDRQVNRAMLQVQGEITRVKNRIRKFFDANGYAETFAAGEWNERQYDEVRTMELPPALKVTLDAYFSMLDKFKELRKILHKEIMAIAKKERYAEAVRIIKSIAGVGKLTAIRLILEWGEDMGTRFKSGGSLACFSGLTQSEYSTGERIRKSRITHQGRGYIRAWLIQCAWICIKRDPAMLAAYQRIAKNTASKKKAIVAIARKLVVRLWTCLHTKTEYAIGVIE

SEQ ID NO: 346212 - protein, 412 aa, unidentified
MIKDTLYVGLDTDKKHIDIAVAEPLPGGEVRYWGKIANEAAALDRLIKRLQRHGRRLVVCYEAGPCGYGIYRRLNDKADVTCQVVAPSMTPRRPGMRVKTNRRDSLMLAKLLRAEELSPAWVPDEAHEAMRDLVRSRGAVVADQMRCRQRIAGFLLRQELRFVGKPWTQKHRAWLGRQVFAAPAHRLMFGEMLEALDQARARLKRHEDHIAELVASWSLAWLVEALQALRGYRLINAVSLAAEIGDPRRFDNPRQLMGYIGLVPSEASTGERVRRGKLTKSGNGRARKVLIEAAWTYARPAKGASPRAQRQSDAVRAVAEKARHRLTGRYRKLVARGKLPTVAIAAVARETLGFIWAIAHAAQTPPQSAQHSTGLAPSRPLRAASGGGLKASLDRPTRPALAAPGRSGRRDR

SEQ ID NO: 346213 - protein, 431 aa, unidentified
MSLEFVFCTRFYEISAVDITLHILRKECMIMILVGIDIGKNQHTFSIIDKNTGEILSNPSFFPNNREGFLFLIKKLNTYSKSDLLIGMEDTGHYHFALLKHLLDSRYTVALINPTTTDLTRKLQGGITKNDPLDSLTICDVIGSNQHNKPYRITKVNRFDLYEQKQLTRHHHNLKEELNTYKNRLQKCIDIVFPEFNSLFRSKYGIVYMNVLKTFSSAEKIANSDIRTIRKCFEYNKRGKRISLSAEQLKAAAKTSIGMPSVAEEIQIRHLVCQIEMIEEQLSEIDKKIEEFSLQNNSPILSIPGISHFSGTSILAELGNICNYTKASQIIKFAGVAPYHYESSQFTAQHTAITKKGSRYLRKTLYQIILPVINHNTVFTAYYNKKLAEGKGHRCAQGHCIRKLLRIIYHLLKTNQSFLSFKCVWLVVPNR

SEQ ID NO: 346214 - protein, 402 aa, unidentified
MNCVGIDVSKGKSMIAVMRPFGEVVVSPFEVLHTDSELSKLAGLLKSLDGETRVVMESTGNYHAPVAWLLHDAGLYVSVVNAMLVHDYGNNSLRRAKTDKKDAVKLANYGLDHWLILPRYVPEEDTRLMLKTCYRQYQQYSKVQTMLKNNLISLLDTAFPDANRLFTSPPRADGSEKWVDFVAAFWHCECVCGLSEKAFTAKYQKWCKKHGYNFSKDKALDIYASSCGHFGVMPKTDTAKLLVEQAVSQLRATSAALAALKQEMQSLAASLPEYPVVMEMFGVGPTLGPQLMAEIGDVRRFHSKKALVAFAGIDAPPYQSGQMDVRSRSISKRGSASLRRTLFLVMGVLLQCAPMDEPVYQFMNKKRSEGKPYRVYMMASANKFLRIYYASVKAYLDSLEHD

SEQ ID NO: 346215 - protein, 368 aa, unidentified
MGQDTLWVGLDTDKKHIDVAVAEPLPGGEVRYLGQIAADPASLDRVIKRLRRDDRKLVVCYEAGPCGYGIYRQLNDKPGVTCHVIAPSMTPRRAGVRVKTNRRDSMTLARLLRAEELTAVWVPDPAHEAMRDLVRARGRAVEALMRCRQHIGGFLLRQDVRYIGAPWTKKHRAWLGQLEFAHPAHRLMFGELLDALDQAQARRDRLTDHIAELTPQWSLAWLVEALQVLRGYRLINAATVAAEIGDPRRFDKPRELMGFLGMVPSERSTGDSVRRGGITKAGNGRARRALIEAAWTYARPAKAPAPTGHSAALREIADKARHRLGARYRKLTARGKLPQVAVTAIARESIGFIWAIAHAAAPKPPRRG

SEQ ID NO: 346216 - protein, 340 aa, unidentified
MRVVGVDTHKATLAACCVDEVGAAVAERIFGNDPGGFGELLAWLTEHAVERVGLEGSAGFGAAAARFLLAAGVAAVEVPPQLSYRERLRTRRAGKSDPGDALAIARVTLREPELPPVRLPDASRELHLLVEARDDLAAEMTRVRNRLHADLVVLSPGYTAVAANLVAEKHRRTVGRLLRPLRGVQAELARERLSRLAKLAAELRSLDRRIEARVAGHPLLALPGVGPLVTAKLVGEVGDVRRFRSADAFAMLAGVAPIPASSGQTRRMRLNRGGNRQLNRALHGIVLAQVRSHPPAQAFVARKRAEGKSWREALRALKRHLARIVFRILSASAQSSVSGA

SEQ ID NO: 346217 - protein, 317 aa, unidentified
MALSRTFVGIDVSKDRLDLWLEPLKRFERASNDGAGWAGVIGLLNSLGVEPAGLVVAFEATGGYEAGLRQALLEAGIEVRRVNPLRVRLYARSLGRNAKNDRIDARVITRYAEVAETKPEILDPARERLAELVCHRRRLVDERVAVGNQTGMLRCSLLQEQNRKRLALIERQIEETDTLILETIGLIPNVVAKLKLLKTLKGVKDITAIALIALLPELGRLTRRAIAALVGLAPFDRDSGTLKGARSIAGGRAAVRTALYMAARAAANSKSPLGDFYKRLVAAGKPKKVATVALMRKMLVTLNAMLRDGTPWKHANV

SEQ ID NO: 346218 - protein, 392 aa, unidentified
MIYIGIDVAKDKHDCFITNSDGEILFNPFTISNNREGFETLFQRIKSVAEDFSKIKVGLEATGHYSYNLLGFLLDKGLPTYVINPLHTNLYRKSLSLRKTKTDKVDSRTIATMMMSDVSLKSYSDTSYHNEELKSLTRYRFDKVKERAKLKSSVSRLVCILFPELEKLVPTLHMASVYALLSEFPSADAVANAHLTRLSNLLSESSKGRYGKDTAVMFRDAARSSIGSHMPAKSLELKHTMKLIQELTVEIDEIEAAIKRIMDEQIQSPILTIPGISYRMGAIIIAEIGDFSRFDSADKILAYAGMSPSTYQSGQLDNCYAHMEKRGSRYLRYALYNATKYVCHWDESFGTYLEKKRSEGKHYNVALSHAAKKLVRLIFAMEKAGQAYMPAA

SEQ ID NO: 346219 - protein, 466 aa, unidentified
MQPNRRRSLGKPRVSPTVFDRLNPHVAGIDCGSGEHFVAVPPDRDPHPVQSFPTFTSDLLRLADWLAACRVTSVAMEATGVYWIPIYEILDARGFEVLLVNARHFKNVPGRKSDVSDCEWIRELHSVGLLRGSFRPTDAIVALRAYMRHRQTLVESAGTYTQRMQKALVQMNLQLPLVVSDITGVTGLRILRDIVAGQRDPQHLAAHRDARVRASTADIVAALTGHYRPEHLFVLQQNLELFDACQAQLAACDRAIDAHVQTLTAQRPPPVTPLPDPRVTKKPHDHQPRFEIRTPLFQLTGGVDLTQIDGVAPYTALKLISEIGLDMTRWPTEKHFTSWLSLAPKNKISGGRLLSSRTPPSANRAAVVLRMAAMSLGRTQTALGAFYRRLAARIGKPQAITATARTLAALVYRALKGELVYRDPGADAYDIQQRARVLRRLRQRAATLGFSLVNRDTGEILAPAIP

SEQ ID NO: 346220 - protein, 325 aa, unidentified
MVVIGLDAHKRTHTVVAVDGTGRKLAERTVPTTRAGHLELLRWARRWRDRTWALEDCRHLTRRLEVDLLAVGERVVRVPPKLMAGTRRSNREPGKSDPIDALSVARAALREPDLPTARLDGVERELRLLVDHREDLVVDRTGHQERLRWFLVELGIDEPVARFARDLLARIRELTAAVNALEAEIRVLAARVAPSLLALVGCGHLTAAKLVGQTAGIGRFRSRAAFARHNGTAPVPVWSGNTVRHRLNRGGDRQLNVALHRIAITQLQREGPGREYLAKRMAAGDTKTEAIRALRRRLSDEVFRRLTTDELDRNKASAASTAASA

SEQ ID NO: 346221 - protein, 341 aa, unidentified
MNIKRVGIDLAKDVFQVHGVDSQEKVILRKQFRRVQLLAYFEKIAPCLIGMEACGSAHYWARELQKLGHTVKLMAPQFVKPYVKSNKNDANDAEAICEAVARPTMRFVAVKTIAQQDIQAIHRVRSELVSHRTAKVNQIRGLLAEYGLAVGRRIEVLRTALPLLLEDAENGLTLDFRILLDELRQDLINLDERVQVMDKKIKTLANSHGEAKRLLAIPGIGPITATAIISAIGNGKQFKRGRDFAAWLGLTPRQHSSGGKERLLGISKRGDSYLRTLLIQGARAVLRVVGQKDDPRSRWLQNLCSRRNKNIAAVALANKNARIIWALLTKETDFLPDGEPA

SEQ ID NO: 346222 - protein, 400 aa, unidentified
MSKRHAQVWAGIDAGKGHHWAAVVDGTGATLWSKKIENDESAILTALGEILGLADEVHWAVDISGTSSALLLALLAAHGQQAVYVPGRTVNRMSGAYRGEAKTDARDAYVIAETARHRNDFASIDVPARLAADLALLTAHRSDLVADRVRMINRLRDVLTGVFPALERAFDYSAHKGALVLLTGYQTPAAIRRRGRARLTAWLANRSVRGADTVAATALEAAQAQQTALPGEDVAAQIVADLAAQILALDDRLKRIEKQIRETFRSHPQAEIIESLPGMGPILGAEFVVAAGDLSAYTDAGHLASAAGLVPVPRDSGRRTGNLHRPKRYSRRLRRVFYMSAQTSIIREGPNRDFYLKKRGEGCKHVQAVIALARRRASVLWALLRDGRIFTSTPPVTQAA

SEQ ID NO: 346223 - protein, 359 aa, unidentified
MNKKTCFEEAVVIGGVDTHKNFHVAAVVNEQDHVLGSASFPSTRHGHALLLNWIRSFGNIDRVGVECTGTYGAGLMRYLQQAGVTILEVTKPDKLSRHKRGKDDTIDAENAAHAAYAGIRTVTPKTRDGMVEALRVLKVCRKTAVAARRVALQMIQTQIVSAPDALRDPLRKMTRMKLVRTLADWRPELDGYRDVTTAYRIALKSLARRYLELSDEIADLDVMIAAIIDELAPELISRTGVGYESAAQLLITAGDNPERLHSESSFSALCGVSQIPASSGMRQRHRLNRGGDRAANSALHIIAIGRLRVDLKTQEYTQRRLTEGLSKMEILRCLKRYIAREVYYILRRRGREISQTQIA

SEQ ID NO: 346224 - protein, 356 aa, unidentified
MKTSQQIRQKLDFSGDSIYAGIDVHKKQWNVFIMSEYKEHKGFVQPPDPSILAEYLRKNFPGATYYSTYEAGFSGFWIHEALKQQGIHNIVVNPADVPTTDKERKKKSDRVDSRKLCKKLRDKDLEGIYVPERSQLEDRELMRLRTKLVRDVKRCKCRIKGLLNFYGINPTCSTWSKKFITWLKALELQSANGTFVLHKLVQELESVDEIKKQVAKQIRIGLLKNERYSKSIKLLFSIPGVGLIGALTILTELGDTKRFKNIDQLCNYVGLVPTLYSSDEKEHVGHLTPRGNSYVLPVLIQCAWAAAGKDPALLKSYHQWRKRMKSQEAIIRVARKLLARIRHVLIHETEYKLGTV

SEQ ID NO: 346225 - protein, 361 aa, unidentified
MQSTTIIAFDQHAATTVAAVLLPGQRSAALHPLTSDTATIIRFVDRLRRRGSVQCCYEAGPCGFELRRALTARQIPCEVIAPALIPRRAGDRIKTDRRDAGQLAVLYRAGALTAIHIPTEQEEAARDLLRCREDIRADLLRARHRLSKFLLRHGRRFTGTKKAWSKRHDAWLRTQTWPLAALDQTHRAYLRAVDEVLARLRDVDTELRALLTLEPLQPRVHRLRCFRGIDDLTALTIAAELGDPRRFATAPRTMAFVGLVPSEHSSGTKRAQGGLTKTGNAHLRRVLVEAAWHYRHHPFVSAALRTRQQGAPAAVIAHAWTAQQRLHRRYQRLAARGKPKQQIVTAVARELTGFVWAALTQ

SEQ ID NO: 346226 - protein, 394 aa, unidentified
MKLIGIDIGKNKHFFCVMDQQTGEIISQPVSFSNDKEGFDFLVQKIKSYPKDSILIGMEDTGYYHFALLKYLLDLQYTVALINPKTTDFNRKMQGGITKNDKLDTINICDVLDTPERKKQYRITKVNSFDLYEQKQLTRHHHNLKEEENVYKNRLQKCIDIVFPEFNKLFNSKYGIVYMNILKMFGSAEDIANTDIRTIRKCFEIEGRGNRISLTPERLKECARSSIGISSSAEVIQIKHLTAQIELIEEQLTEIDKKIEEFSIQNNSPILSIPGISHFSGTSILAELGDISNYSKPSQIIKFAGVAPLHYESSQFNAQHTAITKKGSKYLRKTLYQIILPVIRHNPVFNKYYQLKISQGKGHRCAQGHCVRKLLRIIYHLLKTNQQFDPQLLR

SEQ ID NO: 346227 - protein, 353 aa, unidentified
MRTIAYLAMDVHANHSVLGEMDFHGNFRGNQSFPTSEQNIIKALSAITAKEKYLTLEESNLAYWAAQVSSPYVTEVIPCDPKENALIYKSSIKKDKIDTRKLCRLLRLGELKRVYHPENDDRAIFKASALHYIDLRDQQIALKQKIKAMYRHWGIIDVAGEAVYSVEKRHEYLSQVKQVPIRNQLNRLYAVMDETESMQHKALKTMIALGRNYPEIKTFKKIPGIGDISAHVFDAFIQTPDRFAKRSKLWRYCRMGVTDRSSDGKPLGYRRLDRSGISEIKALIYQAWMSAMKGDNEVKQFYSNSLKRTHSRVHARLNTQRKIIAVMYGIWKKGEAYNPNLFLGSNDIVALYN

SEQ ID NO: 346228 - protein, 428 aa, unidentified
MSKSRTYSSQDVQSVRVDGLNKGHEAEAATVGVDVSKADLKLVIRWASGAKERPLAASNPGQVPQVVELLRELSRGRKLVVAMESTGTYGDVFRQAVTQAGLELQRVGGKAVHDYAETFDGVPSQHDGKDAGVIAELAAMGKGKAWPWRRGSETQQQIQACVDLLGCYSRHYAMWLNQIEAWLARHWPELGELLEIGSPTVLQMLAHYGSPAALAADAEAESRLRAWGGPMLTQAKIAAVRASAAATLGIACSGVDRQRAGRYAQETLAAQEQMQAQRRALRELGASQPNIERVGRAVGQGTACVVYASVGDPASYSSPGAFVKALGLNLTERSSGRHHGTRHISKRGPAGARRWLYFAALRCVQHEQVKPWYQRKLARDNGRGTPALVAVMRKLAMAIYRMCKDQVPFDPGKLFPGRPSRAKEVTMR

SEQ ID NO: 346229 - protein, 345 aa, unidentified
MQKIYIGVDFHARQQTICYLTTDSGEVRLHQLKHQDKAAVRAFYAQFSGQVIVGLEASGYSPWFERLLEELGCEVWLGHAAEIRRRARWRHKNDRRDAELILDLMLHDEFPRLYVPPLQSREVLRMLRYRQKLIKMRTIGKNSLQALALQSGLAKGPHLFTKAGLQELRSVPMTPAMQWQREQWLQLLEPLQQRLLETMLWLKQQGQADERISRLRTHPGIGLLTALCVVHSLEPVSRFANTRKVAAYAGLDPLERSSAERQRFLRISKGGSRVLRFLLVEAAHIAIRSDAELSRFYCRLAERHGRSKAKVAVSRKLLIRAYIILRDEIDYAEFQRRAVAARPAR

SEQ ID NO: 346230 - protein, 401 aa, unidentified
MPELLITEESSIQRSHLSFSNTEVGFATFKEWILDLKERHEKDKVVPGMEPTGHYWFNLGKFLQDNEMKPMLVNPHHVKKSKELDDNNPTKNDRKDPKVIAGLVREGRYMIPYLPDGVYADLRTASNIRFQLQAELTRIQNRISRWFNIYFPEYKTVYGKPDAKSGMLILKAAPLPEDILTLGIDGVNQIWRDAKLRAVGKARAKTLIEAAEHSIGSKEGTMSARMEIRMLLEDYESKNMRLQEVMVLIEELVKEIPMAEKLLEIKGVGIRTVSGFLAEVGDISRFNNPKELQKLAGLAVVENSSGKHKGKTTISRRGRKRLRYLLFEVAMSLVAKNPEFRELHNYYTTRRLNPLKKMQSLMAIAAKLIRVFYAMLTKGVDYDPKKMISDIKRPTVYLQAA

SEQ ID NO: 346231 - protein, 408 aa, unidentified
MERVIEACAGLDVHQATVVATVRGPGPGGQRSEATQTFGTTAEALVVLRDWLAAHGVTHVALESTGVYWKPVYYALEADVTVVLANAQHVKQVPGRKTDVRDSAWLAQLLEHGLIRGSFVPPPAIRELRELTRARTALLQDRTRVVNRLHKVLEDAGVKLATVASNVLGVSGRAMLAALVTGTTDPAVLAELARGTLRKKLPALRAALAGRFQRHHALLVGQALEHFDYLDEMVGTLSAEIAERLRPFAATLTQLQTIPGVSERVAEVLVAEVGVDVQPFATAGHLASWAGVCPGQYESAGRRKGGKTRHGNRWLRGALHLSAQAVVRTKAPSALGARYRRLLHRRGHPKALRAVEHAQIVALYHMLARGVPYRELGPAYLDARAAERAQRRAISLLERAGYRIMPAA

SEQ ID NO: 346232 - protein, 347 aa, unidentified
MRFYTQAHRYYCGIDLHARWMYVCILDPQGEVLLHRNLRACPETFLKAVEPYRQDLVVAVECIFSWYWLADLCAHHGIEFVLGHALYMKAIHGGKAKNDRIDSQKIAVLLRGGMIPVAYVYPPEMRSTRDLLRRRTYLMRKRAELLVHVQHTNSQYNLPEIGKKIAYRANRSGVAQRFSDPAVQTSIATDLSLIDFYDRLLTQLELFITRQAKQQDHHSFYLLRSVPGIGKILALTILYEIHDIARFPRVQEFVSYCRLVKCSRQSAGKNYGFSGKKIGNVHLKWAFSEAAVLFLRNNPEGQKLLARLERKHGKAKALSILAHKLARTVYFILRREKAFDLTQFLAA

SEQ ID NO: 346233 - protein, 340 aa, unidentified
MGRYVGIDLHKNMFVACFWEAEDCQALVRYPLEQIEQFVKALRSDDVVGLESTGNTACFVRQVEGQVASVKVIHPGKFKVIAESTSKTDAKDARTIAWYLAKGMVPEVRMKDRAHAELGSLAQTRDRLVKLRTALMNKIHNLLSAQGILLRRESLGTQKGLEEALKTPVSEVATIELKVLGKEIRSLNESIAELDRELAERGKKLPGHRNLSSIKGIGDKSATILLSVIGDIQDFASAKKLAAYFGMAPRVEVSNDTRHYGRITKKGTKIGRTTLVQCTWVAIRYSPYLRGFYERVKAGKGSGKAIIATARKLLGIIYDTLKHDWVFKDFSHFEIEAEVA

SEQ ID NO: 346234 - protein, 369 aa, unidentified
MPQVRFIGLDVHKKKIAVAIAEEGRSGEVLSYGSIDNTPTALAKLLQKLGKESATLHLCYEAGGCGYGVYRQILDAGHLCDVIAPSLIPRATGDRVKTDRRDAVMLAKLLRAGELTPVWVPDPTHEAMRDLIRSRGAAMSQRQVARQQLQAFLLRHGRIYSGIKTWGPVYYRWLGGQKFELPAHQAVMQDYANAVLDADGRIKERDKQIAELIPQWSMHPVIEALCAMRGVSTIVAASVVASTGDLTRFESPRQLMAYFGLVPSERSSGGTVRRGGITKTGNNEVRRVLTQAAWCYRFPARVSRARMDAFCAVSAAVRQIAWKGQLRLTRRYRKLAAKGKPIQVVVTAIARELLAFMWAIGQVVTPANA

SEQ ID NO: 346235 - protein, 426 aa, unidentified
MRAIGIDVHRDFCEVAISEGGQLRSAGRVPSTPAELELLAQSLCADDEVALETTGNALVIARILEPHVSRVVVASAKELHAISGAKAKTDRRDARTLAKLLAGGLLEGTWLPGEEICALRRRLARRAQLVRQRSRLKNEVHAALYRNLAGAGPASDLFGAAGRRWLAELELPADERETVEGCLRVLDFLGAEVDRLERSIARYALHSSEIRRLVTIPGVSLITAATLVAVIGDVARFPSARKLVGYLGLDPRVRQSGSSPARMGRISKEGAAAARHVLCEAAQAAMRTPGPLRAFGQRIAARRGPQVAVVAVAHKLASLAWRLLTSGEDYAYASPSRVALKLRRIELRAGEPPRRRSGGTVTLADQRERERETALAAERAYRRLVADRQAGSGSRKGAGAAVGRASMKAHVGPGSAADASAPASAL

SEQ ID NO: 346236 - protein, 352 aa, unidentified
MKKESVGCFSNKNLFVGIDVHKKRWVVTVRTYDLELKTLSMHPSAEELEKFLLDNYKGALLHIVYECCFSGFWIYDYFHQRGYQIIVTPTNRIYRDGSIVKTDKIDSRKLAFQHSRGLLREVKVPQMKIREYRSLFRIYDKEKMRLGQILRQVRSILEAKNHPLKWERFNKEMIEKLSALKFQEEIFNKKFTSLLKEYEFVKEQIKDTEGRIKEIAEDKELSEKVKRIEKIQGIGILSAVRLVVYLFDIKGRFETGEKLVHYLGLTPGEHSTGEQIIRSRTGLIGNKQLRSIIIQLAWVAVRKDGNLLNKFERVYKNSGCKQKAIVAVARKLMMKVHSITEKEEEYEVNIAA

SEQ ID NO: 346237 - protein, 395 aa, unidentified
MFIVGIDIAKRSHEAIIIAEDGQVVRKAFSFRNNCTGYNLLLEQVRRLTLVKSQIVFAMESTAHYWLALYARLLKDGYAVMVLNPIQSHSLRELYIRKAKTDARDSLIIADLVRFGRCKASNVPQDKILALRELCRSRAYLVDMAADLKRKLIALLDRIFPEYESLFDSVFSKASIAVLSKYSTPQKVKNANLRKLTDILMESSNGHFGEWKAHQLKEAACSSFGIDDSDGVYSTLLGMFLEQILPLTAQADSLEKQISVFFQEFNNPLTSIPGVGTVLAATILSEIGDITRFSSADKLLAYAGLDPSVKQSGEFKSNQNRMSKRGSPYLRRAIWLASTVAVHRDPMFQTYYEKKISEGLHYMNVIGHVSRKMTAVIFAVLRDGQPYQPILQSAD

SEQ ID NO: 346238 - protein, 315 aa, unidentified
MPADGKDVFVGIDVSKDWVDVAVRPTGAAWRSLQDEESLSALVGRLQELRPRLVVLEATGGYEVPLVAALGAANIPVAVVNPRQVRDFARSLGKLAKTDRLDAAVIAHFGQASGAVAQPLATAEARELAALVARRRQVIQMKTAEQQRREKALPVVQQRIDRVIAVLAQELQDLDQDLTHRLRQSPLWREREDLLRSIPGIGPAATVTLLADLPELGSLTRKQIAALVGVAPLSRDSGRLRGQRTCWGGRANVRTALYMPTLVAVRHNPVLHAFYQRLLGAGKPKKVALTACMRKLLTILNAMLKHHTAWEPNHA

SEQ ID NO: 346239 - protein, 336 aa, unidentified
MLTKSKKLNFEGQNIYVGIDVHLKSWNVTILSDQMHLKTFNQIPSPEKLSNYLNSNYPKAVYKSAYEAGFCGYWAHRRLMDLGIENIIVNPADIPTTQKETAQKSDPVDSRKIARFLRSGELSELYIPQVETEGDRILLRSRYRILMDLGRIRRRIKSLLYFQGVSYPPALNASVHWSSRFMKWLSEDVHLESESAEESLGLFIKEANQLRSMLLEVNRCIKRLSQSPSYEKPLRLIRSVPGIGIITGMTLLAEIENITRFKNADRLACFVGLVPMCHSSGEKESKGELTFRGKLLLRSYLIESAWIAARIDPALQLAFSELCKRMPVNNAIMSPL

SEQ ID NO: 346240 - protein, 320 aa, unidentified
MSQNTIASMNQNPASVYAGLDIAKASLQLHLQSKSYDLSNTAGGHRQLIKRLAASPGVHVVCEATGGYERAVVAALHATAIPVSVLNPARVRQFARASGELAKTDPIDAVMLSAFGQAFAPEPTPPRTATEIALAALVARRAQLLELHVAERQRADTCVEQVLRKLFTTWLAQIEKQIAKVDTLIEELLVQETALAGRVRRLEEITGVGRITAVTVLATIPELGQLNRRQAAALAGLCPYNRDSGQYTGKRCISGGRAEVRRALYMAALSASRSNHLLKPFYDRLIAAGKPGKVALTAVMRKLIVLMNHLLKNPNFSLAH

SEQ ID NO: 346241 - protein, 344 aa, unidentified
MEYYAGLDVSLRSCALCIVDSKGTVLFERELPCEVSDIAECLAGFPHPIERVGFEAGAMSQHLFFGLTAEGFDVVCMEARQVSAALSAMRNKTDKTDARGIAQILRTGWFSPVHMKSREAHGLRALLSTRKALLKKTMDLANEVRGLLKIFGVRLPKTVKHGSFDSVVRPMIEIDDVLAHALVPLLDARVVLYQHYLELDRRVKRAASHDDVCMKLMTIPGVGPIAALSFKSAVDDPTRFKSSRTVGAYFGLTPRRYQSGEHDNPGRISKAGDRDVRAVLYAAANALLMRTMASSQIKSWGMRLMRTKGRRRAVVAVARKLAILMHRMWIDGSEFRQDQVGGMA

SEQ ID NO: 346242 - protein, 350 aa, unidentified
MAMTIVGTNPDAVIGGVDTHAEVHVAAAVNHVGGVLGVESFPTTRIGYRQLVSWLASHGELSLVGVEGTGSYGVGLSRYLARAGIAVVEVDRPNRQTRHRKGKSDPVDALSAARAALSGTATGLPKTRDGNVEAIRVLMIARRSAVDTRIETLNQMRHIVFTATPEIRGKFEGLTAISLANTAAALRPREGDDPVRYTTLVTIRALGQRVQYLREETKRLNRLLRPLIRQTAPTLLEVYGVGYDTAAKLLVAAGDNPQRIRSEAAWAHLCGVAPIPASSGKTARHRLNRGGNRQANSALYRIMLSRLRHDQATRDYVARRLSEGKTMGEIGRILKRYIAREVYKQLPRPA

SEQ ID NO: 346243 - protein, 391 aa, unidentified
MVCVGIDVAKDKHDCCILDSDGTVRADCFTIPNNMDGFKQLLQTIRDCTKKSDKIKVGLEATGHYSYNILGFLLDNGLPTYVMNPLHTNLYRKSLSLRKTKTDRVDARTIATMLLSDVDLKSYTDIAYHNEDLKSLTRYRFDKVQERAKLKQSVSRLATILFPELEQLVSSIHGTSIYALLGEYPGAKQISEVHLTKLTNLLTTASKGRYGKEKAIQIREAARASIGSVMPAKSLELKHTIKLIQELASEINEIEDSIQKIIDELNPPILSIPGMGVNSAAVILAEIGDFSNFSSPDKILAYAGCSPSTYQSGKLTNCYAHMEKRGSRYLRHALYNATKYVCYWNPVFAEYLAKKRAEGKHYNVALSHAMKKLVRLIYALQKSGKAYLAAA

SEQ ID NO: 346244 - protein, 352 aa, unidentified
MTVYIGVDLHVRTQTVCWVDTADGEQHEVPLDHQRDDVRAFYAQFAAPAVVGVEASGYSLWFHRLLEELGHRLLVGDALAIRQCARRRQKNDRRDARLLLDLLLHEEFPAIHIPAPASREVLALLRYRHRLVRIRTMLRNGLQAVALSHRLRLGPKLFTAGGLQQFAALPLTGAFAVQRQHSLALLASLAEQVLAVEAQLQDRAQQDPRVLRLRTHPGVGLLTSLAVVHTLEPVSRFDRARRVAAYCGLDPKEHSSGDTQRWGHISKQGNRLLRFLLIEAAHTAIRGDDDLCRFFFHLQARKNASIAIVAVARKLVLRLYRMLRDETDYTQFRRRGRDARRAREDTSQAASG

SEQ ID NO: 346245 - protein, 428 aa, unidentified
MDDVNRNRLEEFRQLRQAIRQSEEHLIVGIDIAKDRHHAFFGTATGKTLLRRLVFSNDGEGFRKLLDQAEALRVRHGLKKVVYGMEPTGNYHKPLGEYLIRMGRTVVLVSGVTVKHNRESLDGRWDKHDDKDSANVADLISQGKYLYYEYPTAELRGLRGLLSLKRRLKRQEQGYRVRIRNHLIAQYFPEMDRAYERLGAEGLAIVRWCFPASQITEIDVDPFIERVTSRRISMEKRRRLEAIWEKAGESIGCDAVPGVEHEAKVMVEGLRQIREMIQEIDGKIQELCESFPEYRSLLSIPGFGPDVSAKVLGAIGDPDRFENGKQVVKLAGLDLSANRSGKDSAKAIPQISKQGKADLRYALYQAAFIASTKNQDFMRYYTSKLRGREKEKGIHTKRLIKLSAKMLLIAWTLMRKKETFDPTYLKAE

SEQ ID NO: 346246 - protein, 357 aa, unidentified
MNKHKYVGLDVDQATIVAAVEDASGNFLMETFLPTRAADLRDFFKGLKGTIHTAFEEGAQASYDLIEPLAEEVVVCDPRRNKLIQTGNKGDRPDARKLARLLRLGELHAVYHGERGTRGLKELVHGYDYLVHDVTRTKNRLKGAFRSRAICCRGTKVYSADERKEWLEKVDLPAVRTRVSSLYEQLDYLRKLRDKAHKEMLREARKHPAYKLLVKVAGLGPVRTSQIIAAVGSPHRFRTKRQFWPYCGLAVVTHNSSEYEIVDGRRRRRNKPLQTRGLNKNFNRTMKEVFKGAAKTAITSEPFRQYYQRLIDEKMRPEMALLTVARKISAITLAIWKKGENFDPERVNQAARDSGDQ

SEQ ID NO: 346247 - protein, 325 aa, unidentified
MVLGIDISKASFDVVLLADEQSKGIHKIFSNTPRGFKELRAWLVKQGAKQLHACLESTGSYGVPLAEFLVAEGHRVSIVNPRRIKHYAKSRLSRNKTDKQDAFVIARFCLKEQPEPWLPLAPEVKQLQALVRRLEDLKDLKQQEENRLEATLNSAVQDSVESMIAYLNEQIKAIEAAIDDHIDRHPSLKRDAELLQSIPGIGRITAQKLLAEIAFANFGSARELAAFVGLTPKQNLSGTSLKGRGRLSKIGSCELRKALYFPAVNARRFNPVIQAFCKNLLDKGKPMMVVVCAAMRKLLHLAFGVIKSGRPFDVAHLTHTSSLAA

SEQ ID NO: 346248 - protein, 407 aa, unidentified
MIFIGVDLSDKTFDSCICNSDGDVLATNKFNFDDEGFSDFVYRITQHEPDSKNCIIGIENPRSRLVDFLIQRGYNVIPTHPNSIAKYRESRIPSRAKSDPMDARLIADYIREHHKSLRKISLPDDAIRELSILLEDRKKLVEQKTMFSNQLTGTLKEYFPQALDAFGSVTNKSALEFLSMFDTHQEVKALSRQELDNVLVKCGLFRTDSKEKFHNAISKRPSVISHAVVKAKVRLKNALVGHLLLLTQQIEDYEKQIQSILDAIPDGGIFRTLPGADYILGAKLIVLYSSREFASSSEAQAFFGTCPYTSRSGNMIVVGFRRGCNHFGRNTFHQLAFCSLRNSQWSKRQNAKKRKEGKGSNHALRCIANSWVKITYAMWINKTPYDESKHLASIASHIMNQSSFIQG

SEQ ID NO: 346249 - protein, 405 aa, unidentified
MNAVGIDVSKGKSTVTIRRPGDVVLMPPCDIPHTQSAINALIDQIKSLDGETKVCMEHTGRYYEPVANWLSDAGIFVSAVNPILIRDFGDDSLRTPKTDKADSKKIARYALDRWAKLKQYGSMDKTRNQLKTMNRQFGFYMDQKTAMKNNLISLLDQTYPGANDFFDSPARSDGSQKWVDFVYTYWHVDCVRSKSLQAFTEHYRKWCKRNGYNFSASKAEKIYQSSSDLIAVFPKDDSTKTLIRQAVTMLNTASQTVEALRIKMDQTAATLPEYPVVMAMNGVGPSLGPQLMAEIGDVTRFTHREALTAFAGVDPGKNDSGKRNQKSVRTSKKGSPSLRKTLFQIMDGLIKRSPVDDPVYTFMDKKRSEGKPYYVYMTAGANKFLRIYYGRVREYLASLEEAKES

SEQ ID NO: 346250 - protein, 355 aa, unidentified
MTTYCGVDFHARQQLVKWCNTEDGEIHERQLWHQSIDEVREFYAQFKGAVIVGLETSGYSWWFEAMLEELGHQVWIGHATEIRRRARSRQKTDRRDAELILDLLLKDEFPRIHRVSAESREVLRQLRYRHRLVQQRTRSYNSLQAIALSAGVSLKAKLRTRKGKERLLGLVVSAAHGQQRQEWLDVIAQLDGYIERVEKELELIAEADERVQLVRTHPGVGLLTGLGLVHTLSPVSRFANSRKVAAYVGLEPREYSSGERQQFGGISKAGSRLLRFLLVEAGHKAINKDAQLKQLYYRVMHRREKAKAKVAVARHLLVRTYIMLRDGIDYAEFVRRGVAVPSARVGYRPEKCLTI

SEQ ID NO: 346251 - protein, 363 aa, unidentified
MDRLPTSQDSIRSAAHTAARVYEVRLERAAHANSPSHSHGRRFRIHCIGVDVSKQELVTFDGTRERIFPNTRGLGEFDRFLKRSGNALVVFEPTSTYSRRLETLCRTHRISCCQLNPRVVPHLRQVGKGRSKTDSSDAELLYRYGIERGHTEAAPLENDALAESIQARLACYRVAQKGRVAYQNVLEALSQDPATSDSLLAELSAEIDELKRKEKQQLAAAQHLVEQDEEEAQRLGALLSIPGVGPITALTLVALFRKYPAANRSQIVALAGLDPIQFQSGTSVHGKTRISKRGNREVRKRLFEATLSAARCNPSIRATYRRLKEAGKPDKVARIAAARKLLLIAHAIYQSGASFRDPSAKEA

SEQ ID NO: 346252 - protein, 353 aa, unidentified
MNNSRNKAEVILGVDTHLDTHVGVLLNAQGHQLGCLMVTTHISGYERLVTWANSFRCLKRAGVEDTGTYGAGLASVLRKHGINVFEVNRPDRSKRRLQGKSDPTGAESAARTVLSGSATAIAKTQSGATEMMRVVSVARRSAIKANTLAMNQLRALLFSAPQDVRERLWKSKPADCAKGCTRVRSLGTTELLHTLTTTLCLLAKRWFLLADEVEKLDAMLDALTHQHARRLREQFGVGPQTAAVLLSTAGDNPERLRNEASLAALCGVNPLPASSGKTVRHRLNRGGNRAANNALWTIVMVRMRGDPQTQSYVARRSAQGLSSKEIKCRLKRYIVRELYSLILADLAALARAC

SEQ ID NO: 346253 - protein, 364 aa, unidentified
MVIIGCDFHPSGQQVYGIERESGEVVAERWIGHGGEEVDRFYGALPAGAVVGVEASGNMLWFERKLQQYGHRLRIGDAARIQAYEVRKQKHDRRSAELIARLLMEGTFPELGWVPSLAERDLRQLLMHRDKLVRMRTQVKNQLQHIAMNQGQQKKRQLWTKAGRQLLEKLPLEPWTARRRDDLLRWMDQLNQECANLDEAVEQAAEANPEARRLMSHPGIGPVISLGFVLTVGPIERFQRSRELVSYLGLNPREQSSGERRWLGGISKQGSVFLRRLLIQGAQTAVRGDAELARQYRHLAAKKHKAVAKVMVARKLVVRMFWMQKTQQTYPELVRTRGSSSHPGVGKTVRLSERPASPQALAAS

SEQ ID NO: 346254 - protein, 411 aa, unidentified
MRRVIGIDVHRTFGEVVIWEDGRLRHAGRIDMTRTALEGFGKTLLASDEVVVEATGNSMAVSRVLAPFVARVIIANPLQVKAIAQAHVKTDKIDAGTLASLQAAGYLPQIWTPDAETERKRRLVARRYQVVRHRTRLKNEVHSILHAHLIPKCPHADFFNGRGRAWLVAQPLPDDERAAIDRHVRELDRLAEDLALLDREIAQDAIDDSAVNRLMTITGVNLAVAAGIMAAIGDISRFNSPQKLVSYFGLNPRVRQSGLGAAHHGHISKIGRSHARAMLVEAAWAAAKAPGPLHAFFVRIRARRGHQIAAVAVARKLTVLCWHLLTKGEDYLWARPALVAIKTRAMQLQAGHPQQKGSRRGPAYAYNIKALRDREMLIAAQAEQSYERLVTQWKPRRPKTGARAPQLGKTK

SEQ ID NO: 346255 - protein, 423 aa, unidentified
MENTAARKRKQVPEGYLIIGVDPHKKRHAAVAITQDFTIRDKFKFDNTREGLETMLRRVRMEMVESCCRGVMFAIETGGHYWRNIAYALDEQGIPFRFINQFTLKRRREGKDLNRRKNDYRDSEVAAQLLCTGEFTESKLPQGVYAELRTAHNSYRRLVKERTRITNLVKGLLDGLFPEFTQIFKDPCALTALSVLSICPVPSVIARITEDEFVTVIEAEHKGRLMRRKLRELHCSAKTSIGIDAGARSVSSEISFLVEKLELIRRHIGIIEGTLVRLLDETEEGKYLLSIRGLHYIAVAGLLAELGCFKAYRSAKQMIKMAGSNPTESESAGKKRSRTPMSKQGRPVLRYCAWTSVIPMLRFNSDFRNWAKQRRERPVHANPLGGREVVGAALNRLLRLAFAMVKNQTYYQVSKPELTMVAA

SEQ ID NO: 346256 - protein, 355 aa, unidentified
MNDTKYIGLDVHQATISVAVLDSSGKLVMEAILETKAETILQFIHGLRGSLRVTLEEGTCAAWLHDVLKPNVAQVLVCDPRKNALIKAGNKSDRTDARKLADLLYLDKLHPVFHGETGNRALKELARSYLALTRDTTRVMNRLKALYRSWAIPCAGQRVYAPRYRSEWLAKISEAGVHRRAEIYYQQFDALRSLREQVRRDLLAEGRKHKAMKLLRQIPSIGPIRAALLIALMQTPHRFRTKRQLWAYCGLALKTSTSGEYRIVEGRLKRARKFLAIRGLNVNHNHDLKNIFKGAATRAAAVPGPFQEFHAGLVARGMKPTMARLTLARKIAAITLIVWKKGVDFDAEHLKQQAA

SEQ ID NO: 346257 - protein, 444 aa, unidentified
MAGTLYLGIDVSMAENACSPLLQDGTEARRRFTVPNNLPGAEQLASEMAKLMESYHLDRLLVGLEATNLYWWHLACFLNSSPQLSPFQPRVYAFNPRLIKSFKKALSDTTKSDINDAYAVAERLRFGRLPAQFIPNQLYQPLQRLTRFRCHLMHQIAREKSYFLSFLFLKFSEYQNLDPFSDIFGATSQAVLTDYLSVDEIATAPLEELAQLLVKEGRNHFSSPETIAAVVKRAAQDSYRPHATLNEPLNLILGTTLENIRTLSRQTKKLDQAIEREVRKFSNPLISIPGLGPVFAAGIMAEIQDIHRFPDQSSLAKFAGLFWRTRESGSFQAEETSMGKPGNAYLRYYLIQAASSVRMHNAEYGSYYRTKYNESTKHKHKRALVLTARKLARLVDAMLRHNQLYVPPLMNLTEEVNKPAITRARPAKQHHYRQPGSHSLALCA

SEQ ID NO: 346258 - protein, 394 aa, unidentified
MRFVGIDIASEGHVVAVVDEGGNVVAGPTPFREDAAGYRTLLEAVGTAADTFVTLEATGHYWKNVFAFLAGQGYAVALVNPLRTRRFAEEELERTKTDSIDALGIARFAAQKRPPATRLAEEVTLELREMVQLRDRLQQDLGDRVRQLHRVVDLGFPEFTRYVTDLSSELATSILKDRQTAKSFLGLRPRALSNLKYDGRHFVGLELATKLIEAAKVSVGAHHGEAYRVQVRYFCEDIEVLRERIHDIDRDIESKLDAHEVGKLLTTIPGIGPTTAARLIAVLGNPADFQDAAALAAYAGVVPGLRQSGKKAPSSARLTPIGNSSLRAKLYMPTLTAVRLNPWLKAFYERLRARGKPAKVALLAAMRKLLAAVYSVAKHRQPFVPRLLPAEVQP

SEQ ID NO: 346259 - protein, 404 aa, unidentified
MYNAVGIDVSKGKSTVAVLQPGGTVIRKPFDVSHTSQNLNELADYLSSLDGTTKIVMECTGRYHEPMIKALSEAGLFISIVNPHLIKNFGNNSLRKVKSDPADARKIARYTLDNWTELRQYSGMDNTRTQLKTLNSQFSFFMKQKVAAKANLIALLDNTYPGVNKLFDSPTREDGSEKWVDYAYSFWHADCVRKIGLKAFTERYKSFCKKHHYIFQQDKPEKLFNASKELVAVFPKEKTYKLLIQQSIQQLNLASEHVERLRREMNELASTLPEYSTVMGIYGVGKTYGPQLIAEIGDVSRFTHREALTAFAGVDPGVDESGQHKSKSNRASKVGSARLRKTLFQIMTTLLQNAPEADPVYRFLDKKRSQGKPYYVYMTAGANKFLRIYYGKVKECLRNLEQTE

SEQ ID NO: 346260 - protein, 339 aa, unidentified
MKILDGARLLVGLDYHQDFVQVCVLEETGRIVRNTRVENDWRKIAAVVPAGAQVQAALEACCGAADLADELVERAGWSVSLAHPGFVARMKQNPDKTDYSDARLLADLLRVGYLPKVWLAPAELRELRRLVRYRQQKVDERRDVKLRIRAILRDHRIQELDGNPWTRKWLKCLAAFEQIGRDSEWIMQQHLSHLARLNVEIRQVERRLEQRIADNAVVRKLREQKGVGLVTAATLRAEVGRFDRFQNGKQLARFCGLTPRNCSSGNKQADAGVIQAGNPPLRAVLVEAAHRIMHCDERWMKLAQRLKARGKHTCLVVAAIANRYVRWLHHTMQPEALAV

SEQ ID NO: 346261 - protein, 320 aa, unidentified
MKNIILGIDISKTKFDAALLVDGKVKTKKFNNNSKGFTELKQWLTSKSVSIANVCMEATGGYEASLAEYLYDNGFKVSVVNPARIKGFAMSRLARVKTDKADCELIAYFCEAIKPDLWQPIAKHIQELQQWIKRLDSLIANKNQETNRIIKSSTPKVISNIQRHIDFLNTEIKEVEQFIADHIKQHKDLEDKNKLLTSIPGIGAKTVAIVLAFLGVENFDSAKQVVAFVGLNPKPKQSGSSVYRGSRISKTGDADLRKAFYMPAVVSIKFNPIIKDFAERLSGTGKAKMVVVIAAMRKLLHIIYGVLKNSTPFNANIQTI

SEQ ID NO: 346262 - protein, 312 aa, unidentified
MYYIGIDVSKKDLSVFDGKKDLKFINQEGLKSFKKYLKKKVNFSDLVLIFEPTGVYSLYLKEFCAENSIKAYIVNPKKSHNFTRALGKRSKTDKIDARILYQFHKLIDLKDIKIPKIDQQAKTLASYLTSYEFALKQRISLSNHLESLRDKGLIALLKKDLKRAKKLEDKLFNDILEYVSKNQNLKEDYQRLLTISGVGDKTAIALLTLFKTYQGTNRAQITALAGLDPVRRESGTSVKGKVKISKNGKGIYRKILYLPTICATVHNQKIRVFYQRLLAHHKIKKLAVIASMRKILLIAHAMYRDKTEYVTT

SEQ ID NO: 346263 - protein, 370 aa, unidentified
MAHTSTLFIGMDVHKETIAVAYVAEEREAEVISLGTIGTRQCDIDKLIRKLQAKGKTLHFVYEAGPCGYGLYRYLTKKNLKCWVVAPSQIPKKTGDRIKTDRRDAVPRARLLRSGDLTPVYVPAVEDEAIRDLVRAREDALKDVKAAKARLKAFLLRQDLRYEGRATWGPAHLRWLAKGVCPTPAQQIVFQEYVRAVSEQTERLQRLEAELHTQVQSWRWVPVVEAIQALRGVQFTVAVTLIAELGDLSRFENPRQLMSYLGLIPSEHTTGERRRQGGITKTGNSHARRALIEGAWAYRYPAKVSRHLQLRLEKLPKVIQDISWKAQVRLCKRYRRLIARGKNANQVVVAIARELAAFVWAIAREVEVAH

SEQ ID NO: 346264 - protein, 315 aa, unidentified
MERSPAAPTFVGIDVAKDRLDVHLRPWGETFALSRDGAGLEALVERLGALAPALVVLEATGGFEVAVAGALAAAGLPLVVVNPRQIRDFARATGRLAKSDRLDAEASARFAEAVRPAPRALPSAAAQALGELVARRRQLVEMITSEGQRRRQTREARLQRRLEAHLTWLHKELAALETDLDDAIRGTPAWRAAEDLLASVPGIGKTSARTLIAELPELGSLDRRKIAALVGVAPINRDSGAFRGRRMVMGGRASVRTALYMPTLTAIRHNPALQALYQRLIGRGRPAKVAITACMRKLLVILNAILRDHRPWQTP

SEQ ID NO: 346265 - protein, 431 aa, unidentified
MHVVAVDQNVKNVRSYGVYTKDHHDMIEYLRSHEISTVAMESTGSYWQTLFSALQNSGFEVILVSGSQTKNVKGKKTDVIDAIWIQKLHSLGLLSGSFLSNAIMQELKTYYNHRQHLIEQIARYTLKMQKSLRLMNVRLDVALRDITGKSGMNIIEAILAGQRNPLYLSTLVDIRTKKTKEEIANSLHGTWRPELLFELNACLALYHHFNKALAECDEIIEKLLAEYTPERTITKEQEKLFRSYNRKKSKNAPDFNIARISYQFFRTGLFAISGVSHNTVLCLMTNLGGDIYKFPTAKSFASWLRLVPNNKISGGRILSSKVKKGKNTIATALRHVANSIGNQKDHDLLPFFKRIAFRKGRVAAITATARKIAIILWNMIVRAEHYSSQRIMADKEKFREKRLKQVQKNIHNLKLSQDELNQLMQRCLLQV

SEQ ID NO: 346266 - protein, 294 aa, unidentified
MFFFWGRPSCKTLRLLVSTSASILSTFTVSDKSGKALLCTKFTRTKLIEFLAGCTPATVVMEACGGARFMARRIADLGHEAKLIYPQFVRPFVKSNKNDFVDAEAICEAASRPSMRFVQPRTEVQQAMRALHRVRESLVRDKVKTTNQMHAFLLEFGISMPIGVTVIKRLSTVLAENELPPYLAQLLMRLHAHYLYLVEQITELETALEQELSRDETEQRLQTIPGVGPITANVLSSQLGDGKQYSCSRDFAASTGLVPRQYSMGGKNTLLGISKRGDKNLRRRLLTNLEDAIL

SEQ ID NO: 346267 - protein, 355 aa, unidentified
MKYYCTTTEFNCGIDLHARQMYVCVMDRQGRKLVHCNVRNNDFEFFLKLIQPYRHSLTVCCECMFGWYWLADACAAAGLTFVLAHALYLRLIHGGKNKNDRIDSEKITHLLRSNLIPPAYVYPAKLRPLRALLRQRLVYVWSRAELLARISSHQLAHNRTPARQTRRIRDPWEEELLAAEDHPLRQFALQNDLAMIRHYDAQIKLLEGKLVSLAKKQSGRDFALLQSVPGIGLSLGLTILHEIGPIERFPTVKDFLSYCRLVKGTVASAGKIKGLRGAKLGNPYLRWAFGEAAVIAKRDHAIIGPLAQRLEARFQGNKFKANTVVAIKLARAVYFMLKDKTVFDPERLIRTMTKT

SEQ ID NO: 346268 - protein, 467 aa, unidentified
MVLSFLKKCPNGSLPTFSYFLFSGAFFVIYHLIAERKMKKIRNHCAGIDIGAKRVFTSVEGEQVVSHLTFTEDFYKLRDYLLEHQVETVAMEATGVYWIILYEILEEAGLDVWLVDGRQTKQVPGRKTDVKDCQWICELHSYGLLNRCLVVDSDIKELRSYVRLREGHIESASKHVNQMQKALIMMNIRLKEVLSQIHGVSGMAIIEAILNGERDRNKLVNLCHSKVLNNKKDLVYKALEGKYTEAGLFALRQAYDAYYFYQNQISECDKEISKVVNRIGNSGKGQEKRKRKPIRHNRPNVDKLDANLLNLFDGNDATQISGLTDYTWLQLTSEAGTDLTRWPTEKHYTSWLGLSPGQHNSGKMNRNARKKGKPRAGQIFKVIAQSLINSKDIAIGAFGRRLRGRKGPAIAIKAMARKLAVIYWRMMVKGIDYVEQGVKMYEKQIAANKLKTFIRLANELKMEVAAN

SEQ ID NO: 346269 - protein, 344 aa, unidentified
MVEITTVGLDLAKRVVSLCGEDASGRVGVRRTLRREAVLGWFATRSPCLVGMEACGSAHWFARELAALGHTTRIIAPEFVRPFRLSGKNDANDAAAICAAVRQPQLRFVAVKSAEQQARLVVHRLRQGWQEERTAGLNRLRGLLAEFGRVYANSATAILSGARAVLSDETLPAALRRGVALQLEHLRELGVHLADCDHEIAQQARDDPRAQRLARLAGVGVLTASAVTATVVDAEQFRCGRQFAAWLGLTPRQYSTGGKARLGRITRRGDAYLRTLLIQGARSALQAALRVVPQRRNRLAAWIVTTYERIGYHKTLVAIANKHARLIWVLLTRDEPLHAHAAAT

SEQ ID NO: 346270 - protein, 426 aa, unidentified
MQTVLHSKADPLAACVGWDWGCESHAIVLRAADTQEAVVEILAATPEAIHRWLDATEARFGGRTVAVALEGSKGPVFTQLLERPWIRIYAVHPATSTRMRNAFSPSGAKDDKPDALVLLDLVDNNRDKLRKVFVLDAPTARLEQLVELRRDIVDRRTQLTNQLDALLKKYFPQALKLTGAHLYSDLALDFLKRWPSLVELKVARPETLKRFYHAHNVRSSEAVEERLKLAAEAKFVTTDQQRSEIWKMELAYLAAQVGVLMEHLVGVDKHVAEALKQHPDADLFTELPGAGPVFAPRLLAAFGTDRGRYEDADSLQKLAGVAPVMERSGKSTRVRWRWQASRFLRQTFVEWARCTIATSAWAAAYYEQQKARGAGNWAIYRSLAYKWIRILWKCWQSRKPYNEAEYLNQLARRRSPLVARLKAKVA

SEQ ID NO: 346271 - protein, 400 aa, unidentified
MISVGIDVSKNKSTVCIRKLYGEILEKPFEVKHTLEELKKLADKIISFDEESKVILEATGHYHIPVVSYLQERGIWVSVVNPMLMKKYASISIRKGKTDKLDSKTISKFGLDNWHELSNYKIEEDIYYELKALSREYFQFMSLRIKLKVILSNLLDETMPGIAGLLASNSPNFAKDKLSDFVQKYWHYDNIIKLSQNKFTENYKKWTKKEGYQFSENKAHEIYILAKNSITTMPSKMSSTKMIILETIKGIHSTGITLNKILSRMKELAKLLPEYDVVLNMNGVGERLAPRIIAEIGDVRKYYSAKALVAYSGIDAPPYQSGNFNGNNRKISKRGSRYLRKTGYEIMKSIKCRVPTKDTAVYDYIIKKESEGKAKKQAKIAGLNKFLRIYYARVSEILKN

SEQ ID NO: 346272 - protein, 401 aa, unidentified
MQQKQLLVGVDVGCHEHHVAIGGPSGIVEQFEITHDTRGFAYFFARLEGQARRHKLPVVVGMEGTNGYARPLDQMVRAKGYTLLNVNNLKLARFKEIFATPAKTDSIDAQTIVTLMMMAPLMKQAKESLQQVPVIGEIEMQLKRISRRRRQLVQEKVILQNRMQADLQSVCPGFLDTIKKVDALYVLRFLSFRPDLRQLARLKEATLRSIPGIGKTIAQRLGQWQETATFGPEAAWVGPMIVEDAKRILELKEKLDALEAQMETLVDNSSLSKLLLSIPGFGVVCAAEVASEIGTMERFDSEAGLGIYLGMAPVDNSSGKYKGTKSPRQVNKRAKAAMMVALGHHVRLVDESKMYYKKKCAEGKKHNQALRSLGRHLTRVIWRMVKNNRIYESKSVVATAA

SEQ ID NO: 346273 - protein, 458 aa, unidentified
MNRKRSKPKIDRSMAMVHPNAAAIDVGATMHMAAVRADRTPDPVRSFGTFTADLRRLVDWFTECGVETVVMESTSVYWIPIYELLDARGFTVFLVNARDAKHVPGRKTDVSDAQWLQRLHSYGLLRASFRPKGRIAELRAYVRQRERLLEYAASHIQHMQKALTEMNLQLHHVVADITGATGLRIIRAILAGEHDPNMLARLRDYRCHASAETIEKALTGSYRAEHLFALEQALALYDAYHQKVSACDVRIEVVLKELSIDRGRRSDSLLSPRRPRTDQVNGLAFDVRAALFALLGKDITQINGLGPYLSLKLIAECGDDLTAWPSAKHFTSWLGLAPSNKISGGRVLSSRTRRCGSRAAALLRLAAVTVGRTDTALGAFYRRLSARIGKAKAVTATARKIAVLFYNAVRHGMKYIDPGASFYETRYRTRVIDNLHRRAKAFGFVLQPMETTPGLAVS

SEQ ID NO: 346274 - protein, 343 aa, unidentified
MKLQVVGIDLGKTVFHLVGLDSTGRVVIRKRCSRTQLLAFTANLQVQLIGMEACSGAHFLGRALREQGHEVRLMPAQYVKPYVQTNKSDYLDAEAIAEAVQRPRMRFVPIKTEEQLDLQALHRVRERWVMRRTAVVNQIRSLLLERGLTLPKGRSHLDEQLPRILEDAELNLSDSFRVLLSQLKLELEQLAARIEEMDRVIQKTARENEACQRLTEIPGVGPVTATALIAAVGNASAFGKGRNLSAWMGIVPGEYSTGGKQKLLGISKRGNKYLRRLFVQGARSVLQQRHKQAPGLSRWLAQLLGRTHQNVVVVALANKLVRMAWAVLCKNERYRAPVFAGTT

SEQ ID NO: 346275 - protein, 421 aa, unidentified
MQETNEPVEFVERVAAIDIGKSGVVVCVRVPSEDKPGRRRQEVREFTTLTASLLALADWLRCQSVSLVAMEATSDYRKPVYYLLEAEGFTCWLLNAKHVKNVPGRPKTDKLDAVWLAKVVERGMCRPSLVHPKPIRQLRDLTRYRRSLVRERSREKQRVEKLLEDAQIKLSSVISDVFGVSGREMLQALIDGQRDPKTLAQMARGPTRSKITVLQEALTGHFSDEHGFLCQMMTDRIDDLSARIEAVSRRIEDQIAPYAAAVAQLDEIIGVGAIAAQELIAEIGIDMSRFPTAGHLVSWAKFAPIDNNSAGKKKGGSTGKGNPWLAATLAEIVAVTSRSSTFLGERYRRLSRRRGRKRAIVALGNSVLTIVWHLLSDPDARYHDLGPDFYQSRIATQRRERDLIRQLERLTGKTVTLQPSA

SEQ ID NO: 346276 - protein, 351 aa, unidentified
MAGSKRLVIGGVDTHCATHHAAVIDRNGRLIAGAEFSATPVGYASMLTWMRSKRKLGQVGVEGTGAYGAGLARYLHQQGIEVLEVPRPDRRLRRQRGKSDPIDAEAAARTVLAGKASGAPKLADGPIEAIRMLRVARNGAVKARTAALNTLRSMVITAPEPLRTQLRSLSSAQLVTACARLRPDPTNLLDPAQSAKQALRSIAQRAQHLDTETRSLRKQLDDLIQTAAPATAAIFGLGPDTVSALLVTIGDNPDRLRSEAAFAHLCGVAPIPASSGKTHRHRLHRGGDRASNSALHIATVVRLRYDPRSRAYADHRTTEGLSMPEIIRCQKRYLAREIFHSLRADYAQLST

SEQ ID NO: 346277 - protein, 471 aa, unidentified
MSYDRIFFRYAFRHGINQKIKIMSTKKSKKVKKVKINEFTLVHPNAAGIDISSKDHVVAVPEDRDDTPVRTFESFTCDLHKIAEWLNKCRVDTIAIESTGVYWFQLFLLLQAYGFEVYLVNSKHTKHVTGRKDDESDAQWIQKLHSCGLLNRSFQPEEDIRALRSLVRHRKNLIHSRSTHINRIHKALEQMNIKLGVVINDILGKTGKAILQSIIAGERNPKELAKHRDRRIKASIETVEKSLEGIWRKEHLFELKQSYELYEYYQEKIIECEDEIQKQLEEYVAKNNYGDISELRESAKKKLKKNEMLFDTSVYLKKIMKVDITNVFGISYTSALEIFAEVGIDMKRWPTQNHFTSWLNLAPNNKKSGGKLISSRVPKKRNVAGQTFRVAANSLWNSKNPLGDYFRKIKSRQGHSKAIVASARKLAIIYYNMLSKKEEFNPKAIIEYQEKYKQIKIKRLKKQLADLEQAA

SEQ ID NO: 346278 - protein, 351 aa, unidentified
MLIVGCDYHPSFQQIAWVDTKSGEVGERPLMHSSGEAERFYRKLKEQGVEVRVGIEATGHARWFERLLAELGYELWVGDAAEIKAKRVRKQKNDREDARLLRTLLVENRFPRVWLPDVGNRDLRQLLWHRHRLVQMRTRVMNQLQALALNEGVRRKKGLWSQAGRAPLESFQLMPWATRRREDLLALLDGLTPRIAALTAAVEKQSEQHPEAQRLTTHPGVGPLTALAYVLIIGSPQRFRCGKQIGSYLGLIPCEESSASRQRLGHITKQGNSLLRFLLLEAAQAAVRCNPDWRREFLHLTMRRGRQIATVAMARKLAVRLYWMWRNGRDYEMSWQFGSHVGQPGTGNGVK

SEQ ID NO: 346279 - protein, 380 aa, unidentified
MQNDHQSSESVILGVDTRLDIHVGAVISQAGRLLGALIIQTNQAGYLELLDWARSFGGLERAGIEGTGTYGAALTRYLIKNGIYVVEVNRPNRSKRRLEGKSDPLDAENAARTVLSGSSKAIPKMQSGACEALRIISVARRSAVKARTQAINQLRALLVSAPQDVRDKLWKSKPHECIAACINSEVSEHSPLRIALCSTLRSLAKRWMALTEELNELDESLDKLTRKYASNLRSQFGVGPHTAATLLAVAGDNPERLKNEAALASLCGVNPLPASSGKTVRHRLNRGGSREANNALWTIALVRMRSDPRTRTYVDRRTREGLSTKEILRCLERDIVRELYPLILSDLAYANRPILTEERQCRSRVVLQFAEKRAYQKAYI

SEQ ID NO: 346280 - protein, 404 aa, unidentified
MYNAVGIDVSKGKSTIAVLQPGGTVIRKPFDVSHTSQSLIELARYLGSLEGSTKIVMECTGRYHEPMLKALYEAGLFVSVVNPHLIKNFGNNSLRKVKSDPADARKIARYTLDNWAELRQYSGMDNTRTQLKTLNSQFSFFMKQKVAAKANLIALLDNTYPGVNKRFDSPPREDGSEKWVDYAYSFWHVDCVRRIGLKTFTERYRAFCRKHHYIFQPDKPEKLFHASKELVAVFPKEKTYKLLIQQSIQQLNLASGHVERLRQEMNALASTLPEYSTVMGIYGVGKTYGPQLIAEIGDVSRFTHREALTAFAGVDPGVDESGQHKSKSNRASKVGSARLRKTLFQIMTTLLQNAPEDDPVYRFLDKKRAQGKPYYVYMTAGANKFLRIYYGKVKECLRNLEQAE

SEQ ID NO: 346281 - protein, 349 aa, unidentified
MLFTGLDLHKSFSYVTTITDKGRIVGQRKLPSNGEVVEFLKAFDESMEVAIEATPSWYWLYDQLEEEGFDVKLSHPLKTKAIAYAKVKTDKVDSATLAHLLRSDLLPLSYVPEKPVRLTRELLRYRASLVKVQTGIKNKIHAILAKNNVSHSYSDLFGKAGMAFLQLVPLPENYRIALEGYVSVLEAVRREIRVASRRVQQLAQEDPDAMLLMTVPGVGYYSALLIRSEIGDVKRFPSAKQLCSYAGLVPSTYASGNTCYHGHITKQGSRWLRWTLIEAAIHAVKRPGPLRRFYHKVERKKGGKVAKVATARKLLEWMYHILKDGKTFHEIENAVEVLSRGKPVNFAGL

SEQ ID NO: 346282 - protein, 344 aa, unidentified
MAAVLSTLGAVMDTAPFPATSVGYRALWEWASQLGAVHRAGVEGSGSYGAALSRYLLARRVEVFEVSRPDRSVRRRRGKSDPVDAQEAARAVLSGRARSQAKAGDGPVQCARLFKLARDSAVKARTQAINQLKAVLVTADPELREQLAGLKTPALVRTCAQFEDRESGDGETAAVEQATRIALCLLAQRIDQLTGQIRGLERRLTALMERHFPQLLTRVGIGPDSAATLLITMGDNPERLCSEASFAALRGVSPVEYSSGPQRHHRLNRGGERRANAALYRIVQTRLRCDARTRNYYERRIAEGKTRREIIRCLKTLGRPRSVQSGPVWHRAPRSGLSTPNKMI

SEQ ID NO: 346283 - protein, 348 aa, unidentified
MITIGIDPHSRTHTAAALDERGRVLAEITVGSDVRELDRLVRWIQSVGPERIVAVEGARGFGLALCRRVLAAGETVLDVAPALTASEPRSNRKAGKNDRGDAVAVARIALRELGLPHASAEMIGADLKLLVDARDQLVREATRTRNRLHALLLVIAPGYQEHIRDLTSSAGLLIARRLASRARATDRVRSSLACSAITRLRSLSGEIGAVERDITSALDQVAPANLLSICGVGPLVAAKILGEVRDVGRFSSAAAFASYCGTAPIPASSGTIIRHRLHRGGNRQLNRALHTVALTQARRDDRAKAFLARKRGEGKTPRDARRALKRHLADAVYRALLLDAEGARSIAA

SEQ ID NO: 346284 - protein, 440 aa, unidentified
MKALPILDERATGIDVGSERLHVSIGGAAPRVFATMTCDVEQLLAWLLEQKVRSVAMEATGVYWMYLYAALQAAGIAVVVVNGRHVRNVPGRKSDMSDCQWLATLHAHGLLHSGFVPPPQIRRLQDYLRVREDHISMATSHVQHMQKAMERMNVKLHDTISDLTGVSGLKVVRAIVAGQRDPQQLLQLCDVQIRKKKAQRVMESLRGTWQAEHLFALRQALAGWDFYQAQIRECDQAIEQVLHELSGPPSDDDAATPSRAKPGGANTPRIEGLHRMLVQLCGGHDPTIMPGMGDHSLLCVIGEVGTDLRQWPTEQHFTSWTGLAPGAAQSGKRRKKVPRQRNRVGQYFCDMARSAGNTADSAFGGFYRRLKARRGGLVATKALARKLAAMFWRMMVHGVQYVEQGLVKYQLRAALSEQRVLAKLARKHGMQLVSKAAIAT

SEQ ID NO: 346285 - protein, 454 aa, unidentified
MMHGGHIGGQRAGAFLELVGGMDPRRVLLVGVDVAKATWFVVASNLLGEVMVDGVRLVADRAGLAELERLIAATSGQLDAAVVVVGVEAAGHHHQTLVGHLGDREGLVVRLLNPAQVAAVRKQQGNRRRKTDWLDAAAICELLARGEGSSPHLDASPAATLRPLWSGRKDLVDARGRLRQQAGALVDCRWPGFSATDTHAGVAPVLSSPFATKAGRVVVGLLAEGWTPARVAATSVAELRALFAARGCRLSGPLAGRLIGRAASALPAHPAATAGKQATLAGLLGALAALDSQIARLEAEMAPPLAATQGAKLTQIRGVATVAAAGFVAFVGHTGRWSEWSKVWRAAGLDPARSQSGATDQSYGISREGSAWGRRAILDLAAGVCRQPGRFHTSYQARLHARKHPKVALAAVGNQIGRTCFALMGSGADYDPDHQAKRIPQRTGNQPKVGGRAA

SEQ ID NO: 346286 - protein, 390 aa, unidentified
MIYVGIDVAKDKHDCCILDTEGRKLYPVFTISNDKVGFDELFSRIEEVTSDKAEIKVGLEATGHYSNNLLASLVDKGFPTVVINPLHTNLYRKGLSLRKTKTDKVDASSIAMMLMADRTLKPYSETSYHNEELKSLTRYRFDKVHERSKLKSSLARLVNILFPELEKLVPSLHLNSVYTLLEELPGADYIAGCHLTHLKKLLESSSKGRYSRDKAIEIRNAAIDSIGTPMDAKSMELRHTIHLIWILSEEIEEIEASIKGIMDEMQSPIMTIPGISYRMGAMILAEVGDFARFDNADKILAYAGLSPSTYQSGQLDSSHSHMEKRGSRYLRYALFNATKFVCKWDESFGIYLGRKISEGKHYNVAVSHAAKKLIRTIYRMELTGQAYSPS

SEQ ID NO: 346287 - protein, 390 aa, unidentified
MEPPSMQTPNDLSQSGIVLKQDSTLIAVIEMSLSSWLVAGMVPSVERQPLKKLAIDENALLKLLHRWREEAEKAGRKIERIAVAFEAGRDGFWLARWLRARGIEAHVIHASSVAVSREHRRAKTDRLDTELLKRAFLGWLRGERDHCKMVAIPTIEDEDAKRPNREREGLVGEQTRIINRMKAALSRLGIRGFNPKMKKAAQRLEDLRTPEDEPIPPNTLAELRRDMERRRLISEQIRQIENARLERIEHAPRHGPHAMVRVLARVIGVGIETADMLVQEALSRNMRDRRAVARYAGLTGSPDESGTRRREKGLARSGNARVRRGMIQLAWRFLMFQKDSALARWFRARTENARGARKTMIVALARKLLIALWRLVREGVVPDGVVLRPV

SEQ ID NO: 346288 - protein, 340 aa, unidentified
MSTINILGIDIGKSTFHLVGHDLSGREVYRKKFSRPKLIQVLSTIEITTIAMEACSGCHWLARKCQEFGHKVLLIPPQYVKPYVKTNKNDFIDADAIAEAAARPTMRFVSVKTESSQVISVIQRIRSSYVKDRTACMSRIGATLLEFGMSFPKSHAKMKVLFQWLAEHGEPIPPMLLLELRDHHDFYLKLNQLILTQDKKLKEIVNNDERAQLLKTIPGVGTLTASRCISDISNVADFKNGRHLAAWLGLVPRQFSTGGKPTLLGISKRGNKGLRELFIHGARAVLVRPEKAVAVFGNWILELLSRKHFNVVVIALANKLARIAWSVLSTKQAFEVRVQA

SEQ ID NO: 346289 - protein, 319 aa, unidentified
MVYVGVDLHRKRSHVVALDPTGEVVLSRRIGNAPAEFLRIFGELEPQPIEVVFEATYGWSWFADLLADVGIPAHMAHPLATKAISAARVKNDAVDAKTLAHLLRTNLLAEAWIAPPDAREARRLVRTRAGLVRMRSRVQSQLHALLADLGIIPELTTLCGPAGRRWLAELPMAASARSRLDAGLRLIDAITVEVAHADADLRACFAGDHRVRRLLPIPGVGLVTAATVVAEVWDIQRFPSPERLCSWAGLTPGERTSDAHTRRGHITKQGSRWLRWMLVEAATTAVRDPQLGRFTAQIAQRRGPKIARVALARRLLTLC

SEQ ID NO: 346290 - protein, 400 aa, unidentified
MRVVFGIDVSKVSSEVAILVNGEKVHNYTMSNDAIGFSRLLGDLKTVHKPEIIFEATGVYSRRLQAFLDEHSYAYTRLNPLEAKKQLDSLRVRKTDQIDAEKLAQSQFVLNRKPTYIQEEVYQDLRDLSRFYQNLTEDIVRAKNRLHKVLQVTFPELETILSTPTGEQYWNLVTAFPCKDFVLELSKDELSKSIRLSTSKRISDKRVAYLAEKLTALANQSYCAVKKTSPIMEEVRYYAKELLRLSEQRQAVLDEMVELAQPLPEYDILLSIPGIAETTATSIIGELGDIRRFQSANQINAFIGIDLRHYESGNFIAKEHITKRGNPYARKILFKCIHNIASASHTNPCHIADFYEKRKRQSQMTSTKPHTIASIHRLIRTMYYLITHNKLYDYISTQNR

SEQ ID NO: 346291 - protein, 394 aa, unidentified
MEDVLRSCCAGLDIHQKVIVACVIRSIDGKKRPEKFFASFDTTTRGLFELSDWLVSYDVTHISMESTGVYWKCVWRILQNHFELQLANPRQIKNIPGKKTDMKDAEWIARLTRLGVVPTSFIPPEPIQELRDLTRYRKHLVEDLNREKNRGHMVLQSAGIKLTSVIKDIYRKSGRALLYALVEDKPITESLILACVYTTLRRKVPQLMESLEVFMTPHYRKMLALHLTQIECLENQIKEVEETTNDYLAPYEEYVEHLEEIPGINRRTAAVVLAEIGLDMSVFPTAGHLASWAGVCPGNNQSAGKTRSKRVRKGNSYLKKVLAQGAAAISQGKSNRIRAFFFRIRKNAGHKKAIIAIVHLLLRIIYRMLSDQSRYQELGGSYLSNRKNTSITIN

SEQ ID NO: 346292 - protein, 356 aa, unidentified
MDSTKYIGMDVHKEATTIAVMNSAGKLVMESIVETKAATMVQFFEGLRGELYVTLEEGTWAAWLYDLLKPHVTKVVVCNPRKNALLKAGNKSDRIDARKLAELLRAGLLSAVYHGETGLRTLKELCRSYLAISKDLARTMNRIKALYRSWSIPCGGISVYAPRHRAEWLSKITEPGVRRRAELFYQQLDGLQKLRQEARRELLAESRKHGATDLLQRIPYVGPIRAALLIALMQTPHRFRTKRQLWAYSGLALETHSSAEYHYVQGQLQRSKRPVALRGLNQNHNHDLKSIFKGAANKAGSAKGPFHDFYTALVAKGMKPTMARLTLARKIAAITLLVWKKGVCFDAQQLKQQVSV

SEQ ID NO: 346293 - protein, 370 aa, unidentified
MGKSVLYVGLDVHKMSVDVAIAEPGSAGETRYYGRIGGDLEALDKVTRKLRAQGVELRFAYEAGPCGYQIYRHLTAQGYSCLVAAPALIPRRPGDRLKNDRRDALNLARLLRAGELTAITVPDGDDEAMRDLTRAREDAVSVERRAKQRTAAFLLRHGHRYPGKTAWGRGHWCWLLQQVMEHPAQQIVLQEYLDAMREAGARVQRLTGQIQELLPQWRRAPFVAAYQALRGVSLIVAATVVAELGDLSRFNNPKELMAYLGLVPSEHSSGASVRRGRITKTGNGHARRVLVEAAWAYRLRARVTRPLLQRQEGLPESIRQISWKAQLRLCARYRRLLARGKAKQTIVTAIARELAAYIWTIGQVVEPLTA

SEQ ID NO: 346294 - protein, 371 aa, unidentified
MPRFSTYIGLDVHKNSITLAFGPADLDEPVSKGEKLPNDLPRLLRRLKSFGEPSEVKLCYEAGPTGYGLVRELRALGYTCEVVAPAKTPQVSRERVKTDKRDARRLAEYLRTGHLTEVRVPTEEEESLRDLVRAREDIKSVEVNMRRRLGGLMLRQGRIWRGTKHNWTKAHYEWLEVQEFESRGTQEAKQTYLEKIRSLQVTLKDLDEAIEELVPSLKRADLVRALCALKGVKTYTAAALVSDIGDFKRFPSASKFMSFLGLTPSESSSGDTTRRGAITKAGNGRLRRLLVEAAWTYKKSPHIGRDLARRQRDASEVVRDHAWTAQKRLHKRKRVLDNAGKGSRKITVALARELAGFVWAIGQESDLMQAS

SEQ ID NO: 346295 - protein, 355 aa, unidentified
MSSEKYVGLDVHQATISVAVMDSQGKLIMESILETKASTILEFLAGLRGALSVTFEEGTWAAWLYDLLKPHVAKLVVCNPRKMAMLKQGNKSDKIDARKLADRLRLNDLKPVYHGETGVRMLRELARSYLTVVKDLSRVMNRLKALYRSWAIPCAGRDVYYTRHRSQWLGKIPEAGTRRRAEQLYQQLDMLQHLRQQARRELLAESRKHTITAKLRQIPSLGPIRSALAVALIQTPHRFRSKRQLWTYSGLGLETRDSGEYHFVKGQVRRRKKQVWIRGLNKDYNHDLKGLFKAAAIRASVLPGPFQDFYQRSLAKGIKPTMVRLTLARKIAAITLTLWKKGENFDIEKLKSQAA

SEQ ID NO: 346296 - protein, 342 aa, unidentified
MKQYVGLDVSQKETAVCVVDQVGNVLFEGKAPSDPGALARVIHKRAPAAERIGFETGAMASWLWHELKRVGLPVVCVDARHAHAALSVRMNKSDPNDARGLAELIRVGWYREVRVKSDDSQAVRALLVARSRLVRIRRDLENQIRSLLKEVGLLFSRAIGGQFRIRVLQLVDDQHVLRSIVDGLLAVHEEVTKQQELLDKRIRTEAKADETTCRLMSVPGVGVVTAMTFRHTIDDPARFRSAQTVGAYLGLTPRRKQSGELDYNGRISKWGDRMLRTYLFEAASVLLHRTQRWSALKVWGTRLMKRIGAKKAKIAVARKIAIILHCIWTDGTEFEWGAEKVA

SEQ ID NO: 346297 - protein, 362 aa, unidentified
MFRPHTLYIRIRIVRKVSEPAFAMKDQDVTDVIRRKQQTAMKYIGIDVSKATFVVAYSSDKGGEIRTFNNTTTGIKQFIGALPKDGSIHCVMEATGNYSALLLYMLNVAGITVSMENPLKIKNFARAMLSTVKTDKIDARLIALYGEKMNPQPFKIQGEAILRLRQKRTVIRQLTKQITAMSNLRGSLAYLPVPDKGATHTVDETVKFLKKKRDRLQAELTDLVKVEFSRQLALLTTIKGIGITLATALIITTGGFTYFQNAKQVSRYLGICPTYEQSGTSVNIRGHINRNGDAYTRGLLYVAAWTASRFNAKCGETYTRLRQNGKPGKLAMIAVANKLVRQAFAVVTHDKEYVDGFVSNRP

SEQ ID NO: 346298 - protein, 427 aa, unidentified
MEISEVKGSSLRREPSARFSESRSGRRGMEVTVERAWAGVDVGKEFHWAHLLDSSGTKILCRRVENDEADISELISELIAETLSLAEEVVWAVDQSGGGAALLLALLWERGQRVIYIPGLTVGRARETYRGESKTDAKDAHVIADQARMRSDLNELGPGEEEVAELRILLGRRRDLITDQNRTITRLGETLLSLSPALERALDLNRKGPLTLLTHYQSPAQLRRAGHKRVAAYLRNRGVKGFDSVAGKALSAATSQSTTLPAESVAARIVAELAAEILALKDHIELVDEEIEQRFFDRPEAEVLASLPGMGPLLGAEFLVAVGDLSAFESADHLAAYAGLVPAANDSGKRVGNNRRMRGGNKNLKRVFYQAAFASLRSSPESRAFYDRKKAEGKRHTQALIALARRRVNVIWAMLRDGTTFEVQSTA

SEQ ID NO: 346299 - protein, 343 aa, unidentified
MDHFAGLDVSVKETSVCTVDDTGRIIREVKVASEPEALLEVLRNPAWHFKRIGLEAGPLSQWLFSALAEAGLPVICVETRHMRAVLKAQINKTDRNDARGIAQMMRVGLYRPVHVKTLRSQKLRMLLTHRKLLQSKAIALENDLRSTLRNFGLKVGMVGAVKFEGRIKELVENLPDLAVLVEPLLVVRRVLHEQIVILHRRLLDIVRNDDVCRRLMTVPGVGPVVALTYRATVDVPSRFKNSKAVGAVFGLTPSRHQSGESDRPGAISRCGDEMMRVMLYEAAQVMLTRTNKWSWLKAWAMKIARHRGMKKAIVALARRLAVIMHRLWVDGTEFRWTREVVAA

SEQ ID NO: 346300 - protein, 370 aa, unidentified
MLDTTTFVGLDVHARSIKAVSLDVMTGEVRAATFGYDAGAVAEWVRSVDPGARCVYESGVTGFDLQKRLSGLGVDCVVGAVSKMIKPSADRRRKNDRNDAEFLARMLSVGNVVEVWVPDDECEAARDLTRALEDARDDLSRSKQRLSKFLLRHGFVFDERTPTGRRKGNWTRAHWSWIESIRFAEGADNDALAYYVDAVRRAAEEKARLEGLVEGEARKPRWRRRVDSLRCLKGVDTASAADLVFEAGEFSRFRNARSFAAWVGLTPSEHSSGESDRRGAITKAGNKHLRKTLVEAAWHYLTCSGRPKDLAKGQAPDRGARRHAAKGVRRLVERREALLARGVHGNKANVATARELACWVWAVGLMAEEA

SEQ ID NO: 346301 - protein, 407 aa, unidentified
MEVLHPRCAGLDVHAANVVACVRITTGRSVTYEHRTVSTTTRGLLELADWLTANGVTHVAMEATGVYWKPVWHVLEDHCTLVLANAMHIRNIPGRKSDKNDATWIADLLALGLIRSSFVPPAPIQELRDLTRTRKQLVRERARHMQRIQKTLEDANVKLTEVITDILGTSGRAILTALIAGETNPERLADLTSGRLKATRAQLVEALHGRVTAHHRFILKLHLTHIAALATAVADVEARIREALAPVRAAVSLLMTMPGVSETAAAVILGEIGDDMSKFPSAGHLLSWAGLCPRLDESAGKRRSTRTRPGAPWLKTTLVQIAWPAARKKHSYFQAQFLRLKSRRGPKKAIVAVAASMLTDVYYMLRDGAEFHDLGDQHFAQRDKTRLTNRLLQRLRDLGVEVEVKAA

SEQ ID NO: 346302 - protein, 344 aa, unidentified
MAIVGALDIHRQQITFDWVDHDSGEAGHGRISPADRVGFRKWLGQFGDKPIELVVEGCTGWRFVAEECQAAGVAVHVADPAEAAGPRNRKMRAKTDRIDARKLREQLEKGDIHDSWIAPAHVLEIREKVRLYLDLSQAKEAWQKRIHATFFHQGVPKPDGRLFRGERVQVGLSDPDLSPAGEQAVDVAMRMIAAIDADLVPLRAELTAFGRRHPGPRELAHEYGLGALLATAVWEELGDTRRFAASKQAVRHSGLDISIYDSDGKTRGRPRITRQGQPVLRWALYEGAVHASKKTSPDHLYYLRLANKIGRGRAKLAVARKLARRCHHRLRALGDQAWLDLAAV

SEQ ID NO: 346303 - protein, 344 aa, unidentified
MKIAVLGIDLGKNVCSVVGLDPSGAVVLRRRVRRDTLIDLVAKLPSCIVGMEACCGAHHLGRLFAAQGHDIRLMSPEYVRPYIKAQKNDDRDAEGIAEAATRPTMRFVEMKTEDQLDMQTLHRSRERLVGERTALINQLRAILLDRGIVVPQGKRKLDQYLVILMNEHDGERLSARMRMLVADIRAQWQELDRRIGEFDAEFVRWAKENEDARRLVTIPGVGVTISTALIAAVGKAETFEHGRDLAAWLGLVPRQSTTGGKPRLMGISKRGNKYLRKLLIHGARAALPYVAEKDTALGRWAKSLLSRVHQNVAVVAFANKLARICWAVLRSRQRFAAKGVPLVV

SEQ ID NO: 346304 - protein, 406 aa, unidentified
MTYRVFVGIDWGSQEHAVAVLTRDGTGAQERKVAHTGMAIAALVDALITLADGAPESVAVALEVPRGSLVEACLERGFHVYALNPKQLDRFRDRYTVAGAKDDRRDARVLASALITDVGAFRRLDPEDARLIQLRELTRLEEDLDTERRRLSNRLREQLYRVAPGLLTLCPGADEPWLWTLLTRASTPAGAAHLPRAAVARVLHQHRIRRLTPDDLLAVLRAPRVPAAPGVLRAVEDHLAVLLPRLRLAAEQQQTCATRLEQLLDELGQTQEHRDVAILRSLPGVGRKISATMLAEASRPLAARDYHALRTQAGSAPVTKQSGQRRRVTMRRGCNPRLRNAVHYWAQVSAGHDAVSAALYARLRARGCSHGRALRGVADRLLAVLVAMLRHQTLYDPERRRISAAA

SEQ ID NO: 346305 - protein, 344 aa, unidentified
MEITTVGLDLAKNVFQVHAINTANEVVVKKTLRRVQMRRFFEQLDPCLVGIEACGTSHYWAREITKLGHEVRLMPPAYVKPYVKRGKTDAGDAEAICEAVRRPTMRFVAIKAPEQQAALALHRTRDLFVKQRTQLVNMIRGLLAEFGIEIRRGIEQALMLAKRIAALEVPDIPPLAAKVIAGLAGQVLDLQARLGEIERELLAWHRSNAISKRLATIPGIGTVCATALAASVTDPHQFRSGRQFAAWLGLTPLQHSSGGKERLGRISKMGDKYLRRLLVVGMTSLIRRAKYKPEAVDPWLADLLSRKPARLVTVALANKAARVVWAIMVRGGVYRMPAGVTTPV

SEQ ID NO: 346306 - protein, 339 aa, unidentified
MQVTTIGLDLAKNVFQVHGIDDHGEVAFNRALRRAQVLVFFEHLAPCLVGIEACGTSHYWARELIKLGHNVKLIPPAYVKPHVKRGKSDAVDAAAICEAVTRPTMRFVEVKTPEQQAILAVHRTRDLIVRQRTQTINMLRAQLAEFGVVLPQGVYHPLRFAKDCVDGEQPDLPKDAQEVVFDLCDQLLFLHLKILRHSRHMTQIAKREKRVALLRTIPGVGPITASAIVATVGSGEQFNNGREFAAWLGLTPLNKSSGGKERLGHISKMGDQYIRRLLVLGMTSRIRSIRLEPEKFDPWFADILSRKPSRVAAVAMANKTARMIWAVLTRNEPYKVRTV

SEQ ID NO: 346307 - protein, 336 aa, unidentified
MYSIGLDYHWNTSKLHILDEHGKLVKRTRIKGHWPKVMAFLRTVDHPFKIAFEATCGAGMLYDRLRTVARQVQVGHPGQMRLIFRCKRKSDRIDAKKIAKLLFLDEIPPAYMPDAFVRDWRDAIEYRRRVVRKRTACKNALRTMLRSRGIVPPKGLWSPKGLAWLAKVELPRPFADDKRHTLLRELAEHEGGVNHITRRLNAVGRKNAAVRRLQTIPGVGPRTAEAVVAFIDNPDRFRRSREVAAYFGLVPCQDASAARNRLGHITKEGPAVARQLLVEATWQSIRRCPHVRAHFERIVAGRGNRRKIAVVGTARWLLQCMFAMLRSGEAWRFPVA

SEQ ID NO: 346308 - protein, 343 aa, unidentified
MKYIGLDLHKRNIFATVLDGDGNILSKANIGSKREDLSHYLKRQGSGNDISVAIEASYNWLYYFRIIESLTDNITVAHPLKTRIIGEAKVKTDKIDSKVLAYMLRADMLPRVYIPAKISMENKLLLRSRISLVRVRTQIKNKIHAIIDRNKDSYSGLGNLSDIFGKTGTGILKDTDIPQPDYMILANYLDLIKDINKKIAELEAEIDRRIITDKDMELLKTIPGVGKFTAFIIKSEIDDVDRFISKEKFASYAGLIPSVHQSGTKSYTGKITKQGNKFIRWALTEAAHSAIRYSEYFRYHYNKVKARRGANSAIVAVARRIAEIVYVMLKEKRGYIEKQVIYS

SEQ ID NO: 346309 - protein, 380 aa, unidentified
METATARSEKNNTNLAVLHLAFELSNKNWKLGFTVGLGQTPRERSVPARDMAQVLAEIAAAKRRFKLDDNARVVSCYEAGRDGFWLHRALVASGVENLVVDSSSIEVKRRARHTKTDRLDLGKLVAMLIRYHGGEKKVWSVVNVPELEEEDRRQLHRDLEDLKRERSREINRIKGLLSSQGISLEQRGQAKIELAEVRLWDGSCLPEGLVGRLGRAQERLAFIDRQIKELETLRVEELADSPRPDIGQARTLMSLKGIGPATAWVLVMEFFGWRKFRNRRQIGALAGLAPTPYQSGESSREQGISKSGNRRVRARAIEMAWMWVRYQPDSALSRWFRERFGQGGSRQRRIGIVALARKLLVALWRFLETGAIPEAAAVKA

SEQ ID NO: 346310 - protein, 316 aa, unidentified
MKSKTNQNINVGVDTGKYQLDIYIRPLDIYFTVSNDEKGIKEAVSLIKKHQPERIVIEATGRLEMPFIMACANANLPFVIANPVHIKRFAGAIGQRAKTDKLDAQLIAHFSEAIKPRLSTLKPSIMQAMSDLVGRRNQLLVMQTMEKNRLQILPKELAMTIKPILTVFKNQITKIEDKIVKLIESCPDYQAKNIILQSMKGIGKIAAASIISNLPELGYINNKEASSLVGVAPMNKESGRFKGHRKIQGGRHQVRTVLYMAMMSAIQSNPVFKETYQRLVAAGKPKKVAIIACIRKMVVILNSMLRDGVLWEAPKA

SEQ ID NO: 346311 - protein, 357 aa, unidentified
MQKGITSEETQTIGLDLGDRYSQGCVLDGAGDVVESFRVRTTPAGLSKRLAGFEPSRVVLEVGTHSPWVSRLVAHCGHEGIVANPRRVRLIAESDSKNDRSDAELLARLGRIDPALLSPIVHRGEQAQRDLVGIRARDGLVRARAQLVNQVRGFAKSLGTRLPGSSTGAFAQRVREAVGEEFFPGLRALLEMIDTLTASIRALNREIETVCQERYPETNLLRQVKGVGPLTALSFVLTLEDPNRFAKSRSVGAYLGLRPRQRDSGDQRPQLRITKAGDPLVRRFLVGAAQYILGPFGPDTELRRFGLRLAERGGKATKRRAVVAVARRLAVLLHRLWVTGEEYEPLGYGAQAPQAAA

SEQ ID NO: 346312 - protein, 338 aa, unidentified
MKLYGGIDLHSNNSVVAILDEQDEVVYRRRLLNDAAVILEALAPFGEKIVGLVVESTYNWYWLVDALMDAGYRMHLANTAAIVQYSGLKYSDDDSDAVWLAKLLRLGLLQEGYIYPKERRAVRDLLRRRSRLVQQHTANILAVQNLLSRNRGHSLSANKIRQLTPDAVQELLPDANLALAVQSTLLAMRGQEAAIDLLERQACAQMKGTPAYHHLLTTSGIGKVLGLTIVLETGPVERFARVGNYASYSRLVGSERLSNAKRKGRGNTKSGNKYLAWAYLEAANFAVRYNPTIKRYSQRKRAKTNGIVAIKTVAHKPARACYYMLRKGSDFEVARPSA

SEQ ID NO: 346313 - protein, 346 aa, unidentified
MMIIGCDFHPSWQQVSWMDTETGETGERKLVQASGDAEWFYRQLPAPALIGMEATGNCHWLVDLLAELGHELWVGDAAQIRASCVRQQKTDRRDAEHIRILLQEGRFPRIWMPSSEVRDLRQLLLHRYKLVTIRARVKNELQHLCLNQGVQRKHKLWSQAGQKVLRELPLKPWAARRREDLLALLAMLDQQIDPLDRAVKEEAQRDKMALLLQTQPGVGAVTALAYVLTMGDVSRFQRGKQVASYLGLIPREHSSGGRQKLGAISKQGNRMLRMLLVEAAQTAVRLDPGLRKEYLHRCHQKPKAVAKVAAARKLAVRLYWMLRTEKPYPEVVRIESSPRVPLVGAS

SEQ ID NO: 346314 - protein, 371 aa, unidentified
MSASVIYVGMDVHKDSIVLAFAREGREQAETWQTIPYDGVKLRKVLKSLIKNGEVLRVCYEAGPTGFGLCRSLRKAGIDCIVVAPSLVPSKSGDQVKTDRRDARKLAHFHRSGDLTEVHVPEEAVEAIRDLERARDDARCAERVARHQLSKFLLRNERRWDGNAWTKKHLDWIRKQTFAYPAQQRVLEDYVKTVEDLAERVERLTKSMAALVQETTLAPLVQALQAFRGVAMVSAVTIAAEVGDLRRFQTPQQFMSYVGLVPSEDSTGKRRKQGAITRCGNSHLRRIVVEAAWHYRHVPVMSKELRRRNQGVAEGVRRIAWKAQKRLNERMYHLIHAGKCIHKTVVALARELTGFIWAVGQEETLLEAKSK

SEQ ID NO: 346315 - protein, 322 aa, unidentified
MNKYKETFGVDISKDVFDVHGSNKGHDQYKNDEIGFKKFLKELPKGSLVVMEATGYYHYRLAQFLYKNGVVVSVVNPLSVKRFIQMKLAKVKTDKSDAKAICEYALINEVPIYNALTDTQSECLQLFRLLDTYLKQRTATKNKIHGEAVLGIPSKFVYRSLIRNKKQLNKEVAAIESKILSLVKEDQQEQLTLLISIPGIGQKTALFLIVVTDGFNKFETAAQLCSYVGITPTIRESGSSVRGRARISKVGNRKLRNLLFLCSFNACKHNKACREVYERIVNKGKSKKLALIAVANKLLKQSFAIAKSGRPYDETYVSVLPR

SEQ ID NO: 346316 - protein, 389 aa, unidentified
MSYCPVAGIDVSKRFSDMCILSPDNKIFAQEKIYHDETSINRANALLQKAERLFFSKPVIVMESTSHYHLILFQFFSEHGYDVIVVNPLQSNSMKDFSIRKRKTDRADAFKLAMMYRTKTLRPSQIPQTATRALRQLCRHRAELLNDVSSYKNRLTALLDQTFPGYDKVFSDVGGVTSCAVLVRFPTPTILLVEEESELVEVIAAASKSGYSFAKKKAGLLISAAQKAQTLGIHSCADETLIVCTIQMLRTLSESVLQIETAIDNLLAQIKEMRNNVSLLQSIPGVGSHSAALLLGEIGDILLFKKPKQLAAYFGLDPTERQSGSFRGTKNKLSKRGSPYARAALHMGVVNSICKRGKDSAANPVLLSYYEKTNRQRLLKQRQCTNWSL

SEQ ID NO: 346317 - protein, 337 aa, unidentified
MKRYLGVDLHRTQFTVCTRLENGRTYLRQWPMRELKLFAGQLRKEDEIAVEATGNTRLFHDAVVEKVARVVVVNPGQFKVISQSVKKTDRNDAETLALYLSKDLLPEVRMKERSQREIAHLAQTRDLLVKQRSALKAKINNLLSAEGINLKRESLSSNKALDRVLALPLPPILAAEARVLVAQVRSLTGSIAELEELLEEEGPRLAGHENLMSIKGIGPVSAAVLLSAIGNIEDFHEPGKLAAYLGLVPRIQNSNETERSGHITKQGNKLARTALVQCALVAKKYSPYLQQFYQRIQRRRGGGKANIALARKFLGVIYHTLKNNWVFEDFPNFVLAS

SEQ ID NO: 346318 - protein, 330 aa, unidentified
METYNVILGVDVSKLTLDISCAERRLHLKIENEAKGFTELKKWCKTNKINLSETLIIMEFTGGYEYRFIQYCESISLAYCRISGLEIKRSMGMTRGKSDKVDSFRIGQYGEERIKRLTASKPLDKDILTLKQLLSFRKRLVRENAGLASTIKERKHMYEVNKKDVVVQIASQKIKDNELHIVKIEEEIQELIKGNTAMLRNYKILRSIKGIGPINAWMTITYTENFNSFTDPRKYAVYVGVIPFDNSSGTSIKGRKKVSHLANKEVKQELNQAAKAAISHDSEIKKYAERKLLNKCYPLVLNNVKFKLILRIFSLIKRGEMYVEDYKKAA

SEQ ID NO: 346319 - protein, 341 aa, unidentified
MTLYIGVDIHARQQTASYLDTEVGSVEHQELHHERDDIRGFYAQFRGEVIIGIEACGYTNWFEELMEELGHKLLVGDAAEIRRLARRRQKNDRRDADLLLELLMHNEFPALFRYPPESRELLRQLRYRHKLVKLRTVVANSLHALAINCGLSLRAQLLTSRGRARLQELRLSPIAQQQRNELLSLADELSRRVLAVERWLQQQAGQDVRVRRLQSHPGVGLLTSLCLVHTLGDLSRFSGTRKVAAYVGFDPVEHSSAERKVYGSISKAGSRLLRYLLVEAGQTACKHDQQLKQFYRRLVPRRGKARAKVAVARKLLIRCFIMGREEIDYAEFLRRGKKVAE

SEQ ID NO: 346320 - protein, 349 aa, unidentified
MECYAGIDVSLELSSVCVVDAKGKIVREAKVVSHPEDLVAFLRALGLSIERVGLEAGPLSQWLHIGLTAAGFETVLLETRHVKAALSAMTVKTDRKDARGIAQMLRMGWFRPVHCKSPGAQEVRALLVARKQLLTKLLDVEASIRGILRGFGLKIGAVTRNSFEARVRELCAGHMMLSEITEAMLVARSALRKEYTKLHKAMLSIVRADAICRRMMSVPGVGPLVAITFKTAVDDPARIRKSRDIGPLFGLTPRKYQSGETDVTGGITRVGDEMVRTSLYEAANTLLSRVTRFSALKRWGMDVAKRRGTRRAKVALARKIGVIMHRMWVDGTTFRWTKEAPNASQPARA

SEQ ID NO: 346321 - protein, 347 aa, unidentified
MTLYIGVDFHPHQQTVSYCQSDEGEVHQASLFHNPKLVRRFYEQFPKAVVGIEASCTAAWFEQLMQELGHQLLVGNPTAIRARARSRHKSDRRDASLLLDLLLKDEFPALWRRSMQGQSVLEQLRFRHALVKHRTQVCNRLQALAHAAGLPRRGIQTKRARLALMKANFTATQSFERNQLFEMLDDLTARIKVVEELLEKSAAGDRRVELLLTHKGIGLLSALVVVHTLGDISRFPSSKEAVAYTGLDPLERSSAGRVRTGSISKAGSSVLRHLLGQAMHVAARYDGELKSFYKRLASRRSKSIAKTAATRKLLIRLFIMLRDEIDYAEFKRRGSAVVMPAPSHGLQ

SEQ ID NO: 346322 - protein, 347 aa, unidentified
MAAVMIGIDPHKGSHTAVAIGADEGPLGELRVRASAGQARRLLAWAVAWPERTWAIEGAAGLGHLLAQQLLAAGERVLDVQPKLGARVRLLAAGAVNKNDPNDARSVAVAALRSASRREVAADDHAAVLKVWAKRHRDLGRARTQVACRLHAVLCELIPGGVSKRISAALAGQLLEGITPSGAVEAARCELAAAFLDDLRRTGAQMRDAKNKLTAAVQASGTTVTEVFGAGPIVAATVIGEVRDVSRFASRDHFAAYNGTAPIEVSSGRRKIYRLSRRGNRRPSHAIHMAAVTQVSHRHSPGRAYYDRKLAEGQTPKEALRSLKRRLSDVIFARLQADAHRAAAGPR

SEQ ID NO: 346323 - protein, 429 aa, unidentified
MTTNHNSQSTLSPKEDSCPYEALIGIDWGDKEHAFCLKTADGKLESGTLVHSSENLLDWLAKLEKRFDSRSVAIAVEAQSLPLMAALRQFPWITVFMIHPATSSRLRTAFTPSGAKDDLPDASVLLDLLVTHLGKLRPMPEPAAAETRILDGLCRERRELVDLRTKWVLQVQSALKAYFPQALDLVSGELFRPFTKNFLDRWPDLFALQNTKPHVIKAFYTKHGYRNSDFIQRRLDLIKIAQSIETDLARIGELARKVKHLLERIEFANRQIKDLEKQMLTVFKQHENWQFFKELPGAGPSMAPRLLCAIQMAPAKSSEAMQKYFGTAPVKEKSGSRLWTHRRWNVPRFHHQTWIEWAGLSVQYSQWAKAYYQQAKARGKGRYTILRALAFKWMRIIARCIETNQDYSEERYIQALKRQGSPLAQSLLQ

SEQ ID NO: 346324 - protein, 352 aa, unidentified
MEKNNKLDFGGQHIYVGMDVHKKSWSVSIHTEQFEHKTFTQPPEVEKLTYYLERTFPGATYHTVYEAGFSGFWLHDQLRAKGIDCMVVNPADVPTKDKERAGKRDRVDCRKLARGLRNGEINGIYVPPRVKVEDRTLVRTRQSMVRKQTRCKNQITSILFFYGIVIPEEGRWSRRFINWIESIRMERASGDFALKAHLEELKHLRQIIANLNKAILSLSRTEEYMADVLLLKSVPGISTLTAMILLTELADLSRFSSLDKLASYAGLVPDIRSSGETEYDTGITFRRNAALRALLIESSWVSVRKDPALTMAFNKLSARMKKTKAIVHIARKLLNRIRFVLKNRQEYVPAIV

SEQ ID NO: 346325 - protein, 374 aa, unidentified
MPQSSTLYVGLDVHKESIAVAYVAQDHGAEVISLGTVGTRQCDIDKLLRHLQSKSPQLVFVYEAGPCGYWLSRSLMKKGYVCWVVAPSLIPKKPGDRVKTDRRDARQLARLMRSGDLTPVYVPAVDDEAIRDLSRAREDTLRDLKAAKLRLKAFVLRHDIRSTGRANWSPAHLRWLSEVVCPTPAQQMVFQEYVQTVTEQTERLQRLEHELHEQVKTWRFQPVVEALQALRGVQFTVAVTTVAELGDLTRFDNPRQLMNYLGLTPSEYSSGARRQQGSITKTGNTHARRALVEGAWAYRYPAKVSRHLQLRLENLPKAIQAISWKAQVRLCKRYRQLLAKGKNANQVVVAIARELSAFMWAIAKQVTMAPKDQS

SEQ ID NO: 346326 - protein, 328 aa, unidentified
MQGKVSSERTAMATVYVGIDVCKEWLDIHLHPLGRSFRVTNDTAGLRRLKRELDALDQMPRSTLHIVMEATGKWHRAVQRSLHADGFYVSVVDPLRARLFAKACGFLAKTDRLDARLLAIMGEALKPAQTPPQDQALEALQELVNARSAANGERTALSNRMKTAVTAFLRKELTRRLAALDTHIARLDVEIERSIGAEPEMRRRLDILISIPGIGAVTAASLIAGLCELGACSGKQAAMLAGLAPLACESGERAGHRSIRGGRPAPRNAIYMAALSASRHNPDLAHFAERLKKAGKPNKVVLVAVMRKLIVLANTLITKNRIWTPNPP

SEQ ID NO: 346327 - protein, 433 aa, unidentified
MKVLYERVAGIDVHKDMVKVAIRSPGEKPWTRKTEILEFRTFYGVLREMARELRRRGVTHVVMEASGVYTEPVYYALCEQDFEQVAVINPAHAKALKGHKTDAKDCARLAELFECGLLRGSYIPPAELKEVRDLTRYRMKTVQARTSEIQRLGKALESAGIKLGSVASSITGTASTAMIEALIDGERRGGVLADLAIGRMRAAGKLADLSMALAGRFTGHHALLCRLHLDRIAVFDDGVDGLDERIAGKAARWQREAGLLTSVPGFGDVVAQAWLGEIGPAPHLHFATHEKLASWVTLCPGNNISARKRKHGRTGDAGTYIKPMLVQAAWAAIRVRGRLQARYNRLVRRFGGEKNPGAKKKAITAIAHTLLKIAYQVLKSGTPYQEPGADFYTRRESPGQKQAWLERQMQKLHPGCAITITISPPEAALPPGG

SEQ ID NO: 346328 - protein, 263 aa, unidentified
MSEANQTGRVSLGIDVATAKCDVAVLLPGKLARRTCAMDATGCAALATWVRQQGAEPVPACLEAMGAYGAALALFLYEAGSQVSLVTPARIAADAKSRLARTKTDQADAALSAPCCQTPQPLPGTPPAAEVRALQALVRRVEMLQEMAQQEVNRQQSGIHSPAVRASIEATLTFLRAEVAKTQRLIQEQLERSAEVKQQLLLLRSIPGVGSWTAARVRAEIDEVRSAVDARQLAAYAGLTPRERTSGSSVHRPPRLAKTGTSR

SEQ ID NO: 346329 - protein, 365 aa, unidentified
MQKISTMQTSGENIFQGQLTIGLDLGDRSSAYCVLNEAGEIVLEHKPASTPEAMKQVFGSMPQCRIAMETGTHSPWVSRLLTALGHEVIVGHAQKVRLISKSRRKDDRLDARTLARLARIDPELLSPVKHRSAQAQLHLTEIRARAVLVSARTALVNAARGLVKSYGERLRKCGTQQFSRETTSGLSTGLREALEPLLREVESLNERIQEYDRRIEKMAKQTYPETALLKQLKGVGDLIATTYVLTIEDPYRFRKSRDAGSFVGLQPGRRNSGESEPQMRISKEGAEYLRTLLVQGAHYILGPFGKDSDLRRWGLKLSARGGKNAKKRAVVAVARKLAVLLHRLWVSGEVYEPLRNSQKAMSAAA

SEQ ID NO: 346330 - protein, 343 aa, unidentified
MEHFAGLDVSVKQTSVCIVDGTGRLVREVRVASEPEALLPVLTNPLWRFKRIGLEAGPLSQWLFSALAEADLPVICVETRHMRAVLQAQINKTDRNDARGIAQMMRAGLYRPVHVKTLRSQKLRMLLTHRKLLQSKAIAIDNDLRGTLRNFGLKVGVVGTVKFEARIRELVETLPDLAELVEPLLIVRRTLREQIGILHGRLLAIVRHDDVCRRLMTVPGVGPVVALTYRATVDVAARFRNSKAVGAVFGLTPSRYQSGEVNRTGAISRCGDEMMRVMLYEAAHTMLLRLAKWSWLKAWAMKIARQRGIKKAVVALARRLAVILHRIWVDGTEFRWTRETAAA

SEQ ID NO: 346331 - protein, 401 aa, unidentified
MTAVGSKAWIGVDIGKTHHWVCAVDESGQKLLSLKVLNDEAQIIEVIAAVKAVAPDRVWAIDILGTPSALLVALLAKADEQVRYASGRVVAAMSTAYSGEGKTDAKDAYIIAETVRIRSDLSVIDADADLVRTLGVLTGYRADLVADRVRMINRMRDLLTSVFPALEREFDFASCKGALVLLSGYATPEAIRRMGEARLSRWLRQRRVRGYADVAARAVAAAQTQQTVLPGQDVAASIVAELANSVLVQHERLKVLEQQIQDAFAQHSQADVIESIPGFGPVLGASLLVAAGDLAAYPTAGHLAAAAGLAPVPNDSGRRAGNLHKPRRYSRPLRHALYLSAQTSMMRAGPNRDYYLKKRDQGRTHSQAVIALARRRIDVLWALLRDNRTWTPAPPARAQAA

SEQ ID NO: 346332 - protein, 416 aa, unidentified
MPRIDKCGQRIGFEAPRDGSEGDNEVRYIGIDVGKEQHAIAVMDDSGEVVLKPKKFAEDIDGYERLRRWVGEPEEALIGLEATGHYWKNLATTLLGWGFALVLINPLRTKRFAESDLARAKTDAIDAKRIARFLFEKRPDASRLRAEVSDELRELVRLRDRLLQDMGDRVRQLHRAVDLGFPEFSRMIKNLGSQKATAVLAVYPTAKAFAAASERELSNLRYDGRHTVGRELARALIETAKVSVGQHHGEPYQLQVGYFCEDIDTLRERLKKMERRIRNAADQHDLAKLLTSIDGIGPSTAARLIATLGDPSDFDSAKALSAFVGVAPIIQHSGKSTPKRASCGPHGAAKLRHKLYMPTLRAIQSNPHIKRHYDALVARGKPKKLAVIACMRRLLELVFVVAKRRTPFLPVPPQMA

SEQ ID NO: 346333 - protein, 428 aa, unidentified
MNDAEVIRHQQFCQLKASIRGSDQHLIVGIDVAKDKHHAFMGTATGKSLLRKLIFENSLEGFGKLMTHVEAMKVQHGLPLCVFGMEPTGNYHKPLGSYLINGGHQVVLVSGQAVKNNRSLLDGRWDKNDTKCAANVADLISQGKCLFYDSPSEEIVELRSLLSFRRRLKKEEHSLRMRVRNSLLAKHFPEMDRYFGQSLAEGLAIVYWCLDPQKIAAMDYEQFFQLVTTQRRGLAQQRRLKAIWQAAGASIGCASDRASQFEAQLLVEKILQVQKQIKETQQLIETISQQFWHYPLLLTIPGFGPYVASVVLAAIADPWRFESANQVLKLAGYDLSAERSGKTAKTAVPVISKKGNAALRYGLYQAAFIASTRNIHFVEYFTDKLRGREREKGIKTKMRVKLAAKMLVIAWSLMKKKEEFNPDHLNRA

SEQ ID NO: 346334 - protein, 394 aa, unidentified
MNDSRKRYIGLDVHKHYLIALGVDADLNVVLPARRVELFRLETWMKKNLMKQDEVVLEMTTNTWQLYDELVQYAGPVTVVHPPHVALITRSQVMNDKIAASILARLLAKGLLVGIWIPPQEIREARGLVAQRQKMVRLATQAKNRLHAVIQRHHLVPPKGNPFGAKNKEWWMSLSLGKLEELNLQSDLETLQFAEKQVKSMTEIMEGMAAEQEQIGRLLHLAGFGVVTATTVWAAIGDIRRFAGPKYLVGYAGLGTRVHDSGMTSRSGKITKAGRRDLRTVLVEAANAAASSHPHWKAELARLEPRLGRNKAIVAIARKLLIAVWFVLQGKPDKYAEPEAVAQKMLKFAYAVGKANRPKGQTAAQFARIRMDALGVGSELTSIPWGSKKPIPNK

SEQ ID NO: 346335 - protein, 368 aa, unidentified
METEEPIVVLHPRCCGLDVHKKELQACLLVSDAAGRARAETRTFATTTAALLDLLDWLVAAGCTHVAMESTGVYWKPVYNLLEGHLEVLVVNAQHMRNVPGRKTDVADAAWVAGLLRHGLLRPSFIPDRPQRELRELTRTRISLIQDRAAVVNRLQKTLEGANIKLASVVSDVTGLSAREMLEKLVAGETDPSVLAQCARGTMRTKIPQLEQALAGRFGPHQRFLVAQHLAHIDFLDDAIARLSAEVAQRLAPFRDQIERIDTVPGLNERAIEGVLAEIGIDMGRFPSDDHLTAWAGLAPGNNESAGKRKGGKTRKGSRWLRAILINAAHAAAKKKGSKLAREYKRLAARRGARRAASRSRSRRSRRR

SEQ ID NO: 346336 - protein, 401 aa, unidentified
MESPIVSIDVSNGNSHYMCFIKNNKRFGKVKKIDHDIEGFKRLLEDIQKLEAETNEKVCAVFEATGVYTKPLERFLSKNSIKIYIINPLESARKRKEEIHNKKTDKLDPISISKVYYDKKEMMELKKKDETYNWLRKKNRLYEDQLNHLRKYKVTFQNQLSICFPGYLDLFKDGYSDIPMTILKKYPHPDLLKNKKAETVARYLEKNTCHTHKVSLEYALKIIEFAKKTYPGCEKDDVEVEIFKILLDKVIETQRECEKTLNEMITVASTLEEYRYISSIDGIGPNLAARIIAEIGDIEEFKSREALVAYAGLDPHIYQSGDQDGKHLKISKKGNKYLRCLLFLAVGCSIRGAKDNPVNRFYQKKKQQSNPLNSKAAKTACTAKLLKIIYGICKNKTTYER

SEQ ID NO: 346337 - protein, 408 aa, unidentified
MRLFVGDDWAEDHHDVELMDVAGRVLAKARLPEGIAGMTRLHAMVAEQLGDAGPDEARVLVGIETDRGPWVAALAAAGYEVFAVNPLQAVQYRKRHAVSGAKSDAGDAHVLADMVRTDAHQLRPVAADSAQAEAVKVVTRMHKTLIWERTRHTQRLRHALRGYFPAALDAFEDLDAAGTLELLAKAPGPASAAKLTVSQISAALKRARRRGITGKAAAIQAALRAGHLGQPTVVTAAYAASVRALAAILVTLNEQITALQGQVEDHFGQHPAAEIILSQPGLGPVLGARVLAEFGDDPHRYASAKARKNYAGTSPITRASGKKKVALARFVHNDRLIDALMAQAFSALKSSPGARAYYGKQRARGAEYNAALRQLANRLAGILHGCLKTGTLYDEATAWSHHSEKIAA

SEQ ID NO: 346338 - protein, 343 aa, unidentified
MYFIGVDHHKQASQLTVLAEDGRELKTGRVLNLRRELERFLKGFHPFTAVLEAGRSSYVMADLLRELGGEVKMANALQVKAIAHARIKTDKRDSRTLAHLLRADLIPEIYQRGEANRQAQRVLRARAYRVSKQTEIKNKIQSLLAQQKEEIRIEVDKRTGGLFSGRGIEFLLRLPLEGTDKMVLDDLVQGYQETQAHIKTSDGRVQALSGTIEEASRIDTVPGFATTPAVLVAVEIADIHRFSSPAHLHSYAGVIPSTYASGERTYHGRITKQGSAWLRWAALEAVYPAIKKDLGLRVLYTRPAKRKGPNAAKIAVARRLLTIIYRILTENRTYLPDMNRSAA

SEQ ID NO: 346339 - protein, 370 aa, unidentified
MKKKVLYVGLDVHKKTTDVAIAPGRSNGKVRSYGKIDSTVDALNKLIKKLQVDDKELRFVYEAGPCGYQIYRHLDANGIDCSVVAPSMIPRRSGDRIKTDRRDALNLARLFRAGELTSIYVPTVEDEAIRDLIRCRDDIKRFERKARQRLLSFLLRHGYQYSGKRNWTKGFYNWLATVKFSHSAQQVTLHEYIEAINECSQRIKRITEQIQVHAEEWSRARFVKAYQALRGVSLIVSTTVAAEIGDMRRFPNPKQLMAYLGLIPSEHSSGKTVRRGPITKTGNSHVRRALIEAAWTYKMQARISTVLLKRQQGLPKSVCDISWKAQTRLCARYRRLMARGKTKQTVITAIARELSAFIWAIDKEMQVAHE

SEQ ID NO: 346340 - protein, 420 aa, unidentified
MKAYNINDFAALIGIDWADTKHDICEYPINTQKYHYCIIKSKPEALHDWAMSLKQRYPNQQIAVACELKKGPLIYALAKYSHLTLFTINPSSVANYRKAFTPSNAKDDPSDALIQVEILTLHMDKLTVIEPESAAMRSLAQLVEYRRSLVQDSVDLSNKITATLKNYYPQALEWFKEKDTFIFCDFISKWPTLTKVKRAKKQTLLDFFNSHNSHYSQVNDVRILSIKSAMPLTEDIGVIEPNQLLVEVLIAQYRVLLKGIESLDKAIKLAYKSHDDKVIFDSFPGAGPQLAPRLLVAFGSNRERYKDASELQKYAGIAPVIERSGKKMWTHWRYSCPTFLRQTFVEWAGFSIRYSFWAKAYYEQQKSKGKPHNSIIRSLAFKWIRILFRCWKTSTPYDESKYLEALKRRGSPLLKFAINS

SEQ ID NO: 346341 - protein, 438 aa, unidentified
MSNKVIFNLDELFISVGIDVGADFSWMSIALPNQQFVGKPYKILHNSIDSLTTAVSKIKEAEELYSLESRIFLESTGIYHYPLFCYLRDKGFNCSVINPIITKNSTNINIRKVHNDRFDSKKAALVGLKPDLKVSLMPSDLALNCRNLCREYYDLMDNRSAYVNKLQGELRMAFPQYLGIFSKVTINTSLTLLETYTSPSAFLEADKQEIIDIIKSTARFGLTYAQNKYNAIIQAATDANQFGYIIDSNIKRIRLYISFIRKYDEEINSILESLHELVDANEDADFVKQIHLIETFKGAGFLSAVSIMGEIGDFSAFSKPKQLFAYFGLDPAVKQSGKFEGTKVQMSKRGSAIARCVIHTLTLQSISISRNGEAKNPVLREYYLKKCDSKPKLVAMGAVSHKVCNMIFAILRDNKPFKIIAPQEHIKQYNAAKCDMTA

SEQ ID NO: 346342 - protein, 348 aa, unidentified
MLHAGLDLSRKRLDYCLLDEDGERVEVGKTPPDGDGLAGFVRRVEERHGGVVVRAAIESMNGARFVHDTLERLGWEVEVADAVKVKGLAPLACKTDRIDAWVLAELSRRELVPALWLPSFEMRQERERARWRLFLVRKRSSLKHRVHAQLLAFGHPCPVSDLFGERGRQLLERLEFPEPWRSDVLAAVGMIDDLDSEISAIDRELKALGADHRYIPLLTTVPGIAWVLGYTIAAEIGDINRFATPKKLTSYTGLCPRVYQSGGTDRRGHLTHAGPKHLRWALMEAALHACRHPAYHDRYERNKKRLGKQRGAKVAQVDIARQLSEAIWHMLTRNQPFAPASTRVSLAA

SEQ ID NO: 346343 - protein, 439 aa, unidentified
MKGYLGIDVSKGYADFILLSEELAELESCFQLDDSAKGHAALIDWIRLSLEKHQITELRCGLESTGGFEDNWFSLLLRLGDRLPVRVARLNPSVVKHAAKASLRYTKTDAISAENIASYLVRFDEQVRYQVADNKYRSYRSLYNHISLLNRQKTQLINELKQLLYTSFPELQRFCKSSIPGWVLELLKQYPSASALSKARPEKLCKIKAITTAKAGQLIEQAALSVASRHQSTDSFLIKNMATGILQAQQQLALYKEHLEQTCQGEEVDLLTTIKGVGRYSAAAIIIQIEDIRRFPSPKHLAGFFGLHPTVDQSGDKKVKSRMSKKGRPALRAALFMCANSAVLFDPHLKAIYARHRAKGNNHKAALVVIMHKLLRIIWGVLSHQKAYNSDIDLKNQQAVKEVVPDKNETENKRRLQDYDEQAPISRIETKKRKAYQSS

SEQ ID NO: 346344 - protein, 412 aa, unidentified
MENFKIWVGVDLGAAGHQVCVVDRERNILLERKSKHEGASTAQLIDELLGLVDGAAELIGVALETPQSAIAEAMLDRGLHVYSINPKQLDRLRDRYTVAGAKDDRRDAFVLAATLCTDGHHYREIRLGSAELVRLRELSRLHDELGTEENGLANRIDGELLRYFPEMRKVGSVHTDEWMLSLLKLAPTPAKARKLRASTIRSVLERVRRITADEIMTIFREPSLKVAPGVTEACAHHIALLSRRLRLVREQKAETHLQMRRLLEKLSEPVESQDPKIVEHRDAAIIQSLPGVGTIVSATMLAEAWQPLQDRDYTRLRALCGSAPVTRRSGKTSVTVMRRACSPRLRQALYHWARCGVQNDARTKAHYRRLRLAGHTHGRALRGVADRLLALLVKLLEGGQLFDPSRWTPISA

SEQ ID NO: 346345 - protein, 346 aa, unidentified
MAYYVGLDVSVKETSICIMDDKGVVAARTDISTDPDLIAGFISKHAPKVERVVHESGILAIWLTRELEKRGVPIICIDARLAHKALSGRINKSDQGDAEGLAQLARTGWFTQVHIRSEASERVRVLIGARERLIRMRKDLEGHVRGVLKVFGVCMTSVGTGKLRRDFRDQLAAAVDTDPAIEMMSETFIPLHKTLCIARDALDEEVRMMARESDLARRLMTVPGVGPIVALAYIATVDDEKRFRKSIDVGAFLGLTPKRHQSGAVDWSGKISKCGDCDMRRLLYSAASTLISCTRKPSRLKEWATKLAERKGHKKAAVAASRKIAVLLHCLWRNETVFEPGMGGAS

SEQ ID NO: 346346 - protein, 333 aa, unidentified
MVNMNQQGGVTGGAVRPNAGIDVSKQYLDVCLGKEQWRLGNDAKGWDEAITKLRSAEVDLIVVEATGGYERGLVSSLQAAGLTVARVNPRQARDYAKSMGELAKTDTIDARILRDFGDAIARRADRSKYITAMVDEHRAQLSELVVRRRQLVEMRVAEANRLEHARGPAARSIRAVLKTLDKQLADVDRDADGLMEAYFKGQAKLLDSVQGVGPVTILTLTSALPELGRLGRRQITKLVGVVPLANDSGKRKGVRTTWGGRANVRSVVYMAALSATRHNPVIKAFYERLLAAGKPKKVALVACMRKLLTILNAMLRDNAAWDASRHRQAPQNA

SEQ ID NO: 346347 - protein, 337 aa, unidentified
MDKITTLGIDLAKSVFQLHGVDAEGRAVLRRQLRRSQMLEFFQRLPSCLIGMEACASAHYWARELAKFGHDVRLMQPSYVKGYVKRGKTDKADAAAICEAVSRPSMRFVPVKSEDTQALLLTHKAREFLVRQQTQIVNAMRAHLGEFGIVVPKGIHNVERLIIACERAKLPAAARKALNLLADQLIDTQRKIEDLTADIRADARANEDAQRLQTIPGIGPITASALVSALPDVAEFKSGRDLSAWLGLTPRPHSTGGKERLGRISKMGNRYLRRLLYLGAIAQVSARRRGEAGDDWLWKIIQRKKPKQAAIALANRMARTAYALMKNRTEFQAAQAA

SEQ ID NO: 346348 - protein, 345 aa, unidentified
MPIVGGLDIHRKQITFDYLDTDTGQVQRGQISPADREHLRAWLARFHGRDDVAFAVEGCTGWRYVAGELAAAGVAAHLAEPADTAFARGRKRHAKTDKTDCRHLRMLLAEGRLPECWIPPGHILECRALLETYHDLRAEHTAWVQRIHAVLFHQGAPALGEGALRSEQGLAALRAAAAAQLSPAGQLQVTTALEIIEALDTRLHVLRHQLLDAARHLAGAKVLAARLYGVGPVTALAMTCWLGGAGRFSSSRKAVRFAGLDVTVYSSDRKGPPGRLSRQGPPVLRWAVYEAGKTHARASAPDHRYYAQVKDRCNGKRAALSEARKILRQACHILTELGDDALTAA

SEQ ID NO: 346349 - protein, 312 aa, unidentified
MDATVVGIDVAKDRLDVCVRPSGESFVVARTGAGIEELAERLRKLAPRIVAVEATGGFETVVAAGLAAAALPIVVVNPAQVRAFAQALGRRAKTDLIDAAVIAHFVEATKAVPRPLPDETTRLLADLIARRRQIVEMMGAEAQRERRLTNKRLKKSIVRLRKALEKELAELDGEIDDHVRGSPVWAEKEDLLASVPGVGPIVARTLIAELPELGSLDRRKVAALVGLAPWTRQSGQWRGKSFIGGGRKSVRNALFMAAMVAARHNPILKRFRDKLVAAGKPKLVAIIAVARKLLIILNAILRDKTPWQPKTA

SEQ ID NO: 346350 - protein, 426 aa, unidentified
MNAITDFAATIGLDWADQKHDLWLRPADGAKSEHLRVEQTPEALHEWVAKLGERFGRRRVAIGIETSRGPVISALLAYDFIVFFPINPKALKDYRAAFAVSGAKDDRTDAMLLEEFVRLHRDKLRALEPDTPLTRKLGGLTENRRRLVDERTRQVNQMHSVLKTYYPLAETLLGGHMTTPMAADFLARWPDLAALQKADPKTLRAFFYKHNSRGAEKMEKRLAAAAKARPLTEDEAIIAPARHLATALAAVLKALHHAIAAVDKDIAQTFDQHPDAALFRSLPGAGPALAPRLLVAFGTKRDRFASAAEVAQFYGIAPVVKQSGNTETIHMRSRCPKFGRQTFHENAGCAFKKELWAKCYYDNQKGKPDGKHHKACRAVAYKLIRIYYACWKHNSPYDGQRYLQALEKHGSPLHAQLQTLSPKKSE

SEQ ID NO: 346351 - protein, 436 aa, unidentified
MNNTLSQKLAMVTPETLIVGVDVAKHTHYAQPVNFRGEALQKPFPFQNTTSGIGNLVHQIKMNQLKHGLSRVLVAMEPTGHYWLPLACALLEQGITVVMVNPHHVKKAKELDDNSPTKRDDKDAGVIARLARDGRFHLPHIPTGVMADIRNLVNFREQLSKELQQSKAELDTILDRYFPEFKDVFKSVEGKAALAALENFPFPADLLQRTVEEIALVLSQASNKRVGIKHAALLVENARSSVGIKHGIEGARLALKYRLRRIKELLGECELVEARLAQFLKEIPHASYLLTIPGMSTVQVATIISEVGNLDNYSSARQIIKLAGLNLVENSSGNHKGQTRISKRGRAKLRCTLFRVALVLVARTREFSLLHQYYTTRSHNPLKGKQSLVAICCKLLRIIFALGRKKMTYDSGMVIPLSHPAMLNNNKPTAGKQAAA

SEQ ID NO: 346352 - protein, 352 aa, unidentified
MADNETAVIGGVDCHLDSHHAVALDQHGRRLGDHEFRATLAGYGQLLNWLRQYGGVQAIGVESTASYGAGLTRFLTAAGARVVEINQPHRHLRYRRGKTDAIDAEAAARKVLSGEATAIPKDTTGIVESIRQLRLVRAGAIKARSAALTQIGDLIATAPAELRERLTRKTLRGQASVCARFRPDQARLNEPIQAAKLALRTLSERIVVLDAEVATFDRHLESLVAKAAPCTTALLGISTGHAGQLLVTAGQNLDRLHSEAAFAHLCGAAPVPASSGKTTRHRLNWGGDRQANSALHMIAVVRLRYCPRTRAYAERRTSEGRSKREILRCLKRYIAREVFQSLRADLTAPRPT

SEQ ID NO: 346353 - protein, 344 aa, unidentified
MDHFAGLDVSVKDTSVCIVDDTGRIVREVKVASEPDALLAVLTNRSYRFKRIGLEAGPLSQWLFSALAEADLPVICVETRHMRAVLKAQINKTDRNDARGIAQMIRVGLYRAVHVKTLRSQKLRMLLTHRQLLQSKAIAVDNDLRGTLRNFGLKVGMMGAARFEARIRELVQGLPDLAVLVEPLLVVRRVLREQVAILHRRLLAIVRDDEVCRRLMTTPGVGPVVALTYRATVDVPARFRKSKSVGAVFGLTCARDQSGERDRAGAISRCGDKMMRAMLYEAAQSMLVRSTRWSWLKAWAMQIARRRGKRKAIVALARRLAVILHRIWVDGTEFKWTREDASAA

SEQ ID NO: 346354 - protein, 374 aa, unidentified
MDDHSVAYVALDTSKLRNAVAIAEAGRDGEIRYLGEIDNAPAATAKLARRLAKKHAVLTFAYEAGPTGYGLYRQIKSLGHDCIVVAPSLIPQKPGDRVKTNRRDALSLARQLRAGDLTAVWVPDPHHEAVRDLTRARGAAVRDQRAKRQQVSALLLRLGLHYPGKTTWGKAHMAWLAGQQLAHLEQRIALEEMLHAVRQAGDRIARLEHAIHTAVPDWSLAASATALMALRGIEFIAATTLLAEIGDLTRFRTPRELMAWLGMVPSEHSTGERIRRGGITKTGNRRARSVLVECAWSYRHPPRVSRDKLARLEAAPPAVRDIAWKAQSRLTARYRALRRAGKLDVVAITAVARELAAFIWAVGLAVGSGRTPEV

SEQ ID NO: 346355 - protein, 428 aa, unidentified
MEITRNARKINLNHIVDVSVDVHRNNLCFFFEIDGTEFSDVCRNRTCVIRKRLLAYADIAKEHGRKGLRVICEPTGQYQNKLMRMARRLGFLTCYVNAESVAKFRVVETNDSNKTDKKDPRVIGTLGKLNKVIRFRMIGEQYLMLRKLHKIYDECDVAITSFRCRIHKLLVELFCDYSFKKDFLYSRSGRALVQEYGCNPYRIVSAGWDSFCQNMKKEASGIRVTTLERLWKDAENSCLNDMPPGYVEVLEGYLGDLLDDYYRMKERKEKITKEMIAILEKLRKDDPLIPPPTPNVISEKNLARLLAETGPLSDFENWRKLMRYAGLNLRTRQSGTFQGQHKISKKGRRLLRKVLQCIALPLVKKGRLYGDYYHKKKEVNKMPGNKAMTVIARHMLRKIYGWYRSDQAFDEERFFVCRSRYRKLKKAA

SEQ ID NO: 346356 - protein, 339 aa, unidentified
MNNSVIGLDIAKHIFHLFTQGTDGKMIKKKLKRSELLMYFANYPVSIIGLEACGSAHHWARELTKLGHEVILLNARYVKSFVVGNKNDFNDAAAIYDAVTRPNKRVVAIKTVAQQDIQLVHNIRKELVDKRTALVNQTRGLLSERGIIINKGITQIRQQLPLILEDAENGLTTLSRELFAEQYEKLKELDDEIKTQDQRINRLCNANELSKRFLAVPGVGPVTATIVAADIGDSGKGYESSRDYAASLGVVPRQHSSGDKQVYLGISKRGNRYIRTLLIHGARSVLKNCTKKTDKLSLWLQALVARRGFNKAAVALANKNARILWAMANKNKAYEALVA

SEQ ID NO: 346357 - protein, 356 aa, unidentified
MKPVKYIGMDVHQATISVAVLDDRGKLIMECIVETKACTILEFLQGLQGSLSVTFEEGTSAAWLHDLLKPHVSHLVVCDPRKNALLKDGSKSDRIDARKLAELLRGNQLSPVYHGEHGLRTLKELGRSYLTISQDLVRVMVRVKALYRSWAIPCSGKQVYAVRHRAAWLEKIGEAGVRRRAAEFYYQQLDGLRSLRQEVRRDLLLESARHQATKRLRQIPSIGPIRAALLIALLQTPHRFRTKRQLWAYSGFGIETHDSGEHCYVDGELRRAKKKASVRGLNRNYNPDLKNLFKGAATQAAVKPGPLQEFYAALLAKGIRPEMARLTLARKLATITLTMWKKGVDFDARQLKSQAA

SEQ ID NO: 346358 - protein, 339 aa, unidentified
MSRPTSDRLTPGTTSDAAEKRDRRRPRGTSPNSRQSDATKTSSASSHSRGRDISRSGPVEPVDVGIDVSKAKLDICLLPSGQTLVFDNNAAGIRQLVALLQKQPRVARCLLEATGRYERRCAADLMEAGFHVAVVNPRQARDFARSMGKLAKTDTLDARTLAEFAKLARASVDKVIRLLEQQREDLDREIARLSESDDDWKNRRDLLSSVPGVGNITASQLVANLPELGKLNRQQIAALVGVAPINRDSGTMRGHCTIFGGRAAVRAGLYMATISAMPFNPVIKQFAQRRGLFRLDDRSQSRKNVQSSRGVSSIAHRPFRTSFSPLWNRPGTQENLWPR

SEQ ID NO: 346359 - protein, 419 aa, unidentified
MTSDFEWYAGIDWASEQHRVCLLDGGGGPAGEREFAHSGDGLAELCAWLIAMSGCEPHKIAVAIETPHGPVVEMLIDHGFAVHSINPKQLDRFRDRFTVAGAKDDSRDAQVLGHSLKTDGHAFRRLVVDDPMIVELREWSRLGDDLKQERNRLANRLRQQLWRYYPQMLELGGDDIAADWLLALWDEAPTPAKAAEISTQVIAPLLKAHRIRRFEAADVLRILRQKPLTVTPGTIAAASAHIRILAERLRLVNRQVKEANRKLDRLCRKLGQAPESEAGNRPEQRDVAILRSLPGVGRINLAALLTEASEPLKRRDYHALRLMSGVAPVTRRSGKACLVIRRLACNARLARAVYHWTRVASQCDPISQKRYAALRQRGHSHGRALRTLGDRLLGLACTLLRRQVLFDPDYHCKEVAAAA

SEQ ID NO: 346360 - protein, 351 aa, unidentified
MKYYTTTTEYNCGIDLHARQMYACVMDRQGKKLVHTNITGNDFGYFLKRVEPYRHDLTVVSECTFNWYWLADACFEANLPFVLAHAFYLKHIHGGKNKNDRIDSEKLAHLLRANLIPPAYVYPSARRPVRALLRQRMSYVWERATLKTHLSMNQTAEGLIPAGKSGHNRDAWEASILEQYTNPLHKFSVACDMNMIRAYDVQIVKLEAEIVRQAKKGLGRDYHLLLSVPGIGRVLAMTLLFEIDTIERFPTVKDFLSYCRLVKGSVASAGKVKGLTGGKMGNAYLRWVFGEVAVIAKRNHPLLTPYAEKLASKHGKFKGNAILANKIARAVYFMLQKGTGFDAERVIATSI

SEQ ID NO: 346361 - protein, 448 aa, unidentified
MNESKTVIVGLDVHAQSIRLAAVRADELLAEQTLPYDEEAIERALRRWPHVRCCYEAGPTGFGLYRHLVARGIDCQVVAPGLVPTRPGDRVKTDPRDARKLARLHGGGLLEPIYVPSPELEAARDLVRAREDARLDRMRDRHRLSKFCLRHGRRLPWASWGVARRRWLSEQRFDFPAQQHTFDTYLHTVDLVDRRIEELERSISETAAQEPWRELVARLRCLRGLDTLSALSIAVEIGDFQRFRSAAEFMAFVGLVPCEHSSGERRSQGSITKVGNAHVRRLLVESAWHARRRPSVGYALARRQRGQDAVVASAPGAASSVSIVAGRGWPLAASLARRSSSPARESSPASSGRSRPSSRSGALERGRLEQRMRPTTRRTLDASMRHRPSPVTRDPRPRQLPTVPSHAVPTRECQSDSPSLPGPSAARDPHVHPAIRASPLTFCSMSEA

SEQ ID NO: 346362 - protein, 426 aa, unidentified
MHYTQEEKIEQVTESTLVVGVDIGSQKQYARAFDWRGREISRKAFTFADCGSGYTLFSTWIYEMQARLGLDKVIVGVEPTGHYWFGLAQYLESTQIQLVLVNPLHVKQSKELDDGSQTKNDNKDPKVIAKLVIEGRYTFPYRPKGVYADLRNVWNVREAISKDLTVCKNKLKRWIKVYFPEYVNVFKDPDAKSSLLLLEHVALPEDIVSLGAEGVNKIWRDAKIRGVGMKRATTLVAAAKDSIGQKEGADGARTDLKFLLEDYALKRRQFEDIKAKIELLCDKIPETKQLLAINGIGLTTVAGFLAEAGDIRRFDSPKEIIKLAGLNLRENSSGKHKGQTTITRRGRARLRKVIFKGVIPLLASNEEFKQLHEYYTTRKQNPLKKKQSVVAVGCKLVRVFWGVTRSGKAYDGQKMLKDIHRQLPAA

SEQ ID NO: 346363 - protein, 341 aa, unidentified
MSDYSYFCVIDLAKNHFSLHAVDKNDKVILHKSVTRSKLLTTIANMPPIRIGVEACGGAHYWARTLNKLGHEARIMAVKYVIPYRTKGKNDLNDAVAICEAVQRPSTRFVPVKSPEQQAILSVHRMREHWVRERTALMNRMRALLSEFGLIIPVGRSSLMKQVPLMLEDAENELPHLARAVIADAYHHLGELNQRIADTEQVFDSFAKASTNVQRVMKVRGIGPQTATAILASIGNGSQFDKSRDFSAWLGLVPKQYSTGGKPRLGRITKHGDKYLRTLLVHGARTVIANLGDKQDKLSQWCRGVLERRGMNRAIVALAAKNARIIWSLLHNQTEYENYAA

SEQ ID NO: 346364 - protein, 343 aa, unidentified
MNEITTIGLDTAKSVFQVHGVDAGGNVVLRRQLKRRQVLSFFRKLPPCLIGIEACAASHHWSRELAKLGHTVRLIPPRYVKPYVKSQKNDATDAEAICEAVTRPNMRFVPTKTKEQQSILMLHRTRHLLVRQRTATINAIRSHLTEFGIVAGVGRNGVEALLKVIADEQDDRVPVVARDCLMALGAQLEMLKRQALELDAKIMASHRDSELSRRLEAIPGVGPRVATALVASIADPKAFRSGRQMAAWIGLVPKQNSSGGKDRLGGVTKAGDRYLRSLLMIGALSVIKRVKQLGYTRRPWLAQLMARRPTKVAAIALANKIVRMVWAMMVRGERYREPVALAA

SEQ ID NO: 346365 - protein, 386 aa, unidentified
MAQVNDLSRCLAALDQDSTVIAVIELSLKSWLVAGIVPGVERQPLKKLDADADGVLRLLYRWRDEAVKAGRCVTRLAVAFEAGRDGFWLARWLRARGIEAYVIHAASVAVSREHRRAKTDRLDTELLKRSFVGWLRGEAEHCQMAAIPTLAQEDARCPGRERESLVKERTRIVNRMKSTLIRFGVRGFKPALRQAAARLDAVRMPEGEALPANTLAALRREMARLALVREQIKAIEATRVERLAQAPQTGPHAMIRLLAQVRGIGLETAEMLVSEVLSRPLRDRRAVARYGGITGSPDESGSKRREKGLARAGNARVRRGMIQLAWRFLMFQKNSALARWYQERTATAPGLRNKLIVALARKLLIALWRYATIGVVPEGIALRAAL

SEQ ID NO: 346366 - protein, 440 aa, unidentified
MATTERPEMVLAIDFSLDRLDVALRGPAPPWIWGHRAYANNWAGYQQLKQDLLAELQRVSPVQFTAVGESTGPYWWHAFYQFSHDAELAPFDPQLALLNPAHVKGYRKALAEQDKTDPDDARLIERYYRSVGIEHPYQFADRYLRLRTFSRAYARVLHTLAAEKAYFVAVLYLWGSEYQRRAVRPFSDLLGVTSQFIVDEYADLQQLSAIPEAELAALLEQHSHHTLRQPQETAQKLHQVAQNSYPLPAPLGQALHQVLQLTLELIRVLSDNQNAYRQLLEAELATLPEAQRALAYKGLGPVLVAGCLAEIQDTTRFTTGTKFDRRTQTDRPRTYRDGQAAVAKLAGLWWPKQDSGHVQGVQPRLARERNPYLRFWLVQAAYTLQRYQPEYQQFYWQKYREAHDHHHRRALILTARKATRLIFALLHKGRLACLEEGTLT

SEQ ID NO: 346367 - protein, 459 aa, unidentified
MSRAKKRKSKAARGTSELPILRPNAAGVDIGATEIFVAVPPDRDPEPVRAFPTFTEDLHRLADWLKACGIETVAMESTGVYWIPLFQILEARGFEVCLVNARYFQNVPGRRTDVSDCQWLRYLHAVGLLRPSFRPTDQVCVLRSLARHRDSLIQTAATHVLRMHKALDQMNLQIHHVISDITGLTGLKIVDAILAGERDPKKLAALRDGRIKATEETIIKSLVGDYRREHVFTLRQSLAAYRNYQKLIAECDREIEGQLKTFDARVDCKAKPLPAPKVRRHKVFGNEPRFDLRAHLYRIFGVDLTEVPGMSILTAHTLLAEVGPDLSRFPNASAFSSWLGLCPDNDITGGKKVAVGTRHVNNRAAWALRMAANALRNSRSVLGDYYRRMRAKLGAPKAITAAAHKLARIIFHLLSTRQAYDETVFARRDEQTRRRSETILRNQAKALGFQLVPASQAQE

SEQ ID NO: 346368 - protein, 415 aa, unidentified
MSNPLVVGVDPHRRTNVASLMDRDGQEVAPRSRFANNRPGTASLIQTIAQQMQTGHFDAVHLATEATGWYWWHFFQTLERDPTLTQWPLKLYAFTPRLTANYKKTFVDLDHADPIDAFVVADRLRIGRDLPAPFHLNEPYAHLRFLTRYRCHVIHALVREKAYCLATLYLKASEYTALAPFSDVFGATSRAVLQEFASLEEIAALPFAQLVELIDRKGKRRFPDPEDNARKLQQVAQDSYVLPEALRPPVNLILNASFQLIASLEAQEKRLATAIAEASQAVPHTLDTIPGFGPVFSAGILAEIGGVHRFASNEAKVAKFAGLKWRQHQSADFQAEDTPLTRTGNPYLRYYFCEAANSVRQAAPDYHAYYERKYQEVTKHQHKRAIILTARKLVRLVVRLLTTNQPYQPRRSAHT

SEQ ID NO: 346369 - protein, 436 aa, unidentified
MQVMHERCAGLDVHKKTVVPCVILTLPDGRVEKHTVTFSTMTSQILAMADWLKSCGVTHVAMESTGVYWRPIYQLLEGQFTLLVANAQQIHRMPGRKTDLTDAEWLADLLRHGLIAPSFVPPQAQRQLRELTRHRSNVTGRRTQCINELHKTLEGTNIKLSSVATDITGVSAMDMLQHLLAGQTDPNFLAELARGVLRKKIPELRQALQGVVGEHQKLILNQLLGDIERFDQQIEDLNAEIAGRLAQEQSVIARLDEIPGVDRKVAEVMVAELGTDMSRFGSAQRAAAWSGMCPANRQSGGRRYAARSRFGNKHLKGTLAEAGWAAGRSKQTYLGAQFRRIAARKGSRRAALAVGHSILTISYHMMDRGTPFTELGADYFDRRNPERVKDRLVSRLEKLGYGVFPRQRQFHRSPQTEGFAIIPSYKCGNDNDNDND

SEQ ID NO: 346370 - protein, 343 aa, unidentified
MEHYAGIDVSLESVSICVVDASGRIIREAKVASEPEVLVTWFSRLEVAMTRIGLEAGPLSQWLYAGMREAGLAVELLETRHVRDAFKAMPVKSDRNDARGIAQLMRLGWFRPVHCKSLPAQELRAVLTGRKLLQGKRHDVEMSLRGILRGFGLKVGPTTAHSFERRIRDLVEEHPTLVAVADALLLAWATLGEQLGKLHKRLVSLARDDARARLLMTTPGVGVLVALTYVAAIDDPGRFKSSKATGAHFGLTPKKYQSGETDVTGRISKIGDASVRTALYEAANVILTRPVKGSSLKSWAMRVAKRAGMRKAKVALARKLAVVLHRMLVDGTTFVADKAAAAA

SEQ ID NO: 346371 - protein, 339 aa, unidentified
MQHFAVDLGGRKSQICVREASGTILREREVATSSLPRILAKEPPSRIVLETCAEAFSMADAALEHGHEVRVVPATLVRSLGVGARGVKTDRRDAQVLSEVSTRIDLPSVHIPSAKAREWKSLCGLRQQLVRSRTAFINTSRGWGRSRAIRIPSCTPATFPKRATKAAESLPDGLPLALQRVLDSIEDLNMRIAEADKELASLAKEDDTCKRLMTVPGVGPITAINFAAALDEISRFSSAHAVESYLGLTPGENSSSQRKQRTGITKAGPPAVRTTLIQAAWSLRRARPNDPIVVWAKNIELRRGKFVATVAVARKLAGILFALWRDGTTYESSRAATKT

SEQ ID NO: 346372 - protein, 385 aa, unidentified
MANQNDLSRSLVAFEQNNTIIAVIEMSLNNWLVAGIVPGVERHPLKKLSIDAEVLLQLLYRWRDEAVKAGGMITRMAVAFEAGRDGFWLARWLRARGVEAYVIHPTSVAVSREHRRAKTDRLDTELLKRAFLGWLRGEPDHCSMAAIPSLQEEDAKRPTRERENLVGERTRIVNRMKASLVRFGIRNFKPTLRKAPEHLNALCTPEGDPLPPNTLAELRRDMARLRFVVGQINEIEAARLQRLEQAPAEGPHAMVRLLARVIGVGIETADMLVHEVLSRKLRDRRAVARYAGLTGAPDESGSKRREKGLAKAGNARVRRGMIQLAWRFLLFQKDSALTHWYRTQTESAGKKRKTMIVALARKLLIALWRLVTTGEVPAGVVLRAA

SEQ ID NO: 346373 - protein, 339 aa, unidentified
MELTVTAIDIAKKVFQLHWVDPDTGAIERLKLKRAQLLPWFANHQPTLVIMEACGGAHEWGRQLRNLGHDVRLLAAKTVRPFVQRNKTDAADAQAIWTAGQQPGAKFVAVKSDAQQVVLSLHRLRAQLMKMRIMQTNEVRGLLYEFGIVLPEGHRPLLKELPTALLEAQSRLPAMLIDSLNEQVRRIHSLEADIGLVERRLSQQLRDTPACKTLADIPGVGLLTATAIVASMGSPTAFKDAREFAAWIGLVPRQTGTGGRVRQLGISKRGDAYLRTLLMHGARAIVRSDRRTSWPWLAELLKRRPYNVAVAAVANKLARTIWAVLAKDQQWRPHAWQPA

SEQ ID NO: 346374 - protein, 365 aa, unidentified
MKKTITAATASKRNFDGKLTIGLDLGDRSSWYCVLDERGEVVGEQKLSTTPKALRAIFGAMPRSRVALETGMHSPWVSRLVSELGHETIVAHARNVRLIGESRRKDDRLDARTLARLARIDPQLLSPVKHRSRQAQADLMVIRARASLVRARTALVNAARGLTKSYGERLRGCNPRNMDLEKAQALSPELQAVLGPLLQALESLSERIAEYNRQIETIAQQSYPQTALLKQVKGVGTLIALTYMLTLEDPHRFRKSRDAGCYAGLQPGRRNSGQSEPQMHISKEGDPYLRTLLVQGAQHILGPFGVDSDLRRWGLKLAERGGKNGKKRAIIATARKLAVLLHRLWVSGEVYEPLRHTNRTMLAAA

SEQ ID NO: 346375 - protein, 278 aa, unidentified
MRTIGLDVHKRFAEAAILEPGRPLRRRRIPTTPTELRAFVDELGPEDQVVLEATFNTWQLTELLRTRAGRVVVSNPMKTKAIASAKVKTDKVDAEILARLLASDFLAEVWIPDAPLQVLRRQLSHRLSLVRHRSQLRNRIHAVVARNLLDCPHTDLFGKAGQRWLADQRLPADERALIDSTQRMLAALETELALLDRPLAERALEDPQVRHLISIPGVGLVTALALVAVIGDIRRFPRPNQLVGYVGLDPRVRQSGEGPARTGHISRQGQSHARGLLG

SEQ ID NO: 346376 - protein, 338 aa, unidentified
MTWYSGIDLHSNNCMVVVSDEADRVVYRRRVPNELGAVLAGLEPYRGGLAGVVVESTYNWYWLVDGLQAAGYRVHLANTTAIKRYEGLKHSGDETDAAYLAQLLRLGILPTGYICPPQERAVRDLARKRLQLVRTRNAQVLAVENIVARHTGAGIRANIVKRLERKTVQALDLPEDVRGALRANVAVIHTLNAEIAKIEARVRQRVRLRAAFRLITTTPGIGEVLGATIVLETGAIERFAAVGHFASYARCVDSQRFSNGKKKGQGNVKNGNQYLAWAFIEAANFARRYCPQARSFYDRKKARTNNIVATKALAHKLARACYHIMNDGQPFDVKRCFA

SEQ ID NO: 346377 - protein, 434 aa, unidentified
MSSPIPDVVAWVGLDWADQEHQGRLQAVGSSQVESFVLVQRPEALQGWVSQLRTRFPFGRVAIAVEQARGALIYALMTYDSLVLYPVPPKTLADYRKAFFSSGAKSDPEDADLLLELVRCHADRLRAWQPDDTRTRQIQMLSEQRRKLVDDRTRLTNRLTTWLKASFPQALEWAGELGTAQACAFLTRWPSLAALQQARRSQVCHFYLHHGGKDSASLESSLDQIRQTQPLTSDPAVLQVSALMVRLLAQQLSALGSTLQELDQAIAPLFAQHPDQALWDSFPGAGPVLAPRLLAAFGADRQRYHEAREVQQFSGIAPVTAKSGKSCWVHWRWACPKFLRQSFHEFAAHSRRWSPWARAYYEQQIEKGAEHHAAIRALAFKWIRILYRCWKDRTPYDEQRYVRALRRRGSPLVNRLQTQAALSAAPGGTMLKKT

SEQ ID NO: 346378 - protein, 395 aa, unidentified
MKEVASGENGSLRMIEGQSHFRPFGLSCWGFADLNKGVGSMTASYDYHIGVDYHKSYSHLVVQDSGGKTLRSGRVKNDRQSLGGFLERYRQNSHAVVEATRNWMVMYDWLDDICDDVVLAHPLKVKAIADAKIKTDKIDATVLAHLLRADLVPEAWAPGERARELRVALRERMFYVRLRTMTKNRIVTVFDRYPEQTTQLKKLGDLFGKAGRVQLAQVKVSEIDRIQIDRGLAFIGDIDGRIKQSEATIRAMTKANANVRLLKTIPGIGEFFARLIDAEIDDIGRFRNPKKLAAYAGLVPSTYSSGGKTFHGKIIKQGNKWLRWAFVEAVTPAIASDAQLRAQYEHLKIRGVNKARVAIARKLLTIAFQILRDQRAYEPRGESTTEGASTISRLS

SEQ ID NO: 346379 - protein, 404 aa, unidentified
MNNDLGFDIWCGLDVGKQAHHACALDAAGKKVFDKPLPQDQTKLEALFTRLSEHGRVLVIVDQPNTIGALPIAVARSMGIQVAYLPGLAMRRAADLYPGNGKTDARDAFVIADAARTMPHTLRRVDLGEETLAELKVLVGFDEDLAAEATRLSNRIRGLLTQIHPALERVVGPRLATKQGLAVIEQLGGPQGMTAASKSKLLRVITKANPRHAQNFADAITQALSEQTVVVAGTAAAEQVLPKLAASLRQTLDQRSELAAQVEKVVDAHPLAEVLTSMPGVGVRTAARILLDVGDASLFPTAGHLAAYAGLAPVTHRSGTSIRGEFPARSGNKHLKRALFLSSFAALRSDPVSRAYYDRKRAQGKKHNAALICLSRRRVDVLFAMLRNREPYRAPNPTPQPLAA

SEQ ID NO: 346380 - protein, 375 aa, unidentified
MNNNNTLYVGLDVHKESITVAYAINSEPVELMGKIGTSPTDIQNLCKRLRSKSSQVSIVYEAGLCGYGLYRRLVKSGFDCMVCAPSLIPKKPGERVKTDRRDAIRLVRSLRAGDLSAVYVPGIEDEAFRDLARAWASARDDLRHARQRLKSFLLVHGVHYVGRADWGPAHRRWLSKYSFESPWRQLAFDEHRRTIEDRQAQCERLESALKEAVTEWRLYPVVEALQAMRGIQFITAVGLISELGDLTRFEHPRQLMSWFGITPSEYSSGGSRHQGSITKAGNSYARKLLVEAAWSYRHPARISPAIQKRQENLPRPVIDRAWDAQLRLCKRYRKLQAKGKNVNITIVAVARELAGFIWDMGRIAMSVAQQPQCHK

SEQ ID NO: 346381 - protein, 348 aa, unidentified
MIIIGVDFHPEFQQIASVDTETGEFQEKRLAHPAEAEKFYRALVGQKVRMGMEASGHARWFERLVAELQFELRIGDAAEIRTKRVRKQKTDRQDAQLILRLLLENRFPQIWVPSWENRDLRQLLWHRHRMVQARTRIMNQLQAVALNEGLRCKKKLWRERGRQQLESFRLAPWATRRRRDLLELVDSLTPTIAELSHAIEQEVEKCPAAQRLRTHPGVGSLTALAFVLIIGEVNRFRCGKQVASYLGLVPLEESSGNRRRLGHITKQGSSMMRFLLVEAAQVTVRSLPEWRSKYLHLVLRRGRKIAKVAMARRLAVHLFWMMRKEWNYQQLKKFGSHAGEPGNRHGVQ

SEQ ID NO: 346382 - protein, 370 aa, unidentified
MQNSIYVGLDVHKATVSVAAAEDGRGSEVRAIGTFANNADQISKLAERLGKGGRRLHFCYEAGPCGYGLHRQLTDLGHDCIVVAPSLIPMKAGDRVKTDRRDALMLAKLHRAGELTAVWVPDSAHEAMRDLVRARATSKQVLSKARQHLQGFLLRHGRVYSGKKGWTRMYRRWLNTVRFDHPAQQIVLQDYIDAVTDAEERVARLTGQIEVLVPQWSMAPVVRSFQAMRGVALITAVTVVAEVGDFSRFNNPRQLMAYLGLVPSEHSSGAKVRRGGITKAGSTLARSALVEGAWTYRLPARVSNTLKGRIEPLPKTIRDIAWKAQVRLCARYRRLSAAGKLRTVVTTAIAREMVGFLWAIAREVQISASV

SEQ ID NO: 346383 - protein, 365 aa, unidentified
MQNINTMRTKAKNIFKGQLTIGLDLGDRSSAYCVLNEAGEIVLEHKLTTTPEAMKQVFGSMPRCRIAMETGTHSPWVSRLLTALGHEVIVGHAQKVRLITKSRRKDDRLDARTLARLARIDPELLSPVKHRSAQAQLHLTEIRARAVLVSARTALVNAARGLVKSSGERLRKCHTQQVRREMTGGLSAGLREALEPLLQEVESLNERIQEYDRRIERMAKQTYPETALLKQVKGVGDLIATAYVLTIEDPHRFRKSRDAGCFVGLQPGRRNSGESEPQMRISKEGDAYLRTLLVQGAHYILGPFGEDSDLRRWGLKLSARGGKTAKKRAVVAVARKLAVLLHRLWVSGEVYEPLRNTQKAMSAAA

SEQ ID NO: 346384 - protein, 355 aa, unidentified
MNTIYIGVDFHARQQTICYLTTEDGEVRTHELKHQDKTEVRAFYAQFSGRVVIGLEASGYSPWFEQLLEELGHEVWLGDATEIRRRARWRQKNDRRDAELILDLMAHDEFPRLYRPCPQSREILRMLRYRQKLIKIRTMGKNSLQALALQSGLAKRSLLFTKAGQQELRTATMSPVMQWQRDQWFQLLEPLNERLLETMLWLKLQTKDDERISRLRTHPGIGLLTSLCVVHTLWPVTRFRNQRKVAAYAGFDPMERSSAERKHFLGISKAGSRVLRYLLVEAAHTAVKKDDDLKRFYQRLVERRGRPKAKVAAARKLLIRSYIMLRDEIDYAEFRRRAVAARLARQSSRPLVPEA

SEQ ID NO: 346385 - protein, 401 aa, unidentified
MQEPLPHNSIDVFVGVDVGKGQHHAVALDRSGKRLYNKALPNDEAKLRALINELKAHGQLLFVVDQPATIGALPVAVARDEGVLVAYLPGLAMRRIADLHAGEAKTDARDAAIIAEAARSMPHTLRSLRLADEPLAELTMLCGFDDDLAAQVTQTSNRIRGLLTQIHPALERVLGPRLDHPAVLDLLERYPSPAALAATSEKTLANRLTKLAPRMGKRLAAEIVQALSEQTVVVPGTQAATVVMPRLAKQLAGLLQQRDEVASEAERLVHAHPLYPVLTSMPGVGVRTAARLLTEVAHKAFASAAHLAAYAGLAPVTRRSGSSIRGEHPSRRGNKVLKRTLFLSAFAALRDPISRAYYTRKIQQGKRHNQALIALARRRCDVLFAMLRDGTFYQPKTAPNA

SEQ ID NO: 346386 - protein, 342 aa, unidentified
MLIIGCDYHPSVQQIAWVDRENGECGERRLLHSDGEAEGFYRELKQRGVSVRVGIEATGHARWFERLLAELGFELWTGDAAAIRAKRVRKQKTDRQDAQHLLQLLGEDRFPRVWVPSPENRDLRQLLWHRHRLVQMRTRIKNQLQAIAMNEGVRRKKGLWTKPGRTQLEAFSLAPWATRRRPDLLVLLDRLNPSIEKLSAEIEREAEQRPEVQKLMTHPGIGPITALAFVLVIGPPDRFRCGKQIGSSLGACAQRRFQRRSSTARTHQQARECNAAFLAGGGGGSCLAFRAGLATAVRALDYATQPVHRKSGNGPQTGSSLVLDVTSRMGLPAGGQFRPHAG

SEQ ID NO: 346387 - protein, 318 aa, unidentified
MTGRLGMSERIAVGIDISKAEIVVAVAPSGEQWTSPTTPAALERTMARIATYQPAVVVMEATGGYEAPVAAAAAAAGLPVAIVNPRQVRAFAQALGRLAKTDVIDAHVLAAFGLRVDPPVRPLPDADTQALAALVARRRQLLEMLTAERQRLPQASTRTVQRDLQAHIRWLERRLTQVDDDLTTHIQRSPLWRLKDDLLRSVPGVGPNLTRTLLAELPELGTLTDRTAAALVGVAPINRDSGHYRGYRMIFGGRPVVRRALYMGALVASRHNPVLAQFYQRLRAAGKPAKVALVAVMRKLLVILNAMLKHQTAWNPAV

SEQ ID NO: 346388 - protein, 379 aa, unidentified
MLNEETRRELNANPNTLYIGADVGASEMKLAAADRQRNKPLEKTLEPFDDVGLMDWLKAVRKGLGLEAGPVVFVHEAGRDGFSLHWWLEMLGVHSVVVDPASIETSSRRRRVKTDRLDARLLLTKARGYFGGDGGVFSVVRVPSEEVEDARRVSRELKALKEEATRGKTRINGLLAQKGVKLALSKDFVARLKEVMTPWGTSLPPHLKAEILRQVERLELAESQIAQLEQAHQVAMAEGATDADRQGAKLVQLVSIGMATAVTLPKEFFWRDFKNGKEVGAAAGLTGTPRVTGTSTDIEQGISKAGNSRVRTLMIEIAWMWVRLQPNSPITQWFYARVDGTKRSKRKNIVAVARKLLIALWRYATMDVVPEGARLKTAN

SEQ ID NO: 346389 - protein, 341 aa, unidentified
MQTTKYFIGLDISADDFSASCITSPDNLVFSTQKFSNNIDGSNEFLTLLSKHNIKQSDVIICMEATGVYSENISYFLASKGFTISIEAPHKIKNKTKDSPRKNDFIDALSITEYAYRYSDKLPIWKPNNEIIEQIQVLLTTREHLSVQMIANVNALKTLKHKYYQTPLANQIYEQTISKLKEHIKQIDQEIKTLIDKDDSFKNNISLAKSVPGVGLLLAANLLVLTKGFKEQLDYKHIASYSGICPYEQISGTSLHKPPRSRMCGPAKIRKLLYLAALSVRTHNQNFKKYFLRKVAEGKNKRLVLNNIENKLLKIICAVINSGTAYTENFKSINPELLKTA

SEQ ID NO: 346390 - protein, 377 aa, unidentified
MYRIIKIGMDVHSKNYTLCAMEPLIGEEDRIFANIQVTADYKNILMFIEQLKMKLGMSDEYDIQCGYEAGCLGYSLYNQLTAAGVKCVILAPTTMLTQQVKRVKTDARDALMIAQCLSYGGYHAVYIPTQEDDSVKEYLRMRDDHKEALKKIKQQINALCLRHGHHYEGTTWTIKHVTWLRKLELPSLYRETLDEYMASFDEQTAKIERFDQRIEELSSQEQYWEKVKKLCCFLGIKTHTALSLIVETGDFSRFAKGNTYAAFLGLAPGEHSSGEKTNRTGISKAGNRHLRQLLIEASRGICKGAVGHKSKELRARQNGNTAEVIAYADRGNTRLRSRYYKFIRHGKKKNVAVAATARELAGFIWGMMTDNISYRMA

SEQ ID NO: 346391 - protein, 281 aa, unidentified
MTSQTAVIGIDVAKESLSICGAPAGEVFELPNESCSIRNWLKTLPSGCSIAIEATVIYHVLVATLTHARGHRIYVINGYRLSNYRQGIGGRNKDDRSDAQLLARYLAHEQAQLGPWQPPSKVYSRLQAMLHRRAVVVRSATSLRQSFSQDRELASELKPVLKRMATLERRLEDAIQSTLDEAGLTAQSKRCQKVEGIGPLTAAALSMAFLRGSFRNSDAFIAFIGLDVHLKESGRYSGRRKLTRQGDPEIRRLLHSIAMSAARTQRWQSIYQSYLARPEKD

SEQ ID NO: 346392 - protein, 406 aa, unidentified
MSIYIGIDWSQDKHDVAFMNAAGAIIARLTIPHQPDGFGKLEATRKQLAVTATDCLVGLETAHNLLLDFLWDQGYQQIYVIPPGVVKSSRGRYGHSGARDDTLDAQLLADLLRTDRARLHPWRPDSQLTRQIRAQVGFISYLTHSANRTHNRLRAALLRYYPQALELFSGLMVPTTLAFIAAYNTPQALDALSYEAFVAFAHQQGYWNQQVLLACYARLQHTPLQASPATVAVYQDEAQILAQQLRELILTKRQVQRDINTLFALHPDQAIFSSLPGTGDFLAPALLAKLGDDRDRFPSAASLQALAGTCPVTVASGKRKRVIFRHACDAEFRQIAQQWARCSLRKSVWAVAYWQQIRPRSTSDHDAYRRLANRWLAVLWKLWQSREPYDEAYHLQQRRLRSQPVA

SEQ ID NO: 346393 - protein, 386 aa, unidentified
MLVAADRPAAPAAIRTDLGAIFVSLELSKSTWLVTSLSPGSGERMSKHAVRGGDVVGLLARLSHLQDKAQARTGQRFAPIVIQEAGLDGFWVHRALEQEGIESHVVDAASIATSRRRRRAKTDKIDGEALVRALLADKRGEPRVCAMARVPSVQEEDRRRICRERKVLIGERTCHVNRIKGLLFAQGITDYNPLRRDRRRRLEELKTGDSRALPDRLKAQIRRELDRLELLLAQIKDLEAERDALLATEVADSPAATLLDLKGIGPDFATVLYAEGLFRHFDNRRQVAAYAGLAPTPWQSGSVRHEQGVSKAGNPRLRTTMVELAWLWLRHQPGSALARWFQERVRRNGGRLRKSTVVALARKLLVALWKYVTAGVVIEGAVMKTA

SEQ ID NO: 346394 - protein, 312 aa, unidentified
MKITTIGIDLAKNVFQVHGVDERGKTVLKKQLKREQMAPFFANLVPCLIGMEACGSAHFWAHKLQRLGHTVKLMAPQFVKPYVKSNKNDAADAEAICEAVSRPNMRFVPIKNSEQQAVLALHRARQGFVKARTAQANQIRGLLAEHGIIIPQGIGHIAKRLPEILEDGENNLPGTFRHLIERLGDHLKELDRQVQELEVQIQIWHRENAASKKLAQIPGIGPITASALVASIGNARNFENGRQLAAWLGIVPRQNSSGGKQTLLGISKRGDTYLRTLLIHGARAVIRVAERKAQHAGSWLAGVMERRNKNVA

SEQ ID NO: 346395 - protein, 319 aa, unidentified
MAQNDRVVVGIDVAKNKMDACIRAASQRRTFESSAQGRRQLISWLRKHKATTAVMEASGGYERDWAKVLREAGLEVRIVDPKRVRSFARSAGRLAKNDAIDAEMIAWFAETFGEAPAQAYDADREQLLYIVNARQALVDVQTELQNRNEHSLPDVVQKVQARLLKRIALELAKLEAAIAAMISATAHFAELAEIIESVPGLGKGTSAGLIAAMPELGQVSNKVAAALLGVAPYDDDSGKRRGERQIKGGRRKVRNLFYMACLGAATLHNPVLKAFYRRLIAKGKEKKVALVACMRKLIVILNIMIGRGEKWDASRYPVG

SEQ ID NO: 346396 - protein, 370 aa, unidentified
MLDTTTFVGLDVHARSIKAVSLDVMTGEVRCATFGYDAGAVAEWVRSVDPGARCVYESGVTGFDLQKRLSGLGVDCVVGAVSKMIKPSADRGRKNDRNDAEFLARMLSVGNVVEVWVPDDECEAARDLTRALEDARDDLSRSKQRLSKFLLRHGLVFDERTPTGRRKGNWTRAHWSWIESIRFAEGADNDALAYYVDAVRRAAEEKARLEGLVEAEARKPRWRRRVDSLRCLKGVDTASAADLVFEAGEFSRFRNARSFAAWVGLTPSEHSSGESDRRGAITKAGNKHLRKTLVEAAWHYLTCSGRPKDLAKGQAPDRGARRHAAKGVRRLVDRREALLARGVHGNKANVATARELACWAWAVGLMAEEA

SEQ ID NO: 346397 - protein, 341 aa, unidentified
MEFIGLDTHRHYTVAARVDESGAVVEQRRLKNEDLACYLASLPGPARVAVEATANWYHIYELVEPLVAEVALGHPLKTRIIAEAKIKTDKVDATILAQLLRADMLPRAYIAPAVVRELRELLRLRASLVRQRTMVRNKVHAILIKRGLKPPVGSLFGKRGRGWLGEEAARLPQAYGDAVACYLRVLDALQEEIKGVSAGVEERAQLSEEACWLDTMPGIGPYTALLILAEVGDIKRFPDAAHLASYAGLVPSVHSSGGRTRYGSLTKQGSPWLRWAMVEAAHSAIRVRGPLRERYERMRRRKPHGTAIVDLARFMLGCIYAMLTERRSFKSVPRGSSEDMA

SEQ ID NO: 346398 - protein, 369 aa, unidentified
MNQSTMFVGLDVHKESIEIALAPLGAGEVRAYGRIAGDLDSVDKVIRALRQRHAHLNFVYEAGPCGYALYRHLTKRGFVCAVVAPSMIPKRPGDRIKTDRRDAMSLARLYRSGDIKSVYIPGPEDEAIRDLSRAREDAVIAHKRARQQLAALLLRHDVRYPGKTPWSQAHQRWLAVVKMPQPSQQIVFQEYLHAVDETHQRVERMTEQLRQATTTWRMAPVVEALQALRGVSLICAASLVSELGDLTRFDRPRDMMAFLGMVPRQYSSGPHQRLGAITKTGNSHARRMLVEAAWAYRFPARISRGLRDREENQPQVVRDIAWKAQLRLCRKYRRLLARGKVKQVVTTAIARELVGFVWAIAKEVSPPAN

SEQ ID NO: 346399 - protein, 372 aa, unidentified
MSQSSTLYVGMDVHKESIAVAYVAQAHGAEVISLGTIGTRQCAIDKLIRQLRSKSKQLVFVYEAGPCGYWLYRYLMKQGYVCWVVAPSLIPKKSGDRVKTDRRDAMPLARLMRSGALTPVSVPAVDDEAIRDLSRAREETLRDLKAAKLRLKAFLLRHDIRSTGRANWSPAHLRWLSEVVCPTPAQQMVFQEYVQTVTVQTERRGRLELALHEQVQTWRLAPVVEALQALRGVQFTVAVTTVAALGDLTRFENPRQLMHYLGLTPSEYSSGGRRQPGSITKTGNTHARRALVEGAWAYRYPAKVSRHLQLRLEKLPKVIQAISWKAQVRLCKRYRQLMAKGKNANQVVVAIARALSAFMWAMAQQVTVPPKA

SEQ ID NO: 346400 - protein, 327 aa, unidentified
MYVCILDQAGNKMVHRNISTDADRFLKLIEPYRANIVVAVESMFSWYWIADLCSEKGVPFVLGHALYMKAIHGGKAKNDKIDSLKIATLLKGGLIPMAYVYPAKMRSTRDLLRRRMHLMRKRAELLAHIQNTNTQYNLPQFSVKLRYKSNRPGTAERFSDPSAARAVEVDLSLIDFYDELLKKLELDILRMARQHDLQTLSRLRTVPGIGEILSLVMLYEIHDIRRFPRVQNFISYCRLVKCVQTSAGKPHGSSGHKIGNAHLKWAFSEASVLFLRYRPEAKKLFNRLVRKHGKGKALSILACKLARAVYYILAKEKAFDMKIFLNQ

SEQ ID NO: 346401 - protein, 430 aa, unidentified
MKSNTQNAKIEAITEKTLVLGIDVGSETHYARAFDYRGIEYSKKPFKFSNTEAGFVTLKEWILDLKERHEKDKVVPGMEPTGHYWFNLGKFLQDNEMKPVLVNPHHVKKSKELDDNNPTKNDRKDPKVIAGLVREGRYMIPYLPDGVYADLRTASNIRFQLQAELTRIQNRISRWFNIYFPEYKTVYGKPDAKSGMLILKAAPLPEDILTLGIDGVNQIWRDAKLRAVGKARAKILIEAAEHSVGSKEGAVSARMEIRMLLEDYESRNICLQEVMTLIEGLVKQIPMAEKLLEIKGVGIKTVSGFLAEVGDISRFNTPKELQKLAGLALVESSSGKHKGETTISRRGRKRLRYLLFEVAMSLVAKNPEFRELHNYYTTRRLNPLKKMQSLMAIAAKLIRVFYAMLTKGVDYDPKKMVSDIKRPAVYIQAA

SEQ ID NO: 346402 - protein, 417 aa, unidentified
MKKNTKSPTKKEPKAKPAKAQRPVQRETKEVLAELVEKLSGKLELKATPASPGKAGQRPELSPNLDRLTVGVDLGDQWSRYCILGLQGETLSEGPLQTRQAELAEFFQALPPARVVIEVGTHSAWVQETIAGEGHEVLVANPRLMDGSKRRKRKNDRIDANKLARLGRVDPESLHPITHRSREVRQDLVLLRARDALVEVRTELINASRGLVKSLGTRLPKCSSPSFGQKVADAIPVEIREAVLPLVQLVDGMSACIKVYDRRIEELASEKYGHTELLRQVKGVGPLTSLAYVLTLEKPERFPKSRDVGPYVGLVPKQEDSGESQPQLGISKAGDTMVRKLLVGSAHYILGPFGPDTDLRRYGLRLCQRGGKNAKKRAAVAVARKLAVLLHRLWMSGEVYEPLGYASSAAIAQKAAA

SEQ ID NO: 346403 - protein, 400 aa, unidentified
MNIIGIDVSQGESHATLITKEAEEIAFKFKHNKSGFQILNSYIKPGTIIIFETTGVYSAQLTTYLKNKKVKFYELNPLEAKLRMASLRRNKTDKNDSFKLALLGKTQLAEIKNHCNKQSNSLYESLRILSLRYKQLIKCRTRILNFLRSSLELTFPELNQIFKNAYAVLALQVFRMYCHPDFLVGLTLKEMTTRVYQSVSRRIHKDVIQSYCAQVWLAAKDSYPAVPANSLEIEIISEYCDEIESYNKEIAYIQNKLIKTAVGLDDFKVISSIPGAGQLNSALLLGFTGDIARFDNYKQLNAFLGLDLNRYQSGKYIKGDTINRRGSSQGRAVETDMIRSMLRNQGKIQNHLIDYYYKLKKPPFNKRDKVALIACANHLNRTIINLVHTHQLYNYSKAIH

SEQ ID NO: 346404 - protein, 348 aa, unidentified
MSKHTVAAGDVCGLLRRFAELRRKAAARTGRDFPIIVIQEAGLDGFWIHRVLQSEGIESHVVDAASILISRRRRRAKTDRIDGETLVRTLMAYKRGEPRVCSMARAPTPQEEDRRRVCRERRTLVGERVRHVNRIKGLLFAQGVFGYEPLRKGRRERLEDLRTGDGRPLPVHLKAQIIRELDRLEVLLEQLKSVEAERDALLKPATEEAASPAAMLARLKGIGPETAVVLWSEGLFRQFDNRRQVAAYAGLAPTPWQSGSIDHEQGVSKAGNPRLRTTMVELAWLWLQNQPASALSLWFHERVRRLGGRMRKTTIVALARKLLVALWRYTTAGVVIEGAVMKPTSATI

SEQ ID NO: 346405 - protein, 331 aa, unidentified
MTSLSKQASGTPLCIGVDVAKAMLEVGFSDRETTFAPANDAVGHQSLVMLLRDLQSQGASIGLIVLEATGGLEIVVATELQLAGYSVAVVNPRQARDFARSMGYLAKTDRLDAKVLAHMGQTLLQRSDLHKLVKPLTDETHRMLQALVTRRRQLIDIRTAEQQRLAAPDKRMHRSVSFMIETLNSELGRVDQDLQSFIEAHYSELAALLDSVKGVGKATISTLLAEVPELGKLSGREVSALIGVAPINRDSGATRGRRSIFGGRRDVRKVLYMAALTASRYNPVIKVFYQRLVTAGKPKKLALTACARKLLVILNAIARAGKPFDMTLHSA

SEQ ID NO: 346406 - protein, 346 aa, unidentified
MNNPFSGFDACGIEVSARTLLVALGAAERSASRREFANTPEGQRALLGWLKRGKRPVRVVMEATGLYGLDVALGLAEAGVSLMVANPRAARHFAQAMMQRSKTDRIDAEVLRQFAARMPFVVWRPPSAAVLKLVAVARRLEALTQMVADEKNRLHAASLSEALPAVVRRDVQRSIRTQQRAIERLSRAAQEFVATDPELERRYGLLLSIPGFAATSALHTLAELALLPAGMDVRQWVAYAGLDPRHHTSGSSVEKKPRISKAGNKHLRRALFMPALVAIVHEPHLRAFYQHLLARNKTKMQALVAVMRKLLHAIFGMFKHHQTFDGSKVYSLLPAIAPDPATLEVA

SEQ ID NO: 346407 - protein, 387 aa, unidentified
METINPICHAKPCASVEAANLFVSLELSRARWLVTSLSPGSDKISRHSVVGGDYKDLLRLLAEHRMKAERHIGTTVKVVAIQEIGFDGFWIHRILESNSVESHVVEAASIAVPRRRRRAKTDTIDGELLLRTLMAFKRGEPRVCAMVAVPSPEEEDQRRLSRERKTMIKERIEHINRIKGLMACQGIAGFEPMRANAREKLGELRTGDGRAIPERMKAEIRRELDRLELLRQQIAEVEAERDALLHAEDAQGGSPGALLLKLRGIGPEFALVLWQEGLYRRFTNRRQLAAYAGLAPSPWRSGDMKKEQGISKSGNARLRTTMIEAAWLWLRHQPGSALSQWFQERVRTDRGRLRRVSIVALARKLLVALWRFTTHGEIPEGASLKAA

SEQ ID NO: 346408 - protein, 346 aa, unidentified
MNNILKQTFGIDVSMDTFVVRFGTTDTNQDQQISNSESFKNTTAGFKKFIHWTKKHIISNDIPLFFVMEATGVYYENLAHFLYSNNYNVSVVLPGKIRNYAKSLQTKSKTDPIDAANITSFGLERKLNLWKPANSIIKPIKELCREYHSTKIMITEIKNQLHAKNHSYQPEKQTILRKKQLIKLLVKQAKEIENQIKTIIKEDKELSEKIDRAVKIKGLGFISVVTTVAETNGFELVSNQKQLASYAGLDVVLNDSGIRKGKTTISKKGNKFLRKAVFMPALSASKHNQKMKELYVRLVQKGKNKKLALIAVARKLLLLIYTIWKNNTDYIPNYNPNQQKAPCLRN

SEQ ID NO: 346409 - protein, 421 aa, unidentified
MRRKNDNRQVEKRQRITDATLVIGMDIGCECNAMCLMSKEGTILGRYPKIYNSRKGFDYFHGIVESMKKKYGFTDVLIGMEPTGHYWRKIAYFAMDKQYEVRFIRTTALKHQRELDESSSAKNDIRDAYTIANIAREGKYIDTVIEDNIFRQLRTLAHTREKIQRISTGAKHALKGMLEDYFPELKHIFWSMKAKGLWALLEHYPFPEDVLKTDIDTVTELIAQSTRRKIQAHEKALQIYKAAQHSIGLQRVGDADRFRVAAYLSEIRHSETQLKEIEAQMEALLKKIPLAEYILSMPGIGTLTCGVFLGELGNPCNFTNPKQIVKYAGYDPKEHDSGQRTGRRIISKKGRWLLRKYLYFMAMRVVHRSPFLKDYYENKQKTMTKKEALCAVVIKLIKVIFALLRDKRTFTEKQSCLKQAA

SEQ ID NO: 346410 - protein, 352 aa, unidentified
MSKITITGIDLAKNVFHLHAVDRNGRQVKAIKLSRSKLTEYLHRSESITVAMEACASAHHWGRLCQLLGHEVRLISPQFVKPFVKSNKNDRNDARAICEASQRPDMHFVPVKTVEQQAVLSLHRVREMLIGQRTATINQLRGLLTEFGLTAPAGRKALNNRIPAMLEDLMKISPIFLVSCIRQQWEHIGELNQRIDNVTTQIEMHARQSDVTRRLQTIPGIGPITASALEAYVGNATQFRAGRQLAAWLGLVPRQHSTGGKPVLLGTSKRGDGYLRRLLVHGARAVVAAVRSSPNLQKQDKTMMGWLARKHMNVAVVAMANRNARIAWAMMTQERNYDRNFRDQLANQLAAT

SEQ ID NO: 346411 - protein, 349 aa, unidentified
MTTYIGIDLHKRTQTWVALAENGKDILFTKEFPVTPEGVRSGIKLSQKCGDTMVVAIEPTCGWMWVVPLLRSCGMDVHISNPRKVKAIADSLQKTDENDATILAQLVRTGIMHESREVTPEIQKLRALIRERVFLVRVRASMKTRLEGIVTRNGRHRIAGSLSTKKGKVAIIESGEQEWRRSLGTIADVGKYITQLDLEIATYAKEKIPTLLMTLPGVGPVTAVSMWAEVGDYTKFPSPEKLCAFAGLVPTERSSGGVQRLGHITRAGSTILRYVLVEAAMRVRDTDTTSVLYEFYKTIKTKRGAMRARVALARKILTISWYMVKKGEAYQQRFTVSKVEPFPVENKIA

SEQ ID NO: 346412 - protein, 339 aa, unidentified
MRYVGLDAHWRQSTICVLDHRGQKLLSRTIKGPWSKVLEEVGKIRKPFAVCFEASTGYGYLFERLQTIARRVVVAHPGQLRLIFRSKRKNDRVDAEKLAKLLFLDEVPPVYVPSSEVRSWRGFIGHRYKLVRERTRTKNSIRALLRGLGIQAPRGLWYGPGMKWLCSVSFANELDTVRRDMLYERLCFLTKMLERVEATLDRISSRHPGAQLLRTIPGVGPRTSEAVMAWVDDPGRFQRIKSAGRYFGLVPSQDASARTNRLGHITREGPAIVRWMLTEAAWQGVRRSPAIRAFYERVRREDPERGKIALVATAHFLLRAMMAMLRTGEVWRLQEEAAA

SEQ ID NO: 346413 - protein, 338 aa, unidentified
MKLYGAIDLHSTNNVTVVINEHDQVVYQKRLPNDLSLIAQQLSTYRASLEGIVVESTYNWYWLVDGLMEKGHRVHLANTAAIQQYNGLKYTDDHSDARWLAHLLRLGVLPEGYIYPKQERAVRDLLRKRGQLVHQRTSNLLSIQSLISRTTGNSISAKYIKALDIQHVDGVLPNPDLVLALKANLAVMNSADAQIEILEKAVQDRVKLRPQFRFLKTVPGIGPILALTIMLETGEIARFASVGNYASYCRCVGSRKISNGKRKGSGNTKNGNKYLAWAFVEAANFAIRFYPRIKSFYQKKKSKSHAIVAIKAVAHKLCRACYYIIKDQVAFDITKAFA

SEQ ID NO: 346414 - protein, 453 aa, unidentified
MPRKKPGKKKATLPVLNPDAAGIDIGATEIYVAVPADRDPQPIRMFATFTQDLNLLADWLQQCRVRTIAMESTGVYWVPLMQILEARGLEVYLVNARYVKNVPGRRTDVSDCQWLQYLHSVGLLRASFRPAPEVCALRSLLRHRQSLVEMASCHVQHMQKAFDQMNLQIHHVISDITGTTGLAIIDAILAGNRDTEALAALRDPRIRASKDTITKSLVGDYRREHLFTLRQSVELYREYQRRIAVCEEEMKKMMRDLETKADPTMSLPAAKDSVKKCKVMVPAKALALREEAYRILGVDLTTIPGISVLHVQTILAELGGNVSKFRSAGAFSSWMGLCPDNDITGGKVVWSGTRKVKNRVAGALRMAAQSLQNSTSALGAFYRRMRTRLGAPKAITAAAHKLARIIFHMLKTREPYNESLFAEAEVKHRKRRENRLRAMAQALGYTLAPVQPL

SEQ ID NO: 346415 - protein, 317 aa, unidentified
MAMQAGRLIVGADVAKAELVIHHDNSDEVIKLKNSKADIKRWLKQQPLNTAIAVEATNVYHLDLVELAHGLGFSVYVVDGFQLSNYRKSVGGRVKTDPSDARLLSRFLRNEGEDLRPWSPPPAVYGKLQSLLRRRAALVSARTAMTQSWANETLLKAAFEAFVTSIDRLDLLMQKKMKEVLREAGLHEQVARCQAVEGIGFLTATALVMAFVRGEFKSSDSYIAFLGMDLRVSDSGQKAGRRRLTKRGCSEIRRLLHNAAMAASKSTAWKGIYEQHRKSGKATTQALVILARKLARVAFALMKNQDEYVTKASKPAC

SEQ ID NO: 346416 - protein, 391 aa, unidentified
MRSPEGQSTTAAIRYDLGAIFVSLELSQSKWLLTSLSPGGGERMSRHELAAGDVAGLLGLFARLREKARARTGCDYGVVSIQEAGLDGYWLHRVLAGEGVESHVVDPASVAVSRRRRRAKTDRIDGEALLRTLLAYKRGEPRVCSMVRVPSPEQEDMRRLSRERRTLVGERLTHVNRIKGLLASQGIRGYQPLRRDRRVRLEALQTGDGRPLGAHIRTQILRELDRLELLCGQIKAVEAERDALLARLEQAAPPERPAPTAMLAQLVGVGAESASVLWHEGLYRPFDNRRQLAAYAGLAPTPWQSGKIDREQGVSKAGNPRLRTAMIQLAWLWLRHQPHSALSRWFLLRVQDNGGRGKKTAIVALARKLLVALWKYVSAGVVIDGASLKAN

SEQ ID NO: 346417 - protein, 412 aa, unidentified
MQTLVKRGCGLDVHQATVVACLLIIRNDGTVQKQMRTFGTTTRELLNLRQWLLSQGCTHAAMESTGVYWKPVYAILEGGLEIVVANAQHVKKVPGRKTDVKDAEWIADLLCHGLLRSSFVPPKAIRELRDLTRYRRKLVESQSAERNRLLKVLETANIKLASVATDVFGTSGRLMLRALIQGKATPQEMAELAKRKLRSKIPQLELALEGRLEDHHRFLLKLQLDRLERVEGDLAVLEQRIQEKLAPYTAQLALLDEIPGVDWTLAAVIIAELGVDMSVFPSVSQLASWAGVCPGNNESAGKRKSSRIPKGNVYLKTALVEAAHAAARTKGTYLRDKFYRLKARRGYKRAAVAIGHKILVSVYHMVSQNVSYNDLGDLYLDKLNKNHLTRNLVHRLERLGYSVTLAPQQKAA

SEQ ID NO: 346418 - protein, 349 aa, unidentified
MKKVVKQVVGIDVAQDELVVCLGKMYDDWSPVLVAHKTFVNEPKGFDGLIAWVTKQTESDVAIRYVMEATGVYHEPFAYYMHEQDFEVSIVLPNKISNYARTLETKTVTDKTSSEAIAMFGLEKKIDTWSPPKGIYKKIQQLTRERGQLIDERTVIKNQIHAENAGAFPNKKSLQRAQKRLALLVKQDTEIMNEVNALINSDEEVQRIVSLICTIPGIGLLTAATILGETNGFDLIRNKKQLVSYAGLDVKEKLSGTSVKGKPCISKKGNRLLRKAMHLPALSVIGRDERFKAIFARLVSKHGIKMKAVVAIQRKLLEMSYTIYKTQKQYDKEYLKKNEVIKEEEILTT

SEQ ID NO: 346419 - protein, 331 aa, unidentified
MYKFVIGVDISKSTLDVGLKTTGQQEIKHDSFLNKGLGFKHFLEWLKPLVENMNHLVVCIEHTGYYTHAFCAFLQKKNITFALINPLQIKRSMGMRRGKTDKRDSEMIALYGMRFQDDLIVSKVLDKELLTLQLLLAQRKRLLNMELSLKRNTKHLKHCLPKSYNGQINKENLRLEIIIKKKRIDAEEEILELIRKSPPMDRNYKLLLSIPGVGKQTAQYTILYSSNFQKISEPRKFACYAGVVPFDHQSGTSIKKPSRVSYYSNKTMKSLLNFAAMSAVKVDPELKKYYKKKVEDGKSKMSVLNAVRNKIVHRIFAVVKRGTPFVLKPVF

SEQ ID NO: 346420 - protein, 343 aa, unidentified
MGTQIVGGVDTHLDVHVAAVLDEHGGLLGTASFATTPAGYAELADWFVSFGEVVVVGVEGTGSYGTGLTRHLHDRGISVVEVDRPNRQRRRRAGKSDTHDAVSAARAAFAGDALGAPKTRDGNVEAIRVLRLARTSARRDRTRALNQMRALITTAPDELRSQLRALTIPRLIHTAAGFRPAQGTDVGRANRLALKTLARRVLELDNEVAALDAALTPLVAQTAPAMIERLSVGTDTAGALLVAAGENSSRIHNERSFARLCGAAPLDASSGKQQRHRLSRSGDRQANSALWRIVITRLSYDPATRRYLQRRCAEGKTKTEAIRCLKRYVARELYAYLPHHTLA

SEQ ID NO: 346421 - protein, 346 aa, unidentified
MFFAGLDLSRKRLDVHVVDAGGATVLETAAPPDADGLRGLVERLDAFGPVCAAIESMNGARFVHDRLEQLGWDVEIADAQKVKGLAPLACKTDRIDAWVLAELGRRDLVPAIWLPDPAVRAERERARWRLHLVRHRVQLKNRVHATLIAFGTPCPVSDLFGARGRRLLDRVGVPDPWRSDLLAAVALIDELDREIDDCARELRRLGADHRYVPLLTSIPGIAWVLGYTIAAEIGDINRFASAKKLCGYTGLCPRVYQSGATDHRGPLTKNGPKFLRWALIEAATHAARHPLYHEHYQRTAKRLGKQRGKKVARVEIARKLAEAIWHMLTHNQPFAPAGPTRSALAA

SEQ ID NO: 346422 - protein, 344 aa, unidentified
MQHHVGLDVSVKETSVCIVDKAGKVIREVKVATKPAEILVVLTEEALAIERIGLEAGPLSQWLYGALAEAGLPVICVETRHMKAALSAQINKSDRNDARGIAQMMRVGLYRPVHVKTLASQKRRMLLTSRQLLQAKALDIENDLRGTLRNFGLKVGMVGTVEFEARIRELVADHPDLAAIVEPLLIARRVLREQLGVLHRQLLEIVRQDEVCRRLMTTPGVGPVVALTFRATVDVPSRFNNSKAVGAALGLTPRRQQSGEIDRMGGISKCGDAMMREMLFEAALVLMTHSRKWSWLKAWGMKIARHRGMKRAIVAVARRLAVIMHRMWVDGTEFRWSRKEAAAA

SEQ ID NO: 346423 - protein, 366 aa, unidentified
MASIASDPADVIVGVDTHKDQHVAVALDGLGRRLGERFAPATPSGYADLLAWAASLGRVAAFGVEGTGSYGLGLARFLRRHGIVVLEVARPPRKGQRRRQGKSDPVDAEHAARELLAGASAVTPKTAEGAVEAIRLLKVARDTAVTAHSQAMITLKATLVTASDTLRAELEPRTDFALVTACAELEVAGDLADPDVAARHALRALARRWLALHEEIKVHTRQLKRLTSQTAPALVATFGIGFDCAAELLCAAGDNAGRVRSEAAYAKLCGACPIPASSGKTTRHRLNRGGNRQANAALFRIVVVRMRWHPATIAYVQRRTTEGLSKREIIRCLKRYVAREVYRLLPVPTATPCRATPGRIDRLDDL

SEQ ID NO: 346424 - protein, 310 aa, unidentified
MEQVFVGIDVAKDRLDVHVRPSGEAIAVARDGDGLAALVERLAALKPALIVSEATGGFEQVVAGGLAAAGLPIVVVNPRQIRDFARALGRLAKTDRIDAEVIALFAERVRPELRALPDDQARLLGELVARRRQVIEMMTAEGNRARQIESPRLKKRIDRHRRHLQDELTEIEAELDDAIRGTPIWRDKDDLLQSVPGVGDALARTLIAELPELGQLDRKKIAALVGVAPFNRDSGTLRGKRTVWGGRATIRATLYMAALVASRCNPAIAAFYKRLLAAGKPKKLALTACMRKLLTILNAMIRDQKPWQNA

SEQ ID NO: 346425 - protein, 342 aa, unidentified
MEKVSIIGLDLAKRSFQAHGASAEGGVAFRKKLSREKVLAFFADQPRCVVAVEACGSAHHWGRAIRDIGHEVRLIPPTYVKPFVKRQKNDAADAEAIAEAASRPTMRFVAVKTEEQQARAMLFRTRDLLVRQRTQLINALRGHLSEHGVVAAQGQANVKVLEEAVEDEMTSLPLLVVELARVFLDQIEGLSKKISGLEKVTAHEAASGEMTRRLQTMPGIGPITALAIETFAPPMDVFKRGRDFAAWLGLVPRQHSTGGKQVLGKISKMGQRDIRRLLITGAMSVVRAAMRRGAPDGSWLQRMLARKPKMLVAIALANKMARSVWAMLANGEDFRVPAAAAA

SEQ ID NO: 346426 - protein, 577 aa, unidentified
MNPNHVASSLTPIGVGFDTARYGHHVTFLREDLQPATTPCEVTESREGYQLLEQKFQQLAQRIPNVLFCIRIDAAGQYASNLETFLRQLPFPKTISVGEPARNQKYRQAIFPKCKSDPAESHCAGRFALREDPKPAPEVPADLIALREIASRLDAQTRQSTRLANQLHNLMARVFPELATLASDFQAHWVLRLLDQYPTPLQLARARQSSLTDIPHLTADKAQKLQTAARSSVGGFRGTVAEELVRMLVGQLRRSGQEADDLRNLLVKVHQALPQSNQIDTIPGIGAGTAAVLTAKMISIDRFETPDQLVGYFGIFPEKDTSGLDKDGKPKPGCHHSHMCKKGSDLARKYLWNAAKVACQHNPAVRALYRRLRSRGRRGDVALGHCMRKLLHLVWAVWKSGKAFDPNHYPWEPASAPLGNTEAAGHNQGTSPERKVVTAADSTVSSEAPALNAPNPTAPENALAAADNAWVDFALLREQVTIEQVLAHLGWLSCLRGSGPQRRGPCPVHGTSADRVRSFSVHLQKNAFQCFHPPCASHGNVIDLWAAVHRLPLLEAAHHLTATFNLRTTRQTEKRNP

SEQ ID NO: 346427 - protein, 349 aa, unidentified
MIIVGCDYHPGFQQIAFVDTDTGELQERRLEHPEDAEKFYRDLAVQGMKVRVGMEASGHARWFERLLAELNFELWVGDAAEIRAKRVRKQKTDRQDAQHILGLLLENRFPRIWVASGENRDLRQLLWHRHRMVQARTRIMNQLQSVALNEGLRCKKRLWREQGREQLESFRLAPWASRRRQDLLALLDRLDPMIAELSQAIEQEVEKCPTAQRLMTHPGVGPLTALAYVLIIGRAERFQCGKQIASYLGLVPLEDSSGNRRRLGHITKQGSSMLRFLLVEAAQVTARSLPEWRNRYFHLMMRRGRKIAKVAMARRLAIGLYWMWRKGWDYEQVKKVGSHVGQLGTGDGV

SEQ ID NO: 346428 - protein, 465 aa, unidentified
MWAGEVVRFLGSDPANETNLSIAIGGHPASQNADTKMALEGNSSAHTGVLMEGIRNKACGLDIHKKFIVACIKDLQGVTLEARYDRTPKDLLRMKEWIIENHCDVVGCESTSDYWVPIYEMLEGHIEMIVGNARDIKAISHKKTDKIDAAWIATLSLHDLIPRSRIPDKEARELRSLIRLRKNLVEKRTDIKNQVHHILDSFLFRLSSLLSDIFGKSGMIIMNGVINGIPVEEIISMLPERIRRRADEIKEVLETNLPQTAMFRLKCCLDLIRDLDDQIGVIMQMVNRLVSANTRIIRLLTSVPGVGYLAAVTLIAEIGDFKDFSSGDKLASWLGLVPTVKQSADYLRTGAITKRGSRIVRWILVQCAQAAARSHNTRFSDFFKRKVGSIGFGKTIVAIARKMATIIWHLVINDEIYEEKGRFIPREIQIPTSKEPRYFNLNQILELVSSANIFLAQPDPHVDSG

SEQ ID NO: 346429 - protein, 413 aa, unidentified
MEVFCGIDWAEDHHDIAIVDRDGQLLARRRISDDAAGLAALLALLAEHGDSAGDQVPVAIETPRGLLTACLRATGRKVYPINPMAVARYRDRHSIAGRKSDHGDAVVLASILRTDAHAHRPLPADTELAQAIAVLARAQQDAVWARTAAHNKLRSHLREYYPAFLAAFNGTKGGIMRPEARAILAAAPTPAAAAALTLAQLRALLRKAGRRRGIDADAARLRDALRAPQMRQLPLVEQAMGRQALALLGQLDAACAAAADLEQATVESFNQHPDAGIITSFPGLGPLTGARVLAETGDDRSRFADAKGLKAYAGAAPVTRASGKTRAVLHRRVKNQRLAAAGYVWAFSALTASPGARTHYDRRRKDGDRHAAAQRNLFGRLLGCLHYCLATGQHYHENTAFPTPGHAPCDIAA

SEQ ID NO: 346430 - protein, 348 aa, unidentified
MQSTANLPVIGLDLAKTVFQVHMVDVETGEIQRRQVKRARLTEFFAKCAPSLVAMEACGSAHHWARTIRSLGHQAKLLPAQHVKAFLLRDKTDAMDAQAIWVAAQQPHINEVPVKTERQQTCMSLHGMRRQLMKIRIMQTNALRGILGEFGIALPVGHNQLLKTIHGELAKAQQEDQLSADLVVSVQEQLKRIDALQEDIDHLGQRLRAMIREDRQMQAIQQIPGIGDLTASALVAAVGNFSTFKSARQFASWVGLTPRQVGTGGKTQQLGISKRGDTYLRTLLIAGARAVIARAERSSWITRLLERRHYNVAVVALANKIARTAWAVLAKGAAFELVKWHPLENASP

SEQ ID NO: 346431 - protein, 340 aa, unidentified
MTIIRFGIDLAKSSFAVCGVDTSGKIVLRKTLKREKLLEFFANRPPAIVAMEAGSGAHHWARELRGLGHDARIIDPRLVAPYRHQGHSGKNDFNDAVAICEAAGRPQMRFIPVKSKEQQAILLVHRLRQACVVEHTRLVNRLRGFLAEFGIVVPKGANTFKDRWPIIRQRHDQNLPALAWETLDALYAKLGELHQQVLAYDRQINAFVREDERAKRLAQVNGIGPITASAIVATIGNGHDFRNGRQFAAWLGLVPRQHSTGGVQRLGRITKRGDTYLRTLLVHGARSELMLTARRCDHKSTWAEALKTTKSWNRAAVALANKHARIAWALLANDQSYRPA

SEQ ID NO: 346432 - protein, 453 aa, unidentified
MCLEDRPVLEPNAAGIDVGAREMFVAVPPGRDENPVRVFATFTEDLERLTDWLEQCGVTTVALESTGVYWIPLFEILEQRGIRPCLVNARHMKNVPGRRTDWHECQWLQFLHSVGLLRAAFRPGQDVCAVRTVLRHRNELVSAASQHVQHMHKALTQMNLQIHHVISDITGVTGLAIVDAILAGQRDGTELAKLRDPHIKADTETIRKSLEGNWRPEHLFTLGQSRDLYRIYQQQIVNCDLEIEKMLREFEPRTDPAEKPLPPDRKRNRAGSKRRKKNGHPHPEFDLRTEAYKLFGVDVTQIPGLEENALALFSEVGRDMSRWPTAGNFISWLALCPDNDISGGKVLWRGGRKVKNRAGHLFRLAAFSLHHSLTPLGNHLRRMKAKLGPKAATMATAHKIAVIFYTMVKNQVEYDETIWEARDAQREKRLEAKLKRQAKQLGYELVPIEPKAA

SEQ ID NO: 346433 - protein, 346 aa, unidentified
MGKSITDFSSVTTVGLDLAKHVFQIHGIDASGRVVVAKAMRRNKLLEFFASLPPCLVGLEASGSAHHWARELIKLGHDARMMPPAYVKPYVRRQKNDASDAAAICEAVSRPSMRFVGVRSLENQAALMRHKTREMLVSQRTQLLKGLRGHLTEVGVIAAQGPRHARELAELIEACDDTIPVEVCEALAPLAVQLRTLDEAIAQLDRAITKLVQKDETARRLMSIPGFGPITASAMAATVQDASSFAGPREFAAFLGLTPKQNSSGGKQKLGRISKMGNGNLRKLLVVGAHAVLFHHMSHTDPLRMWAKKLLEKKPFKLVAVALANKMARIAFAILRGKTTYREIPA

SEQ ID NO: 346434 - protein, 371 aa, unidentified
MNSIVYVGMDVHKESYTLCCYCYDTDRVEYKQTIPSDYKLILKYMESMRKVYGEDVTFVCGYEAGCLGYSLYHQLREHGVDCKILAPTTMAITNTSHVKTDKRDAANIARCLAFHTYSGVYVPDDEDNSVKEYIRMRDDQKLMLKKIKQQILAFVLRQGKKFEGGKTYWTIVHMKWLKSIELKGLDKETLSEYLVTYEYLTEKIERLDNRIEELASGERYKEKVKNMGCFLGVKTHTALSMVVEIGDFNRFEKAPKFSSFLGLVPSEDSSGDKVNRFSITKAGNSHLRRLMVEAAQSYTRGNIGHKSIALKQRQQGCSPEVIAYADKANERLRRRFYKMTLNKGVNRNKATTAIARELACFMWGMATGKIG

SEQ ID NO: 346435 - protein, 343 aa, unidentified
MQIRSVGIDLGKTTFHLIALIAAGKVLLRKKFTQKQLITFTANMQISLIGMEECSGAHFLGRALREQGHDVKLIPAQFVKPYVKSNKNDFLDAEAIAEAVDRQNMRFVPIKTDDQLDLQALHRVRDRLIARRTSVINQLRAFLLERGMTFAKTPAKLKLAMPEILENEGANLTPRMRNLVSLLCNEWKDLEQQIVSMNAEVEQIASSDPACQRLRKIPGIGPLVATAIVAAIGNGAAFQKGREFASWMGLVPRQHSTGGKARLFGISKRGNSYLRKILVHGARSAVLRVKRERAPFGVWLDALELRAPINVVITAAANKLARIAWAVLSSGQEYRPAVSPMPA

SEQ ID NO: 346436 - protein, 395 aa, unidentified
MQIPQIVVGIDIGGRSHRVTIAGPEGQLLEEFDMEHTAAGFGDFFQRLETHERRLKLPVAIAMEGFNGHARPLDTQILMRGYPLYNVNNLKLARFKEIFPGPAKNDPIDSHKIVELFELRAHLPLAKDVLQEVAAAPAENEKLKRLTRRRRQLVEDKVRVVNRLQADLQSVSPGLLAITGNVDNRWFLRFLTSRDELPQLGRLHHSTLLKIPGVGQHYAETIEQWQRQAYFAPAVEWVGPMIVADGQRILELIEQIEQLEGQIAGLAQQSEIAQALFSMPGFGPICSAELAGEIGTLERFASERSLALYLGMAPLDDSSGTYQGSKPPRQVNRRAKAAMMRAVDQHRKQVLSSQRYYHKKRLEGKRHNQAIRALGRHLVRVIWSLIGQRRAYEIR

SEQ ID NO: 346437 - protein, 388 aa, unidentified
MNVEADKSEPLTAIHTDLGAIFVSLELSRSSWLITSLSPGGGEKMSKHSVPGGDFAGLMERFAQLQEKARLRTGQSFRIIVVQEAGLDGFWIHRALQNEGIESHVVDAASIATSRRRRRAKTDKIDGETLVRVLLAYKRGEPRVCAMLKVPTPGEEDRRHLCRERKALTAERVRHVNRIKGFLFSQGISGYQPLRRDRRQRLEELQTGDGRAFPQHLKALINRELDRLELLLKHIKTVEAARDALLAEEQTAKPGPAAMLLDIRGIGPEFAAILWSEGLFRHFENRRQIAAYAGLAPTPWQSGAVDREQGVSKAGNPRLRTTSIQLAWLWLRNQPRSALSLWFHERVNRNGGRLRKTTIVALARKLLVALWKYVTAGVVIEGVTMKVA

SEQ ID NO: 346438 - protein, 349 aa, unidentified
MIIIGVDFHPEFQQIALVDTDTGELEERRLHHPDEAEAFYRDLVSQGKTVRVGMEASGHGRWFERLMGELQIELWVGDAAEIKTKRVRKQKTDRQDAQLILKLMLKDDFPRIWVPSWENRDLRQLLWHRHRMVQARTRIMNQLQAVALNEGLRCKKRLWRTERPRLESFPLAPWASRRRHDLLELLDRLNPTIAELSQAVEREVEKFPEAQRLATHPGVGPLTALAFVLIIGEAERFQCGKQVASYLGLVPLEDSSGNRRRLGHITKQGSSILRFLLVEAAQVTVRSLPEWRSRYFHLMMRRGRKIAKVAMARRLAVCLYWMLRQRWDYQQWVEFGSYAGQPGNRHGVQ

SEQ ID NO: 346439 - protein, 338 aa, unidentified
MDYMGIDHHKQYSHITLMDEKGKKLRSGKVANYRTELEKFLDGRKEIKAVIEAGRSSYTMVDLLDELDIDVTIAHPKEVKAIARAKIKTDKRDSFMLAHLLRTDLIPEIYKRSPENRAYQRVLRQRAFYVGSITRTKNKIRSLLAQQREELRDKVSRKRNLFSLSGVKFLKGLDLPDRDKELLSALIKTFVHLQERRDETNGLVEKLYQEMPEARLIRSVPGYGIFLSVLVAVEIADIGRFSKVPQFLSYAGVIPSVHSSGGKSYHGKIVKEGNRWLRWAAVEAVYPGIKADFDIKCFYHRLKKRKGSNTAKVATARRMLTIIYRMLKENRLYIPYKR

SEQ ID NO: 346440 - protein, 408 aa, unidentified
MMMEFLFLLLFFFVDKYNFVNKYIKKEWGELSCRTDFKDLSLVLVPILSNQVTKDQIEYHFLPNKGFSQSNHNKYKIMKILDTIGIDISKLNFDVRIHSTQFYQQFENSNKGFVTMLKWVYKNSSFSKENILFVFEHTGLYSHQLSVYLTDKEVPFSLIPGLEIKRSLGIARGKNDKVDATKIALYAYRLRDEIELTILPTEQIRSLKTLLSLRDRIVKQRAGYITSLNEQKRVLVKNKNEVILYTQEKIIKHLSKQIKVLEIEIQEIISSDEQLSNQFKLIIGIKGIGTQTALFVIAYTHGFTRFKTWRKFASYCGIAPFPNASGTSIRGRTKVSNLANKKIKSLFDLCAKSAIQHSPEMKVYYTRRLEEGKNKMSTINIIRNKLLSRIFAVVERQTPYVDIMKYAA

SEQ ID NO: 346441 - protein, 332 aa, unidentified
MNMDPQGGVANRDRRPNAGVDVSKQHLDACWVSEQQRLVNDASGWDELIAMLRRADVDLVVVEATGGYERGLVCALQSAGVAVARVNPRQARDFAKSMGVLSKTDRIDARCLRDFADVLARHQNRLKYITAPVEAERLELAALMTRRRQLVDMRVAEGHRMEHATQLAYRSIKRVLRLLDAQIGEIDKQADDHLDRHFKDQRKLLNSVKGVGPVTILTLTSALPELGRLQRRQIAKLVGVAPLADDSGQRKGARRIGGGRSEVRSVLYMAALAAIRHNPVIRLFHSRLIDAGKAPKVAITACMRKLLTILNAMLRDQTVWNALKHAQNPQTT

SEQ ID NO: 346442 - protein, 411 aa, unidentified
MEVVHARCAGMDISKKDAKVCVRVAGAGRRKTVESVTTWSSMTSQILALREHLIDQQVTCVVMEATGDYWKPFYYLLEDAGFEVMLVNARHVKTLPGRKSDVADATWLAQLGAHGLVRGSFVPPEPIRQLRDLTRARTAITRERGREVQRLEKLLEDAGIKLSAVASDILGVSGRLMLEALIAGDRDPAALADLAKRRLRSKIPQLTEALRGRFTEHHAFLARVHLDLIDRHTDALDQLTARIEVMMEPFQGFRDLICTIPGIGVATADVIVAETGADMSRFPTAKHLASWAGTTPGNNESAGKVKSSRTRPGNPYLQGALGAAAMACSQNPSTYLGARYRRIASRRGPMKANVAIQHSMLIAIWHMGTTGTLYEDPGAEFFTRLHPERAKKRAIGQLEAMGYQVTLDHAS

SEQ ID NO: 346443 - protein, 405 aa, unidentified
MPKTRLITVSSVLRIIGLGGVMTATPKGAADVMMTSLRSPKSAEIEVVLGVDTHLDFHVAVALDTLGRRLGELSVPTTTKGYKRLVCWIEDFGAVRCAGVEGTSSYGAGLARYLTSAGVAVEEVERPKRRHLRRNGKSDPIDAEAAARAVLAGETAGAPKSADGRVEMIRALRSARRSAVKARGQAANQLQALVVTAPDALRERLRWLSTRKLVATACRFRPGTQPETPEAATKLALRSVARRHVALSEEIAELDVQLDRLVAEAAPELLALPAVGTDHAATLLIVAGDNLQRLRSEASFASLCGASPVEASSGKVVRHRLNRGGNRDANRALHMICMVRMGMDRRTREYVARRTAEGKSKREILRCLKRYVAREVYRVLVSAAEAPASTAACPGASSGRLSVMS

SEQ ID NO: 346444 - protein, 391 aa, unidentified
MNKAWVGVDVGKEFHWAQVLDASGRQLLSRKVENDEADILELIDEALSSAEKVVWAVDQPGGSAALLLGLLWERNQRVLYVPGLSVDRARDTYRGESKTDARDARVIADQARMRPDLEELEAGEQEIAELQLLLARRRDLITDQGRIITRLREALLSLFPALERALDLNGKGPLILLTHYQTPAQLRRVGHKRVATYLRNRSVKGSDKVAYKALSAARSQSVSLPAQEVASRIVAELAAEVLALKERIESIDEEIGRRFFARPGARILISLPGMGPILGAEFLVCVGDISAFESADRLAAYAGLVPAARDSGKRVGNHRRMRGGNKTLKRVFYQSAFASLRGSPESRTFYDRKRAEGKRHTQALIALARRRVNVVWAMLRDGTTYETRSAA

SEQ ID NO: 346445 - protein, 402 aa, unidentified
MNAVGIDVSKGKSMVSIMRPFGEIVSAPFEIKHTASGINSLVELINSVEGESRIVMEHTGRYYEVLAHQLSEANLFVSAINPKLIKDFDNDSLRKVKSDKADAVKIARYTLDKWQNLKQYNVMDELRNQLKTMNRQFGFYIKHKTAMKNNLIGILDQTYPGVNTYFDSPARSDGSQKWVDFASTYWHVDCVRKMSLNSFIDHYQNWCKRKKYNFSQSKAEEIYGKAKELVPVLSKDAITKLIIKQAVDQLNSASTTVESLRTLMNETASKLPEYPVVMAMKGVGTSLGPQLIAEIGDVSRFTHKSAITAFAGVDPGVNESGSYEQKSVPTSKRGSSDLRKTLFQVMDVLIKTHPQDDPVYQFLDKKRAQGKPYYVYMTAGANKFLRIYYGRVKEYLSSLPES

SEQ ID NO: 346446 - protein, 385 aa, unidentified
MAPIRMPEAVIGLDVGKSSHWACVATRDGEVLLSTPVANREDDLDSLFGRFPDALVVVDQSRNIGALALARARAAGMSAAYLPGLAAHGAARLFAGDAKTDERDAMVIAKTALGIPDALLPVGDPGPTIAAARALAAQRNFLTCENTRNKNRLRSILLESCPAFEALVDLSDGPQLRLMASLGGAWSVADAGPRRAAALTRGAARGKIEALVRSTTSSTRPDAAVVAAEDRAVKLLARRISENSAEIEAITAEISALLEGDDTYRCLLTVPGIGPKTASELAISIDIEDFPSHDRLASYCGLAPRNRQSGTSISSVTASRQGNKRLKNLLIFSCNCLTRTEGRWGDYYTRCRERGMSHGKALKALARKRLKVIYAVMRDRVPYAA

SEQ ID NO: 346447 - protein, 450 aa, unidentified
MAQGSGLTRGDRNRNRKIAGLREVVRPGRAVLAVDLGEDKQVAVVVDHDGRVLGRKVARAKAHQLGGLLGWAAGAAGKAGLDGLVVACEPTGHRWKALMGLADGAGHGFCCVQPLAVSRAREGDDYTRDKTDHRDAYLIGRLVIRLDCYLPERADEKWARLRHLAARRAGLARDVVACLQQAADLLGCAWPAPLSACKRPLESVTWLAGMTVITSRCCGDPRRVRKMGYEKFLAAVRRELPRWGGARAFHAIVRALWEALASEGGVAAQRPGALERLRLLLEDWRDLRGRLADAGERMTAALEDLGLAGLVASIPGVSVLTGALILAECGDPRRFASARALVKHAGLNPSERTSATINGQSRVSRRGRPALRAAAWRAAWGAMPHNAVLAARHARLTGRDKRALADGQARTACAATLLRWIWAVTTTGRPWDAAIASGQATARPATAAAA

SEQ ID NO: 346448 - protein, 391 aa, unidentified
MIYIGIDVAKDKHDCFITNSDSEVLFKAFTIFNNLDGFNDLYQKIESVMDDVTKVKVGLEATGHYSYNLLGYLIDKGLPTYVINPLHTNLYRKSLSLRQTKTDKVDARTIASMLMSDVNLKSYSDTSYHNEELKSLTRYRFDKVKERAKLKTSVSRLVCILFPELEKLVPTLHIASVYALLSEFPSAKHVATAHLTRLTNLLSESSKGRYGKDTAITFRDSARASIGSNMPAKSLELKHTIKLIQELDSEIDEIENEIKIIMDEINSPILSIPGINYRMGAMIIAEIGDFNRFDSPDKILAYAGFSPSTYQSGQLDGAYAHMEKRGSRYLRYALYNATKYVCHWDPTFAAYLAKKRAEGKHYNVAISHAVKKLVRVIYHLEKTKQQYIKAA

SEQ ID NO: 346449 - protein, 383 aa, unidentified
MKAVCGLDVHKDSIYLCILHPDGELFEQVFGVLTFQLHEMCKLLKKHHVSEVSMESTSIYWVPIWRVLSPHFTLRLVNPYFIKQLPGHKSDVKDAQLIAECTKKELVNGSFVPPEIIQQLRQYDRRIFDLNEEIVRKESKVDAVLQRCNIRLSNYVSNVECKSYRTVVRRLSEGVTDPQELIKEIHGRIINKHGRETILASMEGVVSQAEIDVLRQLREEIDIAESHKKECQDKMSEICQKYFPEELRRLQTIPGIKERAATSLIAEIGTDMSKFETANHLAAWSGLRPRNDESNKKVKSRKTTHGNSYLRRTIIQCAWAASRQKDCFFSWFSYHQTVVRRKNKMKVIVAVARKMLVSVWHVLHDNVEYIDFKHDCEESANNG

SEQ ID NO: 346450 - protein, 398 aa, unidentified
MTESSDYESVQVFIGVDVGKDTYHTVAINRSGKRLFDKALPNDENKLRSLISDLKQHGQILLVVDQPATIGALPVAVARSEGVLVGYLPGLAMRRIADLHAGEAKTDARDAAIIAEAARTLPHALRTLKLADEQIAELSMLCGFDDDLAAQTTQASNRIRGLLTQIHPALERVLGPRLDHPAVLDLLQRYPSPEKLASLGEKKLAAQLCKLAPRLGKRLAADIAQALAEQTVVVPGTNAAAVVLPRLALQLITLRKQRDEVALEVEQRVLAHPLYPVLTSMPGVGVRTAARLLTEVACRAFASAAHLAAYAGLAPVTRRSGSSIRGEHPSRRGNKALKRALFLSAFAALRDPLSRAYYTRKMSQGKRHNQALIALARRRCDVLFAMMRDGTFYTPQAS

SEQ ID NO: 346451 - protein, 412 aa, unidentified
MFVVNPTCAGIDVHKKDVKVCLVTRDAAGKRRQEVRTYSTITSQLLLLRDWLQDNGCKIVAMESTGVYWKPIFNLLEGDFEVMLINPTHIKQVPGRKTDVRDCEWIAELLEHGLLKASFIPPVEIRDLRDLTRYRRRLVEARASEVRRLQKILEQANIKLASVATDVLGVSGRAILEALLSGNQEPPEMAELAKGRLRQKKAELALALEGRFRPHHARLLSRILAHIDFLDQSISECGEEIAQLCRPFDQIIERLDGITGVNQRAAQDLIAETGVDMSHFPSHKHICSWSGVSPGNNESGGKRKSGRTRKGNKWLRAILVECAQAAGHSKGTFLGAQFRRFASRKGKKKAAVVVAHSILEAAYFIIRDQLSYRDLGATHYDQINKDHIIRYHLRRLQSLGVKVELSQLPEAA

SEQ ID NO: 346452 - protein, 427 aa, unidentified
MKTEDIRLEEFRNLKKEVRGSVGHLLVGIDIAKEKHNAFFGSATGKTFLKRFVFDNNREGFEKLLVETDALKQKYGLSQTVFGLEPTANYHKPLGEYLIYRDHEVVLVAGSAVRKNRELLDGRWDKHDVKDAANVADLMAQGKFLYYENPGIEVRELRGLLSLKRKLKKQAQGLHLRIRNNLLAQYFPEMDQYYGTCEKDNLAMVSSCLSPAVIGGMEYNEFFKTVVSRKNGLRQHKHLYRIWQLAKGSIGCEAEEGAACEAGVLVALLKQTRQAIEQVEQEILKLCYTFSEYEFVISIPGFGPDVTAKVLAYIGDQYRFETARQVLKMAGFDLCAARSGKPSEKAVPVISKKGKADLRYALYQAAHVASIRSAHFKQYFAQKIRGREREKGIKTKMKVKLAAKMLVIAWTLMKNKEPFNPEHVKID

SEQ ID NO: 346453 - protein, 386 aa, unidentified
MQTLNNLSRSLIALEPASTLIAVIEMSLSSWLVAGIVPGIERQPLKKLAVDESALLRLLHRWREEAEKAGCRIERIVVAFEAGRDGFWLARWLKARSIEAHVIHAASVAVSREHRRAKTDRLDAELLKRAFLGWLRGERNHCKVVAIPTLKDEDAKRPSRERESLVGEQSRIVNRMKAALIRLGIRGFNPKLKRAVGRLDSLRTPEGEPIPPNTLAELRRDMERRRLISNQIRQIEEARLKHFEQAPNDGPHAMVRLLARVIGVGIETADMLVHEVLSRNMHDRRAIARYAGLTGSPDESGRKRREKGLARSGNGRVRRGMVQLAWRFLTYQKESALAQWYRARTENARGARKPMIVALARKLLIALWRFVWQGVVPDGVVLRLAQ

SEQ ID NO: 346454 - protein, 375 aa, unidentified
MKDVQKYVGLDVSKNAIAVSIADPGRSEPRFHGTIQNKPEEIRKLMKKLGNPENLLVCYEAGSTGYGIYRLLLSMDIECMVVAPSLIPKRSGDRVKTDKRDSIRLAQLLRAGELTSVWVPDEEHEALRDLVRARNDTREDLQCSRQRLVHFLLRHEMRPPKGVRNWSVKHREWLKRLTFKRAAQSIVFQEYLHTINEVEDRMKRIEVQIHEEALQSEHAPVIQALQTLRGVAEVTAVTLVAEIGQFSRFSNPRQLMSYAGLVPKEYSSGSSRWQGSITKTGNSQIRRSIVEVCWSYRHRPSLKGELLKRQEGQNKEAKRIAWNAQHRLHMKYHRISAKGKGGKIAVVAVARELLGFIWAIGCAIEDKQISELKVS

SEQ ID NO: 346455 - protein, 444 aa, unidentified
MQYQKVPKLLENIPYLSVGLDVGADFSWMSIMLPNGTLTGKPFKIVHSDPQSRELAVAKIKEAQEAYSLESRCFLESTGIYHIPLLCFLRDKGFDCSVINPIITKNSTNMNVRKLHNDKFDSKKAAKVGLDASLKTSIIPDDAVIDLRNLVRDYYYFKDLQSAVVLKLTAELKVSFPAYRNVFCKATTQTSLKLLDAYPLAQDLLAAPKGTVVEMIRSTARFGEKYALAKYDALYAAAEDAAIFGRALPSNALRIRLYIKLYREYQEHLDGILEELHKAVDRLKGTPVHNRISLLQTLPGIGFLSAVVLLAEMGSFDLFSPPKKLYAYFGMDPGVNDSGKFHGDRVHMSKRGSSLARRILHMAAINNLKVDKAAKMPVNPVIYDYYVRKCAGKKKIVAVGAVMHKICNTIFAMLRDNKPFELITPEEHCQRYAAEHQGSVSTAA

SEQ ID NO: 346456 - protein, 412 aa, unidentified
MDVLYARCCGIDIHKKSITVCVLIREPGRKEQKHIREFGTTTSAILSCADWLGDLGVTHVAMESTGVYWRPVWNLLEGQFELLLANATHVKNVPGRKTDVKDSEWIAQLLQHGLLKPSFVPDTVLRDLRELSRDRTSLVAERSRLKNRIQKILEDADIKLGSVASDILGKSGRAMLTAMVKGTENRGELADLAQGQLRLKIPQLVEALRGRVRGVHRFRLRQQLERIDFVDAPIEQLEEEIEKQNAPFAEAVWLLAEIPGFDRTTAWAVMGEIGINMNQFPSADDLASWAGVCPGNNESAGKRLSGKTRKGSRWLRQKLCQSAWCASRCKKSYFAAFFQRIAAHRGRKRAIVAVSHALLIVCYYLLQRKCHFQDLGVNYFDHFNHEKLTRYFVKRLTRLGHRVTIQPCQALA

SEQ ID NO: 346457 - protein, 460 aa, unidentified
MNRKRSKSKVERTMPMVHPNAAAIDVGATMHMAAVGADRASDPVRSFGTFTNDLHRLVDWFTECGVETIVMESTSVYWIPIFELLDARGFTVFLVNARDAKHVPGRKTDVSDAQWLQRLHSYGLLRASFRPKGQIAELRAYVRQRERLLEYAASHIQHMQKALTEMNLQLHHVVADITGSTGLRIIRAILAGERDPEVLACLRHYSCHSSAETIAKALTGSYRTEHLFALEQALALYDAYHEKASACDVRIEAVLKELSIHRDRGHGSAPPASRRQHRTDQANALAFDVRAALFALLGKDITTIDGLGPYLSLKLIAECGDDLSSWPSAKHFTSWLGLAPSNKVSGGKMLSSRTRRSGGRAAALLRLAAVTVGRTDTALGAFYRRLSSRIGKAKAVTATARKIAVLFYNAVRHGMEYVDPGASSYETRYRTRVVNNLHRRAKAFGFVLQPLEPKAGAAVS

SEQ ID NO: 346458 - protein, 319 aa, unidentified
MNSIPNRYSKKTQRHVGIDVGKSTFDVHIYELDVHWQSANDESGIKKLVSKLNRYKLTRVLVEATGGYERALVEACAEQELPVIVVQPVQVRQFARAQGVLAKTDKIDARIIAEFGVVMQPELRPISSKKVRYVRDLLSRKRQLNEIRTQELNRQHKAPKALVATHRRFLKTIDKEIEWVNERLQKAVASVTEWRRTHDILRSVPGIGDGVAFTLLGELPELGRLTNRQIAALCGLAPFNRDSGQLKGKRRIRGGRAPIRTVLYMAMMCAIQHNPVMNRFFNKLVAQGKHKKVALTACMRKMMTILNTMVKNDSEWCIS

SEQ ID NO: 346459 - protein, 346 aa, unidentified
MHHAAIDLGSKESQICIRQPDGAIIQERKHPTRKLTELIKTWPTSRVVMEASAEAFKIADAALAAGHQVRVVPGKLVRLLGVGDRGVKNDQRDARQLSQASWQTDVPSVHIPSAAARELKSICGARDVLVATQRNLSNNVRGWLRTQLWKPPGGTMVTLPERVRAHARAGGHELPEHIERQLTMLTQVTEQVQAANKQARRLAKEHPVCRRLMTVPGVGPLTSLRFVAAIDDPSRFSTAHRVQSYVGLTPGEHSSGGSGGKGGGKRGITKAGPSELRRCLVQAAWSVMLARRPHPMLEWARQIAQRRNRPVAVIALARKLAGILFAIWRDGTTYEANHAAGRSAPT

SEQ ID NO: 346460 - protein, 412 aa, unidentified
MSLALPEALFFTGIDWAAETHAVCVMDAGGTIVAGFTIEHSADGIALLTGRLARYGTPGSMPVAIERPNGRLVDLLLEAGHPVVPVSPNAIKTWREGEVLSGAKSDAGDAAVIAEYLRLRQHRLRTAVPYSDETLALRTVVRSRGDLVEMRVAATNQLSALLEAHWPGAKAIFADVESPISLEFLTRYPTPAAAAHLGEKRMAAFLVKHGYSGRRTAAELLARLRAAPAGTSRESLTEALRDAVLAAVGVLAALNAAVKNLDRSVAAHLGEHPDGAIFTSLPRSGQVNAAQVLAEWGDCRQAYDGPDSVAALAGCTPVTSQSGKHRSVQFRWACNKRFRVAMTTFADNSRHASPWAAKTYSDARASGKDHPHAIRILARAWIRVIWPCWLNHTPYDPARHGAAAALAEPIAA

SEQ ID NO: 346461 - protein, 415 aa, unidentified
MEKKEITFEQVIERGCGIDVHKKVLVVTIRGTGIKEETRTFNSFTESIEQLRDWLKKMGITHIAMESTGVYWKPIFNILEADFEIILVNARHIKNVPGRKTDKKDSQMIAKLLLSGLLKASFIPSKPIRELRDLTRYRRKIVGQIASEKNRIQKILEDANIKLSSVVSDMSGATATKIINAMIDGETSINELLKFRHGKMQSSIEELASSLKGNLTEHHKFMLTTIKESIIEKELIIEKLDKRIDEQLQASELKLDAELLQTIPGVGKDGSASIIAEIGNDMSQFPNEQHLSSWAGMSPGNNESAGKKKSSRITHGDKYLKILLVQCAWAATRTKNTYLRKKYDSLVGRRGKKRALIAVGHKILIAAYFILKDKIKYKELGAEFLQEKKKDKQVKYYLKQLKELGAEIEIKNHVA

SEQ ID NO: 346462 - protein, 427 aa, unidentified
MSEVECIGHEPQFAAFVGIDWADQKHVWCLQAVDSEKRESGELEHTPEAVEAWVGQLCQRFSNRPIAVALEQSRGALVFMLTKYEPLHLFPVPSTMAARMRKALYPSGSKDDPRDADLLLDLLLQHRDKLHRLSPDTEATRRVQNLVEERRQLVDEKTAQTNRLTGHLKIYFPQILDWVEHLDSELVCALLERWPTLEQLQKVPPAKLRTFFRKQRCRDQELIERRILAIRQAIPAIGDRAVIEAKSTVVKVIVQLIRSLVQGIADLDEKIEEAAAAHPDFFIFDSLPGAGAVMAPRLLAAFGSQRERYGSAGEVQTYTGIAPVMESSGKKQWVHFRWACPKFLRQSFHEWAGHSIAHSVWARSYYQQQRSKGQDHHAAVRALAFKWIRVVFRCWKDGVAYDESKYLASLARRGSHLAAAVATAKTL

SEQ ID NO: 346463 - protein, 342 aa, unidentified
MKKVTRIGVDTSKNVFQLHGVDAEEKPVVRKKLTRPKMIAFFKDLAPTVIAIEACGSAHHWARQLSSFGHEVKLIAPQLAKPYVKRGKNDAADAEALCEAMSRPTMRFVPVKTADQQAALMLVGMRDRLVRNRTQLANSIRGYAAEFGLTAAKGICRVEVLLTDIASDDTLPELARDLFAIHRREYELLQIEIEKVEAKLMEWHRKDECSQRLSQIPGVGPIGASLLMMKTPDPRLFKSGRDFAAWMGLTPKDHSTAGRARPGGITRAGDELLRSVLVNGATAVLKQVRAGRGRNASPWLHKLLEHKKPKLVAVALANRTARVAWKMMVSGESYRATTAQQL

SEQ ID NO: 346464 - protein, 341 aa, unidentified
MKKFIRIGVDLAKNYFQVHALVSDVGPAVTRKLRRSKMHEFFSQIEPSLIGMEACGSAHYWARGFKAMGHEVLLMPPAYTKPYVKRGKNDAVDADACCEAMSRPGMRFVPVKSAEQQATLMLHKTRELLVKQRTMSVNALRGHLSEFGIIAAKGIGRVDELLDLVESYTTLPNAARASAKVLAHALEGLDKAIDDLEDEITNAQAQNEMTRLLYKVPGIGKIIASVIAASVPDPSVFKSGRDFTAWLGLTPRQNSSGGKQALGAITKQGNRYIRKLLVLGATSLLNVVGKRKGALRDWIVGLLAKKPARLVTVALANKLARILWAMMKTGESFRTEMFAKA

SEQ ID NO: 346465 - protein, 343 aa, unidentified
MEYYVGLDVSLKQTSICVVNQVGSVVREGVVDSEPEAIAAFIRSKVPGVVRIGLETGPTATWLWTEPKQLGLPVICIDARHAKAVLKMQINKSDRNDAAGIARIMQTGWFKEVRVKDLDSHSVRALLASRALLVKIKRDLENQIRGLLKNVGLVIGRAKFNVFTVRAEELIADRPELIAVVGTLLKARQAIEQQTDDLDRKVLKLARHDAQVRRFMTVPGVGPITALCFKATIDDPTRFKRSRSVGAYVGLTTRRHASGEIDWTGRISKCRDAMLRSYLFEAAGVLLTRVPKWSALKAWGMRLAKRNGFRKATVAVARKLAVILHRMWMDRTEFNWSKKEVAA

SEQ ID NO: 346466 - protein, 333 aa, unidentified
MHYVGIDVSKRSLDVCLLAEGSKGSRKTKTLSNGQDSAQNLAKWLILQKCELSQTHVIMEATGIYHEYLACGLHQMGILTSVINPCRSREFAKAMGIFTKTDAVDAYVLAFYGCLKQPEAWMPPEEEVRKLRALLQHRDSLLNDKLRIDNRLNTLKSTEAVQEVMDSLSLVNQYLKSEVARIERLISSHIAQHPGLKRDLKLLMSVDGIGKQIGWNMLAVLRVNNFKSAEQLAAYLGVVPVERRSGTSVHGRARLSKIGSSNIRAKLYMGALTAISKNSHIKALYERLLAKGKMKMSALGAAMRKLVHLCYGVLHTQQPYDEKYKAKIINFSS

SEQ ID NO: 346467 - protein, 372 aa, unidentified
MLYAGVDVSKDKVSVAVLTSGGTKLTGGDFDITTEGLRLLELTLKHLKDEISMAIEQTGTYSMPVILYLMERVEGLRIYLVDGLNFNRFIKLEGRKKQDKADAVSLAEYLRRGLPARLITSKDIKAYGLKVLISEREHLLKVKNQVENRLRQLVETIFPDSKTLSKPVFWSEIRKGRVLLDWKRLTDKAEVLSTILRERKIWLEVVHSLEETEKEINAFLRAYYPEDLEILKSFGFSETTIAYFISVYVNVERFKDVKAFKSYMGLGLRIYQSGKKEKNVVNSYTNKYIRKLLYMYVIQAVRERSNHRRVKEYYLRQVEKGGSKKKAIIKTAGKVIEWVYYCLKHREPFKWEANHETQQEDLSQVNSGQAED

SEQ ID NO: 346468 - protein, 342 aa, unidentified
MDYFAGLDVSVKDTSVCVVDDTGKITREVRVASEPDALLAVLRDPTYRFKRIGLEAGPLSQWLFSALATDLPVICVETRHMRAVLKAQINKTDRNDARGIAQMMRVGLYRPVHVKTLRSQKLRMLLTHRKLLQSKAIAVDNDLRATLRNFGLKVGMVGATKFEARIKELVENFPDLFLLVEPLLVVRRVLREQIGVLHRRLLAVVRDDEVCRRLMTVPGVGPVVALTYRATVDVPARFRRSKSVGAVFGLTPSRDQSGETDRPGAISRCGDAMMRTALYEAAQSMLVHSTRWSWLKAWAMKIARHRGMKRAIVALARRLAVIMHRIWVDGTEFRWTREAAAA

SEQ ID NO: 346469 - protein, 411 aa, unidentified
MNRKLTLLYIGVDLHKNHHTAIMMNCLHEKLGELKFDNKPSAFPVFLKEVNKIAKKEGLTPVFGLEDVGGYGRGLAMFLIENKYEVKAVNPALTVSMRRSSPNNKKTDAWDAECVARILISNLDTLPNANPLDLYYAISQLVTRRANIVSVATGLKLQLHQQLGYHYPSYKKFFSQVDGKTALAFWRKYPSPSCLKGVGVEKLAEFLRKKSNYCLSTKKAVEILALVEQDGDTSKDYQEANDFLVKDVVRDIIIREHQLDQIDAELKKHMALLDYKLETMHGISTVTAAELIAEIGDISRFPNADKLANFAGIAPVQHSSGNKQKARKSKLGNRSLYDIFYNLAIRMLGVSRGEKKPNHPLYHAYYEKKLAEGKTKWQAIICVMRKLVNVIYSMMKYKTEYKMPVLPERAA

SEQ ID NO: 346470 - protein, 355 aa, unidentified
MLLRLYVPGEVRFFGEIENTAEATAKLVRKLAGKYERLTFCYEAGPTGYGLYRQITGLGHACNVVAPSLVPKKPGDRVKTNRRDAVSLAKLLRAGELTAVWVPDEGHEAMRDLTRARETAVNDLRAKRQQVSALLLRLGRHYPHKRKTWTKAHLNWLASQKFEYPQQRFVFEEMMLAVRQAQERLTRLEDAIRGAVPEWSLAEVATALMAMRGIDLISAATLLAEIGDLSRFRTPHELMAYLGLVPSEDSTGDTVRRGSITKAGNGRARRMLVECSWSYQHPPRVGAHKQHKVDAAPPAVREIAWKAQCRLHKRYRALIRRGKLKTVAITAVARELAGFIWAINREITTACGAAR

SEQ ID NO: 346471 - protein, 351 aa, unidentified
MSHKTAATVIHTIGIDTGKNTLHLIGLDDQGAIVLREKIARGRIAARLANVPRCLIGIEAGMATHYVARELSALGHDVKQVPPAYSKPFRQGHKNDFRDAHAIAEAVQRPSTRCVPVKTDDQLDLQALHRVRSRLVGQRTAVINQIRGFLLEHGIAVRQGLRFLRQQLPDILAKRSDVLSPRMIRIMEDLSGDWRRLDERIEHITKEIEVLADTDVNCGQLMTVPGIGPIVASAMVAAIGNGAAFARGRDFAAWLGLVPKQMSTGDRTILGRITKRGNRYLRMLFVQGARAILLRPKSWVKHSFGPWLTTAARRLHRNILTIALANKLARIALSVLIQGRSYETRIVPAAA

SEQ ID NO: 346472 - protein, 428 aa, unidentified
MNEEDRSRLEEFRQFRKEVRGSSEYLLVGIDVAKDKHYAFFGTAQGKTLWRRLVFENNIEGFRKLLAQARALKDQNGLKRIVFGMEPTANYHKPLGEHLIRCGHLVVLVSGVAACENRKTLDGRWDTNDTRDAANVADLVSQGKCLFYEFPVGPLQDLRNLLSLKRRFKRVEHGYRVRIRNHLLAKYFPELDRYYQRATPTNLAIVRWCLDPSVIAGLEYKRFAEMVSSSRGRSSQEKRLQAIWKLAVDSVGCEAGPVVEFEAQVMVEGLKEIQKALEEIEEKIKEVCSPFPEYEILLSIPGFGPDVAARVLGAIGDPFRFENGRQVLKLAGFDLSAKRSGKSSESVIPVISKKGKADLRYALYQAALIASVRNQDFMVYYTCKLRGREKEAGIKTKMRVKLSAKLLLIAWTLMKKKEPFNPDYLVIQ

SEQ ID NO: 346473 - protein, 366 aa, unidentified
MKKISTVAKRGNEIFKEHKLTIGLDLGDRSTHYCILNEAGEVILEHRLPTTPKGIHQVFDGIPRSRIALETGVHSPWVSRQLTQLGHEVIVAHARNVRLIGESSRKDDQLDARTLARLARIDPSLLGPVQHRSAKAQIHLTVIRARAGLVSARTALVNAARGLTKSYGERLRKCGTQQMNREMAKGLSQELRDALEPLLGEIESLNQRITEYDRRIEQIAKEVYPEVALLKQVKGVGTLIALTFVLTLEDSHRFRRSRDVGCFLGLRPGRRNSGMSEPQLHISKEGDRYLRTMMVQGAHYILGPFGQDSDLRRWGLKLAERGGRNAKKRAVVAVARKLAVLLHKLWVSGEVYEPLRNNQIVVSAVA

SEQ ID NO: 346474 - protein, 416 aa, unidentified
MDTTYANVAGLDVHHKTIQCAVRQTATGKLLTQSRSFGTMTKPLRALADDLQAMGVTPVALESTGVLWKPVWNILEGRFTLLLVNPRHLQKVPGRKTDVSDAEWIAQLLQCGLLKGSFVPPRAVRDWRDLTRHRAQLTAEKTRVANRIHKLLADTNVKLDTVASDILGVSGRAMLQALLRGETDVEKMADLAEGRLRGKIPQLRLALEGHVTAHHRFVLERLLAQLDFLDHEEQLLDEEIARREAELLPRDDAKRLDAIPGVNVTTIQNVIAEIGPDRSVFPDEHHLSSWTGLCPGNEESAGRRLRSATRHGNRWLRRALTEAAWAASHAKDSYLATQYRRLAARRGKKRALLAVGHSILVIIYHLLKHHLEYKDLGRDYFDRLEPERLRRYLVKRLEALGHKVILLPRQPNDQAA

SEQ ID NO: 346475 - protein, 321 aa, unidentified
MAKIICGVDVSSQFLDVFLNPRCQRFPNTVAGIADLLALCQQHHVDLVAVEASGGYERRMYRQLWAAGLPVALCNARAVRDFAKSMGRLEKTDPIDAALIAEYAAANQKLVAHPPQSSAHDQLRALVTRLRQLTETRATQLQQRLLVTDPVVRETFTRLLAFLTSEIRQLQDRIAQLIDADPLWHHLDHAFRSIKGVADRTVACLMAELPEIGTLSHKAVSKLVGLAPLADESGRRHGRRSIRGGRATVRHLLFIVASVVRRYHPDFAAFSQRLAAAGKAKKVILVALAHKLLIRLNAKARDARRQLLPMASLPLTTTIPS

SEQ ID NO: 346476 - protein, 347 aa, unidentified
MDHYAGIDVSLEASSVCVVDGAGKIVREAKVASEPATLIGWFASLGLDLMRIGLEAGPLSQWLYAAMKEAGLAVELLETRHVRTALQTMPVKTDRNDARGIAQLMRLGWFRPVHCKSLAAQETRALLTARKLVQSKLYDIEMSLRGILRGFGLKVGPTTPKRFARRIEELVAGHATLEVIAKALLSAQAALLREFDMFEKRVRAMARQDKRARLMMSAPGVGAIVALTYVCAIDDPSRFSSSKRVGPHFGLTPRKYQSGETDVSGRITKIGDAGVRTALYEAANVILTRPVKGSGLKSWAMKLARRAGMKKAKVALARKLAVILHRMWTDGTPFDAGKVASTVVAAA

SEQ ID NO: 346477 - protein, 342 aa, unidentified
MDVKTLGIDLGKSVFHVVGLDERGAIALKRRVTRTQLGVLVGNLPRCVVAMEACPGSHHMARRLAEHGHTVRLLPPQYVRPYVKTNKNDFRDAEAIAEAVGRGTMRFVPPKTVAQLDLQALHRVRDRLVGQRTALVNQIRAFLLEQGRPMRPGRLALRGELRRLLAAAAPGISPNLARLLTQLSQEWQQLEERIDCVTGELAAVATTDPACQRLMAIPGVGPISATALVAAVGNGRAFSKGRDFAAWLGLVPRQHSTGGKPRLLGASKRGNTYLRRLVVLGAQSVLRSKVRDRQRFGPWLRRLELRVHRNVAVVALANKLARIAWSVLANATPYRPLMDEAA

SEQ ID NO: 346478 - protein, 404 aa, unidentified
MEGTSAGIDWASEEHALCVVDAVGGKLAGELFSHEEAGIRELLARMRALGVERVAIERPDGLLVDRLLEAGFTVLPVHPNALKATRPRYEAAGGKSDGFDAFCLAELARTDAHRLRALQPHSDETKALRALTRTREDLVKARVRLGNELRAQLDAFWPGAARVFFDVDSSIALAFLERYPSPADARGLGVKRLEGFLARQRYSGRRPAAELLARLRSAPEGRAGALEAEARRGAVLGLVAALRPIVAQIAELSSQIAGAVRAHPDGQVFLPLFKDPKSTITAARLVAEIGDDRGRYPSPETLAADAGMSPVARESGKRKVAAFRWACDKRLREAVACLADSTRHHHPWAREVYARARSRGLDHPHAIRVLGRAWLRVLWRCWRDEVPYDPAKHGNLRRLQTARG

SEQ ID NO: 346479 - protein, 338 aa, unidentified
MGVTTIGLDLAKNVFQVHGIDGDGKVLVRRQLRRGEVLKFFQGLPACLVGMEACGTAHHWAREIAALGHTVKLMPPAYVKPYVKRGKTDAADAEAICEAVTRPTMRFVAVKTVDQQAALMLHKTRDLLVRQRTMLINALRGHLAEFGIIAAKGPSGTKAAIEALHEAQDRLPELARRALHGLVDQLRLLGEEIDRLEARILEWHRASDVSRRLATIPGIGPITASAIAAAVPDGTLFRSGRQFAAWLGLTPKAHSSGGKDRQTGISKQGDGYIRRLLVVGATAVMRLARQDNAARCWAAKLLERKPAKLAAVALANKTARIAWAVLTRGGTYAAPTAA

SEQ ID NO: 346480 - protein, 357 aa, unidentified
MKHRSRFVIGMDLGDKKSEAFVLDKKTGSCDRFEVRTTRKAMSEVFSTYESSRVAIEVGTHSRWVSALLSDLGHEVVVANARQVRWIYAADDKSDKTDAEKLGLLADFSPRLLAPIRHRSDACQKDLCVLQSRDTLVACRTQLVNHVRGTLKSFGHRLPTCSSRSFAKKSANEVPKDLRPAILPVLTQIASLTKQIDVLDKKIEALCATHQETSALRQIQGVGPITALAFVLILEDHRRFRRSRQVGAYVGLCPRKNQTGESDPELRITKAGNAHLRYLLVQASHYILGPHGPDTDLKRWGLALAARGHKNAKKRAVVAVARKLSTVLHSLWRTGEDYEPLRLSNQRLKRKRTRMAG

SEQ ID NO: 346481 - protein, 367 aa, unidentified
MSERIVSALSSMRLNDVVIGLEATSIYGNSLVYALREDGSLGRFQRKIHVLNPKQVKKFKESYPDLPKNDFVDAFVIADHLRFGRIAKEVYMDDYRYQALRTLTRARFDVIQNLTREKQRFANYLFLKCSGMAQDKNIPNTSATTIALMEHFETVDDLANADLDELTAFIAKTGRGRFADPDVVAKAIQTAAKGSYRLPKTVNDTVNQAMSVSIASMRALKEQVKVLDKAIEQQFEIIPNTLTSIPGIGMVYSAGIIAEIGDIHRFNSQASVAKFAGLVWHKNQSGGFEAEHSQMIKSGNRYLRYYLLEAANSVRRCDSEFRRYYDLKFKEVNKFPHKRALVLTARKLVRLVFRLLKDNRLYIPPEG

SEQ ID NO: 346482 - protein, 354 aa, unidentified
MIPNYNAEQYDIYIGNDVDKKSYVLNIRERYRQLMTKTIPAEPEQLYNFIRRQFPDRRVVIGYEAGPTGYGLHDYMTERDTSCVLVPTTSVRKPASDPVKTNRLDARKLSNMLAEGDFHPVRVPEGPYRELRNLVYVRENYGQLQRASKQRIKSLLLANSLHTACRDVDDHWSSLFLKRLKSIECTPAVRFRLDMLLEDVDYARQKLSKAVRELRLFCRDTADIKDHIHNLCTIPGIGPITAATVLARIGDPKYLQNLSELGSFFGLVTREKSTGNKVRRGSITHAGDGIARCLLIEASWRAIKKDKELSQFYGRIASRHHVLYAKQKAIVAVARKMTLRVYRVLVERREYIVR

SEQ ID NO: 346483 - protein, 360 aa, unidentified
MAKARTLVGLDVHATKVVAAVLDVETGELAFFSMTADIARVAGFCAGLPGPVRAAYEAGPTGYGLARELARREVGCVVAAPSKIPRGSGERVKTDRRDAELLARLLLAGKLHPVRVPGPEEEALRDLIRAREAVRVDLMRCRHRLSKLLLRLGIRLEDGDAWTTRHRQWLSTITLAQPAAQTTLLDARGAVDALVHRREQLEREIIALLPGSPWSVQCSRLRCMRGLDTLSAVGLCAEVGDFASFRKPAQLMSYVGLVPSETSSGQQRRLGSITKTGSTHARRLLVEAAWHYRKRPRIGTTLTERQAGQPPEAIAIAWSAQRRLHRTWTRLEQRNKRRTLIAVAAARELAGFCWAICQIE

SEQ ID NO: 346484 - protein, 367 aa, unidentified
MEKSSKVFVGMDVHKESIDITVAEQGGEVRRLGQIGGDRGSLLKMVRKQQSRGGERVFVYEAGPCGFWIYRELAALGERCMVVSPALIPKRAGDHVKTDRRDSERLASLARAGELAAIHVPDIRDEAIRDLVRGRDDAVIAQRRVRQQLKALLLRNDIRYAGRTSWTGAHWRWLSELKLPEPAQQIVFEEYVDAIAVATARIERLTRAIETEVLTWRFAPVVAGLQAMRGIQFVHAVTLVAELGDLTRFGSARQLMGYLGLVPRENSSGEHRHQGSITKAGNSYARRALIEAAWAYRHPARVTRIIAARQTGLPKAACDIAWRAQLRLSAKYRRLNARHLNHNKIVVALARELSGFVWAIGQSVRPQ

SEQ ID NO: 346485 - protein, 407 aa, unidentified
MEVVYRCCCGLDVHKKSIVACLFKGRDKEVREIGTTTAEIRQLTDWLLNAGCQMVGMESTGAYWKPLYNIFEINGLDAMVVNAAHMKALPGRKTDVKDSEWIADLLRHGLLKASFIPNREQRELREIARYRKSLTEERSREWNRLHKILEGANIKITAVIDINTVSSKNLLNAIAADKDLNRDELLNLVQGSVRRKVDQLLPAMDGIITPLQRKLIRHIVDHIDDMTNRIADMDRLIQEYMSEYESAIERISQMPGIGRRSAEIILAEIGKDMNRFPTAAHLCSWAGVCPGNHESAGKRYSGKSTKGNKALKSTLIQCAQAAGHTKNTFFSAQLQRIAIRRGKKRATLAVAHSMLIAIYHVLKFNTEFRDLGSDYYDTYNREQKIKGHLKRLQALGWSPGDSATVSA

SEQ ID NO: 346486 - protein, 355 aa, unidentified
MTSAKYIGMDVHKESISIAVRNAAGKIVMECVIETKASMILQFIDGLRGDLQVTFEEGTSAAWLYDLLKPHVTKLVVCDPRKNASLREGNQSDKIDARRLADLLRLNHLYSVYHGEHGLRSLKELVRSYLTITKDLGRVMSRVKAIYRSWAIPCSGKQVYAPRHRVEWLGKITEPGVRRRAEFYYQQLDALRAVRQQVRRELLAEGKKHPAWKRLCQIPAIGPIRAAVLLGILQTPQRFRTKRQLWAYSGFGIETQSSADHRSVNGQLQRVKKQSSLRGLNRNCNHDLKNLFKGAAVVASSKPGPLQEFYTTLLSKGIRPEMARLTLARKIATIVLMVWKRGACFDAQHLKPQTA

SEQ ID NO: 346487 - protein, 418 aa, unidentified
MTAIHSIAPTLLVAIDISKHRHEVLIGVPGKKRRRRMTIMNSLEDFHRLSAALVGYDMPVRIGFEATGNYHRPLAHHLGQAGFDLKLVSSVGLARTREALHNSWDKNDPKDAQVILHMLEIGAVQFFHDPLVVGTADIQELSKTHEIVSRSKTELWHRILTHYLPLYFPEAERFHRSSRTDWFLAFLEKYPTPAMITAMSQDAFIADAWQVVGKKVSKERLLSDIYATAVYSVGLPVDPDSDAVRMFRLVLAEGRSLVRQRNEIEARAVELLSDLPDYRLLTTIPGIGPINAMTILAEAGDLRRFRHHRQFLKFCGMDLATVQSGMFRGQSRISKYGNARLRRTLWMAGQTAVLKRTNSFRDKFERYISKDRHNAHLRRKAYTAIAAKMARTVHAVVNHGEPYRPFFEGVSPGGRTSL

SEQ ID NO: 346488 - protein, 402 aa, unidentified
MQRTLFEKGCIMIYIGIDVAKSKHDCCILGSNGQSIRESFTFANNRDGFEQFQAEIQHAMSQTGSAQIKAGFEATGHYNENLAAFLRSSGIEPVVFNPLQVNLFRKSQSLRKTKTDKVDAKCIAQLLMSAESNPVSISYQIQELKTLTRHRFRLISQQTKLKQSISRLIDILFPELPSVCCSVTQVSIKALLLELNGAQQIAACRIDRLANILTKASHGRYGREKALEIKALAQCSIGSSSPATALELRLTLQQLDFLQMQIRDLNKAIQAAVASTQSPLLTIPGIGTILAAIILSEIGDIQRFSSPDKLQAFAGLDPSTYQSGKFKADRTPMVKRGSTYLRWALIQAARQVTLHCESFRRYLEAKLAQGKHYFVALGHISKKLIRVIFRLMTANEVFVPQT

SEQ ID NO: 346489 - protein, 467 aa, unidentified
MSEVRLGIDVACRADHRASLADERGEFIWSSWKFRTTTADLERLWAKIPEDASVTVILEPTRNAWVPLSAWLQARGATVILVPPEQSADLRDYYNKHTKTDRLDSRVLARLPLLHPEGLRGIDNLGPAQSLRRAVRHRFSLVKRRSAASLRLDALVELLGPGWADSLGSATASKTALVILEKYADPRALKRLGRSRLAALLIRSSAGLWREDKADELLAMASETLALWSAGGIEFTELAHDIASEVRVLRQLDDEIAAADKRIAVLYDEADPEGIVRSAPGLGPVLSAAILGNAGDFNRFANLAGVRSFTGFVPKIDQSGLVSGRKGITKAGDAGLRQALYLAADHARHIDPTLAQRYHRLVIIEGKHHNSALCALSAVLITRIAASWRKGELYQLRDEDGDAITEAEGKVACADRYKIDPKVRAARRRNTPAKVLKNRAGRGRKESAQKVAPTFDPPDGEASENAA

SEQ ID NO: 346490 - protein, 411 aa, unidentified
MDTLYPRCAGIDVHKNSVVVCVRCAGHAGKATEQVRTFSAMTADLLALSDWLAEQGVTHVAMESTGVYWKPVFNILEGRFTVILVNAEHIKKVPGRKTDVKDCQWIAQLLQHGLLKASFIPPAPIRELRDLTRQRTQLIEERTAAANRIHKVLEDANIKLGSVATDVLGASGRDMLEALIAGQTDPERLADLARKRLRAKIPELQRALHGRVTEHHRFLLRMHLDHIDHLEGLIGRLSARVEGLMAPFARDRERLETIPGISRRVAETVLAEIGTRMEQFPTAGHLASWAGMCSGSNESAGKRRSGRTTKGDRWLKRALVQAAWAASHTKATYLAAHYRRLAKRRGRKKALVAVGHTLLVIIYHVLQRGTTYQELGPDFLDRLEPERLTRQLVKRLEALGHKVTLEACPAA

SEQ ID NO: 346491 - protein, 388 aa, unidentified
MQKPNDNSKSSHTALVQDNTLIAVVELSLSSWLVAGLVPGIDRQPLKKLGDPRPEDLLKLLHGWRDEAIKAGKQITRIAVAYETGRDSFWLARWLRKRGIDAHVIHATSVAVSREHRRAKTDRLDTQMLMRGFLGWLRGERGHCTMAILPTMEQEDAKRPHREREVLIQEQTRVVNRMKSALIQFGVRNFNPVLKKAKEKLESVRTPEGESLPPNTMAMLQRDMERLKFIKEQTKTIEQARLQHIEQKPDDNLNKMILLLVQIYGLGLETALQLVHELLSRTLRDRKAVARYAGLTGSPDESGSKRREKGLSRSGNVRVRKIMIQLAWRMVMFQPESALVQWFKKRTENAKGTRKPMIVALARKLIIALWRYVNDGVIPEGFKLHAMA

SEQ ID NO: 346492 - protein, 338 aa, unidentified
MALYCGIDLHSRDCWLAILDEGLKVVQEAKVGNDLEALLHALEPYREDLEGVAVESTFNWYWLVDGLEEAGYRMHLTNTWAVKQYEGLKYTDDRHDARWLAHLLALGILPEGYIYPKKERAARDLLRRRAFLVRKRTSFLLAMRGAFECRTGMRISSNDLKKWKAKDVEAQMEDPAEAFSITCLLEPMHALSVQIKKIEKGALARGRLRPEFAPLETVWGIGKILALTIMYEVGDVARFRKVGNFTSYCRLVNTTRLSAGKRKGSGNPGNGNPHLSWAFSEAAHHAVRHYPEAQKFYQRKRAKTNGIIAIRALAHKLARASYHVMRDHVDFDPKKTFA

SEQ ID NO: 346493 - protein, 310 aa, unidentified
MRVIGLDIHRVFAEAVALEAGRCTRLGRIEMRRDRLTAFARSLTHDDHVVIEATGNAAAVAEVLRPHVGRVVIANPQQVRLIAHAKIKTDRIDASVLARLYASGFLPEVWIPDESTQALRRQVTRRNQLVRQRTRLKNMVQSILHAHLIPPCPAADLFGPKGRAWLSQQILPPDEREAVERHTREYSRLGEDLSVVERDLARNALADERAKRLMTIPGIHMVVAVGIIAAIGPIERFASPQHLVSFLGLNPSVHQSGNGPVHHGRITKRGRGHARGMLVEAAWVAARVPGSALGAVSTSPLSQPPASSQS

SEQ ID NO: 346494 - protein, 339 aa, unidentified
MKDITVLGIDLAKSIFQLHGADSHGKKVINKRLTRQKLIEFMVNLPACIVGMEACGTAHYWARRFEKMGHKVKLMAPQFVKPYVKSNKNDYNDAEAIAEAVTRPTMRYVPKKNIEQQTIQSVHRVRDLLIRQRTALCNQIRGLLLEFGIPLPQGVINVKKYIPDVLEDADNELTSDMRELISYQIEMLDELNEKVEIFKNKIELIAKTNEKCQRILKIEGIGPITATAIVAAVGNGTDFKNGREMAAWIGLVPRQKSSGHKKVLLGISKRGDRYLRRLLIHGGRSVARTCENKEDKRHIWVKNKKEAKGMNKTAVAVANKNVRIIWALLVNQQEYRKVA

SEQ ID NO: 346495 - protein, 413 aa, unidentified
MKLFVGDDWAEGHHDVELMDAGGRRLAKARLPDGVAGIARLHAMIGEQLGQDAEEDDAGQVAVGIETDRGPWVAALVAAGYTVFAVNPLQASRYRARHGVSGAKSDAADAHVLADMVRTGSHQFRPVAGDTAQAAAVKVVTRTHKTLIWERTRCTQRLRHALRDYFPAALEAFEDLDAPDVLELLARAPDPASAAALTTAQISAALKRAGRRHVAGKAAQIRAVLHAPHLGQPEVVTAAYAVSVRALIAVLSALDEQVKALQGQVEAYFGQHPDAEIILSQPGMGQVLGARVLAESGDDPARYASAKARKNYAGTSPITRASGKKKAVLARYVHNDRLVDALMAQAFSALRTSPGARACYDRQRARGAGHNAALRQLANRLTGILHGCLKARTRYDEATAWPQHAAHAGKTAA

SEQ ID NO: 346496 - protein, 343 aa, unidentified
MQAITTIGFDIAKSVFQVHGVDAAGQVIVRRQLKRRQVVAFFQKLPPCLVGIEACASSHYWSRELQALGHRVRLMPPAYVKPYVKRQKNDMADAEAICEAVTRANMRFVPTKTPEQQSGLVLHRTRHLFIRQQTSVINAIRAHLAEFGVIAPVGRKGVEELLRVVADPNDKRVPEVVRACVAALGSQLLSLKKQILDFDRMIMAWHRSNQTSKRLNCIPGVGPLLATALVASVADPKTFRSGRNFSAWIGLVPKQHSSGGRDRLGSISRQGDRYLRSLFVAGALAVIRYAKIHGTKHRPWLTALLARRPTKLAAIALANKLARMAWAMMATGARYNYPASLRV

SEQ ID NO: 346497 - protein, 380 aa, unidentified
MNTLYVGIDVSSKSNVVYLMLPNGDKHSNFSVANSHEGSTLLVKKIYSALTSHSLDTVLIGLEATSVYGDNLVYFLREDATLAPFNRKIHVLNPKQVKKFHDTYNDLPKNDYVDSFVIADCLRFGRINKEVYMGEYRYKALQNLTRARFFAVQNLVKEKQRFMNVLFKKYSTMTQEKVFSDAFSTTALAVYDEFESAEALANMDLHELTDFIIEKGKNRFPDPDAVAKAIQKAARSSYRLPKTVNDSVNQVLSISITSMKALESQIKEFDKAIKALMELLPNVLISIPGIGPVYSAGIMAEIGDINRFDNQASLAKYAGLAWKQHQSGGFEAEVTRLIPSGNRFLKYYLCEAAYTELLNVVISERSEPLTVYIPTSREFS

SEQ ID NO: 346498 - protein, 339 aa, unidentified
MRLAHGVDLHSNMFIVDSFNSETQKHEVKRFEMTELGKFKSQLHKDDVVGVEATTNTRYFVNQIKDAVADVKIVNPAQFKVISASVKKTDKNDAKLIAEFLSKDMIPEVRLKSDRAAELYSLAQTRDKLVKLRTVLKNKIHALMNAQGLKIKGRLSSKRTLKGLSEMPLSKSAMVELKVIITQIESLDEGIKELEKELVKGGRDLPGYKNITSIKGISDKSGTILLSVIDDIQNFESEKKLASYFGIVPKVDKSNGKNHSGHITKKGSKLGRTTLVQCTISAIKYSPILNQFYHRLEAKKGSGIAIIATAKKMLGVIFLTLKNDWVFDDFPNGILKNQA

SEQ ID NO: 346499 - protein, 439 aa, unidentified
MNTKNIEEKRHFVHNKIIIGIDPAKHNHQAMIINELGIPYCKSFIFNNTFKGFNEELWHKLTKVLKEIDPQKVVFAVEISINLWQKLCHYLHNKGFTVLMVSPLYTKHERPKMDNTYSKSDPKDSLAIANCARQGYFNFYKEYSNSSDAMHRLSITYDKLKKHSAQTKQRIRSQVELIFPELPNAVDIDTDTARELLRRYLSPGEFLNMNLYSETIIIEKVSQKQHGLKTLKRIQDVALNSIGIPLSDDLLFAEKLTMLTWLNQYQLLKEQMKLVLDKLIEIAEQTPFFSILTSLKGISGITASRFIAELRDPLLFTNYKQIETFAGISLKLSQSGKFTGYRRITHIGNHRLRAIIYTMAEETKNHIPEIRIRYLKRQMKQARYKKNVVASASNMLKLIMSMFKDKHTYQYREESVEELKQLEAKYQEFKNKKKMKKSA

SEQ ID NO: 346500 - protein, 360 aa, unidentified
MTKTMTYVGLDVHARSTHAAAIDVASGELCCARFGGGSEEVIGWLAALPQPLKGCYEAGPTGFALYRAAEAAGLRVDVIAPSKTPRAPGDRIKSDRKDAELLARLLLAGQLKIVTVPSPSVEAARHLCRAREQVRSDLMRCRHRVSKLLLLHGRVYPDPSTWTQRHRQWLARQEFDEPATELAYLDTLAAVDGLVGRKAALDERLSRLALEGEWWPTVARLRCFRGIDTLTALALCLEIGDFARFESPRKLSSWLGLVPALDQSGESRRQGAITKTGSSYARRLLVEAAWHYLREPRIGATVANRQQGQPAHVLQIAWRAQHRLHRLHTRLRAHGKPPNVATVAVARELACFLWAAAVAE

SEQ ID NO: 346501 - protein, 426 aa, unidentified
MNTQNSESIPNAEFAAYVGLDWGDQKHALAWTADTAKTAPQTSTLVHSPEALHAWLQELGQRFAGRPVALAVETSRGPLIHLFGAYPWLRVYPIHPATSARYRTAFKPSGAKDDLPDALLLLELVRDLRHKLRPLQLPEAATRQLAALVELRRDLVDRRTQALLQLLALLKSYFPQAVELVGQDLTSGLALAFLRRWPDPLALQAARPGTLQSFYYQHSVRSEALVTQRLARVQQLRPLTTDEAVLMPARLHLAALLEQLRTLAKHIALVEQKSHTLFREHSEAYLFRELPGAGQALQPRLLVAFGEDRSLYPEPGSLQKYGGLAPVVERSGRQAWVHWRWHAPRFLRQTFIEWAGQTVVYSAWAKAYYQHMKAKGKTHHVILRALAFKWIRILWKCWQTRTPYDEARYLKQLLARRSPHAIKPNP

SEQ ID NO: 346502 - protein, 346 aa, unidentified
MMVIGIDAHKRSHTAVTVDEMGRQGFVKTVGTTTQDHLRLLKWAVGLAEERLWAIEDCRHLTRRLERDLIAAGESVVRVSPKLMAHIRDSARSYGKSDPIDALAVARAALREPDLPVARLDGVERELRLLVDHREDLVGERTRIISRLRWHLHELDPGWTAPTKLQRHSAFDKVQAHLSRRDDGSPIVRRLALRLVEHLRLLTEEIDELTAEITVRVTAIAPSLLAIVGCGALSAAKIIGETAHAGRFRSKDAFARHNGTAPLPVWSSNKQRHRLSRTGNRQLNAALHRIALTQARCYQPARELLERRKNGGDGGMEGLRVLKRRLSDVVYRAMLADETDPPSVAA

SEQ ID NO: 346503 - protein, 443 aa, unidentified
MSELAVLDPRAAFVDVGSEKMHVSIAGGPPALFGTVTSQLHALRDYLAEHQVRSVAMEATGVYWLPLYGVLEAAGMEVVMVDGRQTRNLPGRKTDMKDCQWGATLHAHGLLRAGFVPPAHIRRLQDYLRLRGDHIAAAAGHVQHMQKALERMNIKLHEVISSLTGASGLTVIRAILAGERDPQVLLGLCDIRIRNVKAERVVESLRGDWAEEHLFALAQAVQSWDHYQGLIAACDRQIAVVLRQMPDAKVPPPAASTKTGKPRTRPGVNAPDIADLREILAQICGAKDLTTLPAHSEYSVLQLIGEVGTDLTKWRTEKHFTSWLGLAPGSAQSGKRKASVKRRRNRAGQIFCVMARALARSKYVALGGFYRRMAARRGGLVANKALARKLATLFWRVMVKGLDFVETGVAQYEARVLETKHRILHRLARQLGQQIVPNPAAVV

SEQ ID NO: 346504 - protein, 393 aa, unidentified
MYLVGIDIGKLKHSFCLLEKETGEILVEPVFFENNRDGFNALLSSFKHLPQKDILIGMEDTGHYNLALLKFLLDRNYQVALINPVATNLTRKMQGGISKNDKLDTLTICDVLASNQRVKSYRISKYSSFDLYEQKQLTREHHNLKEEENQLSNRLQKCIDVVFPEFNSLFKSKYGIVYMNILKEFGSADAIAHADIRTLRKCFDTGRGKHISLTAQELKEAARNSIGFPSSSEATQIKHLVARIELIKEQIAEIDKKIEEFSIQNNSPILSIPGISHFSGTSILAELGDIHNYSKPSQIIKFAGVAPLTYESSQFTAQHTAITKKGCKYLRKTLYQIITPVIQYNPVFRKFYLLKIAQGKGHRCAQGHCVRKLMRVIYHLLSTGTQFDPALLR

SEQ ID NO: 346505 - protein, 351 aa, unidentified
MPSKTDAVVARTIGIDTGKNTLHLIGLDEKGAIVLREKVSRGRIAARLANTPRCLIGIEAGMATHYVARELIALGHEVKQVPPAYAKPFRQGHKNDFRDAHAVAEAVQRPSTRCVPVKTDDQLDLQALHRIRSRLIGERTAVTNQIRSFLLERGIPVRQGLRFLRQQLPDILAKRIDVLSPRMIRIIEDLIGEWRRLDERIDHVTTEIEVLAQSNEGCRQLMTVPGIGPIIASAMVAAIGNGAAFATGRDFAAWLGLVPKQMSTGDRTILGRITKRGNRYLRTLFMQGARVILLRPANWAKHSFGPWLTAAAKRLHHNVLATALANKLARIALTVLVQGRGYETRVTSEAT

SEQ ID NO: 346506 - protein, 438 aa, unidentified
MRSRAYASVRVNDVDAETLARGHDSQDVVVGMDIGKYDIKVVCRWPNARFERPWSVNNPSQIASLVRVLQTLGHGRQLRVALEPSGTYGDALRQALQDGGLSVERVSPKAAHDYAEIFDGVPSQHDGKDAAVVAELAALGKSTPWPYAPPDAWRQEMAYWVDELEYHRRVLVLGLGRIEALLARHWPEATRTLSLSSGTLLRVLATYGGPAALAADVHALEVLQRWGGQYLTAAKAQELLAGARNTVGVRQGEWDRQLRVNAERARAARQAFARSKRRLQRLARDHAILQAQGAVVGVPTACVLWTRLGDPRDYACAGAYRKAMGLNLTERSSGTWQGKLRISKRGHPQTRQWLYLATLRLIQRAGVQPWYQAKKARDGDGAKRALVAVMRKLALALYHVGARGATFDARRLFARIARRREKKAEARTASRGTGSGRG

SEQ ID NO: 346507 - protein, 311 aa, unidentified
MSNQYVAVDVSKAALDIALPGANGVWRRTNSVAGIAALRRRLATLEHPHIVCEATGRYGRLLARQMGAAGIAMSIVNPRQVRDFARASGQLAKTDALDAGIILRFADAMQPARTPPTPENQARLAEQVRRRRQLVGMLVTEKQRLSGLDDAETLASIREHIAFLQGQIGQCDARITAEIAADATLARKAMLLESIPGIGATTAAVLIAELPELGIADKKQIAALAGIAPMNRDSGQWRGQAHITGGRLSVRCALYMATLPAIRFNPTIRDFYQHLRAGGKAPKVAITAAMRKLLIIANAIVQQDKPWANLA

SEQ ID NO: 346508 - protein, 344 aa, unidentified
MEITTVGLDLAKNVVQVHAISSTGEVLVRRSLRRAQVVPFFSKLAPCLIGMEACGTSHHWARELVGLGHEVRLMPPAYVKPYVKRGKTDAGDAEAICEAVTRPTMRFVPIKSVEQQAALALHRTRDLLVRQRSQVVNMVRGLLAELGIHIPKGITHALAFVRRAVAGDVGDVPVVAARVISALAEQASELQGRIRQLERDLLAWYRSNDLAQRIATVPGVGLLGATAMAASVTDPTHFRSGRQFAAWLGLTPLNNSSGGKERLGRISKMGDQYLRRLLVTGMTSLVRRNKHHPKAADPRINALLARKPPRLVTVAMANRAARVIWAIMVRGDVYRTPVLNSATA

SEQ ID NO: 346509 - protein, 363 aa, unidentified
MTVYCGVDFHTRQQLIKWCDTQDGEIKEERLFHDSLDDVRKFYSQFTGDVRIGIEACGYSEWFEQMMQGLGHEVWVGDATKIRRRARSRQKTDRRDAELLIDLLLKDEFPRINRLSFESLEVLRRLRYRHRLVQMRTRMRNSLQAIALGSGIVLKSKLRTKRGCAKLNDLPLSPVLSQQRSGWLEMIAEVERRIAQVEAELENTAAGDERVRRLRTHPGIGLLTGLALVHTISPVERFANSRKVTAYVGLEPREYSSGERKRMGRISKAGSRVLRFLLVEAGIKATRADAEMKKLYYRVMQRREQARAKVAVARHLLIHAFIMLRDEIDYAEFKLRGAEMRSNARTVHRPNMPDHLIERPASA

SEQ ID NO: 346510 - protein, 389 aa, unidentified
MSQPFDASKSLATLEQDNTVIAVIEMSQSKWLVAAVVPGVKRQPLKKLQADEEALLKLLNRWRTEAGQTGREIKRVVVAYEAGRDGFWLARWLWTRGVEAYVIHPASIAVSREHRRAKTDRLDTELLMRAFLGWLRGEKRHCSMAAVPAAEEEDARRPNRERENLVTERTRIANQMKAILARFGIRSFKPTLRKAAQKLDGLRTAEGTPLLENTRAELSRHLARLRVVREQIRAIEQKRLHKLAAAPAEENGPHVMVRLIARVFGVGVETADMLVNEVFARHLRDRKAIARYAGLTGSPDESGKRRRERGLARAGNARVRRGMIQLAWCFIKFQKNSALAKWFDARTADGRGSTRKTMSVALARKLLIALWRLVTTGEVPEGVILRPAA

SEQ ID NO: 346511 - protein, 343 aa, unidentified
MQTVMTIGLDIAKSVFQVHGIDAAGRVVIRRQLKRRFVLSFFEKLPPCLVGIEACASSHHWSRELQALGHRVRLMPPAYVKPYVKRQKNDTTDAEAICEAVTRPNMRFVPTKTVEQQSCLMLHRARHLFIRQQTAVINSIRAYLVEFGIVAPVGRRGVEHLLEVVADADDHQLPELARMCLVALGSQLRALKAQILEFDRRIMAWHRSNATSKRLDAIPGVGPALATALVASIADPKAFRSGRDFSAWVGLVPKQNSSGGKYKLGSISKQGDRYLRSLFTAGALAVIRYAKIHGTRHRPWLTALLARRPTKIAAIALANKLARMAWAMMARNERYKEPAALTA

SEQ ID NO: 346512 - protein, 373 aa, unidentified
MPKHSTAFGMDVHLRSTTVCALDADTGEAVTRRFPGNPWGEIAGWMDGFPGPSLAAYESGYLGFAPQRELAGLGVECVVAAVSKIPRSAADSASKNDRNDAARMAKAILAHDISPVWVPSPEVEGIRDLAGAYDGATARLATAKQRLLAFLARRGFVYGGTTPAGNPRKYWTYDFLRWLDKVRPEDDGGVRALAALRNEVEAAAEARADLLSEYGAAVDASPIAAEVAALQSIKGCAFALAAAFSAEVGDFTRFRSGRQVTAYFGLAPSQRSSGDSVRLGGISGAGNALVRKLAVEGSWCYAAARHQPKLMPRDTGVPLEIRMHGRKGSERLLRRREEMLARGVPAAKANAATAAELVRWLWALGMMCREGAE

SEQ ID NO: 346513 - protein, 343 aa, unidentified
MTLYIGVDFHPHQQTLAWCDTRTGETRTLDLGHDPEKVRHFYSSLPEPATIGIEASARATWFENMLFETGHKLFVGNPVLIRKRATSRHKNDRRDAELILELLMRDEFPTIWRRPPTSNQIIDILGLRQKLVRQRTQVYNRLQGIAHDVGLPKGKMSTLCFQALIKAADTDEATSIRRSHLFSLLEKLNEQIDELSRWLKQKAEAETAVKLLLSQQGVGYLTALVTVHTLGDMSRFTRVSKQVASFAGLDPVERSSAGKTRFGGISKAGSSLLRYQLGLAAHIAARSDPKLKSFRKRLAKKKAKGVVRTAAARKLLVKLAIMLRDGITADEFDRRGRTVGNAR

SEQ ID NO: 346514 - protein, 416 aa, unidentified
MFKIIRFNCCGLDVHKTWIFACIGITDANFRTEYFEARFSSFPKDLRQLAAWLQKYGCTEVCMESSGKYWIPVFNALETTCKVTLAHPKYTKPQKGNKTDRKDARWICDLFMCNMIKPSFIPPPDIRHLRDLIRYRTKLTNMLTSEKNRAQNCLTVSSLKLDDVFSDVFGKSARSITEYILAHPGEKFNVAPFVDKRCKTPIDQIQDAVDGAICPEQAVKLRECLNHIDELNAHQDRIEQEIFTLVEPYSVHLNLIRTVPGMNKDPMTAILILSEIGSDMSVFPTAKNLVSWAGCCPRNDKSAKHVKSTRISQAGSYLKPRLVQVANALLNSKDHPEIRERYRRIKSHRGHKKAIIAVCKMLLTAIWNILSTGEAYNASGYLIQTPRPTDETKVLTQKQALELLRLRGYVIKEESA

SEQ ID NO: 346515 - protein, 345 aa, unidentified
MKYYAGMDVSLEETAICIVDETGAIMKEIRAASAPEALADALSAAGLPLERVGLEACSLTAWLHDGLRAAGWPALCIETRQANAAMKTMPNKTDRNDARALAQIMRTGWFRQVHVKSRQSRLWRSLLVARRTVLNEMRSMENVVRAVLREAGLKLGRPARARFEERVHELSGDDGVVMVIVSPLLAVLRTMRAQLDALTRQVLAVVRDEATCRRLMTVPGVGPITALAFRATVDEPSRFTKSRAVGAHLGLTPARYQSGETDIQGRISRCGDELARTALYEAANTLLVRSTKWSSLRAWGMAVARRRGMARARVAVARKLGVILHRMWRDGADFRFGKAPTAAAA

SEQ ID NO: 346516 - protein, 422 aa, unidentified
MLEQAHDHEEIVQRVAALDIGKATLTCCIRVPDESTPGKRLQEVDTYSTMTRSLLALADRLRCLSVTRVVLEATSDYWKPVFYLLEAAGLEVWLVNSHHVKHLPGRPKTDKLDAVWLAKVAERQMIRPSFVPPPHIRALRDLTRYRVDLVNACTAEKNRVEKLLEDAQIKLSVVASSIFGVSGRAMLAALITGERNPTRLAQLARGRMRAKLSSLEEAFTGHFTDHHAFLLRLMLARIDAWNADIAIVDEKISQHITPYRDTVERLDEIPGIGPTAAHVIIAEIGLDMSRFPTAKHLTSWARFAPGVKESAGKKKGKGATGHGNAYLARVLGEAAVSVGRTETFLGERYRRIARRRGNKKAAVAVGRSILTIIWHLLSDPTARFIDLGTGFHDSRLDPEREKRRHIRRLQALGYSVTVEPAN

SEQ ID NO: 346517 - protein, 452 aa, unidentified
MSNKTKVDWKALDIVHPHAAGIDIGGSEHWVAIAPERDEQPVRSFQCFTADLEQMADWLVDRGVRSVAMQSTGVYWIPVFEILPQHGLEVFRVNARHTKNLPGRKSDIAECQWLLKLHTFGLLNNRFPPSDEIRTARTLWRHRGGLVAQASSAIQRMQKAWTEMNIQLANVLSDLSGVSGRRILQAILKGERDPKVLATLADPNVKASRTVIAKSLPGNWRDELLFVLQPEVAMYRMYQERMAACDQKLQGQLQAIESKVDVAAQPLGPRPKGKRARGNAPQFDLRTELYRITGVDWTLVDGIDVPVAQSVIAEVGVDLSAFPSEKHFANWLGLCPTNQTSGGKVLNRRTPKVVNRAKIALRQAASTLIRSQSYLGAQYRRLRTRLGAPKAITAMARKLACLFYRLLTHGKPYTDKGAEFYEAKYRDQQIRFVLHRARQLGLEVIQPTKKLA

SEQ ID NO: 346518 - protein, 313 aa, unidentified
MSDLTIPARFIGCDVGKAEIVVFDSLGGQTTSLPNQPPALAAFAATLDDASLVVCEATGGHELPLLDALATAGRAVHRADARKVKAFIRSFGTLGKSDAIDARALARYGSERHDRLARWTPRERSRERLHLLVATRRDLVGQRVACSNRLQAPGSAPVADRLTRLLALLEQEIAGIEADIQLLIQAHEPLARADAILRAIPGIGPVTAMQIVALMPELGTISRRQAAALAGLAPHPRQSGNREGYRRTRGGRPEIKQALFMAGLAAARHNPTLRAFYQRLRDNGKKPLVALTAVMRKMIVIANARMRDAICSN

SEQ ID NO: 346519 - protein, 452 aa, unidentified
MARKRINKTKKVTLPVMNPDAAGIDIGATEIYVAIPPDRDAEPVRMFATFTRDLNALADWLQQREIRTVAMESTGVYWIPLMQILEARGLEVYLVNAKHVRHVPGRKTDVSDCQWLQYLHSVGLLRPSFRPAQDICAVRSLWRHREALVELATCHVQHMQKALNQMNLQIHHVISDITGLTGLAIIGAILNGERDTQKLALLRDPRIRASHETIAKSLEGDYQQEHLFTLRQSVEMYQQYRKRILECEAEIQCLMEKLEGQADPLSLPPAKDSVKKCKVMKPAKALTLRSEGYRILGVDLTTIPGISVLHVQTILAELGPDHSKFRNAAAFSSWMGLCPDNDISGGRVLWSGTRKVKNRIALALRMAAQSLQQSQSSLGEFYRRMRTRLGAPKAITAAAHKLARIVFRLLITKEPYDDSVFARSEESCRQRAKKRLAAQARELGFNLVPVFC

SEQ ID NO: 346520 - protein, 359 aa, unidentified
MLSQSNKIDFSGQHFYVGLDVHLKSWKVSIMAEKLTLKTFSQDPNPELLHHYLVKNFPNGIYHSAYEAGFCGYWIHNRLIALGISNIVVNPADIPTTDKEKVNKTDKRDSKKIARSLRNGDLKGIYVSSLKSLEDRCLLRIRRTLVKDLTRYKNRIKSFLYFHGIEMPEAFSKSATHWSKRFINWLSSIELTEISAKKSLTLLIVESQHLRLTLLNALRGIQELSRSEAYANNVRLLQTIPGIGTLTAMIILTEMDTINRFASFDQLCSFIGLIPSTNSSGEKENIGEITHRGNNFLRSAIVESAWIAARWDLSLNKCFHDYCKRMESNKAIIRIARKLLNRIRFVLKNNQPYVCSVIK

SEQ ID NO: 346521 - protein, 414 aa, unidentified
MELLHERCAALDIGKKDLKACVRTPSVRRKRSRSQEIRTFATTTDALLELRDWLVAERVSLVVLEATGDYWRGAFYLLEDDLNVILVNAAHAKGLPGRKTDVCDASWLCQMGECGLFRASFVPPEPIRQLRDLTRYRTTLATERTREAQRLEKELEDAGIKLSSVATDILGVSGRAMLAALIHGERDAQVLAGMAKARMRPKIPQLVQALTGNFGEHHAFLCRLHLERIDQLTAAIGELSARIEEQMRPFSRHLERLATIPGVGQTVAEVIVAGTGADMSRFRTAGNLASWAGVCPGHHESAGKRKSGKTRHGNRWLSGALGTAAMAAARTKDDTYFGARYRRLAPRLGKSKAIVAIEHSILTAVWHMLTDDVDYHDLGGDYFARLDPERAMRRIVRQANALGFTVRFDPIQAA

SEQ ID NO: 346522 - protein, 386 aa, unidentified
MQKLKDLSRCLTPLEPDGTLIAVIEMSRSSWLVAGIVPGVERQPLKKLAVDESVLLKLLHRWREEAEKAGYMIKRIAVAFEAGRDGFWLARWLRARDIEVHVIHTSSVAVSREHRRAKTDRLDTELLKRAFLGWLRGERDHCKMVAIPTIMDEDGKRPNRERENLVGEQSRIINRIKATLVRLGIRGFNPKLKKAAERLQGLRTPEGEPIPPNTLSELRRNMERRRLVRDQIRQIESARRDRLEHAPGEGAHAMVRLLARVMGIGIETADMLVQEVLSRNLRDRRAIARYAGLTGSPDESGRKRREKGLARCGNPRVRRGMIQLAWRFLLFQKDSALAQWFQARTENARGTRKTMIVALARKLLIALWRLVRDGVVPDGVILRPAQ

SEQ ID NO: 346523 - protein, 354 aa, unidentified
MNYVGVDIHKRYSVLVAVDERGRELARGRISGNSVHAFAQFFEALQGPGKVVLEACWNWGRIYDVLSEIEQVEEVVLAHPLKTRLIAEAQIKTDSLDALALATLLRGNLIARAHVPSKATRARKELLRQRLYWARLRTRVRNRVHAVLDRQRELEMPQCSDLFGRKGLNALSKLRLAEPDATLLGEELDLLKLIDSQIKAQEGRIVAFNANEQATQYLQSLPGMGKILAAVAAAEIDAIERFDGAAKLCAYAGLVPTTYGSGGKVHQGHLLKSRNQWLQWAFIEAAWVAVGCSSYFGGIYCYHRARGKKANIAITIVARRMCRIAFTLLKERRNFQEQHRTFPGRSAVRLTAAA

SEQ ID NO: 346524 - protein, 371 aa, unidentified
MVKQENAKTGVRWVGIDMGKSSYVLRLIDENGKITGWDGKTNKEGRKELYRRLRSTDKIAIESCSLAFTMNKEFKELTGTDFYILNPNKLFQIYMTDKKTDKEDALKLAKEIRDKPEEDLPRVNAPTEKMKEMRNVMSEYREIVKFRTMKINRLHSVYEHAGITDLKRSDLKTKTNREKNLKLLNGYEKEEAQRLMQLIDLLESQKMELENKIKEEENTNEQMQIVEQIPGIGKTTAFCFVGVIGDPNRFTNMTRVSSYLGFIPKIDCSSKTNHYGHITKKGNAYLRGLLVQAAWVIVRSNNGGSLKEKYNDLIIHGMSKKKAVVAIARKLAELMYTLLKNHSSYEPRAYAPRISSIENLANQALGLAAAS

SEQ ID NO: 346525 - protein, 346 aa, unidentified
MLYAGLDLSRRRLDFHLLDGDGGTVEVGSAPPDADGLRGLTQRLNRHGEPIQGAIESMNGARFVHDRLEQAGWQVEIADAQKVKGLAPLACKTDRIDAWVLAELCRRDLVPAIWLPDPAVRAERERARWRLHLVRHRSSLKQRVHAVLLAHGKPCPVSDLFGLSGRRLLARLALPEPWDGNVQASLRLIDELDREIADCETELRGLGADHRYVPLLLTVPGIGWVLAYTIAAELGDISRFPTPRKLSGYTGLCPRVYQSGESDRRGPLAKQGPKYLRWALVEAAVHASTHPAYRERYQRTKTRLGKQRGATIAQVDLARRLAEAIWHMLNRNQPFAPAGATDPLAA

SEQ ID NO: 346526 - protein, 409 aa, unidentified
MGIDWAEAKHDVCLQAAGSTKRACFQLEPTPEAIDAWATTLRTRFTGHPVAVCLELNKGPLVCALRKYDFPILFPRNPLTLARYRAACTPSRAKDDPTDAELQLALLLTPRAKLQPLQPHSPTMRALEQLVAQRRRVVGDKVRLTKRLTSTLKNDFPHVLQWFPDKDPPIFCDFRSRGPTLKAAQLARRSTLATFFRDHHGRSADVGAQRLHAIKAAPPWTTDAGVIAPNALLVQALVNQLRGTLEAIETFDNALAQRAQSHPDFPLCQALPGAGPVFASRLLVAFGEPRARSATAAAWQKYAGIAPVTARSGKQAWVPWRLQGPKCLRQPCVEWAAESIRHAFWARVYYQQQRDKGKAHQAAVRALAFTWIRILYRCWPDHTLYDESVYLNALNNRGSSLIHNLAQGA

SEQ ID NO: 346527 - protein, 347 aa, unidentified
MRFYTQNHRYYCGIDLHARSMYLCILDHDGQVVLHRNVRAEPEPFLKAVAPYREDIVVAVECIFTWYWLADLCADEDITFVLGHALYMKAIHGGKAKNDKIDARKIAGLLRSGMIPKAYVYPAKMRPTRDLLRRRTFMVRKRAELLSHIQNTNSQYNLPPFRRNLASKCHRAGVAEHFPDLTVRKSIQANLVLIEVYGKLIRELELYIVRTAKEHDPQAFHLLQTVPGIGTTLALVILYEIHDIRRFPTVQDFASYSRLVKCAKMSAGKKHGYSGNKIGNANLKWAFSEASALFLGGNPRGQKLKARLQSKHGKGKAMSILAHKLGRAVYYMLKRNQAFDVNKFFAG

SEQ ID NO: 346528 - protein, 345 aa, unidentified
MEYYAGIDVSLESASLCVVDATGRIVREAKVASGPDTLIEWFRGLGIAVTRIGLEAGPLSQWLYAGMRDAGLAVELLETRHVRNAFKAMPVKTDRKDARGIAQLMRLGWFRPVHCKSLPAQEVRALLTARKLLQTKNHDVEMSLRGVLRGFGLKVGPTTPRTFPGRIRELVAGHTTLSTLVEALLAARNTLFEQWQKLEKRLRSLAREDGRVRRLMTAPGVGTIVALTYAAAIDDPGRFGSSKAVGAHFGLTPKKYQSGETDVTGRISKIGDGSVRTALYEAANVILTRPVKGSTLKSWGMRLAARAGMRKAKVALARKLAVVLHRMMADGTSFLADKAAAAAVR

SEQ ID NO: 346529 - protein, 316 aa, unidentified
MQSPLFIGVDVAKDNVVLACSQASFAVRTVANQPAALKAFLQTLPAQSCIAMEATGGYHLRLADLAHQLGLRVYVLNPKDLYHYAKGVGMRAKTDQVDAALIARFLAHEVARLWPYQPATKQQRTMDQLLGRRAKIVSLRTALQLACSQASSIKAETAKLLKGFAALIRKIDQQIAQCNAATPEHAQQVRRLQSIPGVGVLTASWLANLMGRVKFKNSDALVAFAGMDPRPCDSGQKRGKRRLSKRGPAEGRRLLFNAAMAAVRSPVWKDLYASYRDRGWATTAAILIIARKILRIALAMHNTQTTFDPESIGKKA

SEQ ID NO: 346530 - protein, 409 aa, unidentified
MMKQNIIFGIDVSSKSSTVCVVIDRVKQGKTFKITNDSFGYQDLLDHLNQYLITPLVVFEATGVYSLSLQAFLEDYHIKYLKLNPLKAKKLMDNNLRHNKTDKVDAYRLALIQFNAPQKLRQPQSREYHELQNASRYYEELTRALVINKNQLHRNLQSTFPQLESLLSVPSGRIYWTVVSLFPHAQYVLNHNENQVFQSLLAISGIGRQRAQYLTTRLYALARQAYPYDTENSIIVRAIQRNIANLLSLSAERDNVINYMEKLAMQVNARSLTIYESIPGIAKITAVRLVAELGDLRRFDTSAQIDAFVGIDPGRYQSGEKDSHLGITKHGNHLARKILYRTITQMETVKATQPCHITDYYDKKKRSSNSRGYKKIAIASVHKLIRTMFALIKHDQLYDYNVATHNQRL

SEQ ID NO: 346531 - protein, 407 aa, unidentified
MEQIGFDIWCGLDVGKQAHYACALDTAGKKVFDKPLPQDQAKLEDLFTKIQTHGRVLVVVDQPNTIGALPIAVARSMGITVAYLPGLAMRRAADLYPGNAKTDARDAFIIADTARTMPHTLRRVDAGEETLAELKVLVGFDEDLAAEATRLSNRIRGLLTQIHPALERVVGPRLTTKQGLAVIEQLGGPQGMAAASKSKLLRIITKAYPRNAPPFADAITTALGEQTVVVAGTASAEQVLPKLAASLRQVLDQRAELAVQVEKVVDAHPLAEVLTSMPGVGVRTAARILLDVGDASQFPTAGHLAAYAGLAPVTRRSGTSIRGEFPARSGNKHLKRALFLSSFAALRSDPISRAYYDRKRAQGKKHNAALICLSRRRCDVLFAMIKNREPYRAPAPAPDPSPMPLAA

SEQ ID NO: 346532 - protein, 375 aa, unidentified
MNKISRIGMDTSKSVFQLHGVDAAEQPVLRKKLRRRDVLAFFAKLEPTRIGMEACGGAHYWGRALRALGHEVVLLPPQYVKPYVQRNKNDAADADAICEAMSRPRMRFVLVKSAAQEAVQMLMGMRVRLVGCRTQLTNAIRGHAAEFGVVAAKGLDKIEPLLARIAADPTVPDLAKDLFALQDQEYARLKAEIRQIEAKLMAWHRNNELSRRLAEIPAIGPIGACLLAIKVTDPQAFRSGRDLAAWIGLTPKDHSTAGKRRLGVITRAGDETMRWVLVAGATAVIQQVCKGRGNPSPWLLDLVRRKPPKLAAVALANKAARIAWKLMISGERYDPAAAIQTRERRRAPHNGGCAQRRSRVPCPTTGGTVHATLEA

SEQ ID NO: 346533 - protein, 352 aa, unidentified
MEIIGLDLHKRETQLCRRQSDGRIVDERIPTSRARFTQTFGALAPATILLEASTESEWVAAHLEQLGHTVIVADPNFAPMYATRSRRIKTDKRDARALMQACALGAYRPAYRLSPARVHARAALAVRDTLVRTRARVITLLKTLVRREGLRVPTGTSRTVAARVAALDLGATAPALGAELAPLLALLPALNTQIAALDATLAAIALDDPVVARLATAPGVGVVTAVAVAATLDDITRFPSAHAVEAYLGLVPSEYSSADRRHLGHITKAGNARARWLLVEAGWRILRSKQPETAALRAWGAAIAARRGNRIAAVAVARRLAGVLYAMWRDGVPYDAAKLARGQRGAPRSPMA

SEQ ID NO: 346534 - protein, 341 aa, unidentified
MGEVSTIGVDLAKSVFQVHGADASGAVLFRRKLRRHQVLTFFAAQPPCTVAMEACGSAHYWAREIGRLGHGVRLIPPAYVKPFVKRQKNDAADAEAICEAAQRPTMRFVVPKSEQAQAAAVVFRARDLLVKQRTQIINALRGHLTEFGIVVAKGPAHVPQLVRAVEDGAEPIPELARPILQGLIEMLQALDDRIAGVDREIAQRAKEDETARRLMTIPGVGPVTATALAALAPPAETFKRGRDFAAWVGLTPLQHSTGGKQKLGATSKMGERTLRRLLILGASGVLRWVARNGAPAGSWLARMVARKPPMLVRVALANKMARIIWALMARGGVYQAPVAAA

SEQ ID NO: 346535 - protein, 361 aa, unidentified
MNATTAAIDLAKNVFQVALADETSRVLEQHRLTRSQFERFFDNRSPARVIMEACGSAHHWARVFAARGIEVMLLPAHYVRAYVRRSKTDAADALALLEAARCADIVAVRVKSVEQQSLQALHRTRSLWMGTRTSRINALRGFCRELGLHVPVGARTGLEAMARAVADDQSPIPPLLRPIMQQLIEEIRLLEVRVAQLERQLALVVRESAPCKLLMSIPGVGLLTATGIVAATSGSVTHFKSARHFASWFGLTPKESSSGGTRRLGRISKMGDCYLRMLLTHGARSVLRAAKVAKMRGQELLGVRQWAIELQARSNHNKTACALANKMARICYAVLRDQTPFGQPAARLGKKMQRQSFELAH

SEQ ID NO: 346536 - protein, 346 aa, unidentified
MHSENIAAYIGLDVHKETLAVAIAAPERLGEVRYYGTINNEAQAVRRLFQKLQGLYGNILSCYEAGPCGFGLYHQLTAMNIKCQVIAPSRIPKSPTDRIKNDHRDAISLARLLRAGELTPVWIPDLTHEAMRDLIRARAAAKRDSRVARQRILSMLLRTDKRYAGKHWTGKHRTWLANQSFSQPSQQIAFQHYCQSLEQIEDRILQLDQEISRLLPEWSLCNLVCQLQALKGVGQLTAITLVAELGDFSRFSSPKQLMAFLGLVPGEYSSGNSIRPRGITKVGNSELRRLLYEAAWSYRTPAKVGAWLIYYRPDSVTQYSKDIAWKAQQRLCSRYRSLTAKGKNHK

SEQ ID NO: 346537 - protein, 349 aa, unidentified
MNDSITIGMDLGDKNHIAVVFDGNGDELSVTKVNNTKKAIGQYFKRYHGATVAIEAGTHSPWISRMLTQMGCQVYVGNPRKLRFIWDTVDKSDERDARMLGMVCRLEPRLLSPIRHRSGRAHADLALIKSRDMLVKSRTRLINHARGVAKANGERLPSCSTAAFAKRCKAHVPNELWPALKPIFETIEQLNQQIRALDKQIDQFCQQRYPEAQRLQQVPGVGPVTALAFVLTIEDPNRFAKSRQVGPFLGLTPRRDQSGKIEKQLRISKAGNRYLRKLLVGCAHYIMGPFGPDSHLRSHGLSIAARGGNNAKKRAVVAVARKLAVLLHRLWLDGQAYEPFWGVDKVKAA

SEQ ID NO: 346538 - protein, 331 aa, unidentified
MNYSCFIGIDLSKKTFDVSIISPEREELNYFQLPNTAAGTRRLVKRVHELCIPLSKILFCAEDMGELAIELCLASQSAGFPLALACPLSIKKSAGICRGKSDRIDAYKIACHASLHHRNLRLYSLPEPALTRLKLFITLREDLVKSKKRFSSVDTTLIESGKIADTGEHRQVTKEQLDLLDRQIKHVENCMLECLKESPLLYRNFRLLRSVKGIGLLNACLLICLTGNFTRFENHRKFACYCGVAPFEFSSGTSIRGKNRVSKLGNKQMKVYLTSAAQAAIMHDDQIKKYYKRKLEEGKHKGTVINAIRAKLVARCFAVIRRQQPFIAMLA

SEQ ID NO: 346539 - protein, 340 aa, unidentified
MEEVSIVGVDLAKQVFQVHGATADGRVLFRKKLSRSQFQRFMAGLRPCVVAMEACGTAHYWGREFASMGHDVRLIPPVYVKAFVKRQKNDVADAEAVAEAAMRPTMRTVAVKTSEQQARAMLYRTRDLLVGQRTQMVNALRGHLAEHGIIVGKGLGNVERLATLITSEDLPELVRAMGRLYLSQITQLHEEIDQIDRRIAAEAKQSDIVRRLQKVPGIGPICAMAITAFAPPMEAFRSGRDFAAWLGLVPRQHSSGGKQKLGRTSKMGQRDIRRLLIIGAMSVVHWKGRGGGRPGSWLSSMLGRKPRMLVAIAMANKLSRIVWAMLVRNQEYRDPSGAVC

SEQ ID NO: 346540 - protein, 342 aa, unidentified
MVYVGLDVSGKSLVVYAVNERKQRVFEGEQPATRAGLRALLRQVGVGAKLVAVEAGNQMKWIAETRKKLADIRVHVVHPNEVKWITESRGKTDRVDAKKLAELARGDLLPRGVHVVEGPVRELRELVSARQQLQSKRIALINTIRGYVYQEGHRWPEKFFAGPTWAAKLARWPVSAPLRLIIQMFMAGIEALVAAEQQLTERLLAIQDPRCALLETIPAIGPLSARVLVSALDEVRRFDDQKAVANYGALAPTIYQSGAIRQVGRINRDGRGEVRRVLLQCAHTVARMTSHGAKPLQQFGARIARRRSKKIAVVAVARKLLTTAYGVLKSGQPYDPRKLQPA

SEQ ID NO: 346541 - protein, 373 aa, unidentified
MISVGIDVSKGKSTVCILKPYGEIVSKPFNITHTQKDLSELSSMLFRLNDEVKIVMEATGIYHLPVLTYLQEKGFFVSVINPYLMKSYRNESLRKAKTDKIDSRIIANYGIDHWFKMKEFQTSGEIYEELKLLGQQYRHYMKLHLLSLAELTHLLDLTMPGIKNLLASWNETNRKDKRSDFVERFWHYDVITSMSEQEFTEEYILWAKEKKYVPSQEKAKVIYTLAQESIPTLPSETSSVKILVTEAVRVLKEVDATLGLILSRMQEIAKTLPEYSVVREMGGVGNTLAPKLIAEIGDVRRFRNGKALVAFAGIDPPPYESGQFVGCNRKISKRGSASLRKVGYETMRSLKMRSRPEDPVYRYVVKKESEGKK

SEQ ID NO: 346542 - protein, 436 aa, unidentified
MGCRYAGIDWASDKHDVLVADEAGAEVVAATFAHDEKGLSSLCRMLVRMEVVLVAIERPDGLLVERLLDAGLRVLALHPNKVAAARDRFRVSGGKSDRFDAFVLCELARTDHHRFRVLEPDSDQTKAIRALTRAREDLVATRTVVVNQLRAELERFWPGPLRLFSHMDAEILLAFLERYPSPADVHGLGVARMQAFLKREHYSGGQHPTALMSKLRSAPRARAGELELAARRRLVLSFVGMIRTLNAQIKDLEREIRTQVRAHPDGPIFLSLFKSPASVITAAELLAEIGDCRERYPTREALAADAGQAAVAKESGKWKAAGFRRACNKRLRVAFCRLADSSRHWHPWAQDLYAQARQRGHEHPRAIRTLGRAWCRVVWQCWRNHTPYDPARHRALQRHITVTIPTATAPIVDHAATQRLAGPGLWRPDLATAPTT

SEQ ID NO: 346543 - protein, 344 aa, unidentified
MQIKSIGIDLGKTTFHLVALGAHSQVVIRKKFSRQQLLTYAANLPSCLMGMEAGVGSHFLGRALREQGHEVRLIPAQFVRPFVKSNKNDYCDAEAIAEAVERENMRFVPIKTEDQLDLQALHRVRERLVSRRTSVINQIRAFLLERGISFAKGPARLRREIPEILENADEKLSTRMRRLLDFLWQEWKHLQLQIESLSEDLEKIANSDAACVRLQQIPGVGPLVATAVVSAIGNGAAFHKGREFAAWLGLVPGQWSTGGKTKLLGISKRGNPYLRKMFIHGARAAVLRVKREGSYLGQWMGGLESRAARNVVIVATANKLARISWAVLSSGENYRPRPALAVAS

SEQ ID NO: 346544 - protein, 405 aa, unidentified
MDLLYSRCAGLDVHPRSVSACLRVVVDGRVSQEVRTFGTSTRELTEMAEWLASARCTHVAMESTGVYWKPVWHVLEGRFELVLANAMYVKNIPGRKSDVKDAVWISDLLAHGLLRGSFVPPERIQELRDLTRTRKQLVREIARHTQRIQKTLEDANVKLTEVITNVIGTSGRAILRALIAGETDLDRLVDLTSGRLKASRAALKDALQGRVTEHHRFMLKMHLDQLEHLEATVRDVEARADQQPFRAATELLKTIPGVSGVTARVIVAEIGDDMSRFPTAGNLVSWAGLCPRLDESAGKRRSNRTRHGAPWLKPVLVQAARSAANKRDSYPRAQYMRLKARRGPNKAVLAVAASLLTAAYHMLKHGVEYRDLGPNHFERDKQVQAHRLLRRLKALGLEVTIKPAA

SEQ ID NO: 346545 - protein, 421 aa, unidentified
MTHPKMKWTYCGIDSHKDTHCAVFLDCFFGKIGEITFNNIPSGFEAFLKDAQKLKVVGTDFAFGLEDMSAYGRALNVFLTEKKQTVKHVNAALVASERKSGSVLHKTDSFDAECAARVLISRFDELPVADPQDKYWVLASVVARRNSLVKINVALKNHLHALLTDSYPNYKKYFPLVASRTALAFFENYPSPGTLTGTTAEELRDFLHNEANSRLSLEKASGFLSHIGKSGWKPSEYQAEKDFTVKSTVRQIKANIFEIGEVDGLLEKFLKNFDCKLTSMSGIDTVTAARLLAEIGDIKRFPTSAKLAKYAGVSPVTYASGKSDVQYANTRGNRQLNEIFFRIALTLTMAVGKTNRIVNPYFYHYYRKKLAEGKTKKQALKCVERRLVNIIWGMMRNNTEYINPETYDEPKENADEKGYAN

SEQ ID NO: 346546 - protein, 401 aa, unidentified
MNAVGIDVSKGKSMVCVMRPFGEVVLEPFEVLHTAQNLHDLAEKLKALDGETRVVLEATGNYHKPVAFVLHNAGLFVSVVNPVLIHDYDNNSLRRVKTDKKDAVKIANYTLDKWTRLRQYLPEDDTRLALKNCYRQYQQAVAIRTMLKNNLISSLDLTFPDANNLFSSPAKSNGCEKWVDFIGEFWHSGCVSSLSADAFAKKYLKWCQKHRYNFTRSKSDEIYSCAVNATSLPKSPTSKLLIQQQVAQLKAVSKSVAAFQQEMLRLSQQLPEFDTVMEMYGVGPSLGPQLMAEIGDVRRFSSKKSLIAFAGIEPQPNDSGKIMGNDKGISKVGSAVLRRTLFLIMTVILQTQPQDEPVFQFMNKKRSEGKPYKVYMMASANKFLRIYYAKVKAVMDSERSQ

SEQ ID NO: 346547 - protein, 435 aa, unidentified
MDEVTDEPLYRDRVCGIDIGKAGMVATIRVPSERDPARRAAETRSFGTTKREVLALADWLRCWQVPAVVMEATGDYWKGPFYRLEAEGLECVLADAKQVKNLPGRPKRDPSDSRWLAACFERGAVTPCFVATEEFRVIRLHTRYRRELTEERTREKQRAEKLLESAAVKLSSVVSDLHGVTGRAIMDQLIAGERDPRVLAQLARARARRKIAELEEALDGAEFFTPAHAALLATMLARIDHLNTEIDQLTGVIERLLAPYEEQLQQAESMPGWGRRSAQDAVAETGADMTRFPTGGHLASWAGRTPLDNQSGKRQGRAKSKKGNRYLGGLLGETAVAAGRTQTREGARYRRIARRRGKPKAQVAVGNTQLKVYHTLLSNPGMRYQDLGVDYYERQRGIRRRIAHHVGKLGALGFDVTLCRRPDPQSAGTGETTAA

SEQ ID NO: 346548 - protein, 418 aa, unidentified
MIPIIKVKGTSSLPVIRLPSCVNTLKEAAMDRPIEMTASRIVGLDLSKKTLVGCILSKEEGFQKTRFINGKMNPRGREELLKDLSDDDWVFMEGGTSSFTLARYLLNNTGMRVFVLNPMQLHIIYQSMCKTDKQDAAKIAKYARDANPENWCLIPIPTEQESAERSLINLHIGYSQERVKQVNRLHAIFNGQGYPDLKKSDLKNPETRRRWIDEFLTDETARFSAFLLADQIDSFEIQLECIHDRIRSILLSHPVEARAWLSIPGVGDITAATAIAYIGDGRRFGTASQLRNYIGLLPRRDQSGTVDKKLGVSKFGCMPMRRHIMQGAWGIKKSAVDCSLTHYWQELQARGKRGQKASVAIANKMVSIAFALLKNHETYGMPDQERYFRRKLSCYKLEALNDSPASTKSTVKESLTLE

SEQ ID NO: 346549 - protein, 375 aa, unidentified
MEHHSEAFVALDTAKLRNAVAIADAGRNGEIRYLGEIDNTEAETRKLVAKLASKHARLTFCYEAGPTGYGLYRLIKSIGHDCIVVAPSLIPSKPGDRVKTNRRDAVNLVKLLRAGELTAVWVPDERHEAMRDLVRARDAAVKDYRIKRQNVSSLLLRLGRHYPGKKTWGRTHINWLTGLKLEHREQRIAFEEMLLAVRQVRERIERLEQAMREAVADWTLAPVIEAVQAMRGIDMVGAIAFLAELGDLSRFENPRQLMAYLGLTPSERSTGESVKRGGITKAGNTRARRLLIEAAWSYRFPPRVSKDMQTRIGAAPRTAREIAWKAQMRLCGRFRTLTRKGKRPTIVVTAIARELSAFIWAINREVVGSHATANQ

SEQ ID NO: 346550 - protein, 360 aa, unidentified
MSRTSLSQIHQFIEGYSSGKFWIGIDIHKRSYSLALLREDGMSYTWVTTADPIRLVEQLQGLPITISSIVYESGPTGFGLARTLKKANIPVDIAAPSRIPRPVRPGAKSDRLDCLKLAAYGSKGMVKSIAVPREEEEALRALLRRRQQLTESLVRVKQRIKSLLLYIGQTEPHGLRSWTDKSIRQLENMSLNDAYQILLKSLIRQLRFVQDERQIVLNQLQSLISKTDQQNRLGCLSSVPGVGSITALTFLLEVFNPQRFNRAEEIASYLGLAPMVHHSGEQTPPGKLQPVGQACLRSLLIEAAWMWKTKDEGARTMYNKFLSKMGIPQKAICAMARRLAIILWRIAVEQRTYYPIEVKV

SEQ ID NO: 346551 - protein, 343 aa, unidentified
MDYFAGLDVSVKDTSVCIVDGTGKITREVKVASEPDALLAVLNNPAYHFKRIGLEAGPLSQWLFSALAEADLPVICVETRHMRAVLKARINKTDRNDARGIAQMMRVGLYRPVHVKTLRSQKLRTLLTHRKLLQSEAIAVENDLRASLRNFGLKVGVVGTVKFEARVKELVENFPDLLALVEPLLVVRRVLREQISILHRRVLAAVRNDEVCRRLMTVPGVGPVVALTYRATVDVPARFRKSKSVGAVFGLTPARDQSGESDRPGAISRCGDEMMRTTLYEAAQVMLLRSAKWSWLKAWAMKIARHRGMKKAIVALARRLAVIMHRIWIDGTEFRWTRDAAAA

SEQ ID NO: 346552 - protein, 346 aa, unidentified
MEIHTIGIDLGKTVFHLVGINAAGETVMRKKCSRQQLLHFTANLHVRLIGMEACCGAHFLGRALREQGHEVRLMPAQYVKPYVKTNKNDYIDADAIAEAVGRPKMRFVPIKSDAQLEMQSLHRVRESWVGRRTSVINQIRGLLLERGITIRKGRRHAESTLPQILEDADANLSGRLRMLLAQLQQELRQLQSQIDEIDVDIVQACGEQEACQRLMAIPGIGPITATAIVSAIGNGADFKKGRGFSAWLGLIPGQYSTGGKQRLLGISKRGNSYLRKLLVNGARAVLQSREKQSSGLRVWLGKLVSRAHSSVVTVALANKLARMAWAVLAKGETYRPPLLAAEAVAV

SEQ ID NO: 346553 - protein, 347 aa, unidentified
MNFYTRPHKYYCGVDLHSRTMYICVVGQDGAVLLHRSLPCDPGRFLLAIAPFREDLVVAVECVYSWYWLADLCARESITFVLGHALYMKAIHGAKAKSDRIDSGKTAVLLRGGLMPVAYAYPADMRATRDLMRRRLLFVRQRGSLLAHIQVTHHQYNVDQPGKRITYRSNREGLGEGFEDPSVRHSIAADIALADHYEVTIGELELAVLRQARIHDPNALALLTSVPGIGKVLALTILYEIHDISRFPSVRDFASYCRLVKCERSSAGKSLGTGGNKIGNAYLKWAFSEAAVLFIAKSEQGRTVLKRLERKYGKPKALSVLAHKLGRAAYYMLARKQAFDPQRFVAA

SEQ ID NO: 346554 - protein, 356 aa, unidentified
MNAITIGLDIAKSVFQVHGEDASGKVVLQKRLSRARMEKFFAGREPCLVGIEACGSAHYWARTLRELGHEVRLIPAAYVKPFVRRNKTDARDAAAICRALGQPDMRFVAIKSVEQQGWRGLERSRELLVKQHTQLMNCTRSQLAELGIVAAQGRRGFAELSALLGGDEGRIPEVMAVGLWLLVRQIAALEEAIAALEKRIVAAAGEDAAMRRLVSIPGVGALTAHAIVAAVGEGKQFGSSRDFAAWCGLTPREHSSAKKRRQGGISRQGDNRLRKLFALGASTVMRGVRAHDERATEWQRGILARRPVKVAVLAQAAKTARIAWAILQSGETYRRPVAAAQRPSATGLVAVAAAGR

SEQ ID NO: 346555 - protein, 422 aa, unidentified
MLEETHDSEELIQRVAALDIGKAQLVCCVRVPNPDQPGKRLQEVRTYPTMTRSLLVLADRLRELGVTRVVMEATSDYWKPPFYLLEAHGLEVWLVNAKDVKHLPGRPKTDRLDAVWLCKVAERQMLRPSFVPPPAIRRLRDLTRYRADLVATRTAEKQRVEKLLEDAQIKLSVVASDLFGVSGRAMLAALMSGERDPKVLAQLARTRLRAKRSQLEEAFCGRFSDHHAFLLETMLGRVDQASADIAELDRRIEEELVPFAAAADRLDEITGVGRTAAQVIIAEVGVDMSRFPTAGHLVSWARFAPGVKESAGRRKGNATTGHGNPYLARVLGEAAVTAGRTNTFLGERYRRIARRRGTKRAIVAVGRSILVIVWHLLSDPTVRYQDLGPGFYDTRINAERRKRNHIRQLEALGYKVTLEPAA

SEQ ID NO: 346556 - protein, 366 aa, unidentified
MKKHNSNQQITSKGDQKEKFAFYIGVDLGDKMSDVCVLDPAGEVSEQFRLRMNATDFQTYFTAIARSRVAVEAGAQSRWVAELVERCGHQVYVSNTRKVPYIHESDDKDDSADAYKLAELVHLKPRLLHPIQHRSQEAQADLSWIRAREALVESRTQMINTIRGMTKAFGERLRKCSVESFTAKRAEQIPAAIRGAVVPLLEMIDHLNDQISYYDQMIQHLARTRYPKYWLLDQVVGVGVQTALAFMLTIGDPERFAKSRTVGCFLGMRPRKKDSGGRKPQLGITKAGDVYLRKTLVNCAHYILGPHGPDSDLKRFGLRICERGAKNAKKRAIVAVARKLAVLLHRLWVTGEVYEPLRNSRTATAA

SEQ ID NO: 346557 - protein, 409 aa, unidentified
MKLFVGIDVSSKDMKACIMDADGSTLATAAVDNTLTGATHLRDRIVGIAKGVGANNVQIGLESTSVYSWHPAMFFHEDDDLQAFNSKVYTINPKLIKNFKEAYVDLDKNDHIDAWLIADRLRFGRLPLTAVMQEQYVALQRLTRMRFHMVHNLTREKQYFLQHVFYKCSSFTSEVESSVFGNAILELLLEQFSLDEICSMDLDELAVFLENKSKNRFTDAECVAKSIQKAARSSYRLSKCVENSIDILLATSIESIRSITKQVKELDKAIQKLLDGIPNTLQSIPGIGPVFCAGILAELGDVNRFKDQAAIAKYAGLTWKKHQSGNFNAEETKRIKSGNRYLRYYLVEAANSVKRFDSEFGAYYQKKYSEVPKHKHKRALVLTARKLVRLIDALLRNDQIYTPRRKVHS

SEQ ID NO: 346558 - protein, 408 aa, unidentified
MQVLYPRCAGLDVHKDTIVACVRCVSPPMHQEVRSFGATTTELLALADWLAEHDCTHVAMEATGVYWKPVWHVLEDEFELVLANAAHIKNVPGRKTDVNDAMWIADLLAHGLIRSSFVPPQAIQQLRDLTRTRKQLVREVSQHSLRIQKVLEDANLKLGSVLSDVLGKSGRAMLDAIVAGQTDPEQLAALAQGTARHKTAELREALRGRITEHHRTMLKLHLQVVDALERTLAELDTAVGKALAPIRQRARLLTTMPGVSDLTASVVVAEIGVDMTRFASAGHLISWAGLCPRSDESAGKRRSTRVRKSGTWIKTTLVTAAWAAVRVKTSYLRAQFLRIKARRGAKKAILAVAASMLTAAFHMLRDGTEYNDLGSDHFDRHDKSKTIRRLLKRLQDLGCDVPELPHAT

SEQ ID NO: 346559 - protein, 340 aa, unidentified
MEWTVAIGVDTHKRTHTAVALDRVGVQVASCEVEATSAGYARLLAWASELGEPAFALEGTGSYGAGLASLLVAVGLPVCEVERPRRERRRGKNDLIDAARAAERLLSGQGLSALRGGVPAREDLRLLLLERRSAVRARTAALNQVHAVLLTAPARLRERLDALKGDKLAERCVRLRPRDESERVLVSVLNRLAARARLLTRELAQVESELERIVSTLVPDLLGECGVGPICAAQLVVSSGDPKRMRNEASFAALAGTSPVEVSSGPNRRHRLNRGGDRQLNAALHVIANTRLRCHPETRAYRDRLLARGKSKREAMRCVKRQLARHYYRLLVTNAALART

SEQ ID NO: 346560 - protein, 409 aa, unidentified
MRIIGLDIHRAFAEAVAWEDGKLKRLGRVDMRRPLLEAFAKKLAKEDVVVIEATGNAASVASVIAPHVKKVVIANPKQVRIIAHAKIKTDTIDASVLAQLYASGFLPEVWIPDEPTQALRRQVTRRNQIVRQRSRLKNIIQSILHSHLIPSCPHADLCGASGRAWLSHQVLPEDERLAVERHLREFDRLGEDLKVIERDLARSALGDEGVQRLMTIPGVDMVVALAIVAAIGDTGRFDRPEKLVSYLGLNPSVRQSGPGPAHHGRITKQGRGHARGMLVEAAWAAARAPGPMRAFFLRVRARRGQHVAAVAMARKLAVIIWHLLSKGESYAWARPALHARKLRDLELKAGYKAERGQRGSACAYNIKSHRDQERRWVEQAETAYARFVAGWNPRGPKRARTGAATEVRR

SEQ ID NO: 346561 - protein, 344 aa, unidentified
MKYFTGIDVSLRSVSICVVDEAGEVQYEGKVPAEVDLIVAALQRCKAEIKQVGLEAGTLTQYLTYGLQKAGFEVICLEARQTAATLAAMRNKTDRNDARGLAQILRTGWYRTVHVKSLESHQVRALLASRKALLARCVDLENELRGLLKIFGVRLAPHLAHNRFDETVRAAVSTTPELNTCLLPLLDARTVLYKTYLKLDNAVKSVVRHDPICQRLMTVPGVGPVTSLTFKAGVDDANRFRSSRNVAAHFGLTPRRYQSGETDNPGRISKAGDVDVRMALYTAAHSLMTRSEAWSTLKAWGLRLAKVRGHRRAVIAVARKLAVILHRMWVDGTDFRAARVQGVA

SEQ ID NO: 346562 - protein, 422 aa, unidentified
MSYCPVAGIDVSKRFSDMCILSPDNKIFAQEKIYHDETSINRANALLQKAERLFFSKPVIVMESTSHYHLILFQFFSEHGYDVIVVNPLQSNSMKDFSIRKRKTDRVDAFKLAMMYRTKTLRPSQIPQTATRALRQLCRHRAELLNDVSSYKNRLTALLDQTFPGYDKVFSDVGGVTSCAVLVRFPTPTILLVEEESELVEVIAAASKSGYSFAKKKAGLLISAAQKAQTLGVHSCADETLIVCTIQMLRTLSESVLQIETAIDNLLAQIKEMRNNVSLLQSIPGVGSHSAALLLGEIGDISLFKKPKQLAAYFGLDPTERQSGSFRGTKNKLSKRGSPYARAALHMGVVNSICKRGKDSAANPVLLSYYEKKCKNKPAKVAQAASMHKLVFIVFAVLRDQKPFELKTPEQHAVEQGFVKAA

SEQ ID NO: 346563 - protein, 451 aa, unidentified
MVMREPQEIEDEEHEQVLQRVAAVDVAKASGMVCTRVPHDARPGRRRTRVWSVDATTNAVLELAGYLSAERVEKVTLEATSDYWRIWFYLLEAAGLDVQLVNARDVRAAPGRPKTDKLDAVWLAKLTERGMLRPSFVPPAEIRRLRDYTRLRTDLTRERARYWQRLEKLLEDSLIKVSSVASRLTTVSARDMIEALIAGERDPEVLAGLARGRMRVKHAALVEALTGKFDDHHAELARILLTQIDYLTSQIDHLTIRVEEQVAAIPAAQGIDADGTTGPGAGGGQDAPVLPALARLDDIPGISRTVAQAIIAEIGLDMSRFPTPGHLVSWAKLTPRTIQSGAKSRDGKTGKGNPYLKGLLGEAAATAARTDTFLGERYRRLVRRRGKLKALVAIARTILVIIWHLLTSRTARFRELGAGYYASRTDKDKKTRGHVRQLEALGYTVTLAPAA

SEQ ID NO: 346564 - protein, 342 aa, unidentified
MDLGDKTSRYCALSAAGEVIAEGICATTKKGLTQMFSTMPHCRIAIEVGTHSPWVSRELTRYGHEVIVANARQVKLISQSSRKNDKLDAQMLARLARMDPALLRPIRHRREEAQQDLLTIRIRAALVEARTGLVNAARGLTKAMGGRLRSCDADQMSVEKLEALPAEVREPLQPLLKQVESLTETIKECDEKIKQIAAERYPETELLQQVHGVGPLIALTFILTIDDKERFQKSREVGCYVGLRPKQSASGERQPELRITKEGDVYLRKLLVQGAHCILAKRAPDTDLKRWGTKLAGRGGKNARKRAIVAVARKLAILLHHLWATGEVYEPLQNNPTMAKAA

SEQ ID NO: 346565 - protein, 346 aa, unidentified
MTHIPTHTIATESTSRLFAGVDVGADELVLVIRKKGKSFDPQKYANNRSDRARLLNKLIKLPGIKVCLEATGIYHFDLAIALHDAGIPVMVVNPKASHNFAKVLMKNSKTDAVDANTLAEYAERMDFVPWTRPSNQTLALRGFARRIDALTGQKAAAKNHLHALSATQETPKALLCDAKLAISQLEKRIDALAAEAMILIKAHSELSRIFELLTGIKGIAQTSAIALMGELLLLPPNLSHREWVKFAGLDPKAFESGKSVHKKMRLSKAGNRHIRSALYMPALSAKQHDPHVKAYFQHLVDNGKKPLQAVCAVMRKLLHAIHGMLKHDQPFDNTRFYAIPAPIIAE

SEQ ID NO: 346566 - protein, 326 aa, unidentified
MKKNNMVCAGIDTGKRKLDVAITGQGEQLRVDNTASGYEVLTAWLRQHRVERVGIEATGGYEQGIVCHLREQGFVVVVFQPIQVRAYATFHRQLAKNDKIDAALIAECTADVQEIHGPADPRLEPFAQQMTLIEQIVEDIARIKTRRESCRDKQIRQYWKEEIARLERRRRAELKTLSAAIRKHEDLGKRLDLILSVDGVGLITAIAILVRLPEIGSVTREKIAALAGVAPYDNQSSEQVRERHIRGGRGRLRKSLFCAALPASFRWNRQLIEIYRRLKAAGKSHKAALIACVRKLLIFVNTVVERGTPWQKQQPHAKADLDLQAT

SEQ ID NO: 346567 - protein, 366 aa, unidentified
MRVYVGLDVHSKWSVFVIEEEDGKVIGRGQIPTTPAGLGRLKEEHRLSPGTAVALETGTVAFYVARELTRLELKAVVIDAHEVRVKAQRPGQKSDRRDAFEICEGLRRGIYRTIVHVPSEEISRLRETLSRRRHFVWVRTGEINAAKRLLRAAGLGHLSKSLGTEAAWEKLLVALPVEGELRSYVAQHGAVWRCVQEQVAVLDEALATQQAPVASAVERLQSVPGVGPIVALTAVAVFSDVSRFGSCKEAASYGGLVPSSNQSGDRDTHGRITKRGSAALRSMLCEAAHHAARPTHPLNPYFAKLCAKAGYKKAVVAVAHRLCRILFAMLRDGAVFDIGKLGVEEGSFRRTRIRHYRLKAVPAVRG

SEQ ID NO: 346568 - protein, 340 aa, unidentified
MSMNPNSCLGDRARILQGRERTAMSVANEVFVGIDVSKAELEVCWLPQLGRLQVAREEAGLVQLVERLKALGPSLVVLEASGGYEMPVVMALAGASLPCVVVNARQVRDFAKASGKLAKTDRIDAQVIAEFAQAIRPQVRALPDAAAAHLIALVARRRQLVEMLTAEQNRLALSHAAVREDLKQNIAWLKSRLQDLDGELARAVRSSPLWRENDKLMQQVPGVGRVVSAVLLALLPELGRLSPKKIAALVGVCPFNRESGRWNGKRAIFGGRAGVRSVLYMAIVSAIRWNPLIKAFYERLLAAGKPKKLAMTACMRKLLVILNAMMRDRSDWNPNGALAT

SEQ ID NO: 346569 - protein, 430 aa, unidentified
MAYRIAGIDVHKKMLAVVVADVEVEGEYDFLRQRFGSNPEQLRQLSAWLSQQGVEEVVMESTAQYWQPVWGALERYWKPVCQKREGAGPVSGALHLAQAHSNRGRKGRKQDFPDAERLIKRLVAQELILSFVPPAEQRLWRAVTRRKYQLTRNRVQLHNRLESLLEEAHIKLSSLVSDLLGVSARRMLNALAEGETNPLALAALAHQRLRATEAQLSDALGACIELNPVYRRLLKMALQELQFIEQQRNQLEQEIAALLRQHEAAVQRLAEIPGLGVDSAQQIIAEVGASADTFASAKNLASWVGACPGDEQSAEVSKSHRSPKGSRHMRRILNQAANAAVRTKGSIFQIVYRRLVPRLGHHQTIGAIAHRLCRLIWLILHRAVRYEERGPSVSQKSRAQRTRKMIRELQKLGYRVEPLSVAANAPAPAQ

SEQ ID NO: 346570 - protein, 412 aa, unidentified
MRHRKEQFIYVGVDLHKRTHTAVVINCWNEKLEVIEFENKPSAFPAVVNKVKKHVQEGMTVVFGLEDVGGYGRSLAVYLVENHFLVKEVNAALSNWKRKSYAMTEKHDSWDAENIAKLLLDELDRLPNAHPQDDYWILKQLVMRRYSLRDTLVMLKNQLHTQLSYNYPSYSKFFSEVDGRTALAFWYEYPSPYLLEGVTLEDLTLFLRKNSNNVCSTKKATLILEGVQSDGNTKRSGQEYRDFLVRSHVNQIRDVHREMSDVENHIRDIMQKLDFKLNTFTGIDDVTASAIVAEVGDITRFASADKLAKYAGLTPSQMSSGGRGKDRNQRQGNRALNKILWGLAVRQVHTARTSSKPLNPIFREYYEKRLSEGKKKKQVIICIMRKLVSILYSMLKNKTEYLLAVLPERAAS

SEQ ID NO: 346571 - protein, 411 aa, unidentified
MRLFVGDDWAEDHHDVELMDAAGRVLARRRLPEGVAGIARLHELIGERLGEDAQDAEVVIGIETDRGPWVAALAAAGYTVFAVNPLQASRYRERHGVSGAKSDTGDAHMLTDMVRTDSHQLRAVAGDSADAGAVKVVARTHKTLIWERTRQVQRLRHQLREYYPAAVEAFPDLDAPDALELLAKAPDPARAARLTRAQVSAALKRAHRRDIAVKATAILAALRSAQLGQPPAVTAAYAVTVRSLIAVITVLNEQVKVLEEQVGAHFGRHPDAEIYLSQPGLGPILGARVLGEFGDDPHRYVSGKARKNYAATSPITRASGKKKTVMARFIRNDRLTDALMAQAFTALSASPGARGLYDAERARGTEHNAALRKLANRLVGILHGCLKTRTPYDEATAWPQQEKIPQSDVAA

SEQ ID NO: 346572 - protein, 312 aa, unidentified
MAQGEVFVGVDVSKDWLDVAVWPAGQTARVANDRAGRGELTRRLKRLGDLQAVGFEASGGYERGLLKALLDAGLPARRLNPVRVRRFAEACGLLAKNDRIDAAVIARFCATLPGRLAERNAAADALAELVTARRQLCEEMTRAANQGQHAGQPLLKRLAGRRASRLAQDIRTLDAAIAKAVAADPDLAAKDALIRSVPCAGPVLSHTLLGLMPELGSLSNRAAAALLGVAPFDRDSGTFKGQRRIAGGRQPVRDVAYMAALVGARCNPALAAFKKRLQDAGKRPKVILVALMRKLITILNAILRDQLPWAVT

SEQ ID NO: 346573 - protein, 474 aa, unidentified
MGKVSGLSRSERRRNARRERLRGLLPRGGAVLGIDLGEDRQALALVDHDVRVAWRKTVRVKAHQLGEALDLAVAAARAGGFPGVTVACEPTGPRWMQVQRLCAERGLALVCIQPLVSHIAREQQDYTAHKRDEPDAVLIARLAAELHCYVPEELDEQWALLRQLGRRREQLVAGATASVVRVRDFLSVACPSATGACKVPFESATWLSAVHAVTSRCGADPARLLAGEGREDAAAAARAGVAGWGRTRADGRVLRAVLDALAGDRDGVSWSRRGLFRRIADELGDLQRCRSQLRAVEADMVAVLGELGLSRLGGIPGLTATGAAVILAEAGDPRRYERSSSLVKHAGLSPADNSSGAFEGASRISRRGRPRLRSAAWRAVWPLLLHNPVMAAKYQALVAAAEDAAATAAAAARPGSAQAAQAARAVRSARARARVACAASLLRWLYYMTVHDASWDPVAASGGRWAPAAAIQAA

SEQ ID NO: 346574 - protein, 410 aa, unidentified
MKMAGIDVHKKVLMVVVVDTSRPQEKPARRRFVTMPSELHRRLTWLREQEVEEAVMESTAQYWRSVWLELEPHLRLHWAQAFSNRAPRGGKHDFKEAERLVRRVMADELMLSFVPSGEQRIWRSMTRRKLQLTRDRVRLQNQIECLREEMRIKLSIGVSHLLGASGLRLLHALARGETDAKKLAQRGGERLQCTEEQRVDALTGTVQPVHGERLGLQLERLPLIEEPMTGLNSMIAAAMKSHPDAVIRLAEVPGLGVDSAQPIIAEVGAQASTFASAAELTSGVGTCPGKDESAEQNHSSRSAKGNKYLRRVLNQAAHAAVAKKGSHFQALFRRLLPRLGYPSAIWAVAPRLCRLVWKILHPGVRFIQQGTEVGPREKKKRAPMLARALRKLGYEVTITPISQLAPNPAV

SEQ ID NO: 346575 - protein, 386 aa, unidentified
MSQTTHQTSVPFYIGIDFHKHYSVFCVIDDRNTILERGRIDHKIPIGFELLVKRYPGCRAVFETTMNWHWLYEILEAHMDHKDIVLANAYKMRIIAEAQVKTDKVDAYMLAKFLRAELISTVHIPIKSTRQRKEVLRQRCFFVRQRTMLRNRIQRLLSAQHNLQLPQCSDLFGKKGISTLGKLELPDPAGLLLRQQLEMLENLKTRITEDEIALKKMLEASPELEFVKSIPGMGPILAAVVVSEVDDISRFASAQRFCGYAGLCPTTYSSGGKTHNGRLMRACNKWLRWAFVEAAWVSVGCSAYFGDYYKRKRALGKKANTAIIATARLMARICWQLLTGKRAYASFPPAQKLQGRPEGKPQASSGWVKERKDFAMPKETFPSRSE

SEQ ID NO: 346576 - protein, 431 aa, unidentified
MTKTYILKTPTQTVPAERSAVETYLAPPPPSKGKIIGLDCHPDTFTAAVFVGQTPHDARKIGSRENLSLEALLKWAAAELTPQDIILMEAGSNSFELCKRLGNMGLKACVLESCHVGKHAKTYADNDKMAAARIALVYLAGNAPCVWVPDEQSRERRELLHAYRKAVDDHTAATNSIKSYLNGRGIRLGKHSLDDKTTSQWILDQADWSVLQKNILAEHLANITESKERRKRLYRLIAAEIADDPTMMRCMKVLGVGIVSAFALLAVIGDIGRFHSPEKLVAYIGLNPGQRQSGKGKDIRLGVGRRGRGDIRHLLIQGAHAIMRSGRNTPLGQWGWKLFARKGNRNVAVAAIARKLLVQVWHLLHGNPPLALESDTSFRIKLQKLAVALGTTLRTGIGLGKSLEDSIKTLLARCQTHPEPSASPCETPQPA

SEQ ID NO: 346577 - protein, 452 aa, unidentified
MAKPKKRKHRKLDRSLPVMRPNAGGIDIGATEVFVAVPADRDTESVRSFPTFTQDLYELADWLQRCRVDTVAMESTSVYWIPLFQILEARGIEVHLVNAQHVHHVPGRKSDVLDCQWLQYLHSVGLLRASFRPEQAVCEIRSLMRHRENLVQMACVHVQHMHKSLDQMNLQIHHVISDITGVTGLAILDAIVAGETDPETLAKLRDHRIKASIQTVRKSLVGDYRPEHIFTLKQSQTAYRYYQQLIADCDREIQLRIERFHNQDVDPSAPAECSTESASSMGSAFDLRGHLERIFGMDLTVIPGLDVLRIQTIFSELGADLSGKFSTEDAFSSWLNLSPKDGTSAGRRIRGLRIRTKNRVTQTFRMAAQSLHNSQSYLGDYYRSQRARYGAPKAIKNTAHKLARIFYHLVTTRQPYDETVFAKLEARNQQRQLRKLQSLAKQMGYSLVCASA

SEQ ID NO: 346578 - protein, 387 aa, unidentified
MNEAFDPRKSATAFDQASTLVVVLELSGKSWQAGASVPGVSRRPLRQLEARDLAGALRAIEQWKSEASGAGHEVMRVVVGYEAGLDGFWIARALREHGIEVYVMHPASVAVERRGRRAKTDRIDVDILLRALLGWLRGEPRHCTMAPIPSEAEEDMREPGRRREALTAARLKVENQMRSLLVRFGVVDFRPRLKKALEHLEKLRTIDGRPLPPNTKASLDRLMAQHRLLSEQLKEIETARERVVAVTDPDRMERMIQALASLVGVGVETATTLVHEVFSRRFRDRRALAGFVGMTGTPYDSGGSTREQGLSKNGNPRVRKMLMQATWRWLMFQPQSALAQWFFARTAGAKGRMKKIMAVALARKLLVALWRAAETGVVPEGARLAAA

SEQ ID NO: 346579 - protein, 331 aa, unidentified
MVYAGIDVHRKRSQVSLIDVDGRELLNRNVDNGSEAMLDILEDLEPGTPVAFEAAYGWGWLADLLEERELEAHLVHPSACKAIASARLKNDKVDARMLAHLLRTELLPEAWIAPKEVRDLRVLLRHRASLVRVRTSLKNRIHAVLADEGLKVEGEKLWSDEGQQWLAGVCVRDMHRLVIDDCCGMLDALAIPIGRLETDIRKQAKTDPRVEALCVLPGVGLITAMTLVSEIGDINRFPTARKLCAWAGLTPSVRNSDNKVRHGHITKAGPAAVRWVLTEAGYHARRYPPFNSTFEAMTKRRGKHIAGVALSRKLLARSFHILKSLEAAKTQ

SEQ ID NO: 346580 - protein, 373 aa, unidentified
MPLAKKGVRCSMKQYIGCDTHLRYSIFRILAEDGTMGPAMRIEHGGGELERFLSQLAPGSPVALESTGSYGWLVQAIEAAGLEPHLGHALEVKKRIGGTHKTDAVDAKGLAILLRNGTLPEVWIPPAGVRDQRGLVRSRLALRKHQNSFKCRIHAVLSHYGRKQWVEDEEEITVRDWFTVKNRDQLMKAIEGLPAATREATRQEWLVTEALERHIVSLELAIRARVGQLGWLKLLKSLPGVGEILGPTIWLEVGDIRRFANAQHLAGYAGLVPRTYSSGGKTWRGSTAKSCNHYLKWAFVEAANVIAAQQHKMQAKHPHVVELYRRVKGTTKLSGKAKVAVARHLAESTWWILTRKQVYREPTSARVTSSNNG

SEQ ID NO: 346581 - protein, 383 aa, unidentified
MRIVCGLDVHKDSVFVCILNEKGEKFESKYGVLTPELEELHQLLLTHEVKEVTMESTSIYWHPIWRVLGDIECLKLVNPYFIKQLPGRKSDVRDAAWIAECTMKDLIRGSFVPDATVQRMRQYNRRIFDLNKEKVYKLTKLDALLHRCNIRISNYVSSIDSKSYKEVVRLLSEGIVDAERLMEAIHGRTVNRVGKDVIKAALTGIVNEVDIDLIRLYREELQIDDKHLKECQNKLTEICRNEFPKEFENLQTIPGVKERSATSILSELGADMKMFLTASALVSWCGLKPRNEESAGKIKSRRITHGNKYIRKTMIECAWGASRTQDCFYSNFSYIQTKVRRKNAMKVKVAIARKMLVAIWHVLGENVPYYDYKKPKAIADGNS

SEQ ID NO: 346582 - protein, 413 aa, unidentified
MEVVYERCAGLDVHKKSVVACRIELAEDGWQKETRRFGTMTDELLQLADWLRAGRVTTVAMESTGVYWKPVFNILESEFEVLVVNARHIKYVPGRKSDVSDAQWIAELLRHGLVKGSYIPEAPQRDLRDLLRYRTSLVQERAREINRVQKVLEDANVKLASVASNVLGVSGRQMLEAIVAGNDDPEALAQLAKRSLRAKIPQLERALKGQVRSSHRLLLRLHLEHIDDISAKIASLNEEIERLIVPFDEKDELRRLDEIPGVGLEVGQVILAELGVDMSRFPTAAHAASWAGLAPGKNESAGKNRSGKITPGNPHLKPALVQAAHAASRTKNNYLAAQFRRLAARRGRKRAAIAVAHSILVIAYHMLRNGTEYQDLGGDYFDKRNKEQLQRNLVKRLEGLGLQVTLLPTVAVA

SEQ ID NO: 346583 - protein, 338 aa, unidentified
MRYIGVDLHTNSFTACYLEQEKPEYIRTFRLQDINNFIENLQPTDEVALEATGNSCFFYDEVLPYVKRVVIIAPLQFEVIRRSVHKTDKHDARAIAFFLSKDMLPEARCKNTQYQQLVSLLKTREQLVKSRISLINKMHSLFNYHGIKIKKEALTTKTGFKRAIQKHNWCHLEKVEIEVISYHLEAIRESLKKLEKEIETFVKQLPGFYNLISIKGIGVISAAVFITTIGDINDFRDPEKLTAYFGVVPYVSQSNQQCTIGRITKRGSKMARTALIQCTWVAIRYSPYLKSFYENVKKRRGSAKAIIATARKFLTTIFYTLKKNWIFKDFTKFEFFIG

SEQ ID NO: 346584 - protein, 386 aa, unidentified
MRGQTFVPRDYDVFAGLDVDKRSISVTFSNHQGFISSLHMPYSTEHLIKHVRKHFGDQKVAFAYEAGPTGYGLYDGIVAQGYRCLIAAPAMIPRAPGQRVKTNRLDGVSLSESLRGGQLKSIHVPTPIYRELRHLVQLRDTVMSEVVATKQRIKSLLLFEGLDFPTAPAGSQWSLKVKRQLQKLACSKGVRFKLDELLDSLEFLEKKVVRSTREIHRFCKDDPELLQCIKYMMSVSGIGWIVASQLLARIGNWREIQNVRQLAGFLGLVPTEHSTGDRIRRGSITHSGDGRLRSKLIQASWSAIRQDGELRDFYRSVCRTHARHLGPRVAIVAVARKLSARIAVVLMQQRPYVVRKKVDSAPLTQEETVPQGTTRRPGEPGETDNS

SEQ ID NO: 346585 - protein, 387 aa, unidentified
MPQRNDLSRSLIALDQNSTVIAVIEMSQSNWLVAGVIPGVDRQPLKKLEPDAEGLLRLLRRWQDEATRAGRTINRMAVAFEAGRDGFWLARWLRARGIEAYVIHPASIPVSREHRRAKTDRLDTELLKRAFLGWLRGEPNHCGMAAVPTLEQEDAKRPNREREVLVGERTRIVNRMKGTLARLGIRGFKPALPRAPERLETLRTPEGATLPPNTRAELQRDMARLRFVTDQIRELEAARAERLEHAPETGPNAMIRLLARVVGVGIETADMLVQEVLSRNLRDRRAVARYAGLTGAPDESGAKRREKGLAKAGNARVRRGMIQLAWRFLLFQKDSALSQWYRARTTDARGATRKTLIVALARKLLIALWRFGATGEVPQGVVLRPAA

SEQ ID NO: 346586 - protein, 341 aa, unidentified
MSNANTYIGVDLHKKTCFITIMDKVGKVKKQTEISTDTDKVSKFFNRYSGMPVAVESTMNWIPFYENLESLGCKVSLSNPLQTKAIASARIKNDKVDSRVLADLLRTNLLPCAYIQPREIRDLKELVRQRAAYVELRTRIKNKIHSVLFKTNTKHSFTNLYGKAGMEWLNNLELRNIYHQELDRYLITLDLLDKQINELSEIIKQTARADYDCKLLITIPGISFYSALMIKAEIGDIRRFANANKLCSYAGLIPSTYQSAEKTRFGKITKRGSKWLRKTLVDAITSNCRHSNRLAHHYRKLKKNKGTGKAKVATARKLCTVIFAMLSDKQLFREFTPVKQR

SEQ ID NO: 346587 - protein, 396 aa, unidentified
MQKNVYASVVAAGVDVHYQFSKVAMVDGRGRVVRRERLEHRDRAALGARLSQWPAGMTVVMEASFGWGWLSDVMEEVGLTVRLSNCYKVDKMRQARDEVKTNDKDAAMLALLPLEAKNWWEVWRAPKDVRERRERMRHRMDLVGAQTRLKCQIHAIFHRHGIFHDFSDLFGGGGRQFLQALCEGRQEQSGRLGTGAMEALRSDVLLLMHLRQELARIAVRLRQELERSPQARWLVSVPGFGLILAHVALAEIGQIGRFRSSRALAMYSLLGPRARDSGEARPADQAPLGRHLGQRGNRTLKWAFIEAAHGAVRHGGPWRAMFDRATNGGRKNRGRGYIKVARVLVDVVYAVLRDERMFQDRRPAPPEATRKQRMESFLAVARPGTGRPYHPMVAAK

SEQ ID NO: 346588 - protein, 344 aa, unidentified
MDHYVGLDVSVRETSVCVVDEAGKLLKEAKVPTEPEAIAALLAKGGYACRRVGLEAGPMSQWLYAELAAAGLPVICVEAQHMRSALAAQRNKTDRNDARGIAQMMRVGLYRPVHVKTLQSQERRLLLTARKLLQAKLLDIEADLRGTLKNFGLRVGVVGKGGFRPRVRELIEGREGLSAVMSALLEAHEVLQTQYNVLHKRLLDLVRDDPLCRRLMTAPGIGPVIALTFQATVDVPARFPKSRLVGAHFGLTPKRYASGETDHSGRVSKCGDAMMRTALFEGAQALLVCTKKWCSLKAWGMAIARRRGTKRAIVAVARKLAVILHRMWLDGTEFRWGKEASAAA

SEQ ID NO: 346589 - protein, 310 aa, unidentified
MERAYVGIDVAKDRLDVHVRPGGEAFMVARDHEGLSSLVERLRGLAPALVVLEATGGFEVTAAAALSSAGLPLAVVNPRQIRDFARATGKLAKTDALDAAAIAHFAEAVHPTPRALPDAQARELGELVARRRQVIEMIVAERHRACQLHSGRLQKRIARHLSALQKDLTEIEDDLDESIRGTPVWREKEDLLKSVPGIGNATARTLLADLPELGTLDRKRIAALVGLAPFNRDSGSLRGRRTIWGGRASVRAALYMAALVACRHNPTIAAFYARLRAAGKPAKLAITACMRKLLTILNAMIRDTRPWQNA

SEQ ID NO: 346590 - protein, 369 aa, unidentified
MTRALYVGLDVHKDTIAVAVAEDGRGGEIRFHGTVVNSADAVLRLTKTLTKQGNTPSFCYEAGPCGYGIHRLLTKLGFECAVVAPSMIPRKTGDRIKTDRRDAEMLARLWRAGELTPIWTPDEEQEAMRDLIRTRKQAVDAVKTAKQQLLSFLLRHGLRYETGKYWTQRHRRWLAEMRKFRFPHQQLVFEELKRTVVQNEERVATLDQAIDDAIPRWHFAPVVDALRALRGVNTTIAATVVAEIGDITRFSNPRQLMAWLGLVPSEHSSGSTTRRGRLTKTGNALARTMLVEAGWSYRHPPKEGHPYLKRSAHLPQHIKDIGWKAQTRLCKRYRDLSRTGKPQPRVLAAIARELAGFVWDIARKTPLAA

SEQ ID NO: 346591 - protein, 341 aa, unidentified
MQIIGCDFHPSFQHIARLDTESGEYEQKRLLPEEAAEFYRQLAGPVLVGMEACGNTLWFEQLLSACGHQLWLGDAGKIRAMAVRKQKTDRRDAELLLQLLRERRFPRLWVPSAEQRDLRQLLLHRHKLVGMRRQIKNQLQHLALNQGVQQKRRLWSAAGRQRLEQLSLTGWTEQRRDELLSLLDDLEPRIAKLDQAALAAAQQHAVARLLETHPGVGPITALAYALTLGEVERFAHSRQVVSYLGLNPAEHSSGGRQHLGAISKQGNPMLRSLLVEAGQSAARLVPELQRAYQRLKHRKHSSVAKVMVARKLAVRLYWMWKTEQPYAARMQSSPSHPVAEP

SEQ ID NO: 346592 - protein, 400 aa, unidentified
MISVGIDVSKGKSTVCVLKPYGEIVCRPFEMQHVEKDLEAFHNLLQKLDGEIRIVMEATGIYHLPILIFFHNKGYFVSVINPFAMKKYAKDNSIRGAKTDKLDSIMIANYGIEKWFKLQRYEGDEELYAELKLLGRRYRYYMELRVKALQELTHILDYVMPGIKKLFSSWNEANGKDKLSDFVERFLHFDLITSMSLETFTDEYLVWAKEKKYHRSRSKAETVYELASSGIPTLPSSTPSTKMLVQEAISVLRTVDSSLSLIVTRMQVLAKSLPEYSTVREMGGVGDVLAVKLIAEIGDVRRLHSAKALIAWAGIDPPPYESGQFIGSKRKITKRGSSTLRKIGYEVMRVLKSHPAPKDDAVYHYIFKKDGEGKSKKHAKIAGLNKFLRIYYARVIAVYQ

SEQ ID NO: 346593 - protein, 426 aa, unidentified
MSVRDYNKQVAKRQRIKSTTLVVGIDVGKAYNAVGFMNKEGKVLGSCSKVYNSREGFEQFVKMVEDLKAHYGLKDVLIGMEPTGHYWRKLAYFAKEHGYEVRFVRTTALKHHRELDESASAKSDPRDALTVTNITREGKYIDTVIEDGVLRQLRTLAKARERLLRYSVSAKNSLHAALDDYFPELHELFWSMGSRSLWAVLDRCPFPEDVRSIKVSTLKGLIVQSSRNRAGSLQKAKALYQAATKSIGLRPIGRADRYRVQICLEEVKRRVLTLKSMDQQIKSMLKEIPAAPYLLSIPGIGALSAAVFLGELGDPAHFHHARQIVKYAGYDPQESDSGSWVSRRFISKKGRWLMRKYLFFMSMRVVVLTNYFKTYYERKLETKNRVGQLPRRKEILCAVAIKLIKVIFALLRDKRNFEDTVAYSVG

SEQ ID NO: 346594 - protein, 367 aa, unidentified
MTVTIVDAARPVTGGVKTHLDVNVAPGPVTGGVDTHLDLNVVAALDGIGGLLAVAEFPTTAAGHRELLGWLSGFGPVARVGVEGTGSYGAGVARFLRAAGVAVVEVDRPNRQARRRSGKSDPLDAVEAARAALSGRASGAAKSRDGNVEAIRALVVAKRSARSAKIQALNQIRHLSFTAPEQLRQRLAGVSRHHLAARAAALRPATGEGADPVTVATKTALRILGRRVLALDEEKARIDALLSALVTQTAPGLLAVFGVGVDTAAALLVTAGDNPGRLRSEAAWAHLCGTAPIPASSGKVTRYRLNRGGDRQANCALWGIVITRLGNDPRTKAYMARRLAEGRSKPEVIRVLKRYVAREVYHRLPRT

SEQ ID NO: 346595 - protein, 427 aa, unidentified
MKQEDISRIERFRQFRKQIRGSDKYLTVGIDVAKSKHYATFATTQGRIGQKGLVFENNASGFEHLLTQVQFYQDRDGFEQVVFGLEPTSVYQKPLAEFLIQQDYLVVYVTNEAIKDNRRTLDGRWDKHDKKDSANVADLVGQGKCQYYDLPNIHLRDIRNLLLLRKRLKKQLHGCRIRIRNNLVAQYFPELDRLWHQREAENLAIVRWCLSPAKINQLRFEDFFQMVTTGKKGLRQYQRLRKIWEMAPYSIGCRPGQTLELEAQIMVGLVEYIKKQLDQVQKMIEDLCRSFVEYEYLLSIPGFGSYIAATVLAAIGNPLRFNKASELIRLAGFDLSAKRSGKTSSSAVPVISKKGKVELRYALYQAALIASSRTPRFKAYYHRVLEGRQREKGIRTKMRVKLAAKLLVIAWTLMKKREYFDPDCIKI

SEQ ID NO: 346596 - protein, 470 aa, unidentified
MVAVMIGIDPHKASHTAVAIDPAEVPLGQLRVRASAVQAERLLGWAQAWPERAWAVEGAGGLGHLLAQQLLSAGERVLDVPPKLAARVRLLATGNINKNDPNDARSVAVAALRSAGVREVRRDDHAAVLKVWSKRYQDLGRARTQVACRLHQVMCELIPGGVPGEITAGQAERILASITPAEAVQAARWELAAELTEDLRGIDARIRQARTKLAAAVRAAGTSLTGLFGVGPVIAAAVIGDVRHVARFPDRDHFAAYNGTAPIEVSSGGRKIWRLSRRGNRRLNHAIHMAAVTQIRHRHSQGHAYYQKKLAEGKTGKEALRALKRQVSDAIYACLQADARRDAAHVKSPGGQPGNGSDSSAAGSHPGHRLFGQATPGLRHHTTTAASDPAPGPASARGRAGHSSIAATSPSAKPQVQVQRPQRSEDERPGGAASQRPYSAARKARGQGSQAKPQRPKTASRAHENDRRNP

SEQ ID NO: 346597 - protein, 401 aa, unidentified
MKEHYVLAIDVAKGKSMVSLISSCGEVLISPYEINHNLNNFKNLDERIKKLNVFNDTAVIIESTGIYQMPVKRFFKENNYNLYVINPIYSKMYKQNLRKTKTDKEDCLKLAELFFMKDFKEYIDQDQFYLNLNALSRKYNTLIEAQTRLKNEFRNGVYEVFPEYEKLFKKKLIFSNTSLEFIKKYPHADIISNTRIDALANTMAKLNGRHEKYYLKKAKLIKEYASNSYPSVSRNDEKVNNLIITIELLLSYIKQIENLKSKLINKAKRSYMFNLINSIDGIGEFTTSLIIAELGDISRFDNIKQLTAYCGLDPSIKQSGSSINIGGPISKSGNRYIRRILFVTVQNIIPIASRNFPDNDILLYYRKKRNEGKHHYVAVVDSTTKLLRKIFALVKQYQNNI

SEQ ID NO: 346598 - protein, 407 aa, unidentified
MIFVGVDWAEAHHDVHVADEAGKRLGKARLPEGVDGIARFHELVGAHVEDPAEVVIGIETDRGLFVTALVAAGYQLYAVNPMSTSRYRDRHSTSGAKSDAGDAQVLSDMVRTDRHHHRPVAGDSEGVEAIKVLARAHQTMVWSRGRQTNLLRSTLREFYPAALVAFDDLTSGDALEVLRVAPTPTLGGGLSRSKIAAALRRGGRQRRVEERAVEIQAALRSEQLHAPAVVANAMGASVAANVAVIAEMSAQTTRLAEELESGFEQHPDAEVVRSLPGLGTILGARVLGEFGDEPNRYATAKSRKNYAGTSPITRASGTKKTVLARHVRNRRLADAIYLWAFAALTASAGARAYYDSRRAAGDGHHQALRAVGNRLVGILHGCLIHHTTYEEAIAWAHRPESEFGAAA

SEQ ID NO: 346599 - protein, 371 aa, unidentified
MNSILYVGMDVHKENYTLCCYSFDRDKVEYRQTVPSDYRLILKYLEQVRRKYPEEVEFICGYEAGCLGYSLYHQLTDHGVKCIILAPTTMGITNTNRVKTDRKDAANIARCLAFHTYSAVYVPDGEDNAVKEYLRMRDDQKLALKKIKQQITAFVLRLGKQYTGGKSLWTENHLKWLRGLDLTLLEKETLQEYLITYDYLTDKLERLDARIEELARNERYGERVRRLGCFIGIKPHTALSLLVEVGDFRRFEKAPNFAGFLGLVPGEDSSGGGRNRLAITKAGNSHLRRLLVESSQSYPRGTIGFKSKELKKRQEGNPPEVVAYADRANERLRRRYYRMTLKNGAKRNVAIVAVARELACFIWGIMTDEIA

SEQ ID NO: 346600 - protein, 401 aa, unidentified
MAAVRDNAWVGIDVGKTHHWVCAVDADGKTLLSVKVANDEAGIVSLIAAVTALTQQLTWAVDIIGAPSALLLALLAQAGQPVRYASGRVVAAMSAAYVGEGKTDAKDARVIAETARLRRDLAIIDTDTDLVRNLAVLTGHRADLIADRVRMINRLRDLMTSVFPTLERAFDYSSHKGALVLLTGYSSPDRIRRIGQTRLAAWLRTRHVRGFADVAARAIAAAKAQSVVLPGQDLTASIIAELAGNVLRLDERLKSLDDQIEELFQQHPQAAIIQSMPGFGPFLGASLLVGAGDLRAFPNAGHLAAAAGLVPVPNDSGRRTGNLHRPLRYSRPLRHVCYLSAQTSMMRAGPNRDYYLKKRANGRTHSQAVIALARRRIDVLWALLRENRTWTATPPQLAQAA

SEQ ID NO: 346601 - protein, 429 aa, unidentified
MNYNTQNAKIASITEKTLIIGIDVGSETHYARAFSWRNYEYSKKPFAFSNDEAGFAAFKEWMDDIAEKHGMEVIIPGMEPTGHYWLNLGAYLQEQGMKPVHVNPHHVKKSKELDDNNPSKNDRKDPKTIAGLVNEGRFSYPYIPTGIYAEIRNLSNLRIQTQEEITRIKNRMARWFSIYFPEIKDVYRNPDAVSGLMVIKQAPLPCDIKELGVDGVNKIWRDARLKGAGIKRATTLVTAAEHSIGNTEAPRSARKEIRNLLEDYEGYKKRMDELMEEIEKTLSEIPYIDKLMEINGIGIKTVSCFIAEVGDIGRFDNPKQVQKLAGYAIVADSSGKHNGESRISHRGRKRLRYALYEAAISVIGKNKEFKEIHSYYRRREKNPLKKMQSVIAVACKLIRIFYTILTKGVDYDGQKMLNDIVRPEIQPAA

SEQ ID NO: 346602 - protein, 421 aa, unidentified
MSIEKCKVCGIDVHKSFLVATILDREGNYETKKIHQDLDSLLGLREWIIYQACDSVAFESTADYWRPLYTVLQDKVPVTVANANHIKHVPGRKTDITDSRWIAQLELNNLITPSRIFSGESYDLRSLTRSRELLVQNRTELKNKIHHLLDSASIRLSSVLSDLFGKSGSIILKGIVENKPFEEIVNSLPKRMRGSADAISATLPLSIPPVCLVLLQSYLTLIDHHDEEIKLLEGRIREVLQNKSREQKILTSIPGVGFIGASTLIAEIGDIHDFEDADKLAKWAGLTPSVYQSANVTRTGSITKQGSRHIRWILVELAHVAIRSPGRFRTFFERLMPKKGYKKAIVAVARKMLRIVWHLLVNDEVYVDETPRSKQVKLPKMPPKIQKIGINPIFRRSALKNNIFHKASPTIRVFSANHLLN

SEQ ID NO: 346603 - protein, 358 aa, unidentified
MGEIVKKQKVNVKGKVVSIGIDVHKVSWSITAIVEGVVVLSVTSRPTYTECKKVLARFEGATIRVAYEAGQAGFDLYDKLSADGIECIVTPPSLIPTESGNKVKTDKIDSCKLAKLLESNMLKKVYVLSAEERAHRQLVRTRRQIANHRAELMCQIKSLLMFHGIETPCVGSQQWTHSYVTWLRTVDLGDQYLARSLKVLMDLFDYLTEQKKQLTHAVEHLARTERYANKVRLLTTIPGVGSLSAMEILTELQDVGRFQRGDQLAAYLGLTPSQYSSGERIRMGHITHTGNGRVRSTLIESCWFLIAKDPWMRTKYLNIKIRRGGKRAIVAVARILSLRIRRMLVDGVAYKSGQPAAA

SEQ ID NO: 346604 - protein, 324 aa, unidentified
MSKNTNYFGIDISKDVFDVTDSKDHHYQFTNNHQGFKLFLKKLTSSSHCVMEATGYYHYQLAYYLLEYSIKVSVENPLSVKRFIQMKLSKIKTDKSDSKMICSYAENVELRLWQGNTKNQIECLQIARLLSVYTKQSTMLKNKLHGEDVLGNPSMFVVRSLRRNLKQVQKELKTLELKLVNLVRIDNQDLLTRLESIPGLGRKTAIMLIVLTDGFERFTKASELCSYAGLTPIIRQSGSSIRGRARISKIGNKKLRNLLFMCSFTACKNNKACREIYERITNKGKSKKLALMAVCNKLLKQSFAIAKSGLVYDESYRSVLNTQS

SEQ ID NO: 346605 - protein, 275 aa, unidentified
MDSTKYIDSTKYIGMDVHKETVSIAVMNSAGKLVVESILETKAATILQFIQGLRGNLHVTFEEGTWAAWLYDLLKPHVTKIVVCNPRRNALLKEGNKSDKVDARKLAELLRAGLLRPVYHGENGLRTLKELSRSYLTISKDLTRVMNRLKALYRGWGISCEGATVYAPRHRSEWLGKITEAGVRRRAEFFYQQLDALQALRQQVRRDLLAESRKHSERKLLRQIPAIGPIRAALLMALIQTPHRFRTKRQLWAYSGLAMSRRTAPRRRLTVPGAS

SEQ ID NO: 346606 - protein, 405 aa, unidentified
MNAVGIDVSKGKSMVAIMRPFGEIVSTPFEIKHTASDIHSLVELINSVEGESRIVMEHTGRYYEVLAHQLSEANLFVSAINPKLIKDFDNDSLRKVKSDKADAVKIARYALDKWQNLKQYNVMDELRNQLKTMNRQFGFYMKHKTAMKNNLIGILDQTYPGVNTYFDSPARSDGSQKWVDFASTYWHVDCVRKVSLNAFIDHYQNWCKRKKYNFSQSKAEEIYGKAKELVPVLPKDAITKLIIKQAVDQLNSASTTVESLRTLMNETASKLPEYPVVMAMKGVGTSLGSQLMAEIGDVSRFTHKSAITAFAGVDPGVNESGSYEQKSVPTSKRGSSDLRKTLFQVMDVLIKTHPQDDPVYQFLDKKRAQGKPYYVYMTAGANKFLRIYYGRVKEYLSSLSSLPKS

SEQ ID NO: 346607 - protein, 414 aa, unidentified
MSLSRWVGRAIALDVHRDFCVVAICEDGRVRSGARVPSTPEGLTLFAESLMPSDRVVLEVTGSCWEVARILEPHVERVVVVSPDDTGITRARAKTDRLDARALARLLWSGELESVWMPDGRCRVLRRRLARREQLVHARSRAKNEIHAVLQRRLQGKPPCSDLFGVKGRRWLAGLQLPPEERESVDAGIRHIEFLDREVAAVERLVAQQALNWPEIRRLMTVPGVNLICAATFIAAIGDVSRFFTSRKLVAYLGLDPKVRQSGEAPARSGRISKRGSAAARWALVEAAWSVVGQPGPLHAFYDRTRARRGHGKAIVATARKLAVLFWCMLRRGEDYAHQQPSLTKKKLRRLEITAGAPKYAKTARGVWSTNVAIRRAERELAAQAEASYKRLVTDRQAAAPTRKVGASVTAERA

SEQ ID NO: 346608 - protein, 374 aa, unidentified
MKHYSTLYVGMDVHRNSFTLAHFALDMKQPTGIVQTDNDYRRIVAYVHRLREKYGQETRIVCGYEAGCLGYTLYHQLTKAKIECIILAPTTLPSPRGGKRVKTDGRDAANIAQCLAYGTYSPVHVPSAGDEQVKEFIRMRNDHCQMLKKLKQQILSFCLRHGYLYSGTQSNWTQAHMKWLDALQPEGLLGDTLEEYLTSFRYHQNKLERLDRRIEEISREERYREPVGRLCCLLGVKPLTALSVVSEVSDMHRFSTAEKFASYLGLVPCEHSSGNSVRRGGITKAGNVHVRALLTEAAQSYTRGKVGYKSSALKKRQSGQSETVIAYADRANERLRRRYYQMTLQNGKRGNVAKTAIARELACFMWGLLTDHVA

SEQ ID NO: 346609 - protein, 416 aa, unidentified
MNAVGIDVSSRKSTVAVLRPLGEVVCLPFDVSHDADGLASLAEKLKALDGETRVVMEHTGRYYEAVAKALHEAGFFVCAVNPLLIKEYGANSLRRVKTDKADAVKIARYALDNWADLRDFTPMDAIRYDLKTLNRQFQLASKQRTASANNLIALLEQSFPGIRKCFDSPVRSDGTQKWVDFAHSFWHVDCVRKQPFAAFCERYRKWCKRHAYFFKLSNAEEVYALAKRAVVLTPKSKVVKVLVQEAANQLSSISRSVEVYRAEMDRLAAMLPEYPVVMAMYGVGKSYGPQLMAEIGDVRRFERKQALVAFAGIDPMPNQSGDKNVRSNKSSKRGSPYLRKTLFNVIRTYLQCAPQDEPVFQFLNRKRAEGKPFYVYMLAAANKFLRRYYAKLRDFFASLDTLQSVDPIPATLKASL

SEQ ID NO: 346610 - protein, 334 aa, unidentified
MSKIAVSVGLDYHPGSVQICVLDEHGKVLTNGTRENSSQELNRVARLYGEQIQAAIEVSPGAANLADELVTRFGWSVDLAHPGYVARIKQSPDKTDFGDARLLADLTRVGYLPKVWLAPLDVRELRELVRYRQQLVRERRSTKLRVRALLRNQRLNGPGNAWTKAWLEWVRNEAALPDHSRWVMTQQLSNLERLQREIRQVEQRLEEVTKEDVVFQKLLEQEEVGLVTAVTLRAEIGRFDRFRSGKQLCRFCGLSPRNASSGARQADAGLIKASNPELRCVLIELGQRLMNHSDKWSERSAEMRARGKPRSLIAAAVANRWLRKLYHEMKSTHE

SEQ ID NO: 346611 - protein, 354 aa, unidentified
MNQQEPTPEQYVGLDVSLETTAVCIIDANGAIIWRGKCASTPEAITQTIHRHAPGVVRIGLETGQLSNWLTLGLRRRQLPVVCLDARHVKAALSLQINKTDANDALGLAQIVRSGWYREVAVKSMDAHTLRLLLVARAQLVSQRQAVANTVRGLLKTFGLRVARCSKGLFASRVREAADGNYTLLAIVEPLLTAWQALREQVAVLDRQILARAKADKTAQRLMTVPGIGVVVALAYSAVIDDPVRFRRSSSVGAYIGLTPKRHQSGEEDWSGHISRRGDSLLRSYLFEAATVLLCRHPRDSALKRWGLALAKRIGMRRAKVAVARKMAVLLHRLWRRGQEFAWNMPGIPSGAAA

SEQ ID NO: 346612 - protein, 403 aa, unidentified
MIFVGDDWAEQHHDVYLMDEAGRRLASRRLPEELAGIRQLHELIAAHAEEPDQAVIGIETDRGLWVAALIAAGYQLYAVNPLAVARYRDRHHVSGAKSDASDAKLLADLVRTDRHNHRLIAGDSADAEAIKVLARAHQSLIWARNRHTNALRNALHEYYPAALVAFEDLAHGDTLGVLDRAPTPQQGAHLPLGTIQSALKRGGRQRNIAARARQIQAALRSEQLVAPAPVTAAFAATTRAAVGIIAELNRQISELEATLAEHFEKHPDADIYLSQPGLGVILGARVLGEFGDDPNRYTDAKSRKNYAGTSPLTVASGRKRAVLARHVRNRRLYDAIDQWAFCATSSSPGARAFYDQHRAAGDTHHQALRALGNRLVGILHGCQRHHTVYDEHTAWDHRTQAAA

SEQ ID NO: 346613 - protein, 328 aa, unidentified
MSYVGIDISKDSFVVAFSSASKSKTITYQNDDKGIEKFINTLDKEQHHCVMEATGNYGVNLLYHLCEQEIKVSLINPKQSNFLSKMKLSTAKTDNKDARLLVEYGEKMNPEVYKMPSDKIILLKQKQTVLTHLIKQRTASKNQLKSLELLNKKDNLAIDMLKNNIDNLDKLINNLEKDIVSITEEEFEKQVQLLTSIKGIGKKVATTLVIITNGFSFFENPKQLSRYIGICPTYQQSGKSLNYNGHINRNGHSTLRGQLFIASWSAAKYNSSCKALFERLREEGKPWKLAQIAVCNKLIRQAFAVIKSGVAYIDGHIPTLSAPMQTAI

SEQ ID NO: 346614 - protein, 410 aa, unidentified
MECLVERCAGLDIGKADLKACVRVPGPRGGRRAETKTFATTTGALLALREWLVEQRVTVVAMEATGDYWKPVYYLLEDQFEVQLLNAAHMRNVPGRKTDVSDAGWIAQLVEHGLVRPSFVPPPRIRRLRDLTRYRSALIGERTREKQRLEKVLEDAGIKLSVFISDVFGVSGRAMLAALIEGQRDPRVLAEYARARMRRKIPALVEALTGRFDQHHGFLCRMMLAHIDSLTAAVAELTGQIEAEIKPFQAVADRLDTIPGVNQRVAQTIIAEIGVEMDRFPTAAHLASWAGVCPGNNESAGKHHSGRCRKGDSWLRAALGEAAAAGIGTRNSYLQAQYRRLAGRRGKKRALLAVGHTILVAAWHMISNEVDYQDLGPAHFVTRIDPVRQTRRLVHQLNQLGYQVQLNPAG

SEQ ID NO: 346615 - protein, 403 aa, unidentified
MHDDTPAYAGIDWATRAHAVCVIAGDGSVLEEFEIGHERTGIETLRRRLVGLGVARAAIERPDGPVVEMLVEHGFDVVVVPPRVVKSLRSRYSLAGNKSDRSDAFMLADVVRTDGHRLRALEPDSGATRALRCAVRTRKELVGHRVALVQQLEAHLERAFPGGRCVFADTHSPIALRFLARFPSQTRADWLSERRLAAWLAANGYSGGKDPAVLFGRLRDAPEGLRGPEAELLGVVTLALVSAIEGVAAQISELESRITEALSAHPLAPVFQSLPRSGTVRAASLLVEIGDCTARFPTPDSLACLAGVAPSTRASGRHHAVVHRFASDKWLKNALCDFAQDSVRANPWANDVYRRARARGLRHPHAVRVLARAWCYVIWRCWQDATPYDPSVHRGVQRLLEAA

SEQ ID NO: 346616 - protein, 376 aa, unidentified
MKDNTKYVGLDVSKEKIAVAVADEGRAEPRYYGMIPNSPAAIRTVMKKLGNPDNLKVCYEAGPTGYGIYRYLFSLGIDCEVIAPGLIPKRPGDRVKTDRRDALRLATLYRAGELTPIHVPTEEDEILRDLVRAREDTKEDLLRAKQRLTKFLLRRDINPPNTIKKKWTYAYREWLDKLSFESSTLNIVFQEYLQQLVELEQRMQRFEKEIQKQAEEGFHAPMIQALQVLRGISVLSATALVAEIGSFRRFKKAGQFMAYNGLVPSEESSGEIRKQGKITKTGNKHVRWLLIESAWSYRYKPVVKGNLKKRQEGQPASITAISWKAQQRLHNKFNRLIGRGKAPGKAITAVARELAGFIWAIANEVELARDKEKNAA

SEQ ID NO: 346617 - protein, 338 aa, unidentified
MEQITTIGLDLAKHVFQVHGVDAAGKVVVRKQLRRAEVLRFFAAVPPCLVGMEACGTSHHWAREVTKLGHTVRLMPPAYVKPYVKRGKTDAADAAAIAEAVTRPTMRFVAVKTVDQQSVLMLHKLRDLLVRQRTMLINALRGHLAEFGIVAARGPGGVNAAIAALHEAQDGLPDLARQVLHGLIDQMRATGGEIAKAEKRILGWHRTSEASQRLATIPGIGPITASAMAAAVPDATLFRSGRQFAAWLGLTPRAHSSGGKQRLGGISKQGDGYIRRLLVVGATAVIRLARQDNASKTWAARLLERKPARLVSVALANKTARIAWAVLARNQSYTAPAV

SEQ ID NO: 346618 - protein, 344 aa, unidentified
MTSIDYIGLDIHKKTISFCAKAQDGTILDEGTIPARRDTLRAWAKARPRPWIGAMEATLFTGWIYDLLKPLAHELKVAHPAMLKAITAAKKKNDKVDARTIADLLRCNLLPECYMALSAIRDLRRVLRYRNLVVRQAARMKNRIAGLLMETGTPYNKERLHGRAYFSELLGSLREVPRSVVELLKLSRGQLEFFATIQRRLLKGLCEHPGLSERVARLQTIPGVGEIMALSWALEVGEVNRLPSIAQAASYCGLTSTQHNSAGKEQRGPISKQRNKHLQTILIEATKLAPRHNPQLAVVHERELQRGDRNQATLAVARKLVAYLMAVDKSGKPFAMRASSAEAA

SEQ ID NO: 346619 - protein, 346 aa, unidentified
MEHYVGLDVSLKLTSICIVDRTGKVEREGVVASDPEAIATFIKLHAPHVVRIGLETGATSTWLWTELNKMGLPVICIDARHAKAALKMQINKSDRNDAVGIARIMQCGWYKEVCVKDLDSHATKALLVSRALLVKIKRDIENQIRGLLKNLGLVIGRAKMNMFAVRAAQLAEDRSELFAAVDPLLKARAAVEQQIADLDRKVLRLARNNAQVRRFMTAPGIGPVTALCFLATIDDPARFKRSRSVGAYAGLTTRRYASGEIDWTGRISKCGDKMLRSYLYEAANVLLTRVAKWSALKAWGVKLAKRSGLRKAKVAVARKLAVILHRMWIEGTEFKWSSKEAADQPA

SEQ ID NO: 346620 - protein, 414 aa, unidentified
MTEQLQIAAGFDLHKSFLIATILTFTGEKIVERFNRTQPGLMALKNWIVTHNVQAVGCESTSDYWIQMYDLLSPICNVIVGNARDMKALSHKKTDKIDSEFIATITLKGMIHPSRIFPSEHREFRSTIRLRHKLVQKRSSIKNEIHHILDSELFRLSSVLSDIFGKSGTLIMRGILNNIAIDDIVSLLPASVTKKEEALREILETTLSDGALERLASCLQIMKILNEEIASLTKISMNYAVANFPREFEILKSVPGVGDIVAITLLAEIGDVRDFSSGDKLASWLGMVPRVYQSADKLRTGSITKRGSRVARWILIQAAHAAVKARENDLKTFYSSKKDIIGAGKAIVSVARKMVVIIWHLLTNDEIYKDTQYQSMKQSKKVYIKIPKKTSIEEVLRLLSEAAVILREPDPETG

SEQ ID NO: 346621 - protein, 425 aa, unidentified
MKGTQNEKISQIKFETLVVGIDIGKETHYARAFDYRGIELARLLKFSNTDQGFQRLEQWMRDICKQQEKTEIIAGFEPTGHYWFTLGDHLKRQGYKLAIVNPFHVKRTKELDDNSPTKNDRKDPKTIAMLVKDGRYREVYIPDDIYQELREAVSERERLQEQLTSIHNRVVRWLDIRFPEFTTVFKDWRRNAALITLRSFPTPEKVMEMGVDKIVETWRKQMKRASLKRAEALVKAASRSVGRTSGKVASEASLQNLLAEYDLYCQQYDKQEQLMQDLLMQVPNADKLLDIKGVGLITAATFVGEVGDISRFQDPRQIQKLAGLNLVENSSGKHKGKTTISRRGRRRLRHSLFFSMIAMLGKNQEFRLLHQRNLTRENNPLNKMQSIIALCGKLIRVFFAILTKGVDYSPEKMLGDMEQSIRVAA

SEQ ID NO: 346622 - protein, 423 aa, unidentified
MTAAPATSMPTAMPTIGPGAGWVVEFEVASVIGGIDSHADTIHVAAIDVVGRDLDDAEFPTTPAGYAAALAFLGSFGVIAVIGIEGTSSYGAGIARAAQAAGHAVREVTRPDRSERRRVGKSDSIDAYAAARAVLAGRADAAVKDETIEAIRALNNVRSSAVKAATAAMNQIHSLLITAPAMVREKYRGLKGDKLVDALAGCRPDTVIDTTTRVVLTGLRMLAKRHQYLTAQTEDLEQQLRDLVATVNPTLISARGVGPITAAQLLITAGANPDRLRTEASFAALCGVAPVQASSGKTRRHRLSRGGDRAANCALHTIALSRLQHDPRTREWADRQRARGKQGLELLRILKRAIAREVRHHLLDPHAVPIATDLRPLREAKKISLKAAVEAVGTNQIHISRIERGITHDAAFAQRYRNWLNSA

SEQ ID NO: 346623 - protein, 337 aa, unidentified
MLVKDLSTKIHVGIDVSKLTLDAFILERKLHRKFKNNSKGFTSLFQWVKKQSRTAPDTILFCFEHTGLYSLQLALFLEENGLFYSMIPPLEIKNSLGLTRGKNDMVDSMRIADFSLRYEDKLHISRLPARKIRNLHSLLTLRDKLAKNMRGYIITYNESLRVMQPDDFPELFCGYRNTIAKLKEEIGNVERSLKAILKSDTRLWTTYKLVTGIKGIGLIVASYMIVYTHNFTRFDTWRKFACFSGIAPFDHESGTSVKGKTKVSPIANKRLKTMLHLSAICAIHTDTELKEYYHRRLAEGKPKMSVINIIRNKLVSRAFAVVKRGTPFVDIKRYMDV

SEQ ID NO: 346624 - protein, 403 aa, unidentified
MKHVIAFDVSMGKSYMVIYNAQKQCVFESEIKHSKPEFEKLQEKIHELADNTGELPEIVFESTGIYSRQLERFMQDNQYTYCLLNPLEAKLQCDSLRIHKTDRSDAHRLALTHFTVTRRVSNGTINSFHQLKSLSRWYSELDSELSIIRGRMHKVIQLTFPELERMFTSKSDLFLNFVQLFPPPDCVLDLSKTIIKNRIRANTNKKISNITAEKKAIQIIEIAKTSYPAVSQNDVLCDQLKLYARRYQELLHQKECCINKMVYIAEQRAEYGIILSLPGIGPNTAVRLMAEIGDITRFNNNKQLNAFAGIDIRRFQSGKTFYKDKINKRGNKHLRKLLFLIIQNMIKQRRYGQNHIVEYYDKLKTQPYNKCHKVASIACVNKFLKLLFHLITHDIHYDYRLTA

SEQ ID NO: 346625 - protein, 364 aa, unidentified
MTVSGLTPSEPTKEAPNIMLHVGLDLSRRRLDYDLICEDGSRLERGAAPPDADGLRGLAARLDAYREPICAAIESMNGARFVHDRLEEQGWVVEIADAQKVRGLAPLACKTDRIDAWVLAELSRRDLVPKVWLPDPAVRAERERARFRLHLVHHRTALKNRVHQTLVAFGVPCPVTDLFGAKGRELLEHLALPDPWAQTVNASLALIDDLDGQIIGCERELRALGAKHEYVPLLMSAPGIAWVLGYTIAAEIGDIHRFASPAKLCGYTGLCPRVYQSGERDHRGSLAKNGPTYLRWALIEAATHAARSPVYHERYERTAQRLGRQRGKKVARVDIARKLAEAIWHMLTRNQSFAPAGAALPLAA

SEQ ID NO: 346626 - protein, 413 aa, unidentified
MRRVIGMDIHRTFAQVAVWEEGRLHQAGRVEMTRTALEGFGKTLEPTDEVVVEATGNAMAVVRVLSPSVARVIIANPLQVKAIAPAQVKTDKIDAGVLASLHAAGYLPEVWTPDAATERLHRLVTRRDQVVRHRTRIKNEVHAILHAHLIPRCPHADLFNQRGRAWLSRQPLPDDEKAAIERHVRELDRLGEDLVLLDREVAQSVIADPAVARLTTVTGINVVVAAGLVAAIGDIRRFASPQKLVSYVGLNPRVRQSGLGLAQHGRISKVGRSHARAMLVEAAWTAAKAPGPLHAFFVRIRARRGHQVAAVAVARKLVVLRWHLLTKQVDYLWARRPALVAAKKRGLELKAGQPVRKGNQPGPAHAYNVKALRDQEMAIATQAERAYEQFVAHWQPRGPGHGVRERLKPARYE

SEQ ID NO: 346627 - protein, 347 aa, unidentified
MNKNWFIGIDVSKKTLDASIFVADVVINKFPHMQVRNDKEGFKELLKWLKEQGVRPQDALIGLEFTGYYSDALELFLTRKKLSYTMLPTTVVKHYQRGTRDKNDKTDSAKIADYLFRFHDTECIKLRVLPSKPMQVLKALKSERKFYVRHRTDCENRQKVAKSKDEQKNLQKIIDLYDKEIERIEQKMADVVTSDEEIYLTYMRLMSIPGIGPVNAINTIANTQNFTAFETARQYAKYVGVAPSEHSSGTSVRWRGRPSPHADLQAKADLSMAAMRAVEFSFEMSVFYEQKLGNRPDDKDVKRKALNAVKFKLIRQMFSVAKQHRNFKPLEQTQIQAEIHNTDQRVN

SEQ ID NO: 346628 - protein, 411 aa, unidentified
MIKENFIYVGIDLHKETHTAVMIDCYNQKLGEITFPNRPADFPKLVAKVKKCNTDGKTIVFGLENAYGYGRALAVWLIDKGYLVKDVNTAISHRQAKHRGAMYRKSDSDDAEAIALATLNMLDKLPDAYPNDAYWSLGQLVHRRDNIMKQRTRLVNQLHEQLCIAYPSYKQFFNDISRPTALYFWEHYPSRKYLKGKSVEDLRAELVPVSHNKCSTRTCEKILDAIAGDKVKNNAYQDARDMVTLSIVSDLQHYDKQLAEVDKMLEQMYKMLGCTLTTIPGVNVITAVKILAEIGDIKRFSNANKLAQFAGIAPLHLSSSGKGKDLATKQGNRRLQATIYFLAIQMVHISSKGTPRNPVVRAYYEKRKAEGKTSQQALICISRRLISIIYGMLKSGTEYRMPVMENTGETV

SEQ ID NO: 346629 - protein, 315 aa, unidentified
MNTSINSYVGIDVSKDSFDVCVLPEKKFFKLKQDVSGRRELVSHLPSPGDCLIAVEATGGYERLLVAELVDAGHHVAVVNPRQVRNFAKGVGILAKTDRIDASVLARFAHDVQPRCLGQTTEKQGQLEQLVVRRRQLVGLRTAEKNRMETVTAKPVRKSLQQTIDHLNKQIQRIDKEILALVESHDEWRDKTNLIQSVPGIGPVAGASLVAELPELGQLNRQQIASLVGVAPMNRDSGRFRGQRAISGGRTSLRNVLYMAALTARRYNPVIRAFADRLAAHGKKAKVILTACMRKLLVILNTMVKNNTQWNPQSN

SEQ ID NO: 346630 - protein, 366 aa, unidentified
MTISVLNHRLTPREYDIFAGLDVDKMSISITFLNHDKQIKSMQIPHNAQNLLAYVGKQFPSQKVAFAYEAGPTGYGLYDELVKHGHRCLVVSPSMVPTAPGQRVKTNRLDSIKIAEGLRGGQLKSIHVPSSSYRELRHLTGLRETFVRQATAAKCRIKALLLFEGITFPDAPAGGQWTQSVLKQLKNLSCQGAVRFKLDSLLLSLEFTSKQVVSTTKQIRSFCSQDAQIEKCIGHLTSIPGIGRIVASYLLGRIGDYREMQNVRQLAAFLGLAPAENSTGDTVRKGEITRSGDSRTRNKLIQSAWAAIRRDPELAEFYKRIYQRHPKDRASRKAIVAVARKMTTRIYAVLTQQRDYFIHDVAGSAL

SEQ ID NO: 346631 - protein, 402 aa, unidentified
MNAVGIDVSKGKSMVAIMRPFGEIVSAPFEIKHTASDINSLVELINSVEGESRIVMEHTGRYYEVLAHQLSEANLFVSAINPKLIKDFDNDSLRKVKSDKADAIKIARYALDKWQNLKQYNVMDELRNQLKTMNRQFGFYMKHKTAMKNNLIGILDQTYPGVNTYFDSPARSDGSQKWVDFASTYWHVDCVRKMSLNAFIDHYQNWCKRKKYNFSQSKAEEIYGKAKELVPVLSKDAITKLIIKQAVDQLNSASTTVESLRTLMNETASKLPEYPVVMAMKGVGTSLGPQLIAEIGDVSRFTHKSAITAFAGVDPGVNESGSYEQKSVPTSKRGSSDLRKTLFQVMDVLIKTHPQDDPVYQFLDKKRAQGKPYYVYMTAGANKFLRIYYGRVKEYLSSLPES

SEQ ID NO: 346632 - protein, 342 aa, unidentified
MQHLAIDLGGTKSQICARSPDGQIVQERTVQTASLGAFLKRQTSSRVVLETCSEAFRVADLALSHGHQVRVVPATLVRSLGVGARRIKTDRRDAQVLSEVSCRIDLPSVHVPTEVARRRRSMCTMREELLASRTALINCVHGWTRTQLLKIRSGDAMTFPKRIRDAALSTPDGLPEYVERLLQVIESLNAQMHPADEELLKLAEEDAVCQRLMSVPGVGPVTSMRFVAALDDRARFPSAHAVEGYLGLTPGENSSSERQQRTGITKAGPAPVRRALVQAAWNFRRLRPLDPISQWAKQIELRRGKFVATVAVARKLAGVLFAIWRDGSTYEPNHRAAEQRRT

SEQ ID NO: 346633 - protein, 346 aa, unidentified
MTIVERDRTVIGGVDTHLDIHVAAALDPIGGVLGVESFDAGPRGYKAMLEWMGAFGTVSRVGVEGTGAYGAGLGRFLRKAGVEVIEVDRPNRQVRRTQGKSDPADAVEAARAVLSGRATGAPKSRDGNVEAIRALLVAKRSARDGRLRAIHQMRQLSYTAPDQLRCRLKGLSIKAFISEAAAMRPRASGDTVLYAAKVALDSLGRRVLDLEDETAGLDELLDELVRATAPEMLELFGVGIDTAATLLVTAGDNPERLRSEAAWAHLCGVAPIQASSGKVTRHRLDRGGDRHANQALWRIVMTRIAWDPRSREYMDRRTKEGRSKREVIRILKRYVAREVFKHLPRG

SEQ ID NO: 346634 - protein, 464 aa, unidentified
MLLRLGIDVACRAAHQVSLADEQGRFVWTGRRFRTTPQDLARLWNMLPEGTDPADVLVVMEPTRNAWVPLAAWFRRHGAEVVLVPPERSADLRRYYAKHSKTDRLDSQLLARLPMLHPDGLYAEQGLGPGDALKRAAKLHSTLTHRRSQSLARLDALLEILGPAWHAAIGADLANRTPLKFLAAGYADPYVVKRLGRTRLARFCYRHSRGAWGEPHADALLAAANQTLQLWAGGELDYPDLAEDIAIEARLALQLTEEIKDLDERTTLLLHQADPMGILTSAPGVAAITAAAILGRLGDPKRFDSLAGARAFTGLVPILDSSGLNGRHGGPTKRGDAVLRQALFMAAGQARRIDPTLAAKYQRLMIDAGKHHNSALCHIATTLLTRIIACWRAGQPYQLRDVDGTPVTMDQARTIIAERYAIPKDLRARRKTTADTGTDRRSKESPSAPSTGPSNHNATTPDAA

SEQ ID NO: 346635 - protein, 327 aa, unidentified
MKQPPAPVYVGMDVAKATLQVHLSGHQYEFKNDAKGHAQLAKKLAKLTLPHVICEATGGYERPGVAALQLTHIPVSVLNPAHTLAASKAQGKRAKTDACDAAALTDYGQRYQPAATAPVPPAERTITELALWLKQLIDNCAVVKAQAEHLANPFVVQQHAALLAHYQFQIQTVEQEIKKLVQAQTPFQARVQCLTQIKGVGFRTALLTLVFLPELGSMNRGGAAALAGLAPWTRDSGTMKGKRCIGGGRAQVRPVLYMAALSASRCNPVLAPFCQGLKKRGKPSKVALTAVMRKLLIHMNGELKLLAAKTSLEPSDESNKIKITLAK

SEQ ID NO: 346636 - protein, 295 aa, unidentified
MKYFCGLDVSLNSTAICVVNQDGDIVREGEVPTEPAAIHEWLGKLGLAMERVGLEAGGRTPWLCHELLSLKYPAICIETRHAKAALKAQQVKTDRNDARGIAHIMRTGWFREVRVKSHQSQKLRVALGNRRCLLDKRLDIDSQIRGTLKVFGLKTGKVTPASYEKRIRELVADDAELQVYIFPMLAVRRELILQTMKLEKLILDHVRDDEVCRRFMTAPGIGPLTALAYKTFIDRPQRFAHSKTVGAAVGLTPKKYASGEVDYDGHITKCGDAFLRSHLFEAAKVLLTRSGKPST

SEQ ID NO: 346637 - protein, 418 aa, unidentified
MSDEFEWFMGIDWGSEAHAVCLLDPTGQIRGTRTVAHTAGAVHEALSWVREQTGAEPAAIAVGIETPRGALVDTLIEQGFPVFALNPKQLDRFRDRFTAAGAKDDDRDAHVLADALRTDRRAFHRVRPDDPLIIQLREVTRLREDLQEDEQRLANRLRDQLYRVHAAWLTISPAADEPWLWAILAQTPDPTRWARLSQRRLAAALRAHRIRRVTPEAIRAALQEPRLTVAPGVTDAVATRIAAVVPQLQLVGGQRVAAERRIEGLLEQLASRETADPEPREHRDVEILQSLPGVGRMVTATMLTEATGPLAERNYATLRAFAGAAPVTKRSGKRARFVHMRYACKPRLRQALYHWARISIQHDDAARRYYDGLRTRGHGHPRALRSVADRWLRILVAMLKTRTVYDASRFVQFGAVPV

SEQ ID NO: 346638 - protein, 427 aa, unidentified
MKTENIRLEEFRQLRSEIRGSQKHLIVGIDIAKEMHRAFFGTATGKTLFKRLVFNNSKEGFEKLLTQIDAVMVQNNLSLTVLGMEPTGNYHKPLGEYLIESGYQVALVSGVAVKRNRELLDGRWDKHDTKDSANVADLISQGKCQFYEYPDINIRELRNQLSLKKRFKKQEHGLKVRIRNNLLARYFPEMDRYFKSHMPENLAIVKYSLAPDMIARLDYNEFFDMVTTRRKGLRQHKHLYKIWQEAGRSIGCEAAEGTMFEADLVVEHLKEVSACIRSIDLEIEDICSQIPEYKYLLTIPGFGPAVSSNVVAGIGNPFRFDKVSQVIKTSGYDLSANRSGKNSDKAVPVISKKGKADLRYALYQAAMIASTKNQYFIKYFTEKLRGREGEKGIKTKMRVKLAAKMLVIAWTLMKNKEPFNPDYLKIE

SEQ ID NO: 346639 - protein, 391 aa, unidentified
MIYVGIDIAKDKHDCFITNSDCEVLFKSFTISNNRDGFETLFQKIQSVSDDLTKVKVGLEATGHYSYNLLGFLLDKGLPTYVINPLHTNLYRKSLSLRKTKTDKVDAHTIASMIMSDVNLKSYSDTSYHNEELKSLTRYRFDKVKERAKLKSSVSRLVCILFPELEKLVPTLHMSSVYSLLSEFPSAHDVASAHLTRLIHLLSESSKGRYGRDTAICFRDAARSSIGSHMPAKSLELKHTIKLILELTSEIDEIEAEIKTIMDEINSPILTIPGIGYKMGAMIIAEIGDFSRFDSPDKILAYAGMSPSIYQSGQLDNCYAHMEKRGSRYLRYALYNATKYVCHWDESFGTYLAKKRAEGKHYNVALSHATKKLVRTIYAMEKSGQAYINAA

SEQ ID NO: 346640 - protein, 493 aa, unidentified
MTKSKRRHPERDFTPTHPNAAAIDIGSRMHVAAVPPDRDTEPVRAFGTCTGDLQQLADWFERCGVRTVAMESTGVYWIPAYELLEQRGFEVVLVNARDAKHVPGRKTDVSDAQWLRRLHEYGLLRASFRPKGELAPLRAYLRQRERLLDYSASHIQHMQKALMEMNVQLHHVVTDITGETGMRIIRAVVAGERDPAVLATHRDRRCHASEAEIAAALAGNWREEHVFALGQALELYDAYHAKVVECDLRIEAVLRRLRDAAAKPAGRLPPARHRDKTANAPAFDARAALHAVLGVDLTQIHGLGPSLALKLIGECGIDLSAWPNAKHFTSWLCLAPANKISGGKVLSTRTRRSGSRAAALLRLAAVTVGRTIDGAGRLLSTALRTRRQGQSGDRNGSQDRHPVLQHAATWDRLRRPRRFLLRGQISRPGHRQPPTTREVSRLHAARDAGASVVSQEHSQAPSARTMGHPAQGQQRVRGRDGGRAGRLHAAARS

SEQ ID NO: 346641 - protein, 346 aa, unidentified
MKYYVGLDVSLKEISVCVIDGDGKIKARGTTPADPMAVKSWFKKRSLEPETIVHESGQLSIWLQRGFLELGLPAVCIDARRAHKSLSARLNKSDASDAEGLAQLARTGWFTPVFVRSVEADRLRALVGARERMIRLRKDLEGHIRGVLKTFGIRMAGVTQGKLRRKFRDQLAAAGETDPVLRIMADAFIDIHAMLCKAAADLGRALKTKVETHPVAKRLMTIPGVGPIVSLSFIALIEDPSRFTKSTDVGAYLGLTPKRYQSGEIDWSGRISKRGDKAMRSLLVESASTLIRNVKRFSALKSWAIRLAGRKGFRKAAIATARKIAVLMLTLWKTETDFQWTKEVKS

SEQ ID NO: 346642 - protein, 343 aa, unidentified
MAQQMIIGIDLAKHVLQVCMVTPTGTLKTNTTVARGKLLTFIARPPPALIFMEACGGAHDWARRFCALGHAVRLLAPQYVTPFRRGQKNDPNDALALTEAGQRPHIPTVPIKTVEQQDIQALHRVRERRMKNRTAVVNQVRGLLLEYGIVIPQGIARFRKRLPRVIEEADNGVSFVLRDLLQSLQSDLHALDTRVVEVTCQLTRLSHELEACQRLQEMEGIGPLSATALVAALGNGHDFQTGRQVAAWLGLVPRQQSSGGTTRLGGITKGGNGYVRRLLMHGARSVIGHVRDKPDAKRAWIRQLVTRIGVKKACVAVAKKMARVAWALLHTGEQYRKPVVLLA

SEQ ID NO: 346643 - protein, 382 aa, unidentified
MARQETVGSPRTVYAAIELSKKSWVLGIARPDRDCPSIHRLTGGDIGALVGRLRGATVQDHRIVVCYEAGYDGFWLARSLAKLGIECRVLDPASMQVNRRARRVKTDRIDALALLRALIAIDRGERHVCAVVRVPSVEEEDARRSHRERQRLVRERTGHINRIKGLLFAQGIRGIEPKRRRTRIDFAALITAEGRHLPPRLRQELQREYQRLELVEAQIKIVEQERDTADAQDPIVDSKRRLLCALHGIGPASAAILSREVFARSFASRRQLGSYLGLTPSAYDSGSTTRCQGISKAGNSWARRILIEIAWFWRKYQPDSPLSRWYAKKTADQSPRIRRIMLVALARKLAISLWRYVETGLIPEGVVMARAAPQGGRNVTST

SEQ ID NO: 346644 - protein, 360 aa, unidentified
MSKITRVGVDLAKNLIQVHAVDAAGKVVTNRQLKRDKFIEWCMQLPAMCLLAMESCSGAHYWARKLLELGLDARIIAAHLVTPYRQQGKGGKNDANDAAAICEAASRPSMRFVAVKTVDQQSMLSVHRLREGYKADRTACINRIRALLTEFGLVFPKAPGIECAAQDTLEDASNALSGLARMTIERAQMQWKELDDHIDWCDQRIAAHHKQNEQVRQATELMGVGPVTASAVVATVGNFKQFKSGSQFGAWLGLTPRQNSSGGKNNLGGITKHGEVYLRTLLIQGAKSAVMTAHRREDPISKWVHQLREKSGWQKATVALANKNARILWAVFTKDKPFDAGHISVAGFTTSRHVRSLKTL

SEQ ID NO: 346645 - protein, 357 aa, unidentified
MRNQSDFYGKKVYVGLDVHKKSFALCAICDGVQVGKASMNSCHDGLLTHLANHFKGADITLAYEAGFSGYSLHRFLQGNGITCLVIHAASIEVSSRDRVKTDKRDAAKIAHQLAQGRLQGIRIPEEQEEQNRSLSRGREQLVQLRADIARQIKSKLMYFGLLAATDDRLICESFLKEIEAMKLKKEITFVLRSFANIWRDLSKQIKAFDQELEKQAESDQKVEEVYRSVPGIGKVSSRLLANELGNLKQFSSVDKLYSFTGLTPSEHSSGDTVRKGHISRQGSSRIRKTLVECAWRAVEKDPALKADYERIAVRAGKKRAIVGVARRLIGRVRACFLQECQYKIGYEPKTGENTMAN

SEQ ID NO: 346646 - protein, 420 aa, unidentified
MDQPRELELAACVGLDWADQQHVICLQPTGSVRAESRRLDQKPDALHEWIAQLRARFGGLKVGIAIEQSRGAVIHALMMYDFVQLYPINPKALARYRVAFRVSGAKDDPSDAELLMDLLRLHRSRLRAWLPDSVETRRLQILAEYRRKLINNRIRHTNRITSLLKMYFPHALDWAGELETRQSCDFLQNWPTLSAIQEAGLTQVRKFYLQHHCRNLTLIEQRLAEISSARSLTDDPAIVETLSLAVQIEVAQLRPILDGVARFDQIIAQQFALHPEHDLFESFPGAGPVYAPRLLTVLGQDRSRWTSTADFLCHSGIAPVTRKSGNSHSVHRRLACSNFIRQTFHEFAAQSIRYSSWARAYYDQMRSRGLKHPAAVRALAFKWIRIIYRCWKDAKPYDDQIHVDSLRAKKSPLIKESTQC

SEQ ID NO: 346647 - protein, 362 aa, unidentified
MAEVRSWAGLDVHAAKVIAVTVDSHSGELRAHRLPGDTSRVVAFCAGLPEPAMVAYEAGPTGFGLARALAAAGTECIVAAPGKIERPAQDRVKTDRRDAERLVRLLMIGGLHPVRVPTGQEEALRDLVRAREDVRGDLMRARHRMGKLLLRHGVRYDGAGDNWTQRHRGWLGHVELPDRGAQVTLLDYLGAIDALVVRRDALEQAITELVPGSPWAITVARLRCLRGIDTLSAVGLCAEIGDWERFRRPGQLMSFLGLVPSENSTGEQRRQGSITKSGSRHGRRLLVEAAWHYRRPPARSTALRRRQQGQPAHIIALAWKTQQRLHRTWRRLDTERGKRRTLVAVATARELAGFCWALATAD

SEQ ID NO: 346648 - protein, 385 aa, unidentified
MAPIRMPEAVIGLDVGKSSHWACVATRDGEVLLSAPVANREDDLDSLFGRFPDALVVVDQSRNIGALALARARAAGMSAAYLPGLAAHGAARLFAGDAKTDERDAMVIAKTALGIPDALLPVGDPGPTIAAARALAAQRNFLTCENTRNKNRLRSILLESCPAFEALVDLSDGPQLRLMASLGGAWSVADAGPRRAAALTRGAARGKIEALVRSTASSTRPDASVVAAEDRAVKLLARRISENSAEIEAITAEISALLEGDDTYRCLLTVPGIGPKTASELAISIDIEDFPSHDRLASYCGLAPRNRQSGTSISSVTASRQGNKRLKNLLIFSCNCLTRTKGRWGDYYTRCRERGMSHGKALKALARKRLKVIYAVMRDRVPYAA

SEQ ID NO: 346649 - protein, 414 aa, unidentified
MFAVGVDVSNGKSTVAVMGSKRTVVVKSCEVPHTTDGFAKLAARLHALNGEVRIVMEHTGRYYESFAMSMYQAGFFVSAVNPLAIKDYRQGVDVRKVKTDKADALKIAQFAIDKWDILPHYTPMDTIRYDLKTLHRQFQLSSKTKTALNNNLIALLEQSYPGVNRYFDSPVRPDGSQKWVDFVDTFWHVDCVARVSRNAFVERYRKWCKRLGYNFSEAKAVEIHEDARQKFPLVPKSDTCKLLVREAVAQLNAVSRTVETYRAEMDRLASQLPEYETVMSMTGVGKSMGPQLMAEIGDLRCFAHQKSLVGFAGTDPIKNESGDKVSVSKPTSKRGSPYLRKTLFVIMTILLQLHPEDDPVYQFLDKKRSEGKPYHVYMTAGMTKFLRIYYGKVRDCLKEKGLWEQSNVEEVNPV

SEQ ID NO: 346650 - protein, 420 aa, unidentified
MSKRTYRAKNIKDVDLEKLISRVEGRRIAVGVDVAKTKFHAALVDEERRIIVNVKWEHPQQTNDFVALIKALPSSLTEVVMEPSGTYGDALRYALLGQDIPVFRVSAKRTHDAKEVYDGVPSKHDAKDAVIIARLRLDGAGQWWPMKNDLEGDLSAALSTLDIFQGQYVQNLNRLEACSARHWPELSAIIDLDTSTVLVLLRDIGGPADVVKNLAKARKLMTNTGGSLLSQEKIDAVIASASATIGVPVCRGEKAALKALAADALRAKKECRRARIRLEKLSSGNATLKSMGEVVGKCTAAVLFSEVGDPLNYKSAAAYEKSAGLNIIEHSSGKHQGRRKISKRGSGMARRWLFLAALRLINQNSVVRAWHERKIAREGGKRKMLSVVAIMRKYIRALWHVAHGAVFDPTLKYDLERLGL

SEQ ID NO: 346651 - protein, 355 aa, unidentified
MVDDIALYVGLDVSKDEIANRADAVRKFVDKLAGRHGRLCLCYEAGPTGYGLYRQLCDLGHECLVVAPSLVPTRPGLQIKTDRRDAVALAALLRAGELSSIWVPDETHEATRDLCRAREAAVSDLRRARQHLLSFLLRHGRVFEGRSHWSKAHRNWLATQRFDHRAQQIAMEEYIRAIEQIEERRDRLTRQMLGLLQDWSLNPIVEAIQALRGVAQISAVTLVLEIGDFRRFSNPRQFMAWLGLVPKEHSTGASVSRGSITKAGNTRARRMLVEGAWTYRLPARVGQEILKRMEGLPEAIRATAWKAQVRLCQRYRRMQASGRPTNIVIVAIARELAAFVWAIATTVPITPTKAA

SEQ ID NO: 346652 - protein, 339 aa, unidentified
MTIQSKQIIQERKPLCAGIDVGSEELILLIRKNGNSCKTQKFANAPADRARLVKKLADLPGIIVCLEATGVYHFDLSIALHDAGVALMVLNPKSSHNFAKVLMKNSKTDDVDAETLAQYAERMDFVAWTRPSDEKITLRSFSRRIDALTRQKAAAKNNCHALSATRGTPKAVLRDVKLAISQLEKRIERLAKGARVLIGKHADLARAFALLTSVKGIAQTSAIALMGELLLLPAGLSHREWVKFAGLDPRAFDSGKSVHKKTRISKAGNRHIRSALYMPALSAKQHDPYVKAYFQHLVDKGKLPLQALCAVMRKLLHAIHGMLKQDKPFDNTRFYAIPA

SEQ ID NO: 346653 - protein, 346 aa, unidentified
MRFYTGQHKYYCGVDLHARTLYLCVLDDKGTIRLHTRLPCEPRRFLEALEPYRSDVVIGCECIFCWYWLADLCAGEAIPFVLGHALYMKAIHAGKAKNDKIDSHKAATLLRGGAFPVAFVYPPEMRPTRDLLRRRLFFARKRGKLFGHIRSTFQQHNLPAPTGQLRYNKHRIGLADAFSDPVLRCAIEADLALADRYDVVIRELEHTIEARAQVHDPEALELLRTIPGVGKILALTILYEVHHIARFASVQDFSSYARLVKSEHRSAGKRTGSGGAKIGNAHLKWAFSEAAVLFLKGNPRGQAHLKRLQRKHGKGKALSILAARLGRSVYFMLKNQEAFDMDRFYS

SEQ ID NO: 346654 - protein, 318 aa, unidentified
MSSAAPAFVGIDVAKAELVITIRPSGEHWTIANDVAGIHTLVQRVRGHAPTLIVLEATGGYERAAVAALAAAQLPVVVANPRQVRDFARATGQLAKTDRIDADILALFAERVRPAPRALPDDAAQALDALLTRRRQVLEMLIAERNRLEHAVPTVRRGITQHIRWLERQLADVDRDLDDTIQASPVWRAKENLLRSTPGVGPVLSRTLIGELPELGTLPRKQIAALVGVAPLARDSGTLKHKRLVWGGRAPVRAALFMAALVGTRCNPVLRAFYRRLLAAGKPKKVALTACMRKLLTILNAMMRTNTAWRHIDLSPTT

SEQ ID NO: 346655 - protein, 352 aa, unidentified
MNDTRSSKRFIGIDLAKDHCDVACYDWRGKCVQEWARISYPELFEKLAQLPPALVLMEACNGAHDKARRIADLGHDSRLVNAADVKALRHGRHKNDLRDARYIAQLAFLPDVRFVRVKTSDQQDRQLAMNEYKQIQSVRIQIGNQIHSALEQYGIPSRESMDRLVGHLVDYLDERAEKITPTLREFVLRQLERWKRMKQEENEAKARIEENTKQDEVSKRLMTIPGIGCIIANLLIVHFGDPHRFRNSGQAAASIGLVPRQYSTGGRDTLLHISKRGPSLLRRSLVQGANTLYIWAEKLKGNLGIWVRKLKASGKKFGVIICAIAAKLARICWRIMRDGTEYNPNWSIEHRN

SEQ ID NO: 346656 - protein, 368 aa, unidentified
MNQHITVVGLDVHKATVVAATLPPTADRPTQTVRIENCPKAIDRLVQRFPDREGVVFVYEAGPCGYQVHRQITEMGRKCVVVAPALTPVRPGDRVKTDRRDAGKLARLYRAGELTEIRVPTCAEEAARDLVRVREDALEDRLRARHRLSKFLLRQGRAYRETKAWGVAHRAWLRKQRFDWPSLQQTFEGNLRAVEEAEARLEILDQQVLEFAQSGPYRTAVQYLRSLKGVQTLGAVTLAVETLDFVRFERAPAYMSLTGLVSSEHSSGSRERRGGITKAGNAHLRRILVEAAWSYRLKNTASPELAARRRGCPLEVVRIARKAQDRLHRTFWRLVSRGKPNQVAAVAVARELAGFVWAIGQQVPTAAT

SEQ ID NO: 346657 - protein, 422 aa, unidentified
MLAESVDEEEVIARVAALDIGKAELVCCVRVPGAGGAKRRLQEVSTHSTMTRSLGDLANHLVDLRVERVVMEATSEYWKPVFYLLEAHGLEPWLVNARDVRHLPGRPKTDVLDAVWLCKVAERQMLRPSFVPPRPIRQLRDLTRYRTDLVGARTAEKNRVEKLLEDACIKLSVVASDIFGVSGRLMMAALIAGERDPKVLAEMARTRMRAKIPQLVEAFSGHFDDHHRFLLARMLARIDGIDADIAVLDAQIETHLAPFDLAVERLDEIPGIGPVAAAVIIAEIGVDMTRFPTAGHLCSWAKFSPGIKSSAGKNKSNGSTGHGDRYLARVLGEAAPIAGRTDTFLGERYRRIARRRGKKKAIVAVGRSILVIIWHLLADPQTRYNDLGADHFARHVNTETKKRNHVRQLEALGYLVTLESAA

SEQ ID NO: 346658 - protein, 425 aa, unidentified
MNSISNKKINQVTDQTLVVGMDIAKKKHYACFVDERGRVLKKSFPVPQSREGLEWLYQCIVKAMEEVEKTEVIVGIEPTGYYWLNLAYFLDEKGISLVMTNPMHVKRSKELDDNLPTKHDAKDALVIARLVKDGRFSYPRILKGMEAELRAGATFRSKLVEEQGAVRNQMIRWLDRYFPEFTQVFPSFGKMALAVLEQTPFPSDLAGKEIEEVLTLYRQSEGLQSPQKPKAKKLMELAQHSIGVTEGQQMARIEIATLVRRYRQLEEEIEALTQQLTELVQTSVEYEWLKTVPGLGDATIVELLSEIGSFSHYQDPRQLLKLAGLTLREHSSGQHKGQKRISKRGRRRLRALLFRVMMPMIRHNEAFRQLHEYYTTRPDNPLRKKQSIVVLCGKLLKVLHAVCTKHQAFDAKRMMQDIFGLETAA

SEQ ID NO: 346659 - protein, 345 aa, unidentified
MTVYIGVDFHARAQTISYLTTEDGEIQRLQLDHGQPDEVRSFYQQFAGQQVVVGFESSGYAAWFEELLEELGCEIWIGHATAIRLFARRRQKNDRRDADLILDLLWRGDFPRIHRYSAESREVLQQLRYRQRLVKMRTMIVNSLLFMASSRGLSLRTQLKSRRGLERLRQMALPQPLTEQRDELCQLLLELKTKIEKVENWLEAKADAEVRVQRLRTHYGIGPLTGLCLAHTLECPERFANSRKVTAYVGFDPVEDSSGERRRIGSISKQGSRLLRFYLVEAGQIAIRKDQDLARVYQRVLVRRGHAKAKVAVGRRLLVRAFIMLRDEIDYAEFQRRGVAARSSR

SEQ ID NO: 346660 - protein, 344 aa, unidentified
MCVRVQGRGRRSAAGTVTTWGSMTNQILALREHLLAEEVTCVVMEATGDYWKPFYYLLEEGLTVMLVNAHDARNVPGRKTDVSDAAWLADLGAHGLLRSSLVPPPPIRRLRDLTRARTALTRDRSRQVQRIEKVLEDTGIKLSSVASDIVGVSGRLMLQALIDGQNNPTVIAELAQRRLRAKIPVLTEALNGRFTAHHGFLISMHLKLIDEYNQALGELDDKITEAMAPLAAARELLISLPGFSRIVAEVFLAETGGDMSVFPTAAHLASWAGTAPGCNESAGRVKSTKTRPGNRYLKGALGVAAMAASRSKGTYFSAKYRRIASRRGPMKALVAVERSMLIAA

SEQ ID NO: 346661 - protein, 428 aa, unidentified
MNEGERIRLEDFRQLKKEIRGSERHLIVGIDIAKHQHKAFFGTATGKTLLRVLVFENTIAGFNRLRSRTEALKVQHCLSKVIYGMEPTANYHKPLAEYLIKCGHHVVLVSGVAVNKNRELLDGRWDKHDTKDAANVADLISQGKCLYYDYPSGRLRDLRSLLSLKRRLKKQEHGVKVRIRNHLLAQYFPEFDRYFAKGCSESLAIVKWCLHPSMIAGMEYDEFIEVVAPRMKTLGQEKRLKSIWELAIDSIGCDGGQSLNFEAKLMVEALQQTRDSIRAVDEHIEAICLHFREYRYLLSIPGFGPDISSKVLGAIGNPFRFNSGKQVLKLTGYDLSAHRSGKGSDSAVPVISKRGKAYLRYALYQAAFIASTSNRHFIAYYTNKLRGREREKGIKTKMRVKLAAKMMIIAWTLMKNKEPFDPAYLNRE

SEQ ID NO: 346662 - protein, 445 aa, unidentified
MRRKKNKTTKKVHFESLPLIHPNAAGIDVGSKEHLVAVPPDRDPQPVRTFEAFTPELHELAAWLKRCGIETVALESTGIYWLSLYEVLEQYGFEIRVVNARHVKNVPGRSKSDVLDCQWIRKLHSFGLLNGSFRPEAQVRKLRTYMRLKDNLVVEGTQAIHHMQKALFEMNVQLSNVISDITGESGLRIIEAILAGERDPEQLAAFCSTRIKAPRQTVAKSLHGNWDEALLFCLKTALDTYRFSQNKIQDCDQCIERQLATFEIKTPLPTSKQTLQTQLHQVCGVDLTKIPGIKEQTAQIIISEVGLDMSRWNTEKQFSSFLGLCPNNLITGGKIIRRSTRKVYNRAADALRLCAQSLTHSKSALGAKYRRLRARLGAPKAIVAMAHHLARLVYRMLRYGQNYVEKGIHQYELKFRLQRIKWLKKEARSLNKEARSLNMQLVAAQ

SEQ ID NO: 346663 - protein, 348 aa, unidentified
MEHFVGLDVSVKATSVCVVDDGGKVILEQKVLTEPADIIALLTSLDVSFCRIGIEAGPLSQWLVNVLTAADLPVICVETRHMKALLTAQQINKTDRNDARGIAQMIRVGLFKPVHVKTLVAQKQRMLLTSRKLLQRKLLDLECELRGTLRNFGLKVGVVSGFRYEARVRELVAGFPGLAAIAEPLLSVRRVMRQQFAVLHKMLLDVVRGDPVCRRLMTAPGVGAVVALTYRATVDQPQRFVHSRAVGAHVGLTPKRYQSGETDYDGGVSKCGDALLRTMLYEAAHSLLIHSRKWSWLKAWGVRVAQRRGMRRAIVAVARRLAVVLHRMWVDGSEFRWSKDSTAVPAIA

SEQ ID NO: 346664 - protein, 416 aa, unidentified
MNQKADKVCGLDVHKLFIFAAIMIRGMAEPMIKRFSTDGKGLLELRNWLEENGIERVAMESTGIYWRVVYWSLQDRFEMIVANAREIHDLKKARRKTDKRDCVWIARLCLNNMITPSYVPDWEIQQLKDLFRARVNYVEMRTECKNIIHKHLDIMNTRLGTYLSDIFGKTGTQILNGLVNGCTIEQIMERITDKRILKKKEDIIQSLQGTLNSSSILIIKVHLESIQDIDAKISELDAKIDDTLQNLHAEELRILLSVPGVGYNAAANIISEIGDVSLFETADQLTSWAGLAPSSHSSGGKVINGRIGKTGNRYLRRILIQVAHAAARTKGSVLGTFYRRLLKRRGAPIAIVALARKILAIIHHLLTNMEPYEEPGVKKRVRHQKVLKCDEFGISGAFEIIGKAENKVGAAGGGCG

SEQ ID NO: 346665 - protein, 309 aa, unidentified
MLTAEADKRKTKVVVNTAAGVQALLAWCAKHGAQPAQLHAILEPTGLYHEQAATALPQVRVSLVNPAQARDFAKALALRSKNDALDSYVLARYGQTLSPALWHPAPLHARQLRALLTRREALSKDLLRELNRKEKSQFSPSAPLVDGSIDKAIAFLREQIKQIERAIDQHIDNHPDLKQDCELLNSIPAIGPQAGNAILAVMHNRHIDSAQSLAAYLGVVPVQRQSGSSLNSCARLSKAGPSQVRATLYMAALVGTRHNPHIRALYQRLLKAGKSKKAALGAAMRKQVHLCFGVLKNRIPYQPNYAMNG

SEQ ID NO: 346666 - protein, 350 aa, unidentified
MLIIGCDLHTRFQEIAMLDTGSGEVVTRRLEHENGEGRAFYAGLPERARVGIEATGCTQWFERMLAELGHELWVGDPAEIRARAVRRQKTDTRDAEHLLDLLLAKRFPRIWVPSPQERDFRQLLKHRDKLVGMRTSVKNQLHYLAMSQGVCRKRKLWSARGRAELEGLALDPWASRRRRELLELLDRLEPRIEELDAAVQAEAQRRPDAVRLMQQKGVGPVTALAFVLTLGPVERFPNSRKVVSYLGLNPSEHSSGGRQRLGHISKQGNEMLRWLLVEAGQSAAQFDPEVRRKYLRLKFRRGAKVAKVAMARQLAVRLYWTLRQASPATPPVRMPSSPARSLVDASPSIC

SEQ ID NO: 346667 - protein, 490 aa, unidentified
MEPSTTPEIIIGLDVGKTGHHASALTNTGERIYDKPLPKDEAAQREIFASMQAHGSVLMVVDQPNTIGALPIAVARDCGCTVGDLPDLAMRKAADLYPGRSKTDRRAAFIIADTARTMLHTLRAVDRDDEILAALKTLAGFHDDITKDATRTKNRLRSVLTQIHPALERVFAGEILSRTLVLDSLIHYEGPTKLAAAGRGRVLKWIRNRAKKDPAALVDAILAALAEQTVTVPGTAAAELVISQLAANIKALQAQRDTIAGQVEEMLESFPLAQVLMSMPGVGITTASNILLSIGDCQDFADAAHLAAYAGIAPTTRQSGTSVRGEFPTRTGNKQLKNAMFRSAWIASNCHPASRDYYLRKRGEGQKHNAAVMWLARSHCNVIYPLPPRPMHPRRSRAEPRPPAVGDSGLPHRKLRPPLPCPPHRLNPRGLGGGRGRSRAQQLKPRTADLQLVDVLALRVDARASTGNLLSNADDLVGVTELVVVPDVEH

SEQ ID NO: 346668 - protein, 357 aa, unidentified
MAAAAMMLKTTQSEVLSNTALPCSRRAQKYSTVPGPNRMAESRTTALGYEQLIEWARGFGRFTRAGIEGTGTYGAALARRVQEHGVQVLEINRPDRSRRRLRGKNDPTDAESAARAVLAGEANAIPKAQSGVVEAMRALSMARRSAVKAKTQAISQLRALLVTAPDSIRATLWKVKPEQCVARCAWLQSLGDTPLLKALTSTLRLLARRWMSLAKELHQLDAALAELTKRAGRRLLARFGVGPQTAATLLVTAGDNPDRLRSEAALAALCGVSPLEASSGKTTRHRLNRGGDRAANNALWTISMVRMRSDPRTRAYVARRTAEGLSTKEIQRCLKRYIVRELYPLILADLAESARPT

SEQ ID NO: 346669 - protein, 371 aa, unidentified
MKSILSVGMDVHKNSFSLCAYDGYTGEIVSESTFASDVKLVIKFIEALKSRYENDVEIKCGYEAGCLGYSLYKSLTARGVDCVILAPTTMQVSAKNKMVKNDRMDALNIAKNLASGSYKAVYVPDEEAVEIKEYIRMIHDFKKELKRVKQEICAFVLRHGYQYDGKSKWTIRYMNWIRELEMSEIQRETLNEYIAEMENLNDKIDRFMNRINEIYQSERYHEKVSKLRCFKGIETFAAMTIQVETADFERFPNAKAYASYTGLTTGEHSSGDKNNRIGITKQGNTVIRKTLVECAQALAKGNVYAKKSQRLKSRQKGMDVNIIVYADKATERLKKKYQKLIERNVPRNKAIVAIARELACFIWGMETGNIH

SEQ ID NO: 346670 - protein, 313 aa, unidentified
MKIERWLGIDVCLARLDAHLLPAGESWSVSNDAAGIEDLVRRLKAGSDVLVVMEATGGYQHEAAVALSHAGAPVAVVNPRQVRDFGRATGQLAKTDKISAEILAMFGEKLRPEARFVPDEELELLTALIQRRRQLLEMLTAEKNRLRVTRTLEVQREIKTHIRWLEKRLEDTNQKLDQAVRESPMWREKDKILQSTPGVGSVVSRTLIGELPELGKLNRKQIGALAGVAPFARDSGTLRGKRSVWGGRASVRSALYMAALVGVRHNPVLADMYQRLRARGKLPKVALVACMRKLLVILNAMLRDGSTWKEAHI

SEQ ID NO: 346671 - protein, 431 aa, unidentified
MLGGNQEKLMSENQPEIQYAAFVSIDWADQKHVWSLQEANSRTREHGEVGHMPEAIEAWIAQMSQRFAGRPIAVAVEQSRGALVFMLSKYEQLHIFPVPPAMTANLRKAFYSSGAKTDPADTDLLQDVLQMHREKLRRLSPDTDATRLIQNLVEERRKLVDEKTAQSNRLEAHLKIYFPQIPQWFGDVDSPLVCALLERWSALEALQKARPDTLRSFFRKHHCRKEELIESRIKAIGEAMPALKDRAVVEAQLAVVKVLVQVIQVLHQGIEDFNRQIQEAAAAHPDFFIFESLPGAGAVMAPRLLAAFGSQRERYRNAGEVQTLSGIAPVTESSGKSSWIHFRFACSKFVRQSFHEWAALSITQSQWARAYYELQCRRGKRHHAAVRALAFKWIRIIFRCWKERVAYDEKVYLAALAQHNSPLLAATKIAL

SEQ ID NO: 346672 - protein, 354 aa, unidentified
MSQTPNAVTTVIGIDIGKNSFHIVGHDERGAIMLRQKWSRGQVEARFANMPPCLIGMEACVGAHHLSRKLKALGHDARLMPAKYVRPYSKGQKNDFRDAEAIADAVQRPTMKFVATKTADQLDLQALHRVRERLVSQRTGIVNQIRAFLLERGIAVRQGQRFLRAELPNILATPPDVLSPRMVRVIEGLAGDWRRLDERINGLSSEIETVARQDAGCERLMSVPGIGPIISSAMVAAIGTGDAFTKGRDFAAWLGLVPKQMSTGDRTILGRISKRGNRYLRVLFVQAAWVVLIKPKIWERHGLKPWIEAAKKRLHHNVLAIALANKLARIAWSVLARGRAFEVRKMDEAANQSA

SEQ ID NO: 346673 - protein, 409 aa, unidentified
MQVYIGIDWSEDKHAVTFMNEAGTELASLSIAHRIEGLVQFDAARQKLGLAVDDCLIGLETAHNLLIDYLWSQMYTQVYVLPPNQVKSNQGRFRQSQAKDDPEDARLIADILRTDRSRLQPWRPDSLLTRQMRAKVSLILHLTRQTTRLSNRLRSVLLRYYPAALTVFKGGLTTQIAPQFVLAYPTPQAAQALSYADFIDFARSHGYRQMLNLPSNYARLQADYPPASSETVAVYQNEARLLARLLLETMRAKLSQLTELQVLYRQHPNYATFASLPGMGKLIGPGQLVKFGDDRQRFPYPSSVQALAGTCPVTKRSGKHKSVVFRRSCDKEWRYLCQEWGMALIYRTQSPIARAYYEDIRPHCHSEQHACRCVANRWLAIAWKLWQTGQVYDEAYHFQQRAMHSKPHR

SEQ ID NO: 346674 - protein, 351 aa, unidentified
MREYIAFDSHKRYTIMERENQQTSVARQRRIEHAPGAICGALRECEPGTPVAIEATGNWYWIISEIEQAGLRPLLVHPRKAKLMMGLINKTDQLDVHGLNRLQRNGTLPTVWIPPADLRDLRELTRVRMVLAAQRTRLKNRISSTLAKYGLAVTEASDPYSPKGRRQLLGLLGQLPPQTQWAARTLLAQLDFIEGQIREQEQRLKQRIEATPEMRLLMSLPGVGVILAAVIWLEIGAMERFASAQRLASYAGTTPRVHASGGVVRYGRLRPDVNRYLRWAFVEAANSVAVNHARCPQRHVSELYRRLKIRKGHAKAIGAVARHLAEATYHVLSRNEPYREPTICAGRSREV

SEQ ID NO: 346675 - protein, 423 aa, unidentified
MKPLSDRPFTAHVGMDWADAKHDVCLLAAGSEQREFDRIAHRVDSIDQWAKSLHQRFGGPIAVALELAKGPIVYALQKYDFFVLFPINPATLAKYREAFKPSRAKDDPTDAELALDLLLRHPERFAPLKPQSMAMRTLVRLTEQRRELVDDKTRVTNRLGNALKQYHPQALDWFEQRDTILFCDFLHRWPTPSAVKRARRASLQAFFYAHNGRRPKLIDERIDSIRAATPLTADMSVITPYQMQVLVLVEQLRVTLLAIDRFDRQIAAVAATLPDYALFSPLPGAGPHLAPRLLAAFGEQRERFMSADELQKYSGIAPVTERSGNKSWVHWRRQCPTFVRQTFVEWAGQTVNKSFWASVYYRQQRNKGSSHQAAVRALAFKWIRILYRCWQTGIPYDESTYLNALRRRGSSVLKQLQPEVQNA

SEQ ID NO: 346676 - protein, 340 aa, unidentified
MEISTIGLDLAKSVFQVHAVDAEGKVVVRKALRRAQVLPFFAKLPPCLVGMEACGTAHHWARELIKLGHDVRQMPAAYVKRGKTDAADAEAICEAVTRPTMRFVPVKSPEQQAALSMHRTRVLLVKQRTQLVNMMRGLLAEFGIDIPQGLHRALEMARSIVDDETPSIPPEAAKIVWRLSQQALDTHAQCREIDLDLLAWQKTNDTARRLMSIPGIGPIGATALAASVTDPHYFRSGREFAAWLGLTPRQHSSGGKERLGRITKMGDKYLRTLLVVGMTSLIKGVKRKPDTADPRLAALLASKPTRVATVAMANRTARVVWVIMVRGATYQAGHRPRLAA

SEQ ID NO: 346677 - protein, 320 aa, unidentified
MSQLNQQCVGIDIAKLSLDIAGTGEFSAFSTSNDEDGFMAILKALKEARISLILMEATGGLEASVACSLQAAGYDIVAINPRQARDFARSMGYLAKTDKLDAAMLAQLAQVIDRHPDRSRYIRVLPDEARAVLTAMVVRRRQLNHMLVAERNRRYPSHPQSRKSIDNIIDSLESELDRINNEMKQHVKVFFMKQAELIGSVKGVGEVTVASLIAELPELGKLNRREISALTGVAPLNRDSGKMRGRRTTFGGRAGVRATLYMAALVATQFNPAIKEFYQRLLAAGKPKKLALVACMRKLVTILNAIVKNSKTWDPKHLPG

SEQ ID NO: 346678 - protein, 412 aa, unidentified
MKDLLEISCGLDIHKEKIVACILTGPLGKPTHSEIREFTTLIPDMLALRDWIISENCHHIAMESTGIYWIPIYEILEDAFSGDITLLVVNARHMKNVPGKKTDIRDSEWISTLLRAGLLNASFIPEKRIREFRDLNRYRKSIIRDITSQKNRVEKFLQSSGFRLSSFISDIFGASGRNIILHLMEHGQIDKMSLDSYLKTKTRKRIDKILMSVNGTLSEHQNSFLKILMCHYDSMKEHLIEIETHLQEDMLPFALQIEQLNTIYGISTTASCAIIAEIGTDMKPFKTAEHICSWAGLCPGNNESAGKRKSTSITKGNPYIKSMLCEIAWVIAGKRNTYLSAWYWRIKQKKGARKAIVALARKLLVIIYTMLKQGTNFDENCFEVRRKNCEQKQLSRYIRELEKHGYTVEAQV

SEQ ID NO: 346679 - protein, 446 aa, unidentified
MSNEVAVTTAAPEPQWAAFVALDWADQKHFWRLSEASSQKQEQGELDNTPEAVAAWAADLNVRFGGRPIAVCLEQARGALVYMLLKFPHLVLFPVNPQMAARFRQAFYPSGSKDDPVDTRVLLDILLHHRDRLRRLKPDTPETRLLQRWVEQRRLMVNEKTRQSNRLTACLKLYFPQILKWFENPTVPLVGALLQRWPNLEQLQRAHDGTLRRFFHQHNCRSEELLKERLDAIRQAVPATTDAAVLDAEAMAAHGLIQLIATLRANIAELDERIAKAFAAHAERALFDGLPGAAAVMAPRLLVAFGTDRERLAQAHEMECFSGIAPVRAASGQCEWIHFRRACPKFLRQTFHEFAGHSIVKCQWARAYYDLQIHRGNSHHAAVRALAFKWIRILFRCWKNRTPYDEQVYLQSLQKRNSPLKALLPPGAGLGWKDVAGFQKLSEEPS

SEQ ID NO: 346680 - protein, 341 aa, unidentified
MTITTAGLDIAKQIIQLHAVDERGKPVVRKPLKRHQVLPFFANRPPCLIGIEACGGAHDGARRLTALGHTVKLMAPQFVKPYVKANKHDAADAEAICEAVSRPSMRFVPVKNPEQQALLALHRARQGFVVARTAQGNQIRGLLAEFGLVVPKGLAALKRRIPEILEDAENGLPGAFRELLQHLTELNRQVEDLTQRIEALHRESAVSRRLAQIPGVGPLIATALLAAIGDIQAFANGRQLAAWLGLVPKQSSTGGKTRLLGISKRGDTYLRTLLIHGARSALRAAQRQKESGETWLTRLADRRNPNIAAVALANKNARIAFALLAHDRDYQPGHVPVRAAV

SEQ ID NO: 346681 - protein, 330 aa, unidentified
MNAAGIDVSAKTVTLVISREGRTGKPREFANTPQGHAALSKVLHKAQVERVCLEATGLYHLDLALALDDAGLAVMVVNPKAAKRFAEAMQTRTKTDAVDAALLAQFAQRMPFKPWERPDDLALGIRACARRIAALNKQRTQTKNQLHAAQQTALTPDFLLANLRHNIEYLDAQIEHLRQRVLDLIAADAHLQQSFDLLTSITGIAAASAIQLLGELLVLPPDMKAKQWVALAGLDPQVHDSGSSVHKKPRLSKAGNRYLRIALYMPALSAASHNPHVRGYYRHLIADRGLKKIQAVCAVMRKLLMAIHAMLKTRSTFDSRRFYSLTETPA

SEQ ID NO: 346682 - protein, 363 aa, unidentified
MEYIAFDAHKHYTLASVVRPNGDLVREERIEHDRGSLREFLERCERGSPVAVETIGNWYWIVDEIEAAGCVPKLVHARKAKLMMGEINKTDRLDARGLNRLQRNGTLPTVWIPPGELRDQRDLPRTRMVLVRQRTQLKNRIHATLAKYALHDLEVSDFFGVRGRTLLRQRFDLLPPHTAYASQQLLEQVEELDRRVREFEQRIQAVFKPTPAIQLLLTLPGVGLTLGVVIALEVGDVARFASAEKLAAYAGATPRVHASGGKTRFGPSRPDVNRYLKWAFVEAANAICIGRGRAPHCHVSRLDARIGRRKGHAKAIGAVARHLAEATFWILSKHEPYREPKASAVSPTGDKRGWPLSSRKLDR

SEQ ID NO: 346683 - protein, 321 aa, unidentified
METVTFEQVVIRGCGIDVHKKLLVATISGEGIKTETREFGTVTRSLTELKDWLLKNGVTHVAMESTGVYWKPVYHILEPSGLTVWIVNARHVKNVPGHKTDKQDSRWLCKLLLAGLLKPSYIPAREQREVRDLTRYRQKLIQDVASNKNRIIRILEDCNVKLSSVLSDTGGVTATRLIDKLCDEKTVTMADIDEVYTKKIEASKEEIFEACNGSITDHHIYLLGTIRENNRHIESLIQDLDDKIKDVLAPYDNALERLREIPGLNRKSVEDLIAEIGLDMNVFPSEKHLCSWVGVSPGNNESAGKKKEVALPTETNRPKQS

SEQ ID NO: 346684 - protein, 359 aa, unidentified
MFTERTSVGLDVHARSVVATAIDTTTGELFKERLIPSQEIVLEWLARLPGPVAVAYEAGPTGFGLARALAAAQVRCEVAAPSKLARPAGDRVKTDARDALQLAKLLRNDDITSVRVPTITQEAARDLVRAREDVRGDLMRARHRVSKLLLRHGHVYYGGKAWSAKHHAWLHRIRFDEFGTRCAYEADLEAIEFAVARRDRLDKLIAQLAADSEFTDVTRRLCCLRGISTLTGFALAVEVGDWQRFNGSSIGAYLGLVPSERSSGQSRRQGSITKTGNSHARRLLIEAAWHHKPRYTVGAVLRARWEQAPEAARVRAHVANARLNQRWSSYARRHKKHTVANTAIARELAGWCWSLAVLE

SEQ ID NO: 346685 - protein, 390 aa, unidentified
MYRSDGSFTTHRFSTLLDGLTALREWVVENRCERVLMEATGVFWIPPYTALESSVEVYVVNPLSIKYLPGRKTDTLDAVWLAEIALNGMFKASYIPPRDVREFRELTRTHRKLVEERTAHKNRIHKILERSGIRLSGVLSDIFGKSGLLVITGLIEGKPIEQILATLHDSRILKKRDAIERAICGDLGENEVFIIQQSLESIKHVNAQIAQYEERILRTLARDEESLQIVTSVPGIGFKVGAVILAEIGNISQFDGPKNLVSWAGLAPTVYESAGKTAHGHITKRGSKYLRTVLIETAQVIANGKPNRLKQFFLRIRARKGYKMAIVALARKVFTGVRLRPLNRERYLDDPGTVKTVNLPKIRPNREMDHDEMIQLLTQAGYVVQKLNAA

SEQ ID NO: 346686 - protein, 438 aa, unidentified
MSDLDQAAVKREFAAHIGIDWADQKHFWTMRTADGRTQRGELDNTPEAVQVWAAELEQRFGGRPVAVALEQARGAVIAMLCKYAHLVLFPIHPNTLTNYRKAFNPSGAKSDPRDADLALELLVAHADKLRRLEPDMVETRKLQFLTEERRRLVNQQSSETQRLIGWLKQVFPQILQWFEDPACAMVGELLLRWPTLQALKKTTPKTLRTFFHRQNCRSAERIEERIAQIRQAVAATHDAALLETGILCIQNSVHVLEQMREGIARFDHQIAETYRQHPDRAIMESFPGAGPALEPRLIAAVGSRRERFESAQSVACFVGIAPVKEASGQQIWVHWRWACPKFFRQTFHEWAGCSIRTCQWAREHYDQQRDKGKGHHAAIRSVAFKWIRIFYRCWRDRVPYSEQTYLKAKAARAPKPHPAVSMQWESCGGFAKLSKLPS

SEQ ID NO: 346687 - protein, 344 aa, unidentified
MGQHYVGLDVSLETTSVCVLDEAGGIAWRGKVGSTPEALANVIRTRAPQVARIGLETGPLCTWHWHALRALGLPVICLDARHAKAALSVQVNKTDANDAYGLAQIVRTGWYKEVAVKSLDSHRLRTLLSSRAQLVNMRRDLGTKLRGVLKTFGKVVGKVGERGFEARVRELAAGEAGLEEAVAALLAVRERLEQQIETLETRILRFAKRSDPCRRLMTIPGVGALTAVSFVTAVDDPARFRRSSGVGAYFGLTPRRHQSGEVDRDGKVSKFGDTLTRTYLFEAAGALLSRVAGWSALKAWGTRLARRIGSKKARVALARKLAVLMHRVWVGGSEFRWSKEVAAA

SEQ ID NO: 346688 - protein, 358 aa, unidentified
MAGKVTETAVVGGVDTHKDLHVAAVVDQNNKVLGTQFFSTIRQGYRQMLAWMTSFGALKRIGVECTGTYGSGLLRYLQNAGLDVLEVTAPDRMERRKRGKSDTIDAECAAHAAFSRIRTVTPKTRNGMIESLRVLKTCRKTAISARRVALQIIHSNIISAPDELREQLRNMTRMQLIRTLGSWRPDASEYRNVTNVYRISLKSLARRYLELHDEIADLDVMIAAIVDELAPELIKRNAIGYESASQLLITAGDNPQRLRSESGFAALCGVSPVPVSSGKTNRYRLNRGGDRAANSALHIIAIGRLRTDDKTKEYVARRVAEGHTKMEAIRCLKRYISREVYTLLRNQNRQINSIPITA

SEQ ID NO: 346689 - protein, 354 aa, unidentified
MIIIGADYHPGFQQIAFVDTDTGEFQERRLQHREEAEKFYRDLAAQGMQVRVGMEASGQARWFERLLSELHFELWIGDAAEIRTKRVRKQKTDRQDAQLILKLMLKDDFPKIWVPSWENRDLRQLLWHRHRMVQARTRIMNQLQAVALNEGLRCKKRLWREAGREQLESFALAPWASRRRRDLLELLDRLTPTIAELTQAIEEEVKKCPAALRLQTHPGVGALTALAFVLIIGRAERFQCGKQIASYLGLVPLEDSSGNRRRLGHITKQGSSMMRFLLVEAAQVTVRSDPEWRSKYFHLAMRRGRKIAKVAMARKLAVRMYWMWRQGWDYEQWKKFGSHAGQPGNRHGVQSITE

SEQ ID NO: 346690 - protein, 410 aa, unidentified
MELLHPHCAGLDVHKETVVACIRHMVEGKVTAEVKGFQTTTQELMELSDWLTSQGVTHIAMEATGVYWKPVWHVLSDGEFALVLANAAHVKNVPGRKTDVNDATWLADLMAHGLIRASFVPDEPTQQMRDLLRTRKQFVRERSSQTQRIQKTLEDANIKLDSVIADIVGLSGRRMIKALIAGETAPKALAALAHGRIQATAAELEAALRGRVTAHHRFLLQLHLDHLDAVNAAIERIDKEVDGNLEPFRVAVEMLTTIPGVRNLAAEVMVSEIGIDMSRFKTEGHLISWAGLCPKNDQSAGKRRSTRMKKGAPWLKTTLIQCAWAASRTNGCYLQAQYLRIRSRRGPKKAIGAVAASILTAAYHMLKDGTLYQDLGPSHFDNRDKGKQAKRLVNRLQSLGFAVQITSMAT

SEQ ID NO: 346691 - protein, 438 aa, unidentified
MAFFMEEHARETLALCILASTAEEARMEALYERCCGLDVHKSSIAACILLEQKHRPQKHLRRFGCTTRDLLELAEWLRGFDVRHVAMESTGVYWKPVWNVLEEHFQMVLANAQHIKAVPGRKTDMMDCQWIAELLRHGLLRGSYVPAPIIRDLRDLTRTRATLSQEQSSISSRIQKLLESANIKLASTVTHTMGKSGRAMLDAMVNGEESPERLADLALGKLRSKIPQLQLALDGRIRDHHRFLLDSLLRQFRFLEAEIQALDARLEQLGQQHQELADAVSRWITVPGVERVAAWSLVAEIGSDMTAFPSAAHLASWAGLCPGNHESAGKRLSGKSRKGSPWLRRMACQSAWAAVRTKNCYLSAQFKRLSARRGSKRALIAVAHSLLVIGYHLQSKGCVYQELGSNYFDHLHAERLKRHLVKRLEGLGLTVTLQPQAG

SEQ ID NO: 346692 - protein, 347 aa, unidentified
MNYIGIDCHISSLDFAVVNERGTITNRAKVNTGVKEFMEFVKSIPKPRKLFIEEGELASWMLETSIKFGEKLIVTDPKINKWIGKAGKKDDPIDAEKLAQLARGKYIKEIYHPISNRRRFKELVFAYHDTVRSQSRIKNKIKARFRREGIRCRGETVYSEKSRNEWRKALPGNKIVHLIVDELWTQLDRTREATENLKRNIRLQSKQFPEIKMFQKVPGIGLIHASTLSAIIETPHRFAHKKKLWMYAGIGLAERKSGEKVYSRKLTREYNRQLKNTVKQATEAAIYSKDNPFRRQYLRLTIEVGIPSHKAKLTVARSMLAALYGMWKKGEEYDREIDKKREKGNQK

SEQ ID NO: 346693 - protein, 429 aa, unidentified
MNYSQNQRISQITESTLIVGVDIAKHKHVARAQNDRGLMYGKAFSFSSTRQGFEAFCHWMKSLMTEHEKTEVIVGMEPTGHYWMTLAAFLRSRRIPVVVVNPMHVKKSKELDDNSPTKNDPKDARVIAQLVKDGRYSAPYFPTGVYAELREAVKIRDHLSNELQRIQAKVHNWLDRYFPEFLTVFTSWEGKAALETLKRFPLPQDIIQIGASGILTTWQESIARGLRPRRAHELVEQARHSVGLREGTKMAKLELRTLLTTYEVTQQQLEQVMKEIEDLLNDIPGVQHILTIPGMGIATVAGFFAEVGDLSRYQHPRQLQKLAGLNLKENRSGKHRGKTRITKRGRPQLRALLYKVIRPLVAKNPAFKALHVYYTTRQQNPLRKQQSLIALCCRLLRIMFVLARKQVDFDMNKMMKVTPLCSQILPLTA

SEQ ID NO: 346694 - protein, 343 aa, unidentified
MKLHVLGIDLGKTIFHLVGLDSTGRVVIRKRCSRTQLLAFTANLQVQLIGMEACSGGHFLGRALREQGHEVRLMPAQYVKPYVQTNKSDYLDAEAIAEAVQRPRMRFVPIKTEEQLDLQALHRVRERWVMRRTAVVNQIRSLLLERGLTLPKGRSHLDEQLPRILEDAELHLSDSFRVLLAQLKLELEQLAARIEEMDRVIQKTAKENEACQRLTEIPGVGPVTATALIAAVGNASAFGKGRKLSAWMGIVPGEYSTGGKQKLLGISKRGNKYLRRLFVQGARSVLQQRHKQAPGLSSWLAQLLGRTHQNVVVVALANKLVRMAWAVLCKNERYRAPVIAITT

SEQ ID NO: 346695 - protein, 349 aa, unidentified
METIRPKTYRYFVGTDVSKYKLDFAVRQGKLLVFHRAIPNEAGAIAAFIAGLKSLPGFRIGNAVFCMEFTGIYCHPLLAGLKRVKANIVCVGSEHIRQSIGKVRGKNDKIDAIRIAEYAYTQRDSLRMFVPKRTVLARLGVLSALRARLIGLQTALRIPLKEQRDFFKKGMSREETRLCARSAAALKLDIREVEERIAGTIRSDERLARLMAVMTSVTAVGPVTALAILLATNEFRNIRDPRKFACYAGVAPFKHESGQVSARGRVSHFANKKMKSLLHTCALTARRAVPELKAYFERKTAGEGKNKMLVLNNIRYKLILRVFACVRQDRYYEADHVGVTPGRNPGQCV

SEQ ID NO: 346696 - protein, 449 aa, unidentified
MSDRSGVSRGDRNRNARLARLREAVPLSNAIAGIDLADSKQMVVVTDHESRVLARRTFRRRAWELGMALDWAAARAAAAGFAGVTVAVEPTGHRWRVVGQLAGERRMPFVCVQPLMSAWARRAEDLTFDKTDDKDAVLIARLAGQLRCYLPEPADAIWGRLRHLGIRRARLVADQVAQVQQMRDLLECVWPAVLDAARQPFKSTTWHAALTVALARADGGDLGRVTRLGRRRFDAAVRRQVARWDAVHPWQKIINAVLAACADPAGVTEMRHGALERVLLLLADWRDTRARLADTEQRMVAVLGELGLTELVTSITGLSAVGAASILAETGDPARFTSGRALVKHAGLAPRQKSSGNYTGRTRTTGQGRPALRLAAWRAVWGALKSNPVYAARFAYLTSREHNPLSTGQAHAAIAAALLRHLHAVITTGQRWDPAIAAGGKPNQTLIAA

SEQ ID NO: 346697 - protein, 328 aa, unidentified
MAKHTTICAGIDTGKRKLDVAIEDRGEQLQVENTPEGHKALVAWLQEHGVKRVGIEASGGYEQPVVAELRRTRFVVVVFQPAQVRAYAKFHLQRAKNDKIDAALIAACTAAVRKIHAAPDPRLLPFAEQLTMIDQISEDIARLKNRIESCRNAEIKKLWREDIARLERREKIELKALVASIRTHPDLAKRLGLINSVDGIGLPTAVAILVRLPEIGRITREQAVALAGLAPYDDDSGEQVGVRHIEGGRKRLRRALYTASLAASFRWNQQLIQLYQRLTAAGKQHKRALVACARKMLIFANTVVARGTPWRDEPPAVKAPMVGLLSVS

SEQ ID NO: 346698 - protein, 437 aa, unidentified
MRRKKNHARKNVNLQVLPVVHPNAAGIDVGAKEHLVAVPCDRDPQPVRTFQAFTPDLHQLAAWLKRCGIETVALESTGVYWISLYEVLEQYGFEIRVVNARHVKHVPGRTKTDVLDCQWIQKLHSFGLLNGSFRPDHQIRKLRTYMRLRDNLVVASTQAVHHMQKALFEMNVQLSNVISDIVGETGLTILEAIIAGQRDPKQLATLCSSRIKASRETVAKSLHGNWDEALLFALKVALETYRFTQTKIQDCDCCVQHHLAQFESRAEVINSRQNLKTQLHRVCGVDLTKIPGIKEQSAQIIISEVGLEMTKWNTEKQFCSFLGLCPNNSISGGKVLHRATRKVYNRAADTLRLCAQSLTYSKSALGAKYRRLKARLGAPKAIVAMAHHLARLAYRMLRYGQNYVEHAIHQYELKFQLQRIKWLKKEAKSLNLQLVPA

SEQ ID NO: 346699 - protein, 389 aa, unidentified
MTIYVGIDIAKYEHVVSIYDPSSGELILDSLHFDNNLKGFKLLLSKMKSFKNSDVIIAFESTAHYHQNLFNFLTDQKYKCYLINPYMTSRFRSVSLRNAKNDNIDSRAIAHFISLKHKDLVNEEFQMNELKELCIHRDDLVKQSSALKTKLLTYLDRVFPELESIVEKAGIHSKALRAILKDYPTAHAISSTRIDHLIKLASDASKNRFPDDKVRKIKEAAKSSVGFDSLALALKIRQTIQALEALEKQIDEVESSISSLPTVMESPLHKLKGINSIEIAYILSAIISITRFSSYGKLIAYAGLDPIIRQSGTWQASRTRMSKRGNRLLRYALIWTANNMRKHDSTFKAYYQKKISEGKSHYNALGHCAAKLCRYIFFILNNPEQDFVS

SEQ ID NO: 346700 - protein, 315 aa, unidentified
MNESESTKVSVGIDVSKSMLDIAIHETGEGWSCSNDASGAVALVDKLRQLKPTRTVLEATGGFETLVTAMLSAASLPVIVVNPRQVRDFAKATGQLAKTDRIDARVLAHFAAAINPPLRPTKSDEAQHLEALLARRRQIVEMLVAEKNRLANNRDRAVVKDLKTHIAWLGRRLKSSDDELQRVLRASPVWRERDDLLRSTPGVGPVLSLTLLAQLPELGQLNRRQIAKLVGVAPFNWDSGKWRGSRHIWGGRAAVRSPLFMATLCAIRINPTIRFFYQRLIQAGKAPKVAITACMRKLLTILNLMIKTQTPWRTA

SEQ ID NO: 346701 - protein, 343 aa, unidentified
MEKMYYIGLDIHKKIIVYCLKNQDGTIVQQGVVAAERKALRQWAEELPTPWIGAMEATMFTGWVYDVLKAHALELKVAHPQMLKAITAAKKKNDRADAERIADLLRVNLLPECYMAPEELRELRRILRYRNHIVRSAVRMKNKVSGLLMEVGVCYAKKQLHGKKYFQKLLERTADIPPSVVELLNLSRANLEMFQAVQKRLVETLRDNELIKERVRRLMTIPGVGEVTALTWALEIGEPDRFRSVRQAVSYCGLCSAQRESAGKEQRGPLSKKRNKQLQTVLIEAAKLAPHWNPQLASVHAKELAKGNRNRATLAVARKLVAYLLAVDKRQADFVPKVTSQAA

SEQ ID NO: 346702 - protein, 403 aa, unidentified
MNSVGIDISKGRSTIAVMRPFGEVVISPFEVRHTDSELSELARQLKSLNGETRVVMEATGNYHAPVAKLFHDAGLYVSVINAKLVHGYGNNDLRRVKTDRKDAVKLANYGLDRWLTLPRYVPEEDTRLLLKNCYRQYRQYSKVQTVLKNNLISLLDMVFPNVNRLFSSPIRGDGSEKWVDFVAEFWHCRCVSEKSQKAFTNKYQRWCRKHGYNFSEAKAHTIHAEACGHIDVIPKSETTKLLVEQAVAQIRATSAALAALKHEMQALASILPEYPVVMDMFGVGPTLGPQLMAEIGDVRRFYSKKALVAYAGLDAPPNDSGDVTGRHKSMSKVGASSLRRTLFLVMSVYLQNAPLDESVYQFMDKKRAEGKPYRVYMMASANKFLRIYYATVKAYLESLEHTA

SEQ ID NO: 346703 - protein, 343 aa, unidentified
MQTITTIGLDIAKSVFQVHGVDNDGKVVIRRQLKRRYVLAFFEKLQPCLVGIEACASSHHWSRELQALGHTVWLMPPAYVKPYVKRQKNDAADAEAICEAVTRTNMRFVPIKTSEQQSGLMLHRTRHLFIRQQTSVINAIRAHLAEFGVTAAVGRKGIEELLRVIADPSDKRVPDVVRTCLAALGSQLLSLKKQILDFDRMIMAWHRSNQTSKRLNCIPGVGPLLATALVASVADPKTFRSGRNFSAWIGLVPKQHSSGGRDRLGSISKQGDRYLRSLFVAGALAVIRYAKIHGTKYRPWVAALLTRRPTKVAAIALANKLARMAWAMMAGGERYKYPASLRV

SEQ ID NO: 346704 - protein, 368 aa, unidentified
MTERVHGIDRHKQFSTISVLNRGGQEVRFERACKDLRAYVEGLGTADAVVLEASTGAFWWADQIEGRGAKCYVMDPHKFRIIKDSWNKTDKQDARNLAKALWVHVVTGEFAIPTVYKPTEVVRELRKLFAQYCLLNRQIRMHKNTAQAILVENGIEVNRQLRSRLLTPQLRVEVMKELNISAASRVCAELTLGLLDKVEEAKEQLVAEILIAGESLKSQVELLISIKGVTPLIALAFLADVADIRRFKTLRKMSAYLGLVPRADDSGGKSRPGHINRESRKLTRTVLTQCVRHVVSSSTYLERYYFDLMDRRGAGRARVALIRKLCGMMRRMLLSGEQYRWIDQRLFDKKLSQYERVLKRVKEERPAA

SEQ ID NO: 346705 - protein, 334 aa, unidentified
MRRLFECLAELERKALARTGETYPIIVIQEAGLDGFWIHRALEKEGVESHVVDAASIAVPRRRRRPKTDSIDGKTLLRTLMAFRRGEPRVCAMAKPPSVEEEDRRRLGRERKTLVAERIKHINRIKGLLFTQGIVNYQPLRRDRRARLEALRTGLGDPLPSRLKGLISRELDRLELLLAQIKAVEAEREALLAEQSRQAPAAAPMLLAFKGIGPEFATVLWLEGLFRSFANRRQVAAYAGLAPTPWRSGSIEREQGASKAGNPRLRATLIELAWLWRRHQPNSALTLWFEDRVKANGGRVKKALIVALARKLLVALWKYVTTGLVIEGAVMKTA

SEQ ID NO: 346706 - protein, 301 aa, unidentified
MDKDSMLFVGLDLGDRWSHLAILDEEGQVLEESRVPTTPEALRRRFSTLSHSRVALEVGTHSRWVSQALQELGHEVLVANARKLRVIFDNPRKGDRADANTLARLARLDPKLLSPIEHRSPHVQADLTLLHSRDALVRTRTLLINHVRGIVKSTGARISLCSANFFPSKAAASLPETLKPAVLPILETVHSLNRQIHSYDRQIEALCRGQYPESLQLRRIVGVGPITALAFVLTLENPKRFQKSREVGPALGLVPRQDQSGGSNPQLHITPGLPQGRQDGKHVPASSLGQLSPVHPWALWS

SEQ ID NO: 346707 - protein, 429 aa, unidentified
MNISTSIAEADSKYVWSVGIDWADEKHDISQRCWADGRYQTFQIGADPVSVRTWLEELKELAGPQGRIVVGFEQNRGSLFEMLREQKDWLDLCPLNPLTLSRYRQSFYTSGAKDDPLDSQLIEELLRKHLDRLRLYEPPEPVLRQLDLLCQLRRKAVDSAVGLENQLRSHLKVYYPLVLELHEDLSSTLTLHFLKRWPTLQSLKRAKAQTLRSFYYQHHSRSQSLIEERLQKIARAEAVTEDCTLIDPLVLSVQGLVNQLLAHKASEAAFDKAVQKLALKHPDYEIFNSLPGAGPQMTPRLMVAFGSNRSALTDPSQMQKKSGIAPVLDRSSQSQRIHRRWCRPKFLCQTFHEFAAYSIPHCTWAKAYYEQLMARGKSHHTAVRALAFKWIRIIFRLWQDHTTYDEERYLRDLQKRHSPLSQKIQLQPL

SEQ ID NO: 346708 - protein, 344 aa, unidentified
MTSMQTKYVGLDVHKNFIQGCVLDKEGKVILEHKFKNEPHSMDLFLSNIQQDSKIALESCSCWQYVYDYLSDAGYKDLVLANPSRVRLIAESRKKTDKHDAKVLADLLRMNMLPESYAPPLETRYERQITRHRLSLVRLRADVKRKVNALLLRHGYQHEYSDLFGKAGMEQLYSLDLPMCDRFELDNYLKTIDFLTQKVNDTQERVKDFVSYNPQARLLMSIKGIDYYSALMISAEIGDVRRFNSAKKIISYAGLNPSISQSGDKCYVGHISKQGNNNLRWILVECANIAVMHDSNLALFYHRIKKRRNHKVAVVATARKLLTIIYAMLMNNRNYIPQRKCKAS

SEQ ID NO: 346709 - protein, 372 aa, unidentified
MDQLSKIHLGLDVHKGSITVARADPGREPARVVGKVPHDVSKLLKPLAKLGRPEELHLVYEAGPTGFGLQRRLSELGYSCEVIAPSKMPRKPGARVKTDGRDAIELAQSSRAGDLHPVWVPDAADEAIRDLSRVREDAVKACTQAKQQLGGFLLRRDLRYPGKKAWTKTYFAWLAKLKLDADAAQLALIEYLLAVQAAIARVQRLDKALAESTVGWRFESVVAALQALRGVARVTAIGLVAEIGDLSRFAHPRQLMAYLGLVPSEHSSGERGRRGSITKTGNAHARRLLTEAAWSYRHPARIGRDALQRQDQLSQPVRDMAWKAQLRLTKRFANLNSRGLQPNKACVAIARELAGFVWAVGMQALREKPTAP

SEQ ID NO: 346710 - protein, 423 aa, unidentified
MAYRIAGIDVHKKKLAVVVADVEVEEEYEFEGRWYGSVPQQLQLLCEWLIEQQVDEVVMESTAQYWKPVWGALERWWKPICEKREGAGRMSGSLHLAQALSNRGRRGRKRDFRDAERLVKRLVSQELNLSFVPDTEQRLWRTLTHTRYQRTREKVRLQNQLEALLEEAHIKLSSLVSDLLGASARRMLKALAEGETDPAALATLGDRRLRATPAELHDALGACTELNPVYRRLVKMTLEELHLIEEQIGQIDADVASLLREQQDAVQRLAEVPGLGVNSAQMIIAEVGAKAAAFASAKHLSSWVGASPGEEESAGVNRSKRSPKGNRQMRRVLNQAANAAAKHKGSIFEIVYRRLVLRLGHYKTIAAIAHRLCQLVWIILHKGVRYEERGPAVREKSKRARTVRMIRTLRTLGYRVEPLENPA

SEQ ID NO: 346711 - protein, 388 aa, unidentified
MQIAADRPQASTAIRTDLGAIFVSLELSRSTWLITSLSPGGGEKMSKHSVRGCDVAGLLERFAHLREKARARTGQRFPIIVIQEAGLDGFWIHRMLNAEGIESHVVDPASIATSRRRRRAKTDRIDGEALVRTLLAYKRGEPRVCSMVKAPTPEEEDRRRLCRERKVLTAERVLHVNRIKGLLFSQGITGYEPLRRDRRERLEQLQTGDGHTLPDHLKGQVRRELDRLELLLDQIKAVEAERDALLAAERAAARTPAAMLLDIKGVGPEFAAILWSEGLFRHFDNRRQVAAYAGLAPTPWQSGSVDREQGVSKAGNPRLRTTLIQLTWLWLRNQPHSALTLWFHERVRRNGGRLRKTTIVAVARKLLVALWKYVTAGVVIEGAVMKPT

SEQ ID NO: 346712 - protein, 350 aa, unidentified
MIFIGMDVHVRNSFLHITDEGGQLLKRGRCANTPSDFAAFLAPLGAESGYAALESTTNSRAIARMIRDAATHSGIDMIVDVLDARKLRIIAESVSKCDRRDAAVLNELSRANLRLPICYMPDDEVFALREHLRARSDLVRIRTSVKNRVHAVLHRRGVLTPLGGLFTQAGRTFLAQAKLDDAGSTIMQLYLRTIDQLNGLITESNDSLKQLTRRPRWAKPAALLQTMPGVGLITAMTVLAELGDPKRFRRRAAVANYAGLVPVVRDSNDKRYRGGITKRGSTHLRAVLIEAAWIAIKRVPTYNHLFERVTRRSNKLTAIVAVARRMLEDAWTMLKREEAFRYSAMPSVAG

SEQ ID NO: 346713 - protein, 341 aa, unidentified
MSNVTLIGIDIGKHTFHLHAQDKFGKEVSRKKCSRQQMMRALANHPACIVVMEACAGSHFLARELKAMGHEAKLISPQFVKPFVKSNKNDFVDAQAICEAASRPSMRFVTPKSPEQQTLSVSHRMRESLIRDRTKTVNQIHGFLLEFGVDLPTGMAVIKRLASALEEHDLPVRFVALLQRLHDHFVYLNEQIKLLDEELASQLADDDLGSRLLSIPCVGPITASLLAVEMGDGQQYGSSRDFAASVGLVPRQYSTGGRQTLLGISKRGDKNLRHLLVLCARVYMLRLEHQKGPLAEWVRTLLTRRHSNVVACALANKLARIAWAIATRHSQYETEPDAMNA

SEQ ID NO: 346714 - protein, 347 aa, unidentified
MRFYTQQHKHYCGIDLHARVMYLCVLDGNGAVLLSRNIDCNPRAFLSAVNSFRDDLVVAAECMFTWYWLADLCKREGIAFVLGHALYMRAIHGGKAKNDRIDAHKIAALLRGGMIPQAYVYPPEMRATRDLLRRRNHLTRKRSELIAHIQNTVSQYNLPPLEHRIDKRCDRQGLLAHFPDPQVQNSIALDLAMIEQYDLLLPKLERHIRSCAKQHDRKSFVLLRSIHGADLILPLVILYEIQDIERFARVQEFLSYCRLVKPARESAGKIQGHAGGKIGNAHLKWAFGELATTFLRANPAAQQLHERLKRKHGKGKALSVLAAKLARAVYFMLKRGQVFDEAKFYQD

SEQ ID NO: 346715 - protein, 347 aa, unidentified
MVIIGCDFHPGFQQIAMVETDTGEVRELQLSHKQEAEQFYGSLRGREVLVGIEACGYTQWFEQLLDQMGHRFQIGDASAIRASYVRKQKTDRRDAGHILRLLVEGRFPALWVPTAADRDVRQLIVHRHKRVELRTRVKNQLHALALNQGLRLRWKLWTRAGLEQLKALELLPYGSARRADLLRQLEEMDAEIARLDKTVGKEAAARPAAVRLMSHPGVGPVTALAFVLTIGDVERFSRSRQVASYLGLIPSERSSGGKQRLGHISKQGNPLLRFLLVEAGHTAVRGDAELRRVYTRVQHRHSTGVAKVAVARKLAVRLYWMLRKQIDYAQLRVGPYAGKPVSFCGRK

SEQ ID NO: 346716 - protein, 421 aa, unidentified
MRKKNDNRQVEKRQRITGATLVIGMDIGCEFNAMCLMNKEGTVLGRYPKIYNSRKGFDYFHGIVEGMKKKYGFTDVLIGMEPTGHYWRKIAFFAMDKNHEVRFIRTTALKHQRELDESSSAKNDMRDAYTIGNIVREGKYIDTVIEDGVFRQLRTLAHTRERIQRISTGAKHALKGVLEDYFPELKSIFWSMNAKGLLALLEQCPFPGDVLTIGPDTLTEILAKSTRRKKKAREKALMIYEAAGQSVGLKCIGEADRHRAALFLSEIRHSEGQLKEIELRMKTLLQKIPFAEYILSMPGIGVLTCGVFLGELGDPYNFRDPKQIVKYAGYDPKEHDSGQSIGRKIISKKGRWLLRKYLYFMAMRVVHRSPFFKEYYENKQKTMAKKEALCAVVIKLVKVIFALLRDKRTFTEKQRCLKQAA

SEQ ID NO: 346717 - protein, 374 aa, unidentified
MTTVDPKRWGGRPLTASKCQSGGVEHTTAKEASVGEVSMIGLDLAKSVFQAHGADASGGVVFRKRLRRDKLLAFFAGQPRCVVAMEACASSHYWAREIAALGHETRLIPPAYVKPFVKRQKNDMADAEAICEAAQRPTMRFVTPKSAEAQGAAVVFRTRDLLVRQRTQLINALRGHLAEFGFIVRQGSGHVSKLIDLVADPSSELPAEARAVLAVIADSLQAIQARISVLDREIAARAKADPLVRRLMTIPGVGPIVATALVALAPEASTFRRGRDFAAWLGLTPRQHSSGGKERLGRTTKMGERSLRRLLILGASSAAKNAGRDGSRASPWLVGMLARKPRMLVTVALANKMARIVWALMAHGGTYRAPVAAV

SEQ ID NO: 346718 - protein, 373 aa, unidentified
MPKYSTAFGMDVHLRSTTVCALDADTGEAVTRRFPGNPWGEIAGWMDGFPGPSLAAYESGYLGSAPQRELAGLGVECVVAAVSKIPRSAADSASKNDRNDAARMAKAILAHDISPVWVPSPEVEGIRDLAGAYGGATARLATAKQRLLAFLARRGFVYGGTTPAGNPRKYWTYDFLRWLDKVRPEDDGGVRALAALRNEVEAAAEARADLLSEYRAAVDASPIAAEVAALQSIKGCAFALAAAFSAEVGDFTRFRSGRQVTAYFGLAPSQRSSGGSVRLGGISGAGNALVRKLAVEGSWCYAAARHQPKLMPRDTGVPLEIRMHGRKGSERLLRRREEMLARGVPAAKANAATAAELVRWLWALGMMCREGAE

SEQ ID NO: 346719 - protein, 377 aa, unidentified
MSNVRFIGLDVHAETIAVAAAEPTGEVRSLGVIPNRIESIHKLVKKLGPAKQLRVCYEAGPTGYVVYWQLTALGVPCEVVAPTLVPIKAGDRVKTDRRDALKLARSYRAGDLTPVWVPDAAHEALRDLVRAREAAKKDQLRARHRLGKFLLRHGRRPPTAMKAWTQAHIAWVKSAVRFDHAAQEATLLDYIHEVDHVAARITRLESAIDAAVTLAPARMRAVIEALQALRGVALVTAVTIAAEVGELSRFANPRQLMGYSGAVASEDSSGQRTRRGGITKAGNAHLRRVIVEAAWAYRHRPAVGGALRKRQATISAEVKEIAWKAQHRLHGRYRALTARGKCKQQVVTAIGRELLGFIWAIGVHVESQTAVKNPIAA

SEQ ID NO: 346720 - protein, 362 aa, unidentified
MQVRHIFVGIDLGDKNSVARMAVDREKTERLGFVNNRQGRARLLREAKAKAAQAGGAKIVMAYEASSCGFVLSDEAEAAGIECWVLAPTKMEKSVEQRKHKNDDRDADDVVEKLRGHILAGNRLPTVWVPDPQRRDDRELIRTRLELTDKQTQIKSQIQMLLKRHGMEKPSGLGAGWTIGYRRWLEALQESDSLGCGSRQALSRLMRQLHFMEAEIERMQKPVERLAGEPRHKPIIDELIQETGVGLLTAMVYRTEIGYAGRFRRGRQAGKFAGLTPTSHESGQQNDRKGHISRQGPPRLRKVLCQASWVHVRHDAGARQIYQQQVLRNPKKKKIALVAIMRRLAVRLWHRMRKIELQLAEA

SEQ ID NO: 346721 - protein, 383 aa, unidentified
MTEQQVIVGMDPHKSSNTIAVLARDETMLTRRRFENSDDGFVEMLDAVSGYPDRVWAVEGANGIGRSIAQRLVAFDEIVVDVPAKLATRVRVYSTGHGTKTDNADAVAIARAAIHSPHLRRVQPDDASVATKLLSDRRHELVGLRTQAMCRLHRLLRELIPGGAPRQLSAEKAFDLLNDLKPDDPANEMRLEIAIDHIEDVMRLDRKIDDYNRRIVAEVKTSATTLTRVYGVGPINAAVILGEVGDVSRFPSRDHFASYSGTAPISASSGDHQRHRLNRAGNRRLNHALHIAAITQIRQNTPGRDFYRRKMAEGKTHKEALRCVKRRISDAVWRQLQIDRSDDQTQDTKWPRWPSSRGDLVAYRSPDSPRRNGRPKQLKPAVV

SEQ ID NO: 346722 - protein, 350 aa, unidentified
MNATTVAVDLAKNVFELALADGRWKIIERARLTRAQFERWFDNRSVGLVVMEACGSAHHWARLIRSRGIEVRLLPAQYVRAYVKRNKTDRADAQALLEATRTGDIRPVAVKSIEQQGLQALHRTRSGWMSTRTRRINTLRGFCREFGLVVPEGAATGLAQIARYLADEHSGLPALLRPSMRLVLEEIRLMEARIGELERQLSQLAKASPACQVLQSVPGIGLLTSTAMVAAVADPGSFASGRRYSSFLGLTPREYSSGNSRYLGRISKRGDRYIRMLLTHGARSILRAATVARRAGRQIDRLKSWALAVQARTNHNKAACALANKLARIAWAVWVKHEAYRSEPAPTTPL

SEQ ID NO: 346723 - protein, 315 aa, unidentified
MTTSSRKIVGIDVAKEKLDIAVLGEKKASQVGNDEDGIAKLIKKLQTLNPELIVVEATGGYQRAVVLGLYEAGLPVAVVNPSRVRQYARASGLLAKTDKLDAFNLAEFGKQMKPRRFEAKSEAGRYVSALMVRRRQVEEILKAEKSRLRTVHAEMRGSVERIIEVLKEEIKRLEKDLDRFMKENEEWQEQEQILTSAKGVGRVTAATLLAELPELGKLDRKKIAALVGLAPMNADSGKKRGYRKTKGGRMEVRNVLYMSTLVATRYNPLIQAQYQELLRRGKVKKVALTACMRKFLTILNAMMRDKVPFRQTVTA

SEQ ID NO: 346724 - protein, 424 aa, unidentified
MKNSTARKLKQIGEGNLLVGTDPHKDKHALLIMSQDAMVKKKFKISNTREGFEEGIKRVFEEVGKTGSKGAIFAIEAGSHYWRNFAYYLNEYKIPFFLVSPFTLKRRREGEDLNRRKNDYRDAEMAAELLRTGKYMDSRLLYGVYAELRTTYTNYQRLVEDKTAQINLLKSRLDNLFPEFTQVFKDPCGITAMAVLKQCIIPGTIAQMKVEDFIKTIRSGFSGKLLQIKKLRALHVVAMNSIGINEGAKAVSQEISFIVECIQLKTNQMKVVTKSLIELVDSTPESHYMLSVRGLGYLSVAGILGGVGPFSNYKSGKQMIKMAGMNPTQRESAGKSSSHTPISKQGRAGLRWCLWPAVVSLLRHNNDFKVWAKARQERAANAHPLHRREVIGAAINRLLRVVFALVKKESLYQMPRPERELIAV

SEQ ID NO: 346725 - protein, 344 aa, unidentified
MSEQYVGHQIVGMDLHRRRSVLVRMTDCGEQLETVRISNDPEYLQAVMARAGEHPDVVLEATYGWYWAADTLAELGATVHLAHPLGVKMFSLRRVKNDQHDAADLADLLRMGRLPEAWIAPPPTRELRGWVRHRAKLVGLRSNLKCQVHAVLAAAGVQVPMADLFGPSGQQLLATVRLAVESRSRIDSLLRLIAGLDFEIDTFTRLVAGRLREDPGYRAIQQIPGVGPTLGAVFVAEIGDIGRFRGPAQLACWAGLTPTHHESDTTVHRGRISKQGSRLVRWAAVEAVQRVSAHTRLGQIRDRVGDRRGRNIGVVAAARELTELVFYGLRDHRIRCLATPASAA

SEQ ID NO: 346726 - protein, 359 aa, unidentified
MTAISIVAHSHPFVVGVDTHARNHVYAILAPATGTLLETREFPTSAAGINRAIAWVARRTEADVDTLWVIEGAASYGAVLAGTVATHGYPVAEAPRMDAKTRRGVGKSDVLDAHQIAVTTLGLPVHQLRRPRLNDGVRQSVRILVTARESMSADRTRSVNALNALVRANELGVDARKKLTSAQMSEVSRWRSREEELSLSVARSEAVRLAKHVLDLDEQLTANETQLDELIKASEAAPLLQEKGFGVISTAKCLTAWSHHGRVRDEAAFASLAGVNPIPASSGNTIRYRLNRGGDRSLNSALHMVAITRMTHDAETRAYVEKRRTEGKTDREIRRCLKRYLSRRVYRELNASAAPKNTV

SEQ ID NO: 346727 - protein, 312 aa, unidentified
MSCIGAGIDVSMDTLDVALHNQKATLIVTNTPQGWRQLHQWLSPFGPEQVVLEATGGYEIDALDGLHALGLPMVRINPRQARDFAKSTGQLAKTDQLDARTLAHMASALTLNRYKPKDEAARELHEIHRRRQQVVQMLVAERLRRRLTKDPKVREMLEQHIQTLEADCKTLDKMIAQQIEGTLQAEIGASIKGVGPITIATLICEMPELGHVNRKAIAKLYGLAPLARDSGKSRGKRTTWGGRKGPRSAIYMSTLTAIRYEPKIQTFYTRLVESGKPRKLAVNASMRKLVTMLNGRMRDAMHKPPEEAVHVA

SEQ ID NO: 346728 - protein, 363 aa, unidentified
MVESMTVAVGLDVHARSIRVAVVRADELLEERTLPYDEEAVERLLRRWPGVRCCYEAGPTGFGLQRHLAGRGIDCRVVAPGLVPQRPGDRVKTDSRDARKLARLLAGGLLEPIHVPSRELEAARDLVRAREDARLDRMRDRHRLSKFCLRHGRTLPTNSWSVVRRKWLSEQRFDFQAQQQTFDSYLHTVDLVDARIEQLERAIRETAEQQPWSDLVGRLRCLRGVDTLTALALVSEIGDFERFKTAEQLMAFVGLVPSERSSGEQRRQGSITKVGNAHVRRLLVEAAWHARRRPKVGYELARRQRGQDPATVERAWCCQQRLHARWQRMAGRGKPQQKIVVACARELAGFVWAIATDQPLRNT

SEQ ID NO: 346729 - protein, 352 aa, unidentified
MESITVGVDLAKQVFALCDVEKSGRVLARRELKRDAFQAWIAEQPAGTVVAMEACSSAHFWGRQCEAHGLVPRLMAAQFVKPFRKNALVKNDRQDAEAIATAARQGNMRFVALKSEAQQVRLCWHRVREGYKKDALALRNRVRGLLAEFGVVPAPSVAALKRTLADLDSFGLPPNLRSLIRLQQKHLEAIEEGMAECDAQIEAQAKADERCARLRKLTGIGPLTADAVVASVGNAAEFKNGRQFAAWMGLTPTQFGSGGKVSLGRISCRGDRYLRTMFIQGARSSLQRAKAVPADKATAEQQWIVQLASRMCYGKVLVAIANKHARQVWAMLARGEAYDPEAWLKHPMVQRG

SEQ ID NO: 346730 - protein, 346 aa, unidentified
MEITTIGLDLAKNVFQVHAVNGASEVVVKKTLRRVQMRRFFEQLDPCLVGIEACGTSHYWAREITKLGHEVRLMPPAYVKPYVKRGKSDASDAEAICEAVTRPTMRYVAIKSPEQQAALALHRTRDLFVKQRTQLVNMIRSLLAEFGIEIPRGIGQALMLAKRIAADDVPNIPPLASKVIAGLAGQVLDLQARLREIELELLAWLRSNDIAKRLATIPGIGTVCATALAASVTDPHQFRSGRQFAAWLGLTPLQHSSGGKERLGRISKMGDKYLRRLLVVGMTSLIRRAKYKPEAVDPWLADLLSRKPARLVTVALANKAARVVWAIMVRGGVYRMPAGASVTTSV

SEQ ID NO: 346731 - protein, 316 aa, unidentified
MSTGSLCVGIDVSQGELVVAQQPPADVWTLPNNPAGAADLVRRLRPLGPTLIVLEATGGYERTAVAALATAGLPVVVANPRQVRDFARGLGQLAKTDPVDAAILALFAERVHPEPRPVPDAALHALEAVVTRRRQLLDMLTAERNRLALAAPSVQADLRQHIDWLKRRVAKLDRDLDKKIQASPVWRTRDNLLQSAPGVGPTVSRTLLGALPELGTLTHKQIAALVGVAPMARDSGRWRGRRRITGGRAPVRAALYMAALVATRHNPVIQAFYARLLAAGKPKKLALTACMHKLLTILNAMVKANTLWRPTLAQTT

SEQ ID NO: 346732 - protein, 343 aa, unidentified
MQIAVLGIDLGKNSCSLAGLDNTGRVVMRRRLRRESVIKFAASLPPCIVAMEACCGAHHLGRILRSQGHEVRLMSPEYVRPYVKAQKNDDRDAEAIAEAATRPTMRFVELKSEEQLDMQTLHRARDRLIGERTALINQLRAVLLERGIVVPQGRRKLEQHLAAMLDEGEDVPLSPRVRALVVDMRAEWRELDRRIGAFDDEFAARARSDEAARRLATIPGIGVLNATALPAAIGTGEAFRRGRDLAAWLGLVPQQASTGGRAKLLGTSKRGNKYLRKLLIHGARSVLRPLSRSATPLGAWLRGLLARAHVNTAVVALANKLARIAWAVLSRARTFNGGAVTGA

SEQ ID NO: 346733 - protein, 404 aa, unidentified
MLFVGDDWAEDHHDVEVQDEAGRRLGKAKLPEGIAGIARLHELIAEHLDAEAEQVVIGIETDRGPWVQALLAAGYRVWAINPLQVARYRERHSVSGAKSDAADAHTLADMVRTDRHQLRPIAGDSDLAEAIKVVARAHKTLIWERTRHVLRLRVALREFFPAALQAFAELPAAEALELLGRAPDPVSAARLTTAQITAALKRARRHHAADKAQAIQAALRAEHLTQPTAVATAYAATVRAQVAMLTTLGAEINTMEEQVAAHFGQHPEVEIYRSQPGLGRILGARVLAEFGDDPTRYADARSRKNYAATSPITRQSGKKKLVLARYVHNDRLIDALQRQAYCALTASAGARTYYDQLRRRGVGHHAALRQLANRLVGILHGCLKTGTTYDEATAWPNHQQRAAA

SEQ ID NO: 346734 - protein, 475 aa, unidentified
MNVKGTKKKNQVVTANIFEQQELLKKAEAIKESLTASTWRELETNGKFDKNEKLSFISDDMLILGCDVGSETHYMRAIDTRGRELSKSVYSFNNDSEGFQSAKEWAVQIAAEHNKSQIVLGLEPTGHYWFCLAAWMISNGISVVQVNPYAVKQTKEVEDNSQMKDDRKDPKLIANLVKDGNFGMPYLPEKLYAELRRLSMFRDQLNEDRIRTINRMHREMKIYFPEYKDALGKVDGAFSLELLRQAPFPDDLISLGEDGIRKIWHEARLRGRGYSRAGEILQYAKVSVGIKDGAIAGKAAVKWFVQKILELDAELAVIENQINQKCQEIPHAGNILEISGIGENILSGILAEMGDISRFDDVKEIQKLSGLGLVACSSGKHKGETRISHRGRKRLRYWLFQAAKSAVAHAEEFKELHIYYTTRADNPLKKMQSLIVIACKLLRIIYTILKKGIVYDPKKMLMDIRRVEKKEAIVA

SEQ ID NO: 346735 - protein, 382 aa, unidentified
MGVLVYHNSGLLRPSAPLKTLGERNEKSRNQIRRNRLVGKKTLEVIRIGDNSLHQRQQFSTTEIGISKLINWLNPNDVVGLEAGSQSFRIAKSILNKGIQVIVLNPGDLATIYQSLKKTDKEDSLKIARLIQRFPIEELPTVPIPNDEEEDNRRLCTEQENWTRQLTQSKNRLHSLFTQAGLTHITKKHLRTKANREISVALLPSRYQKEAERILKVLDLVEQNLKLIEEEIKEALKKNKAYAQTIMSMPGIGMITSLAIMSYMGNCKRFSSAKQAAYYVGLVPRVDISGDSAYYGRIVNRGCHSIRRVIVQAAWSLVRCQYGGKIKEFYQRLYPKKGAKKSIIATSRKMIEILYTMIKTGELFDSMPEKVLNRKLTQYGLM

SEQ ID NO: 346736 - protein, 368 aa, unidentified
MVESFEFVVNRIVCFNPCFHKRRTTVNYVGIDLHKKTISICVVNQERQKIDYKRFACSAPQTIVDYFRRLGRFHAVVEATASYEWLVRLLEPLAERIVLAHPKKLRVIAESTRKSDKIDARVLAEFLALDMIPQAYRPTPRQREHRVLVRHRCFLQRRVTSIRTKMRRILSDYNADRRDLFTAEGMAYLAKVKLSAADRFAVTQLVAEFEFQHTQLRALAAELKKFVAQAPIAEAEARELLHSIPGVGPVTTEVVLSELAEPKRFRNAKCAVAYAGMAPGQRESAGKTKELHIERTGSKLLRWVLVEAAWQVVRRTGRWRVIFERLSGRIGRKKAIVAIARRLLGVMMALLKSGQPYRHAYEPAAAPG

SEQ ID NO: 346737 - protein, 365 aa, unidentified
MTSTNTTQPIRFQDCRREVVLGVDTHKDTHVAAVISTTGKLINSRSFPATADGYQQLLDWARSSGLVSRAGVECTGSYGAALSRFLRTNELTVIEVNQPDKATRRRRGKTDTIDAAAAAHAVLSGRATATAKLADGPVEALRLFKMAKDSAVKARTQAVNQLRAVLVTAGPELREPLDGLTIPKLVRACKSLHRSTAGTATAAAVFTLRLLARRVEELDDEITALKQQITDMTRQHVPPLLDCYGVGPDTAAALLIATGDNPERLHSQASFASLCGVSPVEASSGKTQRRRLNRGGDRQANSALYTIVLARLRWETRSRSYVERRVAEGKTRREAIRCLKRYVARELYTTIIRAHARPRDQVLAA

SEQ ID NO: 346738 - protein, 312 aa, unidentified
MAALCAAGVDVGRDFFDVGLAPSGRVFRTVNGPKGVQAVVERLRREDVSRVVLESIGGYAAHLVRALAEAGFQVGVIDPKRIRALRIAEGKKAKTDRLDAKLIARFALLMQDAARPAPSAKAFEIRALSTRRRQLVEMIAMEKVRLKQTLDEAVASSCRQIIALLSEERAKVEGLLQAELLQDAAGAEQSRLLQTIPGVGPAISMTLMADLPELGSLDRKAVASLAGLAPHPNQSGTRTGQAHIGGGRPCVRAALYLAAVSAVRSDKGFKREYQAMRQAGKPAKVALVAIARRIVVAANGMLKANRAWEKHA

SEQ ID NO: 346739 - protein, 340 aa, unidentified
MDEIKTIGLDLAKHVFQVHGVDATGECVLRKRLRRGQVVPFFARLPRCLVGLEACATAHYWARELQALGHEVRLMPAQYVKAYVKRNKNDAADAEAICEAVERPRMRFVPVKTAEQQAALLLHRGRERLVRQRTTLVNALRAHLAEFGVIAPVGLRYVGQLIDIVRDESDRRLPDLARPVLQVLAAQVEMAEAAVAAVEKDLMAWHRSNPLSQRLATIPGIGPIIATAIAATVVEPSGFASAREFAAWLGLVPRQHSTGGKARLGGISKRGNRYLRRLLINGASANLLRSKATNANPWVIGLRRRRPPLVVAVALANKTARIAWAVMHRQENYQSVAVAT

SEQ ID NO: 346740 - protein, 372 aa, unidentified
MNYNTVYVGMDVHKESFSLCAYTIEAEKAFHYQRTEADYKKVLNYLEFLRTIYGGDANFICGYEAGCLGYTLYHQLMANNVKCIILAPTTMLEQRSKKRIKTDKRDAEIIAKCLAQHNYSPVHIPTAKDEETKEFLRMRDDHKLALKKVKQQILAFCLRHNYRYDGNSHWTAAHLKWLKALMPEALYKEILDEYLLTYQTLSDKLERLDKRIEELATQDEYKEAVKKLCCFIGVKTHTALSVLVEVGDFKRFASAQHFASYLGLVPGENSSGDDQNRLGITKAGNRHVRLLLTEASQCYARGQVGFKSKELKARQSGNTPAVIAYADKANERLRRRYYKMVLNKCKKHNVVKTAIARELACFIWGMMTYNIA

SEQ ID NO: 346741 - protein, 350 aa, unidentified
MTMLSEIVDVVIGVDTHKHTHTAGIVEAGTGGELGDLTVATDPVGYGELIEFADRHHGVRVWAIESTGGYGAGLARHLQAAGEWVVELDRPDRPARRHGAKSDPLDAYRAAREALARATLASPRAPGSRAALSVRLTARRSAIEAATVAQRQLNALVIAAPELLRARLRNRTIRTMIPIAARLRGHPSWDVETVETAHVLRALAKRILTLETEAADHERALAVTVKSWRPDLLHLCGVGPINAAVVLCAWSHPGRIHSDAAFAMLAGTAPIPASSGQTIRYRLNRSGDRQLNRALHNITICRLRYDPTTRTYAERRRTEGKTDREIQRCLKRYITRQLFRQLQHPPLDTP

SEQ ID NO: 346742 - protein, 399 aa, unidentified
MLEQAWAGVDVGKEHHHCVVIDAEGRRLLSRRVANDEAVLLALISDVTGLAGQVRWAVDISTGEAALLLALLAAHDQQVSYLSGHQVNRAAGGYRGSGKTDAKDAAIIADQARMRRDLAPIRVPDEVIVELRMLVARRRDLQSDRVRAVNRLHETLLTISPALEKALDLTNQGPLILLTGYQTPAAIRQLGVTELTEWLRARKVRSAGELATRAVAAANAQQIGLPGEALAAHLAGQLAEGVIALDEQIKHTDKLIEGRFHRHHAASVILSMPGIGVLLGAEFLAATGGDTAAFATPDRLAGYAGLAPAPRDSGRISGNLYRPKRYNRQLQRVFYTSALISIRCCPESRTFYDRKRAAGKRHNQAVIALARRRVNVLWALLRDHRPYQASRPVSAAAAA

SEQ ID NO: 346743 - protein, 388 aa, unidentified
MAARTVNNLPPAGAHDDAVRCVLAIELSKKSWIVAVNTPLSDKISRHTLKPCDGKGLLDLCEQIRTRVARATMKRVEIVSCYEAGYDGFWLHRLLQAHGIRNCVIDPASLQVDRRARRSKTDRVDVERMLRSLMAYLRGEPKVWSVVRVPSVAEEDGRRLHRERGRLISERVQHVNRIKGLLALHGIYDYQPLRPDRTQQLERLRTADGTLPPRLKAEILRELQRLELVVGMIKTIETERNAIASAKIETEHGSAKKIQDLAKIKCIGPEFATTLVGEVFYRSFDNRRQLASYVGLTPAHFQSGSMCHDQGISKGGNAKARTVMVELAWLWLRHQPASSLSVWFHERVGKLKGRIRRITVVAVARRLLIALWRYLETGLLPEGATLKV

SEQ ID NO: 346744 - protein, 330 aa, unidentified
MKEQLYGGLDIHKESITGCILDEQGIVIREHKFPVKQEAVGRFTEGIPSTDIIFAMEACGMWQGVYQMFSNLGYIVKLANPKKTHDIACKKKTDKIDAKTLADLLRTRYLPEVWIPTDEILHLREITRHKSRLTRMRVQIQLKIKSTLLRRGIPYSKNIWRQTALKELEKLDPQLKSLIHLYQVFLDEEKIVKKRIETIARNKKETALLLSLQGVGALSALIIYAEIGDIHRFDSPKSLVSYAGLCPGVYQTGETQRTVKNTMVNKWLKWIMYECSGKAKIIDPRFQQYFYQMEQKTSYQIARRATARKMLTIIWHMLMKKEPYRYSISS

SEQ ID NO: 346745 - protein, 487 aa, unidentified
MAKRNQSTFERLQRGEKLSRRERKQIERQLQAAEPGWEIVHRNVAGIDVGNESHFVAVDPRQADQPVREFGSWTAGLHQMVDWLRTCQVQRVVLQTTGVYWIPVQDVLEKAGFEVAVVDARGTKNLPGRKSDVQECQWIRKLDIYGLLRGCFQLSDSIRSIRTIWRLRQRWVEETGRSIQQMQKALTVMNVQLANAISDLSGQTGMAILRAIVGGERNPWTLAKLRDARIQSSEDEIAHSLQGNWRDDVLFELEQVLAAYDFQLQQIEKCEQQLEKYMKAQPSRPAVDPVPAQAASGPEEAPKKPNKKVRRRQAPRKNRIGFDLEPELARVMGADLTVIDGIKLMTVQTIYSELGPDLSAFPTENHFASWLMLAPKRDVSGGKVIRHVWVKGRNRVANALRMAAESLTHSQSYLGARYRSLRGRLGAPKAIKAMARYLACLVYRMLTKGQDWVDRGATYYEQRRQQRELIHLQHKAEALGLQLVPAE

SEQ ID NO: 346746 - protein, 404 aa, unidentified
MNNVAGVDVSKGKSMVSVLRLFGEVVTKPFSVGHTGSELKELANYLKSLDGETRVVMEHTGRYYEPVARFLHEEGIFVSAVNPKLIKDYGNNSLRKVKTDKADARKIARYGLDNWVELRQHTPMDTIRMQLKTLNRQQGLYSKTKTMMKNNLIALLDQTYPGVNALFDSPVREDGSQKWVDFATAFWHVDCVRNMSLTAFTERYRKWCKRHGYNFSQSRAIDVHTKAQDLIAMLPKDALTKTMVQQAIDALNAVSASLERLKTEMRTLAAQLPEYPIVMAMRGVGDSLGPQLMAEIGDVTRFTHRNAITAFAGVDLGADQSGTHEAKSARASKSGPPELRKALSLVMDCLLKTMPQDDPVYRFMDKKRAEGKPYLVYMTAGANKFLRIYYGRVKEYLASLENSD

SEQ ID NO: 346747 - protein, 425 aa, unidentified
MNSNTNHKINQVSETTLVIGIDIAKQKHFACAMDDRGRVLEKSFPFFQSDAGFEQLVKRIKSLQSLHQKSEVIVGFEPTGHYWMNLAAYLVDQQIRFVLVNPMHVNRTKELDDNLQTKNDQKDARVIASLIRDGRFTYSRILTGVEAELRNGASLRSKLQEDITSIKNRMIRWTDLYFPEFQHIFKSFGKNACAVLEMTPLPIDFDGKSDKELIQLYKNVEGLQCLSFSKIQKLKMLATKSIGLTEGLEMGRFEIKTLLSQFKALSKQLEVLSSRLSELAQQLTDYEYILSIPGLGENTAVELLSEIGSLSHYEHPRQLIKLAGLTLRENSSGKHKGQKKISKRGRRKLRAILFRVILPLIQHNIAFKSLYQYYTTRTVNPLKKKEAMVVLCGKLLKILHALCVKRVHFNASLMIRDLHCLQEAA

SEQ ID NO: 346748 - protein, 433 aa, unidentified
MPTNHPYDLVIGLDRSDRKADLHLIDTRTGTVEKQTVATSPEALHDWLAQLRQDHPQDRVALCLEQPAANLIVFLETYSWINLYPINPISLQKFRETFVTSRAKDDGKDAQYLAELLLSHHDKLKPWQPDDSQTRQLQQLVLHRRAVVDQRTGLTNRLKALLKQYFPQALELCGEDLWRPLATAFLLKWPTLQSLKKARKPSLKQFYYLQGSRSQTLIDQRLERIDKAVPLTDEIALLQSYTLRVQLLCKELQLLLKTLEQFDQQIAKVFQQHPDRPIFEALPGAGPVLAPRLLASMGSERERFPQPGNLQCLSGVAPVTKQSGGKCHIQRRYHCPKFLRQSFHEYAKESILHSRWAAAYYGQQRNKGCGHHTAVRALAYKWQRIIWKCWQSRTIYKEAIYEAALKKNKSPLVSLLDQIELGKSPVKNGAKKS

SEQ ID NO: 346749 - protein, 388 aa, unidentified
MIYVGIDIAKLNHFASAISSDGEELIKPFKFTNDNDGFQLLISKLDPLDKDSLIIGLESTAHYSDNLVRYLVAKNYNVCVLNPIKTSTMRKNNIRKTKTDKVDTFIICKTLMMQESLRFVTFYDLDLMDLKALGRFRQKTIKQRTRLKIQLTSYVDEIFPELQYFFKSGLHQKSVYALLKEAPTPEAVASMHMTHLAHLLKVNSHGHFNKEVAQQLRVLAQKSVGASDSSLSIQVTHTIQQIELLDSQLERVEAEMTEIMKFNDSVIMTIPGIGYINGGMILGEIGDIHRFSSPNKLLAYAGLDPSVYQSENFQAKKTRMSKRGSKVLRYALVNAAHNVVKNNATFKAYYEAKMVEGRTHYNALGHCAGKLVRIIWKMMTDNVEFNLD

SEQ ID NO: 346750 - protein, 481 aa, unidentified
MPKQEKHSPESGEKKTEAARGKRGRRRKGMCLDDRPLLEPNAAGIDIGAREIFVAVPPDRDENPVRVFSTFTEDLEAMARWLVSCGITTVAMESTGVYWIPPYEVLEQHGVKPCLVDARGMKNVPGRRTDWHECQWIQFLHSVGLLRAAFRPDGEVCAVRSLVRHRSDLVQMTSQHIQHMHKALTQMNVQIHHVINDITGLTGLAIVDAIVGGQRDPLELAKLRDPHIKASEETICKSLKGNWRGEHLFTLKQSRQMYQHYQEQIAACDEEIEKLLVAFQPWVDPEKKPLPPDRKKKQRGRKRKNVNPKTGFDLRTESYKLFGVDLTQIPGLNSMVLTLFSELGRDMSRWPTSGQFVSWLALCPDNDITGGRVAWRGMRRVHNRAGDLFRLAAYSLHHDPSPMGDYLRRMKSKMDAPAATTATAHKIAIIFYTMVKKQVEYDASLWAQRDAERDKRIEAKLKRQAARRGYKLVPIEEKPAA

SEQ ID NO: 346751 - protein, 368 aa, unidentified
MFEQAHYKVGCDAHKRYSVFAVCDGKGKVLDRVRVNHERGAIQGFLSQFPSGTPVALETVGNWYWIVDEIEVAGCVALLAHAGKAKAMMGHTHKTDKLDAEGLATLLHNGTLPTVWIPPGDLRDERELPRTRMALSKVRTMLKNRMHSTMAKYALSLDTESDIFSRKWRPQLLDLLRRLPGETQRCMQQELELLDQVQEQIHRLEARILERVQKTPTIQLIQSVPGPAEILSIVIDREVGSIDRFPSPKKFCGYAGTVAKVKGSGGKYHYGRMIKQANNYLKWAFIEAANVVVRQRQHPNWRNKHVVKLYERTCRRKGHAVAVGAMARYLAEATYWVLKKGEPYREPVPRRPVGAKSPISPRQGQARA

SEQ ID NO: 346752 - protein, 341 aa, unidentified
MEHIITVGLDLAKHVFQVHGADRNGAVVLRKKLRRDQLLAFFAELPRCVIAMEACGGAHHWGREIGRLGHEVKLIAPAYVKPFVKRQKNDMADAEAICEAAQRPTMRFVPVKSELAQASALVFRTRDLLVRQRTQLINALRGHMTEFGMVVAQGPMHVGRLIAIVEDPVSNLLEPARIVLGVIMAELRALNDRVSVLDAEIVRRAKEDPVARRLMTIPGIGAITATALVALAPSAATFRRGRDFAAWLGLTPVQHSSGGKERLGRTSRMGERTLRRLLIIGASAVASWASRKGPVPGSWLASMMARKPPMLVRVALANKMARTVWALLAHGGVYRAPAVVA

SEQ ID NO: 346753 - protein, 340 aa, unidentified
MNYYTGIDVSLEYSSVCVLDSNGKIVREAKVLSEPEALIAWFGSLGFSVERIGLEAGPLSQWLYAAMKEAGLAVELLETRHVRDAFKAMPVKSDRNDARGIAQLMRLGWFRPVHCKSMEAQETRSLLTARKLVQSKLFDVKNSLRGILRGFGLKVGKTTELEFAGRIKELVAGHPHLEKIANSLLAVHEVLRNEFKKIEKQVNTIVRSDTRARLLMSTPGVGPIVALTYASAIDDPGRFKSSKRVGAHFGFTPKKYQSGETDYTGRVSKIGDSSVRTALYEAAHVILTKPLKGCSALKSWATRIARRAGMSKAKVALARKLAVIMHRMLVDGKPFNAALT

SEQ ID NO: 346754 - protein, 409 aa, unidentified
MNTGTITAVGIDVSKHKSTVAARRPGGEVVLLPFDVEHTAEGLKKLVAKLRQLDGEIRIVMEHTGMYWRPIAMTLKEAGFYVSVVNAILIHNFSDNSIRKVKTDRADAMKIANYGLTFWIDLQEYAGEDENRQLLKIQSRLYERTATTAGMLRNGLISLLDQTFPGANKLFRDDSRNSKGHVKWIDFVLRFWHKECVASLSLASFTDTFQKWCKRTGYKFSASDAERIHAIARNAVATLPKNDSTKLLITQATNSLNAIYDSLQAIRTEMDRLASMLPEYELVMGMEGIGKVTGPQLMAEVGDVRRFSHKGALVAYAGVDASPYQSGSFDSKSRHVSKRGSPHLRRVLFVIMSMTLIRANTANPVFCFMDKKRAEGKHFYVYTVAGSAKFLRIYYAKVKEYLNALEETA

SEQ ID NO: 346755 - protein, 324 aa, unidentified
MEKLYAGLDIHKEKFAGCIMDKDGNITREHTFPSSQKAVERFLYGIPSSDITIAIEACGLWRGAHRILTTMGYSVKLANPKKTHDIACQKKTDKVDARILADLLRTHYLPEVWIPDEQTLQFRDLTRHKATLTRLKTQVQGKIRGYLLRKGVKYGKLSKEDTLATLTDDPDINNLIQVYHSVKQEEKEVMRRIKRIAQNMKQTTMLMSMPGIAEFSSLMILAEIGDIRRFSSPKELVSYSGLCRGIYQTGSTERSVPNTAVNKWLKWIIYECSGRASMLDTRFQNYYYKIKEKKGFKTARRATARKMLTIIWHMLTNEEPYHAA

SEQ ID NO: 346756 - protein, 373 aa, unidentified
MTMIGNEERYSRASSDTVVEVVLGVDTHLDVHVAVALDQLGRRLDTFSVPTTKKGYEDLLAWAEGFGAVRCAGVEGTSSYGAGLARYLRVVGIEVMEVERPKRRHRRRNGKSDTRDAEAAARAVLAGETAGEPKGGDGRVEMIRVLRSTRRSAVKARSQVANQLQGFLVTAPEELRERLRELTTKELVAVAARLRPSKDLDNVETATKFALRSVARRYQLLSKEIAELDTQLDRLVSETAPELISLPAIGTDHAATLLLTVGDNPERLRSEASFASLCGVSPVEASSGKVVRHRLNRGGNRDANRALHLICVVRMRVDERTRRYVARRSAEGKSKQEIMRCLKRYVAREVYRVVVSAASPSPSGSCRRDVPLT

SEQ ID NO: 346757 - protein, 344 aa, unidentified
MQIVSVGIDLGKTTFHLVALGAAGKVLVRKKFTQRQLLTCTANMQTSLIGLEACSGAHFLGRALRKQGHDVRLIAAQFVKPFVKSNKNDFVDAEAIAEAVERKNMRFVPIKTDDQLDLQAIHRVRDRLISRRTAVINQLRAFLLERGLVFAKTPAKLRAALPDILENADLDLTTQMRNLIDLLWKEWKTVEDQIEGLSLELERISAADPGCTRIRQIPGIGPIVATAIVAAIGNGAAFRKGRDFAAWLGVVPRQYSTGGRARLFGISKRGNVYLRKILIHGARAAVLRIKRDRAPIGAWLDALDARAPKNVVVVAMANKLARIAWAVLSSGEDYRPNNNMATAS

SEQ ID NO: 346758 - protein, 412 aa, unidentified
MDVLYPCCCGLDVHKKTVAACLMTSTEGPEPVKEIRTFRTMTADLLALADWLQQAGCTHVAMESTGVYWRPVYNLLEGQFELLVVNAQHIKTVPGRKTDVKDAAWIAELLRHGLLRGSFIPSKPQRQLRELTRYRSTLVQDHARTLNRLQAVLEDANLKLASVVTDIYGVSARAMLAAILTGERDVETLADLARGRLRAKRDQLKEALEGRVTAHHSFLLTEHLSTLEYLDEAIARVSGEIDQRLTADQEAIALLDTIPGVGQRAAEILIAEIGTDMSRFPSAKHLASWAGMCPGNHESGGKRLSGKTRKGSRWLRQILVEIAHVASKTKNTYLAAQYRRIAARRGKKRALIAVGHTILTIAYMILTRKQPYQDLGTAYFDQREQHRVERRLVQRLERLGYEVSLQPKALAS

SEQ ID NO: 346759 - protein, 340 aa, unidentified
MQLYAGIDLHSSNNYMAVIDAEGKRVFKQKMPNDPGTILSRLEKFKDETVGVVVESTFNWYWLVDLLGEAGYRVHLANPSAIQKYSGLKHADDQHDAFWLADMLRLKILPVGYIYPKEERPVRDLLRKRGHLVRLRTSLILSLQNIVARNCGVRLNVNDAKRLKEDAIVPLLKSNEDLALAGAISEETIDFLTRKIWSVESIVQQKVKLKEEYSHLLTIPGIGKILALTIMLETGPISRFPKVGNYVSYCRKVNSKWTSNDKAKGKGNKKNGNKYLAWAFSEAAELARRYDTQCRSWYNRKMQKTNFMVAHQALAHKLARAAYCIMKKEVTFTPEKLFAL

SEQ ID NO: 346760 - protein, 423 aa, unidentified
MSYRIAGIDVHKKMLAVVVSDVEVDGEYQFERVRYSSSPEHLRLLAEWLITQQVEEVVMESTAQYWKPVWGALERYWKPICQEREGAGPKSGTLHLAQAQSNRGRRGRKKDFPDAERLVKRLVADELVLSFVPDTEQRLWRTVTRRKYQLTRNHVRLQNQLEALLEECHIKLSSLVSDLLGASARRMLKALAEGETNPATLAAMADKNLRATQAQLCDALGACTELKPIYRRLLKMFLEELQFIDQQISKLDQELASLLSQHHDAVVHLAEIPGLGVDSAQQIIAEVGAGAATFPSAKQLSSWVGACPGEEESAEVSKSHRSPKGNRHMRRILNQAANASAKSKGTIFEIVYRRLVSRLGHNQTIGAIAHRLCRLIWIILHRGVRYEERAPSVNAKTRRHRTNRMIRELRNLGYRVEPLVNTV

SEQ ID NO: 346761 - protein, 331 aa, unidentified
MQAGEGIIGIDISKDSFDVVLRGTGSEQHRVFSNDQKGFKTLLGWAEKQPERVVHVCMEATGSYWEGLAEHLYQGGYTVSVVNPYQIKRYGDHLLNRNKTDKADASLIAEFCEKDRERLRVWKPYTPEIKALRSMGRRLDELQGMKQQEQNRLKSGVTDPVVIESLQENLKQLKDQIKALWKKIKEHVQQHPDLKEQQRLLTSIPGIGKLTAIKLIAEIGDIRDFENASQLVAYASLAPKEFRSGSSVHKQTHISKQGRTELRQCLYMPAVVASEHNPIVIDLKRRMLASGHVKMEVIVAAMKKILQLAYGVLKSGEPFDPDYGHQFCFNS

SEQ ID NO: 346762 - protein, 354 aa, unidentified
MVIVGTDVHKRTHTFVAVDEVGRQLGHKVVPATTPGHLKALHWAREQFGEHLLWGIEDCRNLSARLERDLLSMGQAVVRVAPKLTAQTRASARTRGKSDPIDALAVARAVLREPDLPIACHDTVSRELKLLVDRREDLVAQRTSTINRLRQRVHELDPAAEPAPKSLDRARPCATLASWLDTQTGILAELARDELADIIRLNDTINALTVRIEDRVNDVAPALLTLPGCGALTAAKIVGEAATVTRFRSEAAFARHCGTAPIPVWSGNTAGRVRLNRSGNRQLNAALHRIAITQLRIPDSAGQRYYRRRLADGKTTKEALRALKRHLARTVYHHLHTDEAARTTPPTNDLHTAA

SEQ ID NO: 346763 - protein, 316 aa, unidentified
MIGIDVGKAHVDVAAIGGELPAALSHVGNDADGHSTLADGLARLKPELVLMEATGGYEAALACVLQAAGLRVAVVNPRMARDFARAMQRLAKTDRIDAATLAEFAGALAQRPDSERFIRPLSEPEQQDLAALVTRRRQLVSMQVAERQRLQLARPVARASIEALLEAIARQLDDVEVEMTRHVEQHHAQMAKLLQSVTGIGKVVAATLIAELPELGRLNRRQICALVGVAPYAKDSGASRGRRRIVGGRFEVRRTLYMATLTATRYNEAIRVFYERLVAAGKLKKVALIACMRKLLTHLNAITRDHLNVQGHAPIA

SEQ ID NO: 346764 - protein, 341 aa, unidentified
MKNLFIGVDFSKEKVDVAIIFADGLTETAPRVFNEFKTTVSGYKQLVKWVEQNSCGIDSSLWLFCGENTGDYSKGLCNFLYGKGYDMWLENAKSIKDASGLRRLKSDRADASMIAEYAMRNYDKAVMYEPLSESLAQLRELFLYRQMVVRHRCSFQVRRGEKRLTMEKSPIKTMISQSGRHIVSELNKEVEKIDKRIAELIKSDEELTEVFTIVTSVPGIGTQNAVCLMVYTDNFRRFNYDSRKISCYYGIAPFGKDSGTSVHSEPHVHYMANRQIKAMLTQAALAAVNFNPVMARYYMRLVERGKKKQVALNNVKNKLVHLVTAMVRNRQIFTPEYKISA

SEQ ID NO: 346765 - protein, 391 aa, unidentified
MICVGIDVAKDKHDCFILSSEGVTLADVFTIPNNLEGFNTLLDKLHACSTPQDSIKVGLEATGHYSYNILGFLLDNGLATYVLNPLRTNLYRKSLSLRKTKTDRVDARTIAAMLLSDAGLKPYTDTAYHNEELKSLTRYRFDKVKERAKLKTSISRLVCILFPELEKLVPTLHMASVYALLSEFPGAKQVAATHLTRLKALLADASKGRYGRDMAVVIRDAARCSIGSRMPAKSLELQHTIRLIRELDAEIEEIEAAIQAIMDELHSPITTVPGIGSRMGAMILAEVGDFSRFDSPDKLLAYAGMSPSTYQSGQLKNCYPHMEKRGSRYLRYALYNAAKYVCHWEPAFAAYLAKKRAEGKHYNVALSHAAKKLVRLIFALEKSRLPYCPIA

SEQ ID NO: 346766 - protein, 452 aa, unidentified
MHRTVREAQAATLAIETRGIEYLDLGALPARDTTTNKEPAMKVEHECCAGLDVHKRTVVACVLKGAPGKEPVTETKSFGTTTPELMEMVQWLKSHAATHVAMEATGNYWMPVYNLLEGHFELLVANAAHMKAVPGRKTDVQDAHWIADLLRHGLLRASFIPSREQRDLRELTRHRSSLATKRGQAANELQKALESANIKLQSVVTDITGVSATEMLTEMLGGKNDPKELAQLAKRKLRAKIPELEKALTGNLRAHHRLILEQLLSDMALFVAQIAELDAHIEKLLQKDNDDIERLDGMPGINRRVAEVIIAEAGTDMSRFPDAHHFASWIGLCPGQNESAGKRRSGRTRKGNRALRAALVEAAQGAVRKKNSYFGAQCRRIAPRRGKKKALIAVTHSLAVAIYHIIKNQTCYVELGADYFDKLNPTRVLHRLTKRIQNLGFDVHLSPVPVAA

SEQ ID NO: 346767 - protein, 350 aa, unidentified
MIIIGCDYHPGFQQIAYVDTETGELQERALQHREEAEKFYRELAAQGLKVCVGMEASGHARWFERLLAELNFELWIGDAAEIRSKRVRKQKTDRQDAQLILKLIRKDDFPQIWVPSWENRDLRQLLWHRHRMVQARTRLMNQLQAVALNEGLRCKKRLWREAGRQQLEAFRLAPWASRRREDLLELLDRLNPTIAELTQAIEREVEKCPEARRLQTHPGVGPLTALAFVLIIGKADRFRCGKQIASYLGLVPLEDSSGSRRRLGHITKQGNTLLRFLLVEAAQVTVRSDPGWRSKYHHLMMRRGRKIAKVAMARRLAVRMYWMMRKGWNYEQLKKFGSHAGQLVPGDGVK

SEQ ID NO: 346768 - protein, 313 aa, unidentified
MIIPRRYVGIDVSKRYLDIFDESLGVPERIANAPQAITQIAARWRCDVLVVFEATGVYDLELREALSQAGIRFARINPARARDFARASGQLAKTDPIDARMLASFARAMQPAAEQAANPARNALAGLAKRRDQLVLMRAQEKNRRSEAEDRAMADRIGRLIEVLDNEIAEIEADISALIKTEPEVSDDAQLMRSLPGVGPVTCMQLIAQMPELGKVGPKQVAALAGLAPFNVDSGAYRGKRKIVGGRKRVRDALYMAALNAVRRADPFKAFYARLRQAGKPAKLALIAVARKLLTVLNAIMRDRKPYLYTRPT

SEQ ID NO: 346769 - protein, 432 aa, unidentified
MLKINYMSTLFVGIDVSSKTNTVYAMDFEENKYLSSSFGNNQPGADKLVNMISDCMHKHKNLDTLLIVLESTSVYSVHISNFLSTSEVLMPYKPYVFCVNPKTTANYRKSYIGMEKTDPTDAYLIADFGRVGRTKKLEPWRGGQFIALKRLTRHRTHLSECIAREKAYMVSNLYLKFSELQLLEGDDKPFGNLYGATSSAVLTEFLSPQEIIDMPEEELLAFLAEKSRNRISDISKTSELLRKAASDSYRLDKCMYEPLNVSLASSFNCIHAYQKEVRLIEQAIEKCINGMNPNALIILQSIPGIGPVWASGILSEIGDITAFHSSDALAKYAGFYWPKGDSGDFVSEDNQMSKAGNPYLRYYLGEAANSVRKHIPEYADFYARKYAEVTKHQHKRALALTSRKFVRLVFGLLAKNQLYTGEKLDVELNTKS

SEQ ID NO: 346770 - protein, 408 aa, unidentified
MLNAVGIDVSKGRSTVAVLQPGGVVIRKPFDVYHNQNALNDLVTFIKSLDGDTKAVLECTGRYHRPIVEALHRAEIFVSAVNPHLIRNFGNNTIRKVKTDPADAKKIARYALDNWHELSEYSDMDSKREQLKTMNTQFDFFMKQKTAAKSNLIALLDQTYPGVDNLFDSPVRADGSEKWVDFAYSFWHVDCVRKLSLNAFKERYKAFCKKRGYIFNELKAEEIYSASKNLVAPLPKEDGYRDLIRFSIKQLNLESEHVEKLRVDMNVLAAQLPEYPVVMGMYGVGTTFGPQLMAEIGDVMRFTHREALTAFAGVDPGRDDSGQRVAKSVKASKCGSARLRKTLFQIMTCLLQNMPEDDPVYQFLDKKRSEGKEYYVYMTAGANKFLRIYYGKVKEYMRNLQAEQSQGK

SEQ ID NO: 346771 - protein, 379 aa, unidentified
MTCKECGQVIKLTRTMNKCHSNTELSSHEETRCQFNGGTEAIKLGIDMHQDFCVVVLQEDGANPEPPQRFQKEAFLRWAAKLARSGAEVHAVYEACGFGFALQRQLSALSIQCHVVCPQKLDEQNRRVKTDGLDAKALCLKLDRFVEGNRSALALVRVPSEEEEQKRAIHRQREQLVKARKQLEAQGRSLMVNHGLEPVKSWWRRGNFAALQVPTWMKELLGNSQPILLGLQEKIAALTIQLQSAADPKQPRGLGLMTSVIIDREIGDWHRFSNRRQVASYTGLCPGEYSSGNTRLQSCVTKHGNPRLRAALVELAWRLVRFQPNYKPIVKWRQILTKSALATGAARKKAIVAVARQLAVDLWRIKTGRLRAEELGLIN

SEQ ID NO: 346772 - protein, 342 aa, unidentified
MTCYVGLDVSMKETAICVVDEMGNRVWDGKTRTDPDAIAAVLARRAAGAVKIGIETGPMTVWLWHALTERELPVVCLHARHAAAALKLQMNKTDRNDAFGLARLVRSGWYRPVAVRSMETHRLRALLITRDQLVGMSTALINKIRGLAKTFGILVGPGKGGTFERQVRATLPDDPVVAALFESLLAMLGTLRERQHAIAKQLGRVARQSGACRLMMTMPGVGPLTAVSFMTTIEDPHRFRRSQDVGAYLGLTPRRYQSGEVDINGRISKCGDRLTRKLLFEAANVMLSRTSQALALKDWGAAVGRRSGFWKARVALARKLAVILHRMWIDGRDFEPKVTAMA

SEQ ID NO: 346773 - protein, 414 aa, unidentified
MIIAEEPTGARVCAGVDWAKDDHAVCIVGAEGEALQRFMVTHDRAGLTNMVHRLLRAGVDEVGIERPDGPIVDALLAAGLTVLVIPPAQVKNLRSRYGSAGNKDDRFDAYVLADVVRTDRRRLRPFERDTVATTALRTTVRARRDLVIHRVAAANQLRAHLQIVFPAAAGLFDSIDSEVSLQFLERFTTQGQADWLSVKRLSSWLASIGYSGGTDPGVIYARITAAPRGTIGADAATHAVMTHAYIAVLRTLNTQIRTLAVNIGAQLDVHPDAKIFTSLPRSGSVRAARLLAEIGDARGRFPTASSLACLAGVAPSTRQSGKVKAVTFRWGADKELRDALCDFAGDSRHSNPWAADLYAKARARKCDHPHAVRILARAWATIIWRCWQDHTAYNPAEHGGLQRILNQDQQTVAA

SEQ ID NO: 346774 - protein, 408 aa, unidentified
MLEVKVERCAGIDVHKKFLAVCVMIGLAHQKPASEVRRFGTSVRELERLKAWLMEKGCTEVVMESTGSYWKPVFNILEGSIRVILANPEQVKALRGKKTDPKDCRWLAGLLRHGLVQPSFIPPRDIRELRDLTRRRRTLMREGASERNRVQKILEDANVKIGNVLTDVFGMSGQSMLEALLENKLNAEQMAHLAQGRLRPKIPQIIEALEGHSMNDHHRLLLRQILKHMAFIEDMVSELDKEIWQKLRPYEKQVELACSVPGIGRDAAASILAEVGPDMSEDGPFGSPHHLASWSGICPGNNESGGKRKSGRTRKGNRWLRATLAQTALAGAAKKNSAFRDRYQRLKPRRGPQRAATAVAHAQLIALYWVLRNGRPYQETVREIDTQRRELIIRHHLKRLTELGYTPA

SEQ ID NO: 346775 - protein, 360 aa, unidentified
MPRAEARSQVEITGGVDTHRDTHTAAAIDQTGRMLGHATFPTTRAGYAALLAWLRSFGRLVLAGVEGTGAYGAGLTTYLSEQGITVVEIDRPNRKTRRRAGKSDPIDAEAAARAALGKVRTGTPKNRDSQVEALRNLRVARTSAVDQRAGCMRQIKALIVTAPHGLRDQLRGLTTARLIHTCRNLRPDSTQIGVPEQAVKTALRSLARRYTTAQQEIAELDTLITALIETINPALLQLTGVGPDIAGQLLVTAGPNPERIHSEAAFAMLCGAAPIPASSGQTQRHRLNRGGDRQANKALYLIVINRLRWDPRTHTYLAKRTADGLSKKDTIRCLKRLIAREIYYTLRQTQPTTNKQPATT

SEQ ID NO: 346776 - protein, 461 aa, unidentified
MTVARKHKQRNSDKQGVMPVMRPDAAGIDIGATEIFVAVPPDRAEENVRSFPTFTQDLYALADWLKQCAVKTVAMESTGVYWIPLFQILEERGFEVYLVNARHVKNVPGRRTDVSDCQWLQFLHSVGLLRASYRPEQEVCAIRSLLRHRESLVQMAATHVNHIQKALDQMNLQVHHVISDIMGQTGLAIVDAILGGERNPRVLATLRHERIKASEEVIAKSLVGDYRPEHLFTLRQSLTAYRSYQDLIAECEREIRQALQQFHPPSSPPAATGELENESTARKTRSSDGILRAELRQAFGVDLTQIPGIRTGIAQTLFGEIGPDFRKFRSASAFASWMGLCPDNEISGGRVLWVGTRKVNCRAATALRMAAQSLHHSKSALGDFYRRMRGKLGAPKAITAAAHKLARIIFHLVTTHQEFDDSRFAADQLRFHKHQEAKFRAKARALGFQLIPLEPVPTTVP

SEQ ID NO: 346777 - protein, 368 aa, unidentified
MRGKTFVPQDYDVFAGLDVDKKTIAATFSSQQGFIRSLQMPYNVDHLLNHVRKHFGDQKIAFVYEAGPTGYGLYDGLAAQGYRCLIAAPSMIPRAPGQRVKTNRLDSRGLSESLRGGQLKSIHVPSQIYRELRHLTQLRDTMVREAAAHKQRIKAMLLLEGIDFPPAPAGRQWSLRVKEKLRKLVCSRTVRFKLDQLLDSLEFCEKQVVNSTKEIRRFCKEDAELSQSIQYLMSIPGIGWIVASQLLARIGDWRQIDNVRQLGSFLGLVPTENSTGDTVDRGSITRVGDGRLRSKLISVCQRNPRGKGPRIAIVAVARKLSTRIYAVLKNQRPYIVRQQIHSVPLTQEETSPQGTTRRCAEPGETPAS

SEQ ID NO: 346778 - protein, 418 aa, unidentified
MSKINERCAGIDVGKRFLLCCVLTAAANEEPSPRTLRFDTTVAALIRLREWLVTERITHVVMESTGSYWIPIFNILEDHFVVVLANPEEVKNRKGHKTDRKDAEHLADLLRHNHLRASYIPPKAVRELRDLTRRRLQLTQDATRERNRVEKLVEHVNVKIGNVLSDVFGASRQSMLLALIDGNATPEQIARLARGQAKRKIPQLTEALNGHGMSDHERFLIRSCLRHLACLEEELEEVDGEILRRMQTPLFQRPFLLLQTVPGIGQLAAATILAETGADLSSFPTVEQIASWAGLCPGNRESAGIRKGSQTTHGNPYLRTALVQCAWAAVRKQGSVFQARFHQLLSRRGPKRAIVAVAHQILTILYWMLKRGVPFRGSETAPQQRRRQRRAHHHLKCLRRLGLAVQILAGTDILSENG

SEQ ID NO: 346779 - protein, 346 aa, unidentified
MSYSTTVGVDLAKNIIQISVVSGRDKELLNRSLTRKKFAEFLGKQKPSLVAFESCATSHYWARAAERHGHAVRIIPAKAVAPFRQGHKTDSNDALAVAEAARRPNIKDAPMKSIEQQGMQAILRARDRLIQECVASSNHMRGILLEFGITIPQGFAALLRQLPEALEDGDNELPDFYRPTLHCLYHRMLELRGDLEAMTGDVNLLVKNHPVCSKLTAIEGIGPIGAMSLYTSLGTGEAFASGREFAAYVGLTPRQYSSGGKANIVGLSKRIGNRKLRSVLIQGALAYVYRMKAPRTSKDRWLKDLIERAGPRRAAVALANKNVRTAWALVTQGTEYQRRGQLEVAA

SEQ ID NO: 346780 - protein, 387 aa, unidentified
MPQPNDLSRSLVALDQNSTIIAVVEMSQSSWLVGGILPGIERQPRKKLEPSPELLLALLHRWRDEAVRAGRTITRIAVAFEAGRDGFWLARWLAARGVEAHVIHASSVAVSREHRRAKTDRLDTELLKRGFLGWLRGERGHCSMARVPTLAEEDAKRPNRERDCLVGERTRIVNRIKSTLVRLGIRNFKPTLRKAAERLATVHTPEGTPLPPNTLAELQRDMARLGFVISQIREIEEARQKRLEQQHETGAHDMVRQLARIVGVGVETADLLVHELLSRPMRDRRAVARYAGLTGSPDESGARRREQGLARAGNARVRRSMIQLAWRFLMFQKESALALWYRARTADSRSGTRKTMIVALARKLIIALWRFVTTGEPLEGVVLRPAS

SEQ ID NO: 346781 - protein, 394 aa, unidentified
MHEVFVGIDISKNFFNVSIVNRRGEEIKRFKFDMDIYHFNKLLEELNKFNKKSIIVGMESSGVYHMNLYFFLRENSFNVSLINPLIISSFTKLSLRKSKTDRKDAKEIAKYLLMVDENINYFESNEIKYLVRERERISKEIGKIKNDIEKIIIVTFPEIIKFYNIYNKTLLNLIKDYPSSNRIREVSYEEIEDILNKNRRGRKSKISSKRIIELAKSSIGISSEVKERILSFKISHLLFLMDKEREIEEIIRKNIDGVMRRNIEIVTSIKGIGEVSAIHLLSEICDINRFNSYKKLIAYSGFDPTIYQSGNFEGKSRISKRGNRHIRRILWIMANSVIRYNEVFKIYFIKKIDKGIPYKKAVISVCHKLIRVIYSLIKNGSYFDPNFHLVHNSL

SEQ ID NO: 346782 - protein, 405 aa, unidentified
MEIVYTHCCGMDVHKKSVTACLITPKGKEIKTFSTMTDDLLKMLDWLMKEGCQQVAMESTASYWKPVYNLLEAAGMPTMIVNAKHIKNVPGRKTDVKDAEWIADLLRHGLLKESFIPSQEQRELRELIRYRHSLIQERAREINRLQKVLEGANIKLSSVVSDILGKSSRAMLEALIQGEEDPEKLSELAQKRLKSKKGELQKALKGLMGPHQKLMIEIMLEHIDSLTAKVKQIDEEVEKRMDPFFEIVVLLETIPGVGRRTAEQILAELGTDMGRFPTASHLCSWAGVAPGNNESAGKRKSGKTRKGNKKLRAALVEAARAAARTKGTYLSSKYQRLAARRGAKRAAIAIAHQILKISYYIIKEKQPYIELGPDHYEKTRRERTARSSIKKLESLGYKVSVEETA

SEQ ID NO: 346783 - protein, 317 aa, unidentified
MTQTNITTAGIDTSKAKLDIAVHGRSERWQVANQPAGWRELAGKLTGADVTRVGIEATGGYERGVVEHLRAAGFTVLLLQPLQVKAFGQVHLRRAKNDALDAVLIAACAAVLDPPGIPPDPRLTKLAGQLTFLEQIEEDIKRFKIRLEHIEEPALRRMVLGDIKRLKARKRAQTCHLARQLRSHPDLAARFDLVLSIPGIGERTAIALLVRMPELGRVSREEAAALAGLAPFDHDSGQHKGQRRIAGGRARLRRSLFAAALPAAFRWNSALIALYQRLIAAGKAHNAALIACARKLLIYANTVVQRGTPWTEKPAHV

SEQ ID NO: 346784 - protein, 417 aa, unidentified
MEAMQMEVVYTHCCGLDVHKKSVTACIIVPGADGKPRKETLTFGTTTKEISRLAERLIADGVTHVAMESTGSYWKPIWNILEGRFTLLLVNAKAVKAVPGRKTDVMDCEWIAKLLRHGLLPGSFVPGREQRELRELTRYRTTQIEERTAEVNRLQKVLEGANIKLGSVATDIMGLSGRQMLAALVSGSQDAAAMAALAKGRLRDKIPQLEEALQGSFGPHQRFLVAKQLAHIDFLDETIEGLDKEIAQRLRPFEEIIVRLDEITGVGRRTAEIILAEIGVDMSRFPTDKHISSWAGMSPGNNESAGKRRSGKTRKGNPALRRVLVQAAHAAGRSKDTYLAAQFRRLAARRGTKKAAVAVGHSILVIAYNLIKHGTSYSDLGGNYFDRRDREALEQRLVLRLKGLGYRVTLEPAEEAA

SEQ ID NO: 346785 - protein, 359 aa, unidentified
MQSQSNKLDFTGQNIYVGFDVHLKSWKVTIMTEHLTHKTFSQPPQPIVLYQYLKKNFPGGAYHSAYEAGFCGYWIHNNLKSLGINSIVVNPADIPTTDKEKVQKEDSRDSRKIARTLRSGDLTAIFVPSTKTLEDRCLVRTRAMLVKDLARNKNRTTSFLYFHGIEMPEAFKSNQTRWSKRFITWLDTIEMPEQSGKNSLNAIILASTNLRLSVLQITKQIKELSKTESYQEQVILLRSIPGIGLLTAMTLLTEFETIDRFENMDTLCGFIGLVPSTNSSGDNDIVGDITRRGHIVLRSAIIESAWVAVRLDPALTKSYYDYCKRMAPNKAIIRIAKKLLSRIRYVLKNKKPYVCSVVK

SEQ ID NO: 346786 - protein, 366 aa, unidentified
MKKGSTAAAKQSRNFSQQKLTIGLDLGDGSSWYCVLDEQGELQWEQKLSTTAKAMREAFRRMPRSRMALETGVHSPWVSRLLSELGHEVIVAHARNVRLIGESRRKDDRLDAQTLARLARIDPQLLCPVKHRSAKAQADLTVIRARAGLVRARTALVNSARGLAKSYGERLRSCNVRNMNPEKAEGLSPELEAALEPLLAAIESLSERIREYNQRIEALAEQSYAQVALLKQVKGVGTLIALTFLLTLEDPHRFRKSRDVGCYLGLQPGRRNSGQSEPQMHISKEGDPYLRTLLVQGAQHILGPFGPDCDLRRWGLKLAERGGKNGKKRAIIATARKLAVLLHRLWVSAEVYEPFHNSNPTMTTAA

SEQ ID NO: 346787 - protein, 483 aa, unidentified
MKSKPEEQNKRATNHPTQHQWHEMNRKQRREITRQIQSEDLSLEVIHPDAGGIDIGNESHYVAVPPGRDNQSVRRFGCTTAQLKAMAAWLKQCRIRTVAMQSTGVYWVAVYDILEQAGLEVYLVNARDTKNLPGRKSDVQESQWLMKLHTYGLLRNSFRPSQEIREMRTYWRQRNDLVQSAGRHILRMQKALTQMNIQLANVLTDISGTTGQAIIKAILAGERNPHKLAEFRDPRVKASEEQIAQSLEGNWQEDLLFVLKQEHKGYEFCQKQMAECDRQLKQYLQQREDRSHGAPLPEEKRKGPLKKKKGNAPQFDLREGLFRMTGTDLTRIDGIDVMTATTIISEAGWDMSKWKTEDHFVSWLRLCPDNRISGNKVIGKGRLPTNNPITIALKMAATTLRLSKTYLGAQFRRLRTRLEAPIAIKAMAAKLARLVYRMLRYGMKYVDQGAAVYELRHRELQIKRLKAKAQKLGYRVTPIPAAA

SEQ ID NO: 346788 - protein, 434 aa, unidentified
MAGVPVASIQFLKGRDSLSDIQNTLFVGIDVAKDSNRVHAMDFDRHRLAAFSAPNDQDGASRLETQILSTLRSADLSRCTIVIESTGIYSAHIATYLSASAALSAIDTRVYLINPKITKNYRESFSDMDKTDPADAYLLADLARVGRTDKLFPFRGSQKLALQRLTRHRMHVSDLITAEKNYALNNIYLKFSAFDAIQNGKPVFSDTFAVSAMSVLTEFRTTDEIVETPLEDLAAFLIRSSKNRLDDPLHTADLLKKAAKASFRLDQAAYDPINIALASSLTCIDCFKNELKDVNRAIANQVKGFSDSQYQSLLSIPGIGPVYASGILAEIGDISQFRDEAALAKYAGLTWRKRQSGRFNAEDTYMTRTGNVFLRYYLCEAANSVHCHLDEFARYYKTKYNEVSTHQHKRALALTARKLVRLVHGLMSSGRLYQ

SEQ ID NO: 346789 - protein, 406 aa, unidentified
MKQIVSVGIDVSKGKSTVCAMIHPNTIIKESFEVLHTVEEMSMLADYIGSLDGEIRIVMESTGHYHLPVAQFLYQKGFFVCVENAYIIRQFSRIMLHGAKTDPLDAKKLAKYGLAYWSELKPYKFHPSCYTKLSLLSKQYQTYIKLLIAAKQNVIHLMDEMLPGFKEALDTASSVQFSKVKYVDFAKEFYHVDMIKTMGKEIFRENYKQWCKEKGYRFQSEKADELFHLAEDGIPTLPTEFPSTRLCMEVATEQVSQLGYALEQILSQMQNLAKTLPEYQTIRQMGGMGEKLCVRFIADIGDVRRFHNGKALVAYAGIDAPPYQSGQYTGTKRRISKRGNSALRKTGYEVMKSLKSHPPKTDTRVYDFIIKKENEGKSKKQAQIAGLNKFLQIYYARVMEIYKNIV

SEQ ID NO: 346790 - protein, 424 aa, unidentified
MKNKIIVGIDVAKEFSYYAIITPNGEQYGKPFREENDLTGLERVSKKLKEVEKELNASCVLVMESTGHYSSILFHFFHNSNFEVCIVNPIQTNSIKNIKVRKVKNDKVDAYRIAILYKLGEIKPTKPPKKEFAQLNILTRQYIKLTDDCTMYKNNLISLIDQIFPRYNTVFSNITSKASLYILENYPSAEKLLNADKDTLITTLATLSKKGLKWAKTKYNALINVAISALKIGCAPKTSEIVIKSAITILKTLIEQKSMIEKEIKAIAENIEEVKLLTTIPGIGVISAAIFISEIRDFNNFKNARKLVAFCGIDPAVVESGKFKGDRVKMSKRGSGYLRRVLFMAALASIRKNRNGKYINPVLYNYYNLKAQSKPKKVALVALMHKIVNYIFAVLRDKKPFRIITPKEHNKLYKQTKLKLSLVS

SEQ ID NO: 346791 - protein, 465 aa, unidentified
MMHPQRRPWKKHTPGPSLLERINPNAAGIDCGAAEHYVAVPADRDATPVRSFKTFTADLHRLADWLTACGVTTVAMESTGVYWIPLYEILEARGLDVVLVNARHVKNVPGRKSDVVDCQWLQQLQSVGLLRGSFRPTAAIAALRASLRHRETLVQSAATHVQRMQKALVQMNLQLSIVISDITGVTGLRMLRDIIAGQTDPRALAQHRDARCQASEAEITAAFTGHYRPEHAFVLQQNLELFDAYQRQLAACDTAIEAHVRTLVAQAPAPAGPLPAPRTRKKPRDNEPRFNIRTPLHQLTGVDLTQIDAIGSYGALRLLAEIGTDMSPWPTEKHFTSWLTLAPHNKISGGRLLSSRTLSSANRAAGILRMAAMSLGRTETALGAFYRRLAYRVGKAKAITATARKLAILVYRTLKDGLLYHDPGAAAYDAQHRLRVVRRLRQRAANLGFSLVNRETGELIEGAVS

SEQ ID NO: 346792 - protein, 369 aa, unidentified
MHETTTAFVGLDVHKDAIAVAVAEPGRAPARFLGTTPPTLASVRKALSHLGAPQRLSVVYEAGPCGYRLARELCAEGYDCEVVAPAKIPRRPGERIKTDRRDALSLASFARAGELTAVMIPDARDEAMRDLARAREDAVRARLKARQQLKAMLLRHGERYTGKSSWTAAHERHLATVRFAHPAQNVAYAEYRSAVRDSHERVERLTAALRAQVADWRLQPLLAAVCTLRGLELVTALTVLAELGDLRRFAHPKQLMSFLGLVPSEYSSGASRRLGAITKCGNAHVRRVLIEAAWTYRFPARLARELQIRQEGQPKIVRDIAWRAQLRLCTRYRRLQARGVHQNKICIAIARELTAFIWDIARHVPLATH

SEQ ID NO: 346793 - protein, 341 aa, unidentified
MHKLPAEVFLCCGIDVSAAQLVVALEGGDGGRWLQRSFPNRASGHQALILWLNKSGTQIRVCLEATGLYSLDLALALHAASGIDVAVLNPKMVNRFAATLCRSKTDPADAQVLAEYARRMPFQAWHPPQAAALELRALTRHIAALTQQHTRQSNRLHAASASMTGSRYVQQDLKRSLRDLDRRMEKMRRQALAVIAQDAELRPRLALLLTIPGIGEISALNLLGELALLAPGLTVRQWVAHSGLDPAHHESGTSVHQRSRISRAGNRYLRRALYMPALVAVRHDPCLRTFYRSLLARHKAKLQALIAVARKMLHAIFGMFRWRTAYDGPRLFPAIDLASAA

SEQ ID NO: 346794 - protein, 394 aa, unidentified
MKLVGIDVGKNSHHFCVMDKETGELNVTPSSFSNNKEGFDFLINSLKPYSKKSILLGMEDTGHYHVALLKFLLSNGYTVALINPKTTDLTRKMEGGITKNDKLDTITICDVLDTPERKKQYRITKVDRFDFYEQRQLTRHHHDLKEELNVYCNRLQKSIDLVFPEFNTLFSSKYGVVYMNLLKTFGNAEIIASTDIRTIRKCFEIKGRGNRISLTPEKLKECAKNSIGISSEVETIQIKHLVSQITLIKEQIAEIDKKIEEFSITNNSPILSIPGISHFSGTSILAELGDIGNYSKPSQIIKFAGVAPYHYESSQYNAQHTVITKKGSKYLRKTLYQIILPVIKYNPVFKKYYLLKISQGKGHRCAQGHCIRKLLRIIYHLLETGQSFDPALLR

SEQ ID NO: 346795 - protein, 410 aa, unidentified
MDAIVECCAGLDVHQATVVACVNSGPSNKRSRKEVHTFGTTRAALEEMRDWLAASGCTLVAMESTGIYWHPVYAALEGHFDLIVGNAQHIKNVPGRKTDVKDCEWISDLARHGLIARSFVPPRPIRDLRDLTRYRRKLSQTQASERNRLIKLLESANIKLSGLISDVFGVSGQAMLLALIEGQETPAEMAQHARKRMRRKLDALAQALNGRIDEHHRFVLRMQFERIKAAEADLERIDARLSEKLVPYAQPLGRLMRIPGVNWITAATIIAEIGVDMGAFASAAHLASWSGLCPGNHRSAGKQKTGKVRKGNVHLKTALVTAAVAVAKTRGSYLGDKHRRLRARRGEMRAHVAIAHKILVAAYHILATGSDYQDLGPTYLDKLDQRRTAGQLARRLRDMGYEVDIRPKAA

SEQ ID NO: 346796 - protein, 343 aa, unidentified
MDHYVGLDVSLEQTSVCVIDGDGKTLWQGKCASTPEGLAATIRARAPAVVRIGLESGPLSSWHWHELRKLGLPVVCLDARHAKAALALQLNKTDRNDARGLAQIVRTGWYREVAVKSVDSQLIRSMLTTRAQLVRMRVDLANQIRGVLKPFGLIAGKGGGQPFIARVRALVAGGPLEQVAEALLAAWETISSQVVALSRRLIATARQDQAVRRLMTAPGVGTLVALTYVSVVDDPERFARSSSVGAYVGLTPRRYQSGEEDHTGHISRCGDKLLRTYLFEAAGIILHRVSRWSTLKAWGTRLARRIGTKKATVAVARKLSVILHCMLCDGGEFRWSAKESQAA

SEQ ID NO: 346797 - protein, 349 aa, unidentified
MRFYTKQHQFYCGIDLHANAMYVCILDSTGEVVLHKNIPTRPKSLLKLIKPYRENLVIGCECMFSWYWLADLCADEDIEFVLGHALYMRAIHGGKAKNDRIDSHKIAVLLRGGSFPLAYVYPKSLRATRDLLRRRNHLVRKKAELFAHIQNTATQYNLSDPLGRIAKPSERGDLLHKFPDPIVRRMVEVDLLTIEHYEQLLGTLEWELERLTNRQAPIELALLKSINGVGRILGMVMLYEIEDIGRFPRVQDFVSYCRLVKPEKQSNGKSYGHSGKKIGNAHLRWAFGEAVVLMLKGNKPLQTQLQKLASRHGKGKALAILAHRLGRAVYFMLKNQVPFDQELFMRKGT

SEQ ID NO: 346798 - protein, 387 aa, unidentified
MIYVGIDISKLNHFASAISSDGEIMLQPFKFTNDYDGFHLLLHKLDSLDPDSLIIGLESTAHYGNNLLEFLVKHNYKVCVINPIQTSAMRKNNIRKTKTDKVDTYIIAKTLMMDPHRFFSQHDLSIMHLKELGRFRVKLIKKRTQGKIQLMSYVDQAFPELQYFFKSGIHQKSVYTVLKEAPTTKDIASMHLTHLSHLLEVSSHGHFKKDTATELRILAQKSVGCSDSSISTQITQTIELIELLDSQVHDVESEMELIVNSLDSVIMTIPGIGFINGGMILGEIGDITRFSSPSKVLAFAGLDPTVYQSGNFNASHTKMSKRGSRPLRYALINAAHNVVKNNKTFKDYYDQKISEGKSHYNALGHCAGKLVRIIYKMLTDNVSFNLD

SEQ ID NO: 346799 - protein, 343 aa, unidentified
MERYYYIGLDIHKKIIAYCVKAIDGSLVDQGTIDADRQSLEAWVKGLPGPWVGAMEATMFTGWIYDSLKPHAIALKVAHPAMLKAITAAKKKNDRADAEKIADLLRVNLLPECYMLSEEIRELRRILRYRNHIVRTAVKMQNKMSGLLMEVGATYSKKRLHGKKYFRELLERVDDIPPSVKELLQLSRSSYEMFRSFQKRLIETLRNNQLIHDRVHHLMTIPGVGEITALTWVLEIGDSGRFLSIRKAVSYCGLCSAQKESAGKEQRGPISKKRNKHLQTMLIEAAKLAPHWNEQLAIVHEQELKKGNRNRATLAVARKLVAYMLAVDRKGADFKLPSEIRAA

SEQ ID NO: 346800 - protein, 332 aa, unidentified
MYNFFVGVDVSKKTIDVSWTDGPKPSYLNHFANTIPGFKKMIASLSKHTAVSFSEWIICFENTGTYSKALLSWLVSQEIPCLEENPMKLNGHKILSRGKSDKIDSRIICDYVYTKRDRVVPSTLTKPLIQELKKLLSQRELLLKQKQALAKSLQEQKAEFSPVLYELLEKQNKLLIDQYNLNITKIEELIDEKIKTDKEMDKNNKLAQSVIGVGPIITWYMIAYTNNFSSVKNSRQFANYIGIAPHPYESGTSIKRNAKTNKMANQQVKAIVSNGIQSAIQYDPQIQAYYVRKISEGKPEGVVYNNVKNKLISRVFSTITRGTPYGKLNSYV

SEQ ID NO: 346801 - protein, 438 aa, unidentified
MSNKVIFNLDELFISVGIDVGADFSWMSIALPNQQFVGKPYKILHNSIDSLATAVSKIKEAEELFSLESRIFLESTGIYHYPLFCYLRDKGFNCSVINPIITKNSTNINIRKVHNDRFDSKKAALVGLKPNLKVSLMPSDLALNCRNLCREYYDLMDNRSAYVNKLQGELRMAFPQYLGIFSKVTINTSLTLLGTYTSPSAFLEADKQEIIDIIKSTARFGLTYAQNKYNAIIQAATDANQFGYIIDSNIKRIRLYISFIRKFDEEINSILESLHELVDANKDTDFVKQIHLIETFKGAGFLSAVSIMGEIGDFSAFSKPKQLFAYFGLDPAVKQSGKFEGTKVQMSKRGSAIARRVIHTLTLQSISISRNGEAKNSVLREYYIKKCDSKPKLVAMGAVSHKVCNMIFAILRDNKPFKIIAPQEHIKQYNAAKCDIAA

SEQ ID NO: 346802 - protein, 497 aa, unidentified
MPTKSSIYAHCNPQLIKLFEAAGHPAKVACVALDYAKAQHTALICNGLGDLLKGAFAVDNAPTGAGQLLQQVRSTAKQRRIRPEHVFFGGEDYPSYAENFVRRLRQEKFLVVRVNAWEAKQQRSNFQASSDSLDLLGIARCCLNRRGETVRDLPVAYTNLRIATRDRDHLVRNRTAVSNRIHSYVDRVFPGFLNVQKSGLCPFCKASLDLMVDRFSPEQLSRRPRKALADWLGRHGVEQPDEVAAQLKELAKGVLGPAPEQTIMLQRSLAKLIELYRGLEESITLLDRELAYWLARTPGALLTSIGGFGITLAAGWTAELGPPSQWRAVRQLCSYAGVVPKSKQTGGPQKEPVVGPVQQRCNKRLKNVVLQAVEKVRQYGPEDLLQAAQQLEAQGSHVEFGLAKRLVRLGKYLALTGTIYRPKALLASDTPKATLVTYYQTLWDKLLKKWKDKADLKDVFAPEHPLGQWRNMARELYALELHLPQQRATPSPSASAP

SEQ ID NO: 346803 - protein, 432 aa, unidentified
MDVLYTHCAGLDGHKKQLTACRWVPDPTGQCVEGLTEIETFGTMAIELLGLVDWLTEAGITHVAMESTGEYWHPVYNLLEGHFTVLLVKAAHVKNVPGRKTDKADARWLAKLLRHGLLQASFIPPRGQRDVRDLTRYRTKLVQERAREVNRVQGVLERANIKLASVVSDVMGVSSRAILAALVDGRADPATMAELARGRLRSKLPLLEQALSGLVRDHHQQLLAMQLTHIDFLDEQIATLNTTIAERLRALTPTETVTVPVAADEPAGGRAPHVDAAAPLTFDQAIILLDTIPGVDRRGAEMLVAEIGTDMSRFGTAARLAAWAGVAPGNDASAGKRRSGKTRKGNRALRTGLVQLAHSATHTKETYLATLFRRLAARRGKQRAIIAVAHSILVSVFSILVRHEPYRELGATYFDLLQQSQSVERLTRRLEQ

SEQ ID NO: 346804 - protein, 340 aa, unidentified
MRQLYAGCDLHGNSNLIGIVDGEGKRVFKKKLPNDFSLVRDTLKPFQEELVGIAVESTYNWYWLVDALMEEGYKVHLANPAAIQQYSGLKHADDKHDAFWLAEMLRLGILPEGYIYPKEERPVRDLLRKRGHLVRLRTSLILSLENIISRNFGSKLPVNYVKGLRKDRVSPLFEGNEDLALAGKVSRETIDFLTHQIRQIEGVVEKRIQLKEAYRYLLTLHGVGKILGLTIMLETGPIGRFETVGDYTSYCRKVPSQWISNGKRKGSGNRKNGNKYLSWAYAEASDFARRLHPESRAYYNRKMQQSNPAVAHSALSHKLARAAYYIMRDQVAFRPEKLFG

SEQ ID NO: 346805 - protein, 341 aa, unidentified
MNIKRIGIDLAKQVFQVHGVDGQEKVVVRKKLSRAQMLVYFQKLPPCLIGMEACSSAHYWARELQKIGHTVKLMAPQFVKPYVKSNKNDANDAEAICEAVARPTMRFVAIKSIEQQDIQAVHRIRSELVQQRTAKVNQIRGLLGEYGLVVGQRIDVLRKALPLMLEDAENGLTVDFRTLLEGLQQDLITLDERVDDMDKKIKLLASSNEDAKRLQQIPGIGPITATALISAIGDGKQFKRGRDLSAWLGLTPRQHSSGGKDRLLGISKRGDAYLRTLLIHGARAVLKVAGNKEDPRSRWIQNLCGRRNKNIAAVALANKNARIVWALLTKKTDFLPEGKPA

SEQ ID NO: 346806 - protein, 317 aa, unidentified
MDSRTTESFAGIDVCKASLEVALSGGKQVLSFRNDKRGVRALVGHLRGEQPALIVLEASGGYERLVVTALTAAQLPVVVVNPRQVRDFARATGTLAKTDAIDARILCHFAAAVRPEPRRLATAEEQALSDLQARRQQLVEMITAEKNRLRTAGPRVAPQIARHTRWLERQLQDLEGELRDLVQSSPVWRAKGELLQSVPGIGPALSAALLANLPELGELNRREIAALVGVAPLNRDSGVFRGKRRVWGGRRNIRTMLFVGALVASRFNPLIKSLYQRLCAAGKPKKVALVACIRKLLTIVNSMLRTKTTWNPKLADL

SEQ ID NO: 346807 - protein, 343 aa, unidentified
MDYFAGLDVSVKDTSVCIVDGTGKITREVKVASEPDALLAVLNNPAYHFKRIGLEAGPLSQWLFSALAEADLPVICVETRHMRAVLKARINKTDRNDARGIAQMMRVGLYRPVHVKTLRSQKLRTLLTHRKLLQSEAIAVENDLRASLRNFGLKVGVVGTVKFEARVKELVENFPDLLALVEPLLVVRRVLREQISILHRRVLAAVRNDEVCRRLMTVPGVGPVVALTYRATVDVPARFRKSKSVGAVFGLTPARDQSGESDRPGAISRCGDEMMRTTLYEAAQVMLLRSAKWSWLKAWAMKIARHRGMKKAIVALARRLAVIMHRIWIDGTEFRWTREAAAV

SEQ ID NO: 346808 - protein, 349 aa, unidentified
MLIIGCDYHPSFQQIAWVDTESGECGEQRLAHSGGEAERYYRGLNGQRVRVGIEATGHARWFEGLLAELKYELWVGDPAQIRAQRVRKHKNDREDARLLLKLMVEDRFPRVWVPSAENRDVRQLLWHRHRLVQMRTRVMNQLQAIAMNEGVRRKKGLWSQRGREQLETLTLANWATRRRKDLLDLLDRLNPRIEELSEAIEQEAVQRPEVQRLMTHPGVGPLTALAFVLIIGSPERFRGSKQIGSYLGLAPCENSSADRQRLGHISKQGNALLRFLLVEAAQAVVRFDPEWRRHFLHLAMRRHRAIAKVAMARKLAVGLYWMWRKEWDYRQMAQFGSHVGQPVTGHGVK

SEQ ID NO: 346809 - protein, 434 aa, unidentified
MHTHYTTLFVTLDIGKNVHWCGAYEGFELKPVIEPLKVRSNQAGFEQVTAVIDGLLSCGRYQQVVLGHEPTGIYHEAWARALAERYGDHQAGRAAPPVAYYFLNPLLSKRKREELARGRKRKTDRLDLRAIAFCLRDGLGQPAFLATDQALCFQLWGAAYRKNHRQRQRLTVALLAQFDRLWPGVLVNVKRFARMHPELDTPQPLVHSKPLERQRVRAIIQHCPNPHHFLALGPDGIQTFFRSHIGRCGPATANLAHKVAQQALLPPPDLAQLLAQQLQAEFAHYLALEQHLTALAQQADQLVPHSPAAVLSTIPGVSNLLAARYLAHLGHPHRFAQAKEIWAFAGFDVVTEESGDFRRVGHITRKGAPGLRDTLYLIGLHTAQYVPAIGRTKQRALARGKREVAATLHAAHKANRLCHHLLFHQLPFDPDRSR

SEQ ID NO: 346810 - protein, 341 aa, unidentified
MKTRTFVGLDVHRKLVVATAVDPLGKRIRQSSFGPKPNELTRFLSRLPKPTKVVLEACSVWERYYEAAVSTGAEVVVSHPLRTRLIAEASIKTDKVDSAALANLLRLDSIPLTFVPPPEIRALRRLYLERDFYARTKSSIMRHAYARLAERGVDYGKGALQHRPQREKLREHGIPEFDRAIDSMDDLERTCKELDAEIHAAFLKSEDAQLLKTIPGIGELMAVGIAGFLCPIDRFPNVDKLTSYTGLCPTTHQSADTLYHGKLKKDVNRSLRALLVAASWTHRVHLPKGEVSKLVRRVVRRKGKMRGTVVGAHKLLRIIYAILKQRRPYLPRAPEGFASGQ

SEQ ID NO: 346811 - protein, 423 aa, unidentified
MEIVYPICCGVDVHKKFFVATLITTEGMVPRYQKRRFSTFNNQILAFKQWLLDNNCRDVCMESTGKYYVPVYNLLEDSIRVTVANPKWVRAVKGNKDDVKDSKWIGNLFRLGLVPSSFIPDRDTRILREFTRYRFKLMSCKSSEKNRYQNVFTVCNVALDAVVSDMFGKSASSITDYIINSDTFDPNHCVSLLQRSLKKKADEVVASIDGFQMTPAQKLRARAVREHYDFLIDHIQALDNAIDGLAAPLESAITLLSSVPGIDRRSAITVLSEIGTDMSLFGSSKRLCCWGGLTPGNNESAGKKKSVRITRAGVYLKPALVQVAHAAVKDKKSPYYAIKYNHISKRRGKKRAIIAIARMILTAIYHMLSTGEVWNPCDLYQVDMPPELREKELQKSIRRAAKLLVAQGVVDAETVKTLFADSA

SEQ ID NO: 346812 - protein, 313 aa, unidentified
MKRCDPSTAVAGIDISKKRLDAALYGSDETFAVGNDAAGICVLIAAFKRAGVVRVGFEATGGLERGLRRALEEAGFEIVMHQPLEVRLFARLYRRKAKNDRIDAQTIAAATARSETLQAARDPLLVELAERMTVYECVADALAQLRTFKASLSLTDARATIDGEIQRLAQLKQAIARDLLARVRQRPDLARRHLLLMSLPGIAAIVALALLVRMPELGGLRRGQAASLIGLCPFDRDSGAFHGARFISGGRARPRRFVYLAALSARRRPEFKAFADRLAAAGKKPKQILIAVARKLIEAANLILAQDRAWVPA

SEQ ID NO: 346813 - protein, 428 aa, unidentified
MEHAGPAAQADGVPFLQGCGHADSARLLDTHYVLGWDGPGLSQLVHGLKDLPCPNVDREGVLRATASGSSAGPIPKEALMRFYQQQHRFYCGIDLHARSMYLCIVDQTGAVLFHQNLPTSPEAFLHAVAPYRDGLVVAAECMFAWYWVADLCRDQGIPFVLGHALYMKAIHGGKAKNDKLDSHKIATLLRGGTLAQAYVYPKGMRETRDLLRRRSFLVRQRALLVAHIQNEASQYNLPAFAKKLTFAANREELQVADHFPDPSVRLSVQTDLALIDAYDTRIGELELYLSRHAKIDDGNTYQRLQSIPGVGKILALILLYEIHDMRRFADVGNFLSYARLVRGSHESAGKKKGAPGKRIGNAHLKWAFGEAACLLVRHSARGKAWLARKQKKHGKAKALAILAAKLGRTVYHLWRKREVFDEARVFAS

SEQ ID NO: 346814 - protein, 450 aa, unidentified
MREPEEIQDEAYERVLDRVCAIDVGKASGKVCTRVPHPSRPGQRRTRVWDVDATTNAILELGQYLASERIEKLTLESTSDYWRIWFYLLEAAGLDVQLVNARDIRNAPGRPKTDKLDSVWQAKMTERGMLRPSFVPPVEIRQLRDYTRLRVDLTRERTRYWQRLEKLLEDSLIKVSAVASTLDTKSVRDMLEALIAGERDPKVLADLARGRMKAKRAALIEALTGRFDDHHAELTRMLLDQIDQLNVQIDRLTTRIEELIAAIPAAQGADADGTTGPGADRGADAAVLPAIDRLDEITGIGREGAQAIIAEIGLDMGRFPTAGHLVSWAKLSPRTIQSGASSRSGRTGKGNPYLKGVLGEAAAAAARTDTFLGERYRRIVKRRGKLKALVAVARSILVIIWQLLADPTARYQDLGSDYYARRTNKDRRARSHIRQLEALGFTVTLTQAAA

SEQ ID NO: 346815 - protein, 360 aa, unidentified
MNATTVAVDLAKNVFQLAVADGQWHVVESHRLTRAQFERWFPNREVSLVIMEACGSAHHWARWLNGLGIEVMLLPAAYVRAYVKRNKTDAADALALLEAARCADIVPVRVKSVEQQALQALHRTRSLWMGTRTSRINALRGFCREFGLAVPQGARTGIEAIARTLADPHTPIPAMIHRARRFLVEEIRLLELRIGQMERELSELAKHSPACTTLLSIPGIGLLTATAMVAATGGSVSHFKDARHFASWFGLTPREFSSGNSRVLGRISKKGDRYLRMLLTHGARAVLRAASMARQAGKTLDGLRGWGLAVQERANHNKAACAVANKLARICYATLRDGEPYGTPSRLAHKLNRSDFAIAV

SEQ ID NO: 346816 - protein, 313 aa, unidentified
MSQNNQSILYVGLDVAKLTLQLHLAGRLHSLANDPKGHAQLLKLLSAHPSVHVICEATGGYEQAPVRVLQAVDIAVSIIEAGRVRYFARAQGQRAKTDPIDAAVLTAYGYAIKPAATPALSASQQQLAAVAQRRRQLLDLRTVELNRAEHYTDPFCVRQTRRLQKSLEKQIQQCNQTITELIAQDPILAHRAKRLQAIAGVGPVTAATVLAEMPELGKLNPQTAAALAGVAPYNYDSGPLKSTRHISGGRQTVRCALYMATLSAVRYDRILKAFYQRLLAAGKKPLVALTACMRKLVVLMNHLLKNDKFQLAS

SEQ ID NO: 346817 - protein, 459 aa, unidentified
MPKKSSNKAKSQRSRERALLQKVHLNAAGIDIGADAHWVAVPEDRDANPVRSFGVFTRDLILLCEWLKRCQVETIVMESTGVYWIPLYQMLERKGFEVRLVNAHHVKNVPGRKTDVKDCQWLQQLHTFGMLGGSFRPQAQMCVVRSYLRLRDTLSKDCNSLVQRMQKALTEMNVQLHRVISDITGVTGMSILRAIIAGERDCLKLAQLRHPQIKSSALDIAKALEGDYCQEHLFALQTALELYDSYLLKIMACDRHVQKALSTFEAKTSAPAPELNGMRSAEKRQEALRRHHLEQMTGADLTKLPGLDLLAVERILSEIGLDMSRWPSEKHFCAWLNVAPNHRISGGQILSSKPRKNANRAAAALRLAAQSAMQSKSAIGAFIRRIKSRLGAPTAINAGAHKLARLVYRMLKFGKAYVETGQEAYEKFFKERTLRNLQRKAHQLGFQVTPITTPTVPVS

SEQ ID NO: 346818 - protein, 383 aa, unidentified
MKSVCGLDVHKDSVYLCILSEFGELIEKVFGVLTYQLEEMRDLMLHHHVVEVSMESTSVYWIPIWRVLSPHFKLNLANPYFIKQLPGRKSDVKDAQWIAECTMKELIRGSFVPPEIIQQLRQYDRRIFDLNEEIVRKLSKLDAVLQRCNIRLSNYVSNVDSKSYKAVVRAISQGITDPEELVKLIHGRIINHHGIDVITASLKGVVSLAEIDMISQLRDELDMAEAHKEKCQTRMLEICEREFPEELRRLQTIPGIKERTATSLIAEIGTDMNKFETANHLASWSGLKPRNDESNKKIKSRSITHGNVYLRKTIIECAWAASRTKDCFFSRFSYHQTQVRKKNKMKVLVAVARKMLIAVWHVLHDNTIYIDFTTDRKTSQTRG

SEQ ID NO: 346819 - protein, 363 aa, unidentified
MGETTTATDRGKLTVGLDVGDRYTQICVLDEDGEVLEEGRVATSPRAFRQRFAALPPSRLVLEAGSHSLWAHRLLEEVGHEVIVANPRMLRFIYGNDSKNDRADAGYLARVGRLDPGLLHPVTHRSEESQAHLVLLRSREVLVRSRTRLISHARGLVKPFGVKLPHCGAQVFASRVREHVPDILLPALGPVIDIVAVLTEQIQDLNDKVETLARDIYKETALLAQVPGVGTLTSLAYVLTIEDPSRFSRARAVGSYLGLRPRQDESGTLKPQLRITKAGDTFLRHLLVECAHYVLSSNSQDTDLKRWGLKLAERGGKAAKKRAAVAVARKLSILLLRLWTTGEIYEPLRGAPRSTEPGLVPSS

SEQ ID NO: 346820 - protein, 330 aa, unidentified
MRKETEAGIDVSKDVLDVAARRDERQLETARFGNDAAGHQKLVRWLTRGGRTARVVLESTGTYSLDVALALHRTRGVAVTVANPRAIKQFTGALMQRSKTDLTAAIALREFAIRMPFVAWQPPAAHVLELRGIARRIATLVVERTRERNRLHALCATAERSAVVCNDIAVNVRHLDRRIELLTEPAIALIADHADLREAFERLVSVPGIAAHSAVQLLPELLVLPPGMTVRQWVAHAGLDPRAHQSGTSVDKPARISKVGNAHIRRVLYMPALVAVQHNRHVRAFFDKLVARGKTPLQAYVAVMRKLLHAIYGMLSTRTNFVGAKFHAAA

SEQ ID NO: 346821 - protein, 353 aa, unidentified
MKTYYVGMDVHRASIVMVVLNGAGKVVMQSVIETGAERVRGFLKQLRGKVYVTFEEGTQANWLHEVVRALVTEVVVCDPRYNKLLQSGNKNDRVDAQKLAELLRNGALREVYHGDNGVRALKELVRSYDCLVSDTTRVMNRLKAIYRGRAIGCAGHEIYCQDRRQQWLEKLRERGAKQRASCLYQQLAALKPLRHEAKRLMVKEARRQPAYPWLLSVPQFGSVSVAQLLAIVGTPHRFRSKRQFWTYIGLAVVTRTTADHEVVNGVLRRSQRPVSTRGLNRNHNHLLKRVFKNAANGACHGGPFKAAYELRVTQGMVPSLARLTIARQLAAITLAVWKRGEQFNPERMKQQAA

SEQ ID NO: 346822 - protein, 332 aa, unidentified
MSVYVGIDVHRKRSQVAVIDQDGEVLANRNVPNGVKPILGVIGGLPAGTPAAFEAAFGWGWLEALLEDYGFEPHLVHPLQCKAIASARLKNDKVDAAILAQLLRADLLPEAWIAPPPVRELRALVRHRIQLVRLRTLLRNRIHAILADHGQDRPAGCWSGPGRQWLASLELPAASREVIDDDLALIDALQQPVDRLDWELHQRAKADPRVKVLTRLPGVGPFTALVILAETGDVSRFGSARKLAAWAGLTPTVRGSDRTVRHGHISKQGSAWLRWILCEAAQTAKRHPDFAASYQAIAHRRGKKIATTAIARKLLTRAYHMLTDASSGGAPR

SEQ ID NO: 346823 - protein, 321 aa, unidentified
MQSFHLGVDVAKAKLDCALRLSDGKYKHKVFENSQNGFVALREWLDKQGAINPQVCMEATGVYWEAVAEFLANEKLRVSVVNPAQIKAFGASRLVRTKTDKVDAQLIAEFCRERQPEPWQVPSPSEQALRALVLRLEALQAMRTQESNRLEVARDIVRDDILGHIQWLDDEIKALRKKIRDHIGGDPDLKNKQALLDSIPGVGESTIALLLAFGMHSGRFANARQAAAFAGLDPRQHESGSSVKGKPRMSKVGHAFLRKALYMPAMVTLYKTDWGTRFRERLAASGKPPKLIIGAMMRKLVHVAFGVLKSEKSFNPALQNA

SEQ ID NO: 346824 - protein, 461 aa, unidentified
MARSRARRSPPRAAPPGALPQLNANAAGIDVGATAHFVAVPADRDAEPVREFGTFTGELYRLAEWLRACGVETVALESTGVYWIPLFQVLEERGFAVKLVDARQLKRVPGRKSDVLDCQWLQQLHTFGLLAGAFRPDDQICVLRSYMRQRAMLTKYAGQHVQHMQQALVQMNLQLAVVLDDITGATGLRIIRAVLAGERDPHRLAALRHGKCKHDEATIAAALRGDWREEHLFALGQAVELVEAYQAKIAACDARIQVHLQQFADRGTGVPPPPGPPPRADRHDLSFDATAELYRLTGVDLTAIDGLQAHTVLKVLSEIGLDMTRWPSAKHFGSWLGLAPNNRVSGGKVLSRRTTPTANRAATALRVAAQTLHHSKSALGAFLRRKAAHLGMPKAITATAYKLARILYTMLATGAPFVDPGQDYYERAYTARVVKRLSRRASDLGYTLVKHDAPQALATSG

SEQ ID NO: 346825 - protein, 377 aa, unidentified
MSKLRFVGLDVHAETIAVAVAEAGGEVRSLGVIPNRLESVRKMIGKLAPIGTLKCCYEAGPTGYVLYWQLAQMGVACEVIAPSLIPTKAGDRVKTDRRDAEKLARCYRAGELTPVWVPDADHEALRDLVRAREAAKKDQLRHRHRLGKFLLRHGKRPTDAGKAWTQKYLNWIRIHVHFDQPALEATVQYYREEVEHIAERITKLEQAIDEAVQQEPSEIRAVIEALQALRGVAQTTAATVVAELGSLSRFPNPSQLMGYSGLVSSEYTSGNRVQRGRITKSGNAHLRRVLLEAAWTYQHRPNVQGRVLRRQKSLALSEEARQIAWKAQQRLHKRFAALTARGKERNVAATAIARELLGFMWAIAVHTEAQQKQAKAA

SEQ ID NO: 346826 - protein, 351 aa, unidentified
MEEYIAFDSHKRYTWVEHQEANTGKTRAYRLEHGAGAIRQALVGCAPGTAVAIEATANWYWIIDEIEQAGCVARLVHPRKAKLMMGLINKTDKLDAHGFNTLQRNGTLPTVWIPPGALRELRELTRTRLVLVAQRTRWKNRITATLAKWGLPPSAYSDPYGKRARVELEQQLERLPEQTRWATRQMLAQLDSLSEQAQQFEKRLEQLVEVTPMMQWLMTLPGVGIILAATIALEIGEIERFANAERLASYSGTTPRVHSSGDRTRYGRTRPDVNRYLKWAFAEAANSVAVNHRRNPERHVSRLYARLRGSKGHARAVGAVARHLAEAAFHVLQRKEVYRDPSLNPRPETGV

SEQ ID NO: 346827 - protein, 370 aa, unidentified
MSQSRTLFIGMDVHKDTIAVAYVAHDHGAEVPSLGTIGTRRCDLDQLVRKMQSQATHLIFIYEAGPCGYWLYRYLMKKGSDCWVVAPSLIPQKPGDRVKTDRRDAVQLARLARSGALTAVYVPTVEDEAIRDLTRAREDTISDRKDAKLRLKAFLLRHDIRSTGRAKGGPAHLRWLSEVVCPTPTQQIVFQEYVRAVPEHTERLQRLEQALQEHVKTWRLSPVVEALQALRGVQCTVAVTLVAEMGALTRFDSPRELMKCLGLLPSEHSSGAQRRQGSITKAGNTHARRVLVEGAWAYRYPAKVRRHVQLRLEKQPKVLQDISGKAQVRLCQRSRRLTSRGKHANVVTVAIARELTGFLWAIAKEVPSVV

SEQ ID NO: 346828 - protein, 346 aa, unidentified
MMIIGCDYHPSWQQICWLDTATGETGERKLEHASGEAERFYRQLPAPALIGMESTGNCQWFVEMVTRLGHDVWIGDAAKIRAAEVRQQKHDRRDAALILKLLLEGRFPRIWTPSGEEKDLRQLLIHRYKLVRIRAQVKTELQHLAMNQGVTRKRKLWSKAGEKVLRELPLKPWTSRRREDLFKVREMLNGQIDLLDQAVVEAAEKNERARLLMTQPGVGPITSMAFVLTMGDVNRFQRGKQVASYLGLIPREYSSGGHQRFGSISKQGNRFMRMLLVEAAQGAVRCDPGFRNEYLHRCHKKAKGVAKVAAARKLAIRLYWMLRTNTGYPEVVRVESSSRVALVSAS

SEQ ID NO: 346829 - protein, 457 aa, unidentified
MVNKRAYKRVSVNDIDRNQLLEAALTGGKTGTVLGLDIAKNEIVGCVRWGTGQFERPWKIVNPKGILTLIELCQLLKSKCDGFSVALESTGTYGDAARYALSQATISVQRISGKAVSDYKEIFDKVPSQHDGKDAAMIAELAAFGKGTLWPYTALSEIQQRINHQVRRIGALRTQQTQWTGRLEALVAKHWPELTSELKLGSVTLLKLFETYGSPARALADPRLALNLAMWGRSPMTQEKVSGVIESAKTTMGLPMGEPDADWVKEVACETLKALREVRTCDRKLRELIANDDVMARYSDAAGASTLAVIWSKIGDPIEYSSSGAFVKAIGLNLKEISSGKRKGELGISKRGPAQARRWIYYWAMRAVQRPEFAKWYEEFIRVGSVRSKSTGEHRKMKALIALMRKLCKSLWHVRKHEKEFDYTKVIESIPEPSSKRRRKRKGSNKQTLGPAPNPGI

SEQ ID NO: 346830 - protein, 344 aa, unidentified
MNYYAAIDVSLELSSVCIVEATGKVVKEVKVETRPEALVKFFKNFGLPLTRIGLEAGPLSQWLHAGLTEAGFETVLMETRHVKAALSAMTVKTDRRDARGMAQLLRMGWFRPVHVKSPESQEVRALLVARKQLQHKLTDIELSIRGILRGFGLKVGKVTDKAFEARIRKLASGHAMLEQIAEAMLAARATLLEQFNKLHKAVLDIVRHDEVCRRFMTTPSVGAIVAITYKSALDDPNRIKKSRNAGPLFGLTPKRYQSGETDVTGGISRVGDAMVRTALYEAANVLLSRVTRFSALKRWGLQVAKRRGLKRAKVAVARKLAVILHRMWLDGTAFRWTKTKVAHA

SEQ ID NO: 346831 - protein, 394 aa, unidentified
MKLIGIDIEKNKHFFCVMDQQTGEIISQPVSFSNDKEGFDFLVQEIKSYPKDSILIGMEDTGHYHFALLKYLLDLQYTVALINPKTTDFNRKMQGGITKNDKLDTINICDVLDTPERKKQYRITKVNIFDLYEQKQLTRHHHNLKEEENVYKNRLQKCIDIVFPEFNKLFNSKYGIVYMNILKMFGSAENIANTDIRTIRKCFEIEGRGNRISLTPERLKECARSSIGISSSAEVIQIKHLTAQIELIEEQLTEIDKKIEEFSIQNNSPILSIPGISHFSGTSILAELGDISNYSKPSQIIKFAGVAPLHYESSQFNAQHTAITKKGSKYLRKTLYQIILPVIRHNPVFNKYYQLKISQGKGHRCAQGHCVRKLLRIIHHLLKTNQQFDPQLLR

SEQ ID NO: 346832 - protein, 400 aa, unidentified
MRVVFGIDVSKVSSEVAILVNGEKVHGYTMSNDAIGFSRLLGDLKTVHKPEIIFEATGVYSRRLQTFLDEHGYAYTRLNPLEAKKQLDSLRVRKTDQIDAEKLAQSQFVLNRKTTYVQKEVYQNLRDLSRFYQNLTEDIVRAKNRLHKALQVTFPELENILSTPTGEQYWNLVIAFPCKDFVLELSKDKLLESIRQSTSKRISDKRVAYLAEKLIALANQSYCAVKKTSPMLEEVRYYTKELLRLSEQRQAVLDEMVELAQPLPEYDILLSIPGIAETTATSIIGELGDIRRFQSANQINAFIGIDLRHYESGNFLAKEHITKRGNPYARKILFKCIHNIASASHTNPCHIADFYEKRKRQSQTTSTKPHTIASIHRLIRTMYYLIMHNKLYDYASTQNR

SEQ ID NO: 346833 - protein, 296 aa, unidentified
MLIMGCDFHPRYQQIAMMDTETGELVERRLEHENGEARAFYASLPKPVLVGMEAPGYAQWFERMLAEFGHELWIGHASEIRAGVVRKQRTDARDAQHLLRLLLEKRFPRIWIPSPAERDARQLLRHRYKLVCFRVSVKNQLHGLAMSQGVCRKKKLFTAQGREELEKLSLGPWGSRRRQELLGVLDQLNPVIDELDRAVRQEAESRADAARLMIHPGVGPITALAFVLTLGPVARFRRSKQVVSYLGLNPKERSSGDKQYTYAISKQGRRNAVDLARGRAVNFSESRREPQKFGQR

SEQ ID NO: 346834 - protein, 346 aa, unidentified
MLYAGLDLSRKRLDVHILDEDGRTVEVTAVSPDAPGLRRLAAHVLRFGDEVDGAIESMTGARFVHDTLERYSWDVAIADAAKVKGIAPLAAKTDRIDARVLAELARLELVPEIWLPDPSVRAERERARFRLHLVHHRTALKNRIHATLMTFGHPVPFADLFGAGGRELLTRLALPEPWTGTLATSLRMVDVLGAEIDACEADLRRLGADHPSIPLLLTVPGIGPLLAYTIASEIGDIGRFASPKKLTGYTGLCPLVRQSGNRDVRGPLAKNGPKYLRWALIEAATHAARDAHYRERYERTKRRLGRQRGAKVARIDIARKLAEAIWHVLTKNEPFAPAGPTKLLVA

SEQ ID NO: 346835 - protein, 451 aa, unidentified
MFSERTSVGLDVHARTTMAWALDGETGEVFSERLDAETHKVLAWVATLPQPAAVAYEAGPTGFVLARALDSIGLRCMVAAPSKMERPAGDRIKTDKRDAQRLAKLLRMDELPVVRVPTLAEEAARDLVRGRDDVRRDLARARNRISKLLLRQGRVWRGGSGWTYIHHEWLRKQRFDDADTEFAYDNGYEEVLALETMRDRFDQRITDAAARPEWCPVVRRLSCLRGIDTLSALGLAVEVGDWQRFTGATIGAYLGLVPSEHSSGPNRFQGPITKTGNSQARRLLVEASWYHYKPLPRSRRDPAPPDGTGLPAGTATGRPRQPAAPPAVGILPRPEEEHQRRRRRGGPRTRGLVLEFGGDGLTLRGPQNGRREAGRASARDDARGPYEHPLRRATLDCRPEAPSPTNIRSCGNQPADIRLTARRRTTRHRPPAGPTEPPPGPHRRAHTLLPT

SEQ ID NO: 346836 - protein, 324 aa, unidentified
MNKNKQFCGIDISKDVFDVVDHTDCHHQYPNDEVGFKDFHKILTKKSHCVMEVTGSYYQCLASWLHSKSIDVSVVNPLSVKRFIQMRLKTSKTDKADARMIRLYGEAEDPDLWQPPSEYIIEANELHRLVALLLRQRTALKNKLHGLNAKGVKKGPVITSICRQIRNLDTEVSVLELKLEEVVKAHQADLITRLCSIPGIGKRTAIYLIVITQGFEKFETSRQLISYFGLDPTIHESGSSVRGKSRISKTGNNLIRNLLFMCSFSACQHNKSCNEIYNRIIAKGKSKKLALIAVANKPLKQSLAIAKSGLYYDENYRSVNLNNV

SEQ ID NO: 346837 - protein, 302 aa, unidentified
MEHFGIDLHQKHSEICGLDASGKGKVQERVATSETGLRKVFGKRKSCRVVLESGGQSSWAARLLGEMGHEVVVVNPRRIRLIAESSLKTDRIDAEILARLARQEDSQLRPVYQRSEGAQELRTRLRVRTSLVRVRTALINSVRGTLRAHGYRMSSCLAARFAARFVDLKMEAELRQVLDPLVATIAEVSTRIEHLEKDLVEESGSDELLVRFQEVPGVGPLVSLGYIGWMDKPERFQRSRDVGACLGMRPKVRDSGDRQWRGPITREGDGEMRRLLVQAAHAALHCRRDSALKRWPCSSRPE

SEQ ID NO: 346838 - protein, 366 aa, unidentified
MKQQHNRSEFTIGLDLGERRHRFCVLDGKSEVVEEGSLSNDRACLARLTARYCGALAVMEAGAHSPWISRYLEGLGWQVIVSNPRKVRAIYQHERKSDQRDALMLARIGRMDRALLYPVRHGSEEAQQDLLRIKLRDSLVRARVALINSVRFSLKSLGYPVSNPSSERFHKVAMEGLPEVVRQMIAPSVQALAELSARIAMLEREIRVLARTKYPQTLLLQQIPGVGAITALYFVLKIEDPHRFKNVRDVGAYTGLCPRRDQSGQSDPQLRISKRGDAYLRRLLVSAAQYILGPFGPQSALREYGLMLAADGTTRGRKRAVVAVARKLAVLLLSLWKNRSHYEAFPHWQTIEDKRSGTIAIHRVEA

SEQ ID NO: 346839 - protein, 321 aa, unidentified
MNGWLGIDVAKETLDVALVSERQRTYGQFGNDVAGYAALLRWLKKRKLAECHACLEATGVYGEGITEELYKQGITVSVVNPARVRGYADSQLSRNKTDKLDAYLLADFCRTFNPEAWTPPPPEWRELRALVRHLEDLSHAHQQLTNQMDSGTPSAIVQTHWQTQLALLNEHSQQVKQAITVHLDHYPDLKRQKDLLISIPGIGDLTAARLLAECRSLTAFTNVRQLVAFAGLNPRHHQSGTSICKHTAISHRGSASLRAALYMPAIVAKRHNPVLRRFAQRLLDRGLAPKAVVVAVMRKLLHLAYGVLKSGRPFDPAWLPS

SEQ ID NO: 346840 - protein, 411 aa, unidentified
MEVVYRRCSGLDVHKETVVACIMIREGGQVQKEIRMFRTMTSDLIVLHDWLQAHGVTHVAMESTGVYWKPVFNLLEGSFEVLLVNAAHIKTVPGRKTDVKACEWITDLLSHGLLRGSFIPPEPIRDLRDLTRYRKSLTDERVRGVNRLQKLLESANIKLSSVATDVMGVSGKAMLEALISGSTDPEVLSDLAKGRLRKKLSLLKEALQGRFRPHHRFLLGEILVHLDFLDEAIERLSEEVVNRIVPFSKVIELMDLIPGIDQRVAEGIVAEIGIDMSRFPTHRHLASWAGVCPGNNESAGKRKSGKTRKGDRWLYRYLIEASWSITRSKGTYLYALYHRLVPRRGAKKAIVAVAHSLLIIVYHVLKNQVPYHELGANHFDKLNLTHIKRHHVRRLESLGFRVILEPLKKAA

SEQ ID NO: 346841 - protein, 414 aa, unidentified
MLKIVYRICCGMDIHKSFVVACIASTNEQGVTTYKSKRFSTFTGDLRRCADWLSENNCKDVCMESTGKYWIPVYNILEPTCNIVLAHPKYVKAIRGKKTDKRDAKWIADIFKHDLVAGSFIPPADIRQLRDLFRYRWKLTSFTTGEKNRAQNCLTVSNFKLDDVFSDVFGKAASAITSRILENPTEKITDVSGFRTKGMKATNEQVLAAVDGEMCKEQAEKLRIIRSHMDSLELCKLNLESLILATAEKYLPQLNLVVTAPGIQSFAAIGIISEIGVDMSVFPTSKHLCSWAGLTPQNNESAGKKKTTRISRAGAYIKPLLVQCALNAIRAKKFPEVRNRYLALKKRRGHKKAIIAIARMLLTAIYNMLKKNEPYNPELYRKGDRPPVHREVSVAEAIFILQRQGYLVAAPPTV

SEQ ID NO: 346842 - protein, 425 aa, unidentified
MRSVGLDVHLDFCEVAIVEDGEVRSAGRVETKPERLELFAGSLCPDDRVALEVTGNAWEIARILEPHVAQVLVVSPSDTTIRQARAKTDRLDARTLARLLAAGSLDGVWMPDEATWVMRRRLSRRSQLVWARSRAKNQVHAVLMRQLVGRPPFSDVFGTKGRQWLAELELAFEERETVDSAVRQIAFLDSEIATVERLIAQAALQSAEVKRLMSVPGVNVIVASTFMAAVGDIHRFKNPRKLVGYLGLDPRVRQSGPGPATHGHISKQGSTRARHALVEACWTTVRQPGPLHAFYQRVRGRRGHSVAIVAAARKLACLFWCLLTREQDYAYQQPSLTKKKLRRLEIAAGAPKFSPDAAGIWAANNAMREAELELARQAEVAYARTVRDYHAAQAGKTAKVGASVTPGHASKRPKKGNAARQTTSP

SEQ ID NO: 346843 - protein, 347 aa, unidentified
MKEITTIGLDLAKQVFQVHGADAEGAPLFNRKLRRAEVLRFFAKLPPCLVGMEACGSAHHWAREISAFGHDVRLIPAQYVKPFVKRGKTDAADAEAISEAVTRKTMRFVPIKSADQQASVMVFRTRALLVRQRTQAINSLRAHMGELGIISTVGIANVKPLAAIVRDESDERLPPAARFALEEVVDQIDRLAMRIEKLEREIVAIAKQDEDMRRLATIPGVGAITAAAVKAFIPDPAGFKSARHFAAWIGLTPKSHSTGGKQRLGRISKMGNSQLRSLLVVGAASILRHVRRDDKTRPWLRELIARRPFKVVAVALANKMARMIWALLIRGGTYRGPTRLLAESAPA

SEQ ID NO: 346844 - protein, 344 aa, unidentified
MVIAVLGIDLGKNVCSIVGLDEAGAVVLRRRMKRETLTGFVAKLPACIVAMEACCGAHHLGRLCLASGHDVRLMSPEYVRPYIKAQKNDDRDAEGIAEAATRPTMRFVELKTQEQLDLQTLHRSRDRLVSERTALINQLRAILLERGIIVPQGKRQLQQYLIGMMAESDANDLGARMRILIADGQAQWRDLDRRIALFDAEFVAFAKENEDARRLVTIPGVGVTIASALIAAVGKAETFGRGRDLAAWLGLVPRQWTTGGKPKLMGISKRGNKYLRKQLIHGARAALPHLAARDTALGRWAKDLISRVHPNVAVVALANKLARIAWAVLRRGERFTAKGMPQAA

SEQ ID NO: 346845 - protein, 351 aa, unidentified
MALYVGLDVSLRMTSICVVEADGSSVWEGKAESEPVPLVKVLSPWRDKIVLVGIEVCPLSEWLYGALVESGFQIVCIETRHAQRFLSSRPNKTDRSDARGIAEMMRLGHYRSVHVKSKASQLLRTTLIARKKFVDHMLAIEDTIRGLMKVHGLKLGAVHRSRFAARVETLLADAHDLRMAIGPLLEARNMMRKHKALMDRQLSQMARKDHVCERLMTVSGVGPLVSLSFKATIDDPNRFKDSKAVAAHLGLTPRVYQSGEIDRSGNISKCGDKLMRHALYEAANSHMRISKKWSTLRAWGVKLAKTYRGQKSMRGSCPQTGDYHASDVGRGNGLPLRKAACDPTHIRIVPA

SEQ ID NO: 346846 - protein, 366 aa, unidentified
MKKTSTVRANGNMIFKGHKLTIGLDLGDRWSNFCVLNKAGEVLLEQKLATTPEAMKQTFERIPRSLIALETGTHSPWLSRLLKELGHEVLVAHAQKVELISKSNRKDDRHDARTLARLARIDPELLGPVRHRSAKAQIHLTVIRARAELVSARTALVNGARGLAKSYGERLPKCGTEQVSRELAAKLSAELREVLEPLLNEIESLNERIKEYDARMEKLAKESYPQVALLKQVKGVGTQIALTYILTLDDPHRFAKSREVGCFLGLKPGRRDSGESRPQMHISKEGDRYLRTMLVQGAHYILGPFGEDSDLRRWGLRLAERGGKNAKKRAVVAVARKLAVLLHRLWVCGEVYEPLRNSHKAMRAAA

SEQ ID NO: 346847 - protein, 368 aa, unidentified
MKQGIRMAERGSIAAVGIDVGDRFSHWCALYGDGSVGARGRVRTSGEAMLEQGKQWPGVRVAIENGTHSGWISRVLTTAGCEVVVANPSRWRGTAHNSKNDRNDAEALARVVRVDPRLLFPIQHRGQQQQQDLALIRVRAQLIKARTQLVNTARGVVKSLGGRLPSADAAYFVPRTWPQVPAELHAALEPLYQSLLALNQQIRTLDKGIEQLSRQHYQQTARLRSVPGVGPVTALTYVLTLGDPHRFTSSRAAGAYLGLRPRQRQSGERDPNLGIARNGDGYLRSLLVECAHHVLSRGPDSALKQWGLALAGGGKRPRRRALVAVARKLAVLLHKLWVSGQRFCPFPEETVDAQRRAHHCLGAAAATV

SEQ ID NO: 346848 - protein, 350 aa, unidentified
MLYVGVDAHKSTSQITVMNEAGVILRRKRVNSTSEGFKGALAGFNEPFKAVLEASYSWGPMYDWLDDVSEEVLLAHPLKVRAIASARIKNDRIDSEVLAHLLRANLIPAAHAPSREIRALRRVLRQRMFFVQLRTMLRNRVRALLAQHSVKLPADERIYTREGRAWLDRVALPGSDAHLLQADCELHNSIEVRASTDTLINKLAAQDPSVKWLISLPVIGRFLSVLIRWEADDIHRFPDAKHFVSYTGLAPSTYASSSRLVHGALTKQGNKWLRWAFIEAVTPAVRTSEFVRDHYMKVKSRRGTKDDALFDSKKDCRDHLRRLERTTLLGGNSQLTSSKRLRLPSITSWA

SEQ ID NO: 346849 - protein, 401 aa, unidentified
MVKENFIYVGIDLHKETHTAVMIDCYNQKLGEITFPNRPADFPKLVTKVKKCNTDAKEVVYGLENAYGYGRPLAVWLIDKGYFVKDVNTAISHRQAKHRGAMYRKSDSDDAEAIALATLNMLDKLPDACPNDAYWSLGQLVHRRDNIMKQRTRLVNQLHEQLCIAYPSYKSFFNDISRPTALYFWEHYPSRKYLRGKSVEDLRKELVPVSHNRCSTKNCEKILDAAASDKVKNNAYQDARDMVTLSIVSDLQHYDSQLAEVDKMLEQMYKMLGCTLTTIPGVNVITAVKILAEIGDIKRFSNANKLAQFAGIAPLHLSSSGKGKDVATKQGNRRLQATIYFLAIQMVQVSSKGTPRNSVVRAYYEKRKAEGKTSQQALICISRRLISIIYGMLKQDRKSVV

SEQ ID NO: 346850 - protein, 406 aa, unidentified
MADIFALDVSMGKSYCVWYRGKHCLKEFSLVHTKAEFNALRDMINEAQKPIIYFEATGIYSRVIEHFFETNGLRFCRLNPLELHLKSESLRRVKTDQKDAHRITLTVQENTFRLTVPWKKDYLQLHELSRFYNQLNADWNYRLNHLHTALEQVFPELKQLFVNKTSKLALNIVELFPHPALVRPYSRVKLKNILMASTDKRISKMKTYKYADRLIDLAQQSYPAVSSDAIQVDEVRYYTRQLIALARKKEEVIKRIESIAQLLPEYGLYYSFPGIGKQTATQLVGELGDISRFDNSNQLNAYVGIDIRRHHSGTYAGQDHINKRGNPIARKLLYFTIGNMIRQQHVNPNHIVEYYYRLKEKRPYPKLNKVAMVACMNKTLKCLLSMIKHHEKYHYRYTDSMVPVRA

SEQ ID NO: 346851 - protein, 404 aa, unidentified
MIVVGLDWSRCKHDFVLMNLHGDILERGTIAHNINKLEELAARIEQHVDSANQVRVGLELNDGALLAWLVAKGYTLFGIQPKSAQRARDIYRPSGSKDDKIDAFVLAEFVRINADRLRPWSPPSDITLKLRELLRWREELVHQRTAAYQRVRALLAEWSPQLSELCNNLERIWQLDILRQFPTESRLCQAHGNRIRSFLRNHCMRSQKQQQIEKIRQSVPMPVSGGRGYIIEKQTVCLVKQIQMLTAEIKQIEEDLQQITAQHPNVNVFKSLPVQGTATIASLLAVFGDNRKRTMSPDELAALCGVAPVTVASGKAKKVRQRRACDHTFRQALVHFAFNTAFCQGCWAGPFYQRKRSEGATHHAALRCLAKRWLKILHRMWKDQAAYDEQLHQANQKRNQNHAA

SEQ ID NO: 346852 - protein, 335 aa, unidentified
MEHCAIDLGGRKSQVCVRASDGQLLHEERLETASLKRYLQGIPRCRVVMETCAEAFGIADAALALGHEVRVVPATLVRSLGVGARKTKTDRRDAQVLSEVSCRIDLPSVHVPSARSREWKTICGMREALIGCRTKLINTVRGWMRGQGLRIRRGETTTFSRRVRELGSVPEHVESQLKAIEALCGEIKAADKRTAKLAAGDAVCRRLMTVPGVGPVTSLRFVSALDEAGRFPTAHRVESYLGLVPGESSSSESRQKLPITKAGQSGARWTLVQAAWSLRIACRSADARPMQLWAAEVEKRRGRRIATVALARKLTGILFALWRDGTTFDPARAAR

SEQ ID NO: 346853 - protein, 356 aa, unidentified
MISSTKYTGMDVHTQSISIAVRNSVGKVLMDCVIETKASTILQFIDGLRGDVRVTFEEGTWAAWLYDLLKPHVTQVVVCNPRKNALLQEGSKSDKNDARKLAELLRLNHLQPVYHGENGIRTLKELSRSYLTINKDLTRVMNRLKALYRGWGIACPGNDVYAPRHRAEWLDKIREAGVRRRAEHYYQQLDVLRFLRQEVRRDLLVESKKHRGWKPPRQISGIGPIRAALLIALMQTPHRFRTKRQLWNYSGLGLETHDSAQYRVVKGQLERSNKPVTLRGLNKDYNHDLKDIFKGAALRASIAAGPLHGFYEALLAKGRKPTMARLTLARKIAAITLIIWKKEVRFDANHLKQQAA

SEQ ID NO: 346854 - protein, 309 aa, unidentified
MVFNVTDSEGNYYKFKNNGLGFKKFTKLLSNDSHCVMEATGYYHYQLAYHLLESGIKVSVENPLSVKRFIQMKLSKIKTDKSDSKLICEYAQKVDLKLWQGNSKVELECLQITRALAIYTKQMTMLKNKLHGEAVLGEPSKAVVRSLKRSLTHLNKEAKILEDKLLVLVKQSHQDLLTRLKTIPGIGPKTAIMLVVLTGGFDRFTSAAELCSYAGLTPVIRQSGSSVKGRPRISKIGNQKLRNLLFMCSFNACKYNKACRDLYERIVAKGKSKKLALIAVCNKLLKQAFAIAKSGLIYDNDYRSTLVKN

SEQ ID NO: 346855 - protein, 355 aa, unidentified
MNATKYVGMDVHTSTISVAVFNSDGKLTMESVIEAKRNTIVEFIQGLRGELFLTFEEGTWSAWLYDLLTPYVTKIVVCDPRRNALLKEGSANDRIDARKLAELLRLNSLRSVYHGENGLRTLRELVRAYLTIGQDLVRVMNRVKAIYRSWGIPCAGQSVYHPLHRDEWLGKITQASVRRRAEFYYQQLDALALLRKQARKELLAESKKHQAWKLLRSIPALGPIRAAVLVAIVQTPHRFRTKRMLWRYSGFAVVTQTSADRQYVDGQLRRSKKPAFVRGLDRAHNHHLKYLFKSAAIQASTTKGPFREFYEALVAKGMRPEMARLTLARKIATISWMVWRKGNAFDAKYLKPQTA

SEQ ID NO: 346856 - protein, 352 aa, unidentified
MKYIIGCDAHKRYSQFTVINERAELCLQTRVNHERGCIHEFLSRFPKGTPVALESVGNWYWIVDEIESSGCKPRMAHAVKAKLMMGNVDKTDKLDARGLATLLLNGALPTVWIAPAEVRDERQLHRTRMWLCKQRTALKNRIHATLAKYNRVLPTKSDIFTPKWQMALQKLVDTLLPETARCLRQELELLKYLQGQIEQMEERIHERLETTDCIQLLQTMPGIGEILALVIEREIGDISRFHSAPHFASYAGTVPTTSSSGGKTWQGRMRKQANQYLKWAFIEAANVIVLNHNHPSWRLKHVVKLYERIRSRKGHAVAVGAVARHLSEATYWILHKKEPYREPDHKLVSQTG

SEQ ID NO: 346857 - protein, 343 aa, unidentified
MKLSRVGIDLAKNVYQLHGVDRSGKTAWKRRLKRHQWLKVLLDRTEPGCVIGMEACASAHHWGRELQSRGYTVRLIPPQFVKPYVKSNKNDARDAEAICEAMSRPNMRFVTVKTVAQQDIQATHRIREELKVRRTAKANQIRGLVAEYGLVAPKSLSSLRAAIPCWLEDAENGLTHYFRCLLHGLWDDLLTLDDRMREMDKTIKRLAKDNEDCVRLEQLRGIGPMTSTAMIATVGDARQYHKSRQMAAGIGITPRQHSSGDKHRLLGISKRGDVYLRMLMIHGARSVVASAKHKDDRLSRWVTEIATRRHPNVAAVALANKNARMAWAILRNKTDYDPDFAIG

SEQ ID NO: 346858 - protein, 354 aa, unidentified
MRDEQNPVCEAAVWIGVDVSKSTFDAALAEGGQGGFPPLGKLPARCFSRSPEGVAELLSWLRASGVAPESARVVMEATGRYSVEMAAWMAQACPPLSPAIASPRQTTAFIKSLGLRNKTDRMDARALALYGVERRPRAYQPPPVSEGELRELVRYRDFLVQQKVAVENRAGETRDSKFIQRETRRQLLQLERDIAKTEREMERVKKASPELETDIELMTSIYGVAFLTASTIRAELGDLRRFEKARQLTAFAGLNPSLRQSGSSVRGRTHISKAGNPRVRRALYMSAMVAVRGDNDFRNDYERLLAQGLSKMAALCAIMRKILVLMRALLISGKPYVPLWKNRPQLQEKMCLEA

SEQ ID NO: 346859 - protein, 499 aa, unidentified
MTVVWIFQAELIPDRKLIDLRRAHLFLLLSNYFILPMEKSTTRQKKRKLNIIHPYAAGIDIGSRSHVVSVPPDLDDEPTRTFNGYTDDLKFLVQWLIGLGITTVAMESTGIYWIPLYELLSNAGLEVYLVNARHVRNVPGRKTDVNDAQWLQQVHSYGLLQASFLPDRDIAQLRSFMRLREQLTRSRASIQQQIQKALMQMNLQLQHVVSDVMGVTGRNIISAILLGVRDSKELAELRDERCKNSKEMIEKALCGNYESDHLFELQIAFEIYNTYSSKIEAAEEMIEEALLQLSKTAQKPLTGFDKADILRSLPSVPKQRRKKVLSFDPGPMLQAITGRDVLQIPGLGEGTILTIISECGTDMTRWKTSKHFTSWLGLAPQNKITGGRIKSSRTRGGAGRAATAFFMAAMRVNKLDSALGAFSRRLAARAGKGKALVATARKLAVLFYKMMSEGFTWNDMGSEAYEEQIRQRQVKNIIKKAETLGLRVLEDSLEAAPAS

SEQ ID NO: 346860 - protein, 349 aa, unidentified
MNKRDDCGVEVSAKQLLVGLEREGAARTRREFANTPEGHQALVRWLVVPERRLRVVMEATGLYGLDLALRLDAEPSVELMVANPRAVRHFAIALMKRSKNDPIDTEVLVEFAQRMPFQRWVRPSPPALALHALARRLESLTEMHAAEKNRLHAAQLSPALPAAVVRDLQRSLRGLERALARLTRQAVEVLGQDPDLNLRYQLLLSACGIGPTSAVQILAQLAVLSADLDVRQWVAQAGLDPRQYSSGSSVHKKTRISKTGNRHLRRALYMPALVAIRHEPHLRAFYLHLLARGKAKMQALVAVMRKLLHAIFGMFKHQQPFDGARLFPLPAEPALPQPDFSTAEAPCAP

SEQ ID NO: 346861 - protein, 427 aa, unidentified
MKYKQNDKILQLTEDTLIIGVDIAKYKHVARAQDYRGIQFGKALTFVNTHNGFTSLMDWINTLKEKQGKVDLIIGMEPTGHYWLPLAYWLDEQDIKVVVVNPAHVKKSKELDDNSPTKNDVKDARVISRLIENGRYAVPNLPKGVYAELREGMNLHDQLMKDLQGVQGRVHQWIDRYFPEYTMVFSSWEGQASLRVLGMELFPDELVECQEDMILDEIRESVKRGVGIKKVRQLKDVARSSIGIKDGRDMARLRLRSLLAQYHLLKEELSNVWESIENLLEGIPGVQEMSEIQGVGKKTVAAFLAEVGNLKNYDHPDQIIKLAGLNLRLATSGKWKGRTVIAKRGRPKLRSLLYKVILPLVAQNPAFKALHQYFTTRNDNPLKKKQSLIALCCKLVRILFTVARKQTGFSPEKMLRDIPHFNELKAA

SEQ ID NO: 346862 - protein, 354 aa, unidentified
MSQKLDTSPAVIGIDIGKNSFHIIGQNQRGGIVLRQKWSRGQVETRLANLPPCLIGMEACVGAHHLSRRLQMLGHDARLMPAKYVRPYSKGQKNDFRDAEAIAEAVQRPTMKFVATKTADQLDLQALHRVRERLVSQRTGVINQIRAFLLERGIAVRQGLHSLRSELPGILATRTDVLLPRMLRIIEDLAGDWRRLDGRIEGLSSEIETLARQDQACERLMTVPGIGPLISSAMVAAIGTGDVFSKGRDFGAWLGLVPKQISTGDRTILGKISRRGNRYLRALFVQAAWVVLVKVKCWERYGLKSWIEAAKKRLHHNVLAIALANKLARIAWAVLNKGRAFECVKTAEMASRPA

SEQ ID NO: 346863 - protein, 360 aa, unidentified
MFTERTSVGLDVHARSVVAAAIDGVTGEVFRARLVPAPQEVIRWVGSLPGPVAAVYESGPTGFGLSRALAAAGIRCQVAAASKLQRPAGDRVKTDARDALHLARLLRLDEVVPVRVPTEVEESARDLVRCREAARADLMRARHRLSKLLLRHGIVYSGGKAWTQAHDYWLLKQSFPLAGTQAAFQDAYETVVLAAGRRDRLDTAILEMAADGQFTPVVRRLSCLRGISTLTAFSLAVEIGDWDRFTGAGIGAYLGLVPSEHSSGASRSQGPITKTGNAHVRRLLVEAAWHHRKPYRPTAVLRRRWQLASPAAVARAQAGNHRLHQRWVGYSDRKKRPVLANVAVARELAGWCWSLAMLPE

SEQ ID NO: 346864 - protein, 460 aa, unidentified
MQIVYKRCCGMDVHKDSVTACLLLIDAEGEFLVEKRRFGTMTQDLREMSTWLKSQGVERIAMEATGVYWKPVWNILEAEKDFDLLLVNAQHVKNVPGRKTDQKDSEWLADLLQHGLLRGSFVPPLEIRQLRDLTRMRTRVRQDLATWANRIQKVLEDANIKLGSVASDVLGVSGRQMLKALIAGQRDPKQLAELARGRLKEKVEALQLALEGHFTEHHAFQLQILFQFVEFGESQFEKLTIEIRRLITKVEQNPCQPAEQESMPLEAVQPKLSPSVAPKTAEPASAKEKSRLQTAVDLWKTIPGIDEITASMLVAEIGVDMGQFPSAHHLSSWAGLCPGNNESAGKRRSGKTRKGSIWLRRTLCQAAWAASRTKNTYLSAKYRRMIVRKGKKRTIVAVAHSMLIIAYELLKGGNPYRDLGADYFDRLDSRGLQKRLVNKLTNLGFDVTLTRKSEPAIQAQ

SEQ ID NO: 346865 - protein, 385 aa, unidentified
MTIRFKGYKFIPRNYDVFAGLDVDKKSMSITFADHAGAQRALRMAYSPTPLLNYVRKHFPGQRVAFAYEAGPTGFGLHDELVRQAYTCVVVAPSKVPRAPGDRVKTNRLDSRKLAENLRGGQLRGIHVPTAVYRDLRHLVQLRDTHVKQLTASKLRIKSLLLYEGIPFPDPHEKWSARAMRELQTLPCSETVRFKLNDLLDTLHFHFQAASRATKQIRQHCLHDPELEQSIELMMSLPGIGWIVASHLVARLGDPQQIKNGRQIAGFLGIVSSEHSTGDKENRGEITRSGDSRLRNKLIQTAWTAIRQDPELRAFYRRIYQRHPKKVAARKAIVAVARKLTNRIYVVLKEQRPYVIRPDSSIAPLTAEEIIGPRDRLDTAQNDQP

SEQ ID NO: 346866 - protein, 320 aa, unidentified
MSGSIGIDVAQADFVVASEGVAGSRSYPNTDRGCRDLIKDLSREAGSVERIVVESTGGYERRVVAALGAAGLPVVVVNPRHVRDFARSKGQLAKTDQIDAHILADFAARIQPRIKPLPSEEQEDLRELLTRHEQLVQMLVAEKSRLLQAEGQSRHALRKKIKNHIKFLEREINMLDSDLDDALKNSEVWQEKDDLLQSVPGVGKGTSRTLLGLVPELGTVNAAEIAKLVGLAPFNRDSGKSRGSRHVGSGRGRARAMLYMATLCATRCNPVVRTWYQRLLAAGKPRKVALVACMRKLLVVLNQMIKTKTRWQATLAPATA

SEQ ID NO: 346867 - protein, 319 aa, unidentified
MIDEDDKRVLEKRLPNDLSVTLKALLPYRETLQGIAVESTFNWYWLVDGLQEQGYDLHLVNTLAVKQYDGLKYSGDRHDAFHLAHLMRLGILPTGYIYPKTQRAVRDLLRRRLFLVRSASAQLISVQSQVWRSTGVRIKSADLRKPDFEARGVEGYTLQAVAAGLAVYQATQREIDGLERSVYEAVKLSDDFKILQTVTGIGLILAMTIMLETGTISRFAGPGNYASYCRCVDSRRDSNGKKKGEGNARAGNKYLSWAFSEAAHFAVRFEPLAQRFYERKKARTNGIIAIRAVARKLARATWMMLKHQVPYDARLMFPG

SEQ ID NO: 346868 - protein, 314 aa, unidentified
MSEKIFVGIDVSKDRLDIAASNGERWSCANREGDFTELLERLRGWPVELIVLEASGGYEGAVVGSLAGAQLPVVVINPRQARDFAKACGRLAKTDQIDASTLALFAERIRPEVRPLKDEQTRELEALLQRRKQLLNMLVAERQRLQIATPTVRTDIREHIHFLVKRLKDVNGDLDELMRKTELWREREQLFKPVKGVGPQTLRTLCASLPELGKLNRRQIAALVGVAPYNCDSGTLRGKRHCWGGRAEVRCALYMAAITATRCNPVIRTFYARLLKAGKAKKLAITACMRKLLTILNAMARDTSAWNQNMHVIA

SEQ ID NO: 346869 - protein, 328 aa, unidentified
MYLCILDHEGKILLHRDIKTDPDVFLKTIAPFREDIVVAVECIFTWYWLADLCDREAIPFVLGHALYMKAIHGGKAKNDKIDAYKIAALLRGGMMPMAYVYPSDMRSTRDLLRRRTHLARKRAELIAHIQNTNHQYNFPDMGRISRKCDRNKAGVSEHFTDPSVQKSIDLDVALIEHYDKLLNSLEQELSNIAKVHDADSYFRLRSIHGIGRILGLTILYEIHDINRFPSVQDFVSYCRLVKSAKESAGKIVGSSGKKIGNAHLKWAFSEAAVLFLRGNPEAIKYRAKLERKHGKAKSLTILAHKLARAVYNILKKKEVFQPKVFFAK

SEQ ID NO: 346870 - protein, 333 aa, unidentified
MQTAKKIVGIDVGKGKLDICYPNGQKETVRNIKSCRTKVIKKAAKLGAFIAFEATGPYEEPLADECLARSVRAVRLDAWKTRRFAESQGRIEKTDAIDCEMIRDYAASLKDEKLHFVKPRSEAQKRLKKAVKTRKNLLKARAIIANQFEDDLDPETARHLRSALASLDRNIAKVEAECDAAIASDERLRELDGRFREVKGVGPCLSRMMLAQCPDIGDFNSKSVAKMCGNAPLDHESCTLKGKAKPRRGRSDLKKALYMAAVSASRNNHILREFYQRLVANGKPRKVALTAVARRIAVLLNTIAKHPDFKPAQDPKTAAKTSRAKRGRPRKAK

SEQ ID NO: 346871 - protein, 408 aa, unidentified
MNTLYVGIDVSSKSNVIYLMLPNGDKHSNFSVANSHEGSTQLVKRILSALTSHSLDTVLIGLEATSVYGDNLVYFLREDATLAPFNRKIHVLNPKQVKKFHDAYNDLPKNDYVDSFVIADCLRFGRINKEVYMGDYRYKALQNLTRARFFAVQNLVKEKQRFMNVLFKKYSTMTQEKVFSDTFSTTALAVYDEFESAEALANMDLHELTDFIIEKGKNRFPDPDAVAKAIQKAARSSYRLPKTVNDSVNQVLSISITSMKALESQIKEFDKAIKALMELLPNVLISIPGIGPVYSAGIMAEIGDINRFDNQASLAKYAGLAWKQHQSGGFEAEVTRLIPSGNRFLKYYLCEAAFSLVRCDKKYSDFYHLKYKEVNRCQHKRALALTARKFVRLVFRLLKDNRLYCPAK

SEQ ID NO: 346872 - protein, 351 aa, unidentified
MGTHKSQVREVRFEGAIWVGVDVHKNSYAVAVRDQEGRAVQFTMAADNDAFVRKIISYGQPIALVAYEAGPCGYSLYRACEAAEITALVAAPSRIPRPVTRGNKTDRLDCRKLADYAARDMLVPVSVPTEEEEMLRGLQRRRHDLTDHIRATKLHIKSLLLEYHIEEPHGMASWTKASVELLRNLSLGVALREALDSHLRELSFLEEERQRVNHAIAKVTSQDVSQRMRILQSVPGVGAVLATTFACEIFRPERFANGEHLSSYVGLAPVVSQSGEGSAIGYLVRTGQQRLRSLLVECAWVHKGRDTGAESLYRRVLSRTGIAQKAIVAVARRLLMLLWRLCIENRMYVSA

SEQ ID NO: 346873 - protein, 346 aa, unidentified
MRFYNVQHRYYCGVDLHTKRMYLCILDHDGNKLLHRNVRAKPREFVSAIDGFRDDLVVGAECMFTWYWLADLCLDEKIKFILGHALYMKAIHGGKKKDDKLDSEKIARLMRGGTFPLSYVYPREMRATRDLVRRRMFLVRRRSELLAHVQLTNQQYNHDPFEKMLQYASNRDVLDRFEQPSVRLSVEADLKTVDHYDKLLKQLERDLVRQATLHDPRACRLLRTIPGIGKILSLVLLYEIHTIDRFPSVGDFLSYARLVTPKQTSDGKVTGHGGAKIGNVHLKWAFSEAVLWMLRNSDDAKAFLKRKEKKYGKARAMTMLARKIARAVYQMLKRKESFDAVKFFAC

SEQ ID NO: 346874 - protein, 316 aa, unidentified
MFQLGIDVSKKTLDVCLLREGVKGRVKNCKLKNDFNAVSTVVSWLRKQHCEPGDVHIIMEATGVYHELLAYGLHDAGAKVSLANPHRSREFARGMDILTKNDKVDAYMLACYGALKEPEPWEPPPENVRYLSALLRRRDALVTDSSREKNRLEKCRATDTPYAVAESIENVLRNLSAELQRLDTLIQGHLDQHPELKKDFDLLTSIKSVGFQLGLNMLVILRSHRFDTAEQAAAFLGVVPVEKSSGTSVRGQSRLSKIGPPEIRAKLYLASLCGLRFNPAMKAMYERLCQRGKAKMCAIGALMRKLVHWCYGVLHT

SEQ ID NO: 346875 - protein, 387 aa, unidentified
MIEITVQSTKASFATTRRGLSELAAFLSDAGVTTVAMEATGVYWKAPYYALEGLFDEVWLCNAQHVKNVPGRKTDLSDAEWLADVAAHGMVRLSFVPPPEIRELRELTRYRKTQVDVRGKEIQRLEKVLQDAGVKLTSVASTVWSVSSRAIIEALIAGERDPAVLAEMAKGRMRSKISRLEEALSGHFGSHHAVVCRQIIDHIDFLDRSIASLTAEITTRLAPFEQAVTIVCSVTAIKRTTAEVIIAETGADMRRFPSPGQLCAWAGVAPANYESAGKHRPAGTRPGARWLRRALIEAARGAASTKGSYYSAQYARIARRKGANKAAVAVAHSMLFTIWHLLSDGALYEDPGGDYFQRRHDPLAEAKRLARRIEELGYAVTMTDKAA

SEQ ID NO: 346876 - protein, 415 aa, unidentified
MPVATCGIDWAQDHHDIAIVDTDGRLLAKRRISESIAGFAELTAMLAEAGDNPDDLIPVAIETQRGLLVAALRATGRPVYPINPMSVARYRERTSMSGKKSDHGDAVTLANILRTDADQHRRLPADTELAQSITVLARAHQDATWRRTRAGNELRSLLREYFPGFLHTFADRPGGISSPEARAILAIAPTPVKAARLTKPQIVAALRRAGRQRGLTALAATIQQQLRIPQLRHPALVEGSFGVQAAAVLATLDAECTSVERLGEATATAFTEHRDHQIITSFVGLGELTGARLLAEIGDDRTRFVDARALKAFAGSAPVTKASGRSIRITHRHVKNNRLAAVGFVWAFVASGCDGPTRVHYLGRRDHGDRHAAALRHLYNRMLGQLYHCLQTGQTYDPLKAYGPPPGALPEQAAA

SEQ ID NO: 346877 - protein, 323 aa, unidentified
MNKDTKYFGIDISAAVFDVTDSDGVYHQFNNTAPGFRNFLKLLDPNSHCVMEATGYYHYRLAYYLVENTIRVSVENPLSVKRFIQMKLSKIKTDKSDSKSICEYAQRVDLKLWQAHSKHQMECLQITRLLSVYTKQSTMLKNKLHGETVLGNPSLLVVRSLKRSLKQVQKELKTLEDNLLKLVKEEHQTLLTHLETIPGIGRKTSLMLIVLTDGFERFRSAGELCSYSGLTPIIRQSGSSVKGRPRISKIGNKKLRNLLFMCSFNACKYNKACKALYDRIVAKGKSKKLALIAVCNKLLKQAFAVAKSGLIYDENYRSVLAKI

SEQ ID NO: 346878 - protein, 425 aa, unidentified
MNYKQNEKINQVKESTLVVGIDIGSTTQYARAFDWRGIELGKVFTFSNSREGFEAFKAWMQHLQDKYRKSDVIVGIEPTGHYWFDLGAYLEDEGILLVMVNPYAVKQTKELDDNSQSKNDRKDPKVIAKLVTEGRYSAPYTPDGVYADLRIMVTNRKRLIREMTQIKNRFARWFAIYFPEYTDVFGDYEAQSSMLLLKKVCTPEAIVELGAEKINKIWRDAKLRAVGMKRATTLCETAKRSIGLKKGSLAAQYEMKLLLEDYEYKKAQLDAVMEEIEKLCRKIPESEQMLAIKGIGVITVAGFLAEVGDVRRFESPRQIQKLAGLSLRENSSGKHKGQTTISKRGRSNLRAVLFNAAIPLIATNPEFKSLHEYYTTRANNPLKKKQSVIAISCKLIRVFYAILANGVTYDAQKMLSDIHRQPQAA

SEQ ID NO: 346879 - protein, 392 aa, unidentified
MIYVGIDVAKDKHDCFITNFDGEVLFKAFTIANNLDGFNDLYQKIVSVTEDITKVKVGLEATGHYSYNLLGFLLDKGLPTYVINPLHTNLYRKSLSLRKTKTDKVDSRTIATMMMSDVNLKSYSDTSYHNEALKSLTRYRFDKVKERAKLKSSVSRLVCILFPELEKLVPTLHMASVYALLAEFPSAAAVANAHLTRLSNLLSESSKGRYGKDTAILFRDAARSSIGSHMPAKSLELKHTIKLIQELTAEIDEIEAAIKQIMDEEIQSPILTIPGISYRMGAMIIAEIGDFCRFDSADKILAYAGMSPSTYQSGQLDNCYSHMEKRGSRYLRYALYNATKYVCHWDKSFGAYLEKKRSEGKHYNVALSHATKKLVRLIFAMEKSGRVYLPTT

SEQ ID NO: 346880 - protein, 408 aa, unidentified
MNSVGIDVSKGKSMVAALRPLGEVAIAPREVPHTLSKLEGLGYDIMGLGEDTKVIMEATGRYHEPVAAALHELGICVCVLNPIVIKQSGAGSVRKVKSDRKDALKIAKYGLDNWTELRPYSPVDSVRQLLKLFSRQYNLYMKTSVSLQNNLISLLDKTWPGANKLFDSPTRADGHQKWVDFVVDFWHCDCLNRISEKAFTERYQKWCKRKGYHFSSSKAEDVYISSAGHFPTLPKNDNSKLLINSAAAELTAARNTLMTVKAEVIRLAQQLPEYDIVQSMYGVGEITGAQLIAELGDVRRFDNRRSIVAFAGIDPGVNQSGSYQRGSNPASKRGSPHLRKTLFQVVETHLKRSPADEPVYQFLDKKRAEGKPYYVYMTAAANKFLRVYHARVKEYLNAHCPELDPLKL

SEQ ID NO: 346881 - protein, 343 aa, unidentified
MEYGAIDLHTKESEIRIVTADGAVVLHRRVATRREALMAVFNGRPRMRILLESGGESEWVAQHLEAMGHDVVVADPNYAPMYVQRTRRIKTDRRDVTALAEANRLGIYRAAHRVSAGQRAVRRQLQVRAQLVQMRTQAICLLRGQVRSEGLRLRGGRAERIVARYEALDVPAALRRVLQPAVDLLTALQPLIAAADTAAGEAAKADPVTMRLMTAPGVGPITALNFRATLDTVARFPGPGAVAAYLGLVPQEDSSGERQRKGSITKAGPAHVRAVLVQACWNIWRTPSGSATLHAWVRRLADRRGKKVAIVGLARRLARILFAMWRDDKDFHPGRVGALAVAA

SEQ ID NO: 346882 - protein, 435 aa, unidentified
MQRVIGMDIHRTFAEVVFWEAGRLRSGGRVDMTRSGLEGFGRSLSKEDEVVVEATGNAMAVVRVLSPYVARVIVANPLQVKAIAHAHVKTDKIDAGVLASLRAAGFLPEVWVPDADTECLRRLVARRNQVVRHRTRIKNEVHAILQAHLIPPCPHADLFGRLGRNWLGRQELPVDERAAIERHLRELDRLGEDLELLDREIAERVIEDPSVKRLLTITGVNIIVAAGLTAAIGDIRRFSSPQKLVSYVGLNPRVRQSGLGLAQHGRISKRGRSHARAMLVEAAWAASKAPGPLRSFFLRIRARRGHQVAAVAVARKLTVLCWHLLTKDAEYNGCVPRWSPTRYGRCSYRLDSRRERATSGARPMPTTSRNCAIVRSMSRATLNMPTNSSSADGSRVVLVRGARVPPMRSDGDGCTAGLTSSGPALCHAVTRAPPE

SEQ ID NO: 346883 - protein, 372 aa, unidentified
MSQSNILFVGMDVHKDSISVAYISDQPGAELVHYGTIGTQQYAIDKLIRKLQSKGQTLHFVYEAGPCGYWLYRYLTKKGHPCVVVAPSLIPKKSGDRVKTDRRDAAALARLFRSGDLTPVYVPEVNDEAIRDLSRGREDAMQDLKVAKQRLKSFLLRQDIRYSGRSNWGPQHLRWLADVVCPTPAQQIVFQEYVQTINERQLRGERIERELLDHAQTRRLYPVVLAIQAMRGIRFTVAITVIAELGDLTRFADPRQLMAYLGVTPTEYSSGSKRRLGSITKTGNTHARRVLVEGAWAYRFPAKVSREIQRRQEGLPQSIQAIAWKAQLRLCKRYYRLVAKGKDKNTVVVAIAREMIAFVWAIAKQTPIEVEG

SEQ ID NO: 346884 - protein, 333 aa, unidentified
MLPPNCGTATPYILRNVVGLDISKLTFDASAMVGKTEHSAKFDNDSKGLDQFSDRLKSLGCQNLHICMEATGNYYEEVADYFAQYYSVYVVNPLKISKYAESRFKRTKTDKQDAKLIAQYCRSAQESELVKRQKPTDEQYRLSRMIAAYAQIKSECAAMKNRHHAAKDEEAAKAYAQIIKAMNEQLEVLKEKIKEQTEKPNCKEGVKRLETIPAIGRMTAAVLFHHLTSSKFETSNKFAAFAGLSPQQKESGTSVRGKGKLTKFGNRKLRAVLFMPAMVAYRIRAFPDFIKRLEEKKKPKKVIIAALMRKLAVIAYHVHKKGGDYDPSRYKSA

SEQ ID NO: 346885 - protein, 316 aa, unidentified
MAKAVSEITLGIDVSKDELVICHWDTGHFTRLINQPAEIQAWLGTLYGPVRIAIEPTSSYHLELVEQAHARGLTVYLINPRQLVHYRKAVNVRNKTDPADAWLLARFLAHESGSLRPFKPQCAKARRLWALIKRRGVAVRARQKLQQSFRELELPAKALFTEFRKVIARIDQQIQALIRELGWWADYQHCLSIPGIGPVNAAALTTVFHRGAFAGSDAYIAFIGLDIRARESGKFTGQRKLTKCGEAEIRRLLYCAAQPARTYRLFDNYYQKQLEKGLSKIAAKVILARKLARIAFTLLANQTSFKKQEINDSQVP

SEQ ID NO: 346886 - protein, 387 aa, unidentified
MAQQLDDLSRSLTPLEQDSTIISVIEMSQASWLVAGIVPGIERHPLKKLEPSEVELFRLLMRWRAEATEKGRTITRIAVAYEAGRDGFWLARWLRARGIEAYVIHPTSVAVSREHRRAKTDRLDTGLLKRVFLGWLRGEPDHCHMVAIPTLAEEDAKRPNREREGLVRERTRLVNRMKSCLVRFGVRSFKPTLRKAPDRLATLRTPEGVPLPPNTLLELRRDMARLRFVMDQIKEVEEARAQGLEQAPQDKPHVMVHLLARVMGIGIETADMLVHEVLARTLRDRRAVARYAGLTGSPDESGSRRREKGLAKAGNARVRRGMIQLAWRFLLHQKESALAQWYRARTADARGGTRKTLIVALARKLLIALWRMVTTGEVPAGVVLRAA

SEQ ID NO: 346887 - protein, 398 aa, unidentified
MESQLRVGIDVGCHAHRVGIADPAGSILEEFDISHSEAGFQEFFRRVEERRAKLGFPVAVAMEGYNGYARPLDRLVQEKGYRLFNVNNLKLARFKEVFPGAAKTDPIDARKILELFHLREQLPMAKDVLQEVLPAPEVNEKLKRLSRRRRQLVTEKLRVLNRMQGDLQAVSPELLAATHDADNLWFLRFLSFRDDLRQLAKLRRATIRQISSVGVKYAKVIEEWQAKATFSDEVEYVGPMIVDDAKRILELHQQIHALDEALAKLAEQSEIARRLSTIPGFGKTSIAELAGEIGTLSRFSSEASLALYVGMSPLTVQSGQMSRARAPRQVNTRCRAAMMTTVARHIGCVPQSRVYYERKRAQGKTHNQAVRALGRHMIRVIWAMLRDGRDYEPRGDAA

SEQ ID NO: 346888 - protein, 340 aa, unidentified
MNIVYLGIDLAKNVFQLCGLNQAGKPLYTKRVDRKILLQTVANIPACLIGIEASTGAFYWQREFEKRGHKVKVISPQYVKPFVRGQKNDGNDALAIAIALMQPTMKFVPPKSPEQQDIQALHRARQRIVNHRTATVCQIRGLLLDRGIPMGISVTRARRAIPLILEDAENGLSARMRRMIAELYDLFLDLERRIVFFDKEIDTVFKQSEACQRIAKVKGIGPKTATAVIAAIGKGTEFKNGRHFAAWLGLVPRQHSSGDRQVLMNLTKKGDKHLRPLLIHGARAVVRVATNNNDGYLNQWVNQLKERRGFNKTTVAVANKNARIIWSILHNETEYRPAVI

SEQ ID NO: 346889 - protein, 328 aa, unidentified
MSIIGIDVSKNKLDCALIDGSNHAKFKFKVVSNSEDGFIALIEWLSKHINSTVSEYHFVMEATGVYHEKCADWLFNKGSKVSVVNPAHSKYYGQSLGVRSKNDKKDSVVLARYGLTQNPIAWQPEAPEIRILKALASRLDAIEKDILREENRHEKSSINPCSDSVLESIKMILAVLNEEKINLEKLIDTHINQYAYLKTNYALLQTIPGVGPVVSRYMLVVIGSRTFKAASQCAAYIGLIPIQNESGTSLRGRSRLSKAGNPVIRAKLYMAAISALQHNPDIKIQNQRLLKNGKSKMSALCAAMRKLVHICFGVIKHQKPYQVQANLS

SEQ ID NO: 346890 - protein, 354 aa, unidentified
MLDTETGEVVNLTLMHEGNNVREFYSKLPRPVLVGIEATGSMHWFLNLMEELGIECRVGHPAQIRAAEPRKQKHDRRDADLILKLLAQNRFPAIWLPSKELLDLRALLLHRHQWVRMRVRMQNALQAIALANGLRRGPALWSYDGQAKIAFLPLLPHAAYRRSALQAMYKNMQSEIENLTRRVAEQAGNRCGARLLMTHPGVGPVTALATEVFLGDPQRFTDSKTLASYVGIIPREYSSGEHQRLGGVTKQGSPLLRFLWGEAGAHAARRDPELKRFYRRKLVQKGLGKARVAVARKLGIRLWIMLRDEIDYQEFCRRGQIQQKTVRPVVGMPETGNGAKSHRPSDEATRLPES

SEQ ID NO: 346891 - protein, 368 aa, unidentified
MRTEIHIDIEAIRLTIKVLNLFAIINLKYKFMKTTENSYETFVGIDVSKLTLDVTILKPLSKKLIHRVFDNSDEGHLKLKKWLAAPHEIVFSRTLFCLEHTGLYTRSVDKFLREREAYVWMESSLHIKKSLGLTRGKNDKIDSQRIAEYAYRFSDKAVMRNPCTSGLQILRDLLTTRDRLNKSLKSIMVSINELKRVDIHQAINLETFQLAAIRGLKTSIKEVEESMFETVENDKQLKIHCEMATSIPGVGKILAIKLMVYTHVFTRFESVRQLACYCGVAPFEHRSGTSINGKTGVSKFANMDLKSTLHLASLSAIQHNPDLKAYYHRKVSEGKSKMSVINAVRNKLLSRIIAVVNRQTPYVVLSQA

SEQ ID NO: 346892 - protein, 407 aa, unidentified
MTIYMGIDWSQKKHDVCALNEKGEVIARLTFPHTQNGFHQLDKFRQKLAASVAECQIGIETAHTILIDFLWSRGYENLFVLAPSAVKSARKRYGQSRAKNDRRDAYIIGDMVRTDQQRLQPWRPHSPLIQQIKAQVRLIQYQTKTMVAASNRLRATLFRYYPVATKIFSNPMPPIAWHFVLEYPTPEAATALSWDAFRLFARRCRHRQSDATLRRCYARLQTAEVIAQPQVVLAYQAEAVLLAGQLLQFDQSKKAQLKSLTTLFSQHPDAPLFRSLPGAGPFLAPALLSKFGDDRGRFPTPASLQTLAGTCPVTNQSGQKRRVLFRTACDRPFRQIVMQWAQSSLASSTWANMYFEQRHSPHRSYNHALRCLANRWLAIAWKVWQSGNPYDEAFHLQQRKNRLLSHR

SEQ ID NO: 346893 - protein, 343 aa, unidentified
MDYFAGLDVSVKETSICIVDDAGKIVREVRVASEPDALLQVLTKNNYRFKRIGLEAGPLSQWLFSALAEAGLPVICVETRHMRAVLKAQINKTDRNDARGIAQMMRVGLYRPVHVKTLRSQKLRMLLTHRKLLQSKAIAVENDLRATLRNFGLKVGVVGRVKFEARIKELVENLPDLAILVEPLLVVRRVLREQLGILHRRVLAVVRDDDVCRRLMTVPGVGPVVALTYRVTVDVPARFRNSKSVGAVFGLTPAKDQSGERDRSGAISRCGDEMMRMMLYEAAQIMLVRSSKWSWLKAWAMKIARHRGMKKAIVALARRLAVIMHRIWVDGTDFRWTREVATA

SEQ ID NO: 346894 - protein, 416 aa, unidentified
MTEQQRWYVGVDWASENHHVLITDGDGRKIGEKIFKHGGEGLAEMAIWLMATSSATDPGQLHIAIEVPHGPVVETLIERGFKVHAINPKQMDRFRDRFTLAGAKDDSRDAKTMASALRTDPRCFRLLAVGDPVVIELREWSRIAEDLGAERNRLTNRMREQLWRYFPAILEFNGDLGAEWLLELWEAVPTPARATRVREATIAKLLKRNRIRRFNASYVLAVLRQQPVTVAAGTMEAASAHIATLIARIRLLNGQLKQAHERLDALTSRLALNEEAEPGHKKQHDVEILASLPGVGRIVLATLLAEGFDALQRRDYAALRSLTGVAPVTRRSGKSLIVIRRQACHQRLSNAMYHWARVAVQHDRISRAKYAALRSRGHSHGRALRSVADRLLNVACAMLKTGTTFNPSLADEKTPC

SEQ ID NO: 346895 - protein, 273 aa, unidentified
MDQITTIGLDISKNVFDVHGVSAEGTVVLRKRLRRGHVVEFFAALPPCLVGLEACASAHHWSRELAACGHDVRQMPAQYVKPYVKRNKNDRADAEACCEAVQRPGMRFVPAKTPAQQAELVAHRVRDLLMRQRTALINTLRAHMAEFGIIAPKQPIKTAELKAVIADASDARLPAVARMALKEVVAQLEALERRTIELEKQIVRRLKTDAVAKHLLTVPGIGPIGAALLRATVPDPTIFASGRAFAAWLGLTPRERSTGGRTKLGHVSNQTTH

SEQ ID NO: 346896 - protein, 341 aa, unidentified
MDISVLGVDLGKNSCSVVGLDATGKVVVRRRMRRETVITYAASLRACVVAMEACCGAHHMGRALARQGHAVRLMSPEYVRPYVKAQKNDDRDAEAIAEAATRPTMRFVELKTQEQLDMQTLHRIRDQLVGDRTSLMNQIRSLLLERGYIVPQGRAKLAARLGEMLDDDEPVLGARIHRLVSDMRLRWIALDERIADLDAEFTEAARSDERMRRLLTIPGIGALNATALVAAVGDARTFGRGRDLAAWLGLVPRQATTGGKPRLLGITKRGSRYLRKNLIQGARSSLPTMSKSDTRLGAWLRGLLSRSHPNTVVVALAAKMARIVWALLRHERTYEPIAQAA

SEQ ID NO: 346897 - protein, 337 aa, unidentified
MKVTTIGLDIAKRVFQVHGVDDQGVVALRRRLQRDEVAPFFANLPACKIGMEACGGAHYWARRLATLGHTVRLIAPQFVKPYVKSNKNDANDAEAICESVSRPSMRFVPAKSVEQQDIQCLHRVRSRLVSARTQLANQVRGLLAEYGIVLPQQIHQLRRGLPLILEEDNELTPFTRRLLASLYDELVEFDQKLASIEEQVRAAHRASESSQRIAEVEGIGPLTATALVSALSDGKAFQNGRQFAAWLGLVPRQHSSGGKPRLLGISKRGDAYLRTLLIHGARSVVYRAAAKADQRSRWIADKQLRLGTSKACVAVANKNARIVWALIARNESYQRAL

SEQ ID NO: 346898 - protein, 371 aa, unidentified
MGKHRLAFIAFDSAKNKHAVAIADSGRGAEVRYLGEIDNSPDAVRKLVAKLTRQYERLHFCYEAGPTGYGLHRQLTELGHVCDVVAPTMIPKRSGDRVKTNRRDSVALVKLLRAGELRAIWVPDSVHEAVRDLTRARATAMVDLKTKRQQLLSFLLRHGRGFPDGRNWTKTYERWLAKQTFAHPAQQIVFQDQLEAITTAQARLAALEQQLREIVPTWTMAPVVAAYQALRGVSFLVAITFVAEVGDVRRFATPQQLMAFLGLVPSERTTGDTIRRGSITKTGNHRARRVPPEGAWTYRSSARVGETLRTRLKDLPSSVRAIAWKAQVRLCARYRRLIARGKKTPVVTTAIARELSAFLWAIGQQVAPQTR

SEQ ID NO: 346899 - protein, 401 aa, unidentified
MNAVGIDVSKGKSMVAILRPFGEIVYSPFEIKHTSHDINSLVDLIHSVDGESRVVMEHTGRYYEVLAHQLSEADIFVSTINPKLIKDFDNDSLRKVKSDKADAVKIARYALDKWQNLKQYSLMDELRNQLKTMNRQFGFYMKHKTAMKNNLIGILDQTYPGVNTYFDSPARSDGSQKWVDFASIYWHVDCVRKMSLNAFTDHYQKWCKRKKYNFSKSKAEEIYGKAKELVPVLPKDEITKRIIKQAVEQLNSASSTVEELRILMNDTASKLPEYPIVMAMNGVGPSLGPQLIAEIGDVTRFTHKGAVTAFAGVDPGVNESGTFSQKSVPTSKRGSADLRKTLFLVMDVLIKTMPQDDPVYQFLDKKRSQGKPYYVYMTAGANKFLRIYYGRVKEYLASLPQ

SEQ ID NO: 346900 - protein, 335 aa, unidentified
MSNVTVFVGLDYHQSSIRVCVMDRDGHSLSNFRCPNNVDELLRRAGLAGRSVHAAVECCTGSADFAEELIQKAGWIVDLAHPGYVSRMKQSPDKTDCTDAQLLADLVRVGYLPLVWLAPHEIRELRRIVRYRQQLVEERRDTKLRIGALLRDQRVRPPQPWRRWTKAWLAWLRHTTELSEQGRWIIDQYLERLNRLKDEVATVENRLQAMTEEDAQVIELLKRPGIGSVTAWTMRAEIGRFDRFRSGKQLARFCGLSPRNVSSGERQADAGLVKAANPQLRAVLIQAAHRLRRYEPRWQKLASRLAGHGKPGSVVVAAVANRWIRGLFHQMQPAA

SEQ ID NO: 346901 - protein, 506 aa, unidentified
MLWPYHLGHVQKQRLVSYFAVRQKKHPAYNIFNTSDATCWRLFYKIKNMNKEEQKTERYERMPVVNPSAAGVDVGSSSHFVGIGQNKEDVTEFGVFTENLHALCKHLVANKITTVALESTGSYWQPLFVLLQQYNLNPILVNGKFTKNVKGRKTDVQDCQWIQKLHTMGMLEGSFLPDLFTEKVRQYYRHRQTLVDNAAGYINKMQKALRLINIRLDSVLRDVMGRSGKDIIEAILKGERDPKVLSSLAQPTVKKSKEEIIAALTGDWREEYIFELRQCYEIYQHYHKKIDECDEAIKQLLAAEIKRKQKEENLPLAKDIKIKKKKARKNEARINVQQLAVDLTGGVDISAIEGVGLGLVLCIIAETGLDLKAFPTAKHFSSWLGVAPNIKKTGGKVINSRTRKGKGRLAKAFMHSANAIGNMQNSNYLLHFFKRKERKIGRAGAITATANKLSKIIWNMLVKKQSYCPIMPQQYLDKIKKKEVKNIQRKINQLNIQDNEILFAVA

SEQ ID NO: 346902 - protein, 345 aa, unidentified
MRIIGCDFHPSYQQIAMLDSATGELWEGRLEHEGGQARRFYDALGGPVRVGMEAVGNSQWFERMLAEQKHELWIGDAAQIRRLVVRQQKTDRRDARHILDLLLDGRFPRLWVPSPEMRDLRQLLRHRQKLVELRAQVKNQLQHLALNQGVRRKRRLWSAEGRRVLEQLPLEGWTARRRSELLALLDRLNQPVGELDQAVRAEAERRPEVQLLMTHPGVGPVVGLAYALTIGPPERFPRGKQVASYLGLIPREKSSGGRQRLGSISKQGNTMMRTLLVEAAQNAVRGDEELRRDYRRLAERKHTALAKVMVARKLAVRLYWMLREQRPYAPHPVAPMQGSPSHSVV

SEQ ID NO: 346903 - protein, 317 aa, unidentified
MNATAALPVVGLDLAKSVFQLAVADGAWRVVEQHRLTRAQLERWFVNRAVGLVVMEACGSARHWGRWLNARGIEVRLLPAAYVRAYVKRNKTDTADAYALLEAARCADIVAVRVKSLEQQALQGLHRTRSLWMATRTSRINALRGLCREFGITVSQGARLGLEQIARVLADPGSPVPELIRGTLKLLVEEVRLLEARIGQLERELSALARRSPACTTLLTIPGVGLLTATAMVAATSGSVSHFHDARHFASWFGLTPKEHSSGSSRHLGRISKRGDRYLRMLLTHGARSVLRAATLAARRGQDLDGLRRWALSVQGR

SEQ ID NO: 346904 - protein, 365 aa, unidentified
MENINLTINIGAMSNIRAIGIDLAKEIFHLHAVDDKGCEVFKKRLTRIKLIEFMNNLDCNRDKTIIGMEGCSGANYFVKKFRDFGYRNIRVVSAQFVKPFVKSNKNDSIDACAIVKAILDPDMRFCLVKEDWQQDIMNIHRVRSRLIKQRTALGNEIRGLLAEYGIISAKTISKLRQKLMILLNSDESNLSDIAKELFYDLFEELVSIDEKIQKTDVQLRQILSNNKLCQKLIKIPGIGLISSTALVGELGNASNFKNGRELSAYLGLVPKQHSSGGKNTLLGISKRGNSYLRTLLIHASRSAVNSMNRVKDINNNQFKKNKKLSDWFLNLQVRKNSNVAVVALANKLARICFVVLSKEYEYEPN

SEQ ID NO: 346905 - protein, 336 aa, unidentified
MMNPVIGLDVAKGESQVQAFLDKKQPYKKSFKVTHTLEGLNSLLNFIKEVEDVSGGHPPIILESTGHYHTPIVQYFEDRGYLLIIVNPLISYRAKSSILRKVKTDIIDAHHLCELYYKEDLEPYKQRGIQLLNLRILTRQHKNMTGMFVQTKLQFQVVLDQVFPEYCGVFGSLYSDVSLRTLQAFPTSEEILEADKETIANKIKELCKSRSQQWANSQAEKLMAAAAQNPFQKALYHSLSLSLNMYINMLFEYKKHLSMLEDEIDTLAKNIEECKIIQSIPGIGKKIAATIISEIGEINRFNHPKKLVAFAGIDPSVFESGTFKGTLSKSNYQKRL

SEQ ID NO: 346906 - protein, 400 aa, unidentified
MRVVFGIDVSKASSEVAILVNGEKVHNYTMSNDAIGFSRLLGDLKTVHKPEIIFEATGVYSRRLQTFLDDNGYAYTRLNPLETKKQLDSLRVRKTDQIDAEKLAQSQFVLNRKPTYVQEEVYQNLRDLSRFYQNLTEDIVRAKNRLHRVLQVTFPELENILSTPSGEQYWNLVIAFPCKDCVLELSNDELSKSIRLSTSKRISDKRVAYLAEKLIALANQSYCAVKKTSPILEEVRYYTKELLRLSEQRQAVLDEMVELAQPLPEYDILLSIPGIAETTATSIIGELGDIRRFQSANQINAFIGIDLRHYESGNFLAKEHITKRGNPYARKILFKCIHNIASANHTNPCHIADFYKKRKRQSQTTSTKLHTIASIHRLIRTMYYLIMHNKFYDYASTQNR

SEQ ID NO: 346907 - protein, 355 aa, unidentified
MQSNKISFKGQNIYVGIDVHLKTWHVTTLTESGYKYSFAQHADAKELFDRLNKKFPEAHFLSAYEAGFCGFSAHYALTEQGIENIVVHAADIPTTGKEKAMKTDAVDSEKIAWALKRNELTGIYIKDKRYMDDTNLIRLRQRFIMDLSRQKNRTKHLLYTQGVTYPERFHNCRTHWSRNFMKWLREEVELLSEQKMSLLLLCEQVENTRKAILKVTREIRRLSTTDRYKENYDLLVTVPGLGLITSMSMLTELDNDIVRFPNERSFVSMLGLIPTCHDSGEKKVSGEKINRGNKHLGPLIVEASWVAIQRDYQLGAYYSSCCQIMKPHKAIIKVARKLACRAYAVLKTKTKYELS

SEQ ID NO: 346908 - protein, 482 aa, unidentified
MFQLVGSNIRYTRVTMLGCVFIVGQWIPDRKELFTMSKEKFLSVGIDVGSTFSWMSIVDPNETLILKPFKIIHNDLDSLNRALTEIKKAEELYSLKSHTFLESTGIYHFPLFCYLMESGFEAFVINPLITHSIKNIGIRKVKNDKLDSIGIAKLGLKPDLKVSVIPAKLVLELRSLTRNYYNLVDIRSSYVNQLKTHLHTVFPQYLDIFCDVTGNTSMMILEQYPTPDNILKAHKDCLISKISKASRKGIKKSTEKYEKLIQAAKAAKIFGCNSESVYFIISTILTLIKGLNSAISDTLGKIQSLVKEHHSEKFIQQIHWLDSITGIGFLSAVTIMCEIGDFSVFKSPKQLFAYFGMDPEVNQSGKFNGTQVHMSKRGSRIARRAIFAAALACIRKKRNGEAINPYLYDYYQKKANGEAINPYLYDYYQKKAAAKPKMVALGAIMHKISNYIFAVLRDEKEFSLRSPEEHCQAYQPPHILAA

SEQ ID NO: 346909 - protein, 320 aa, unidentified
MMAQNDLAVVGIDVAKDKVDLCIRALALRQTCPNTAQGRRKLVALLRRHQVGKAVMEASGGYEREWRKVLHDAGIEVRIVDPKRVRHFAQSAGRLAKNDTIDAEMIAWFAETFGETPSQTHDAAQEELAALVKARLALVELKIRLQSQSAHAAPGPVQKAQARVLKSLATEIEKLELAIAAKVKATPHLAERAEIIESVPGFAETTSAILVAGMPELGQVSDKIAAALVGIAPYDDDSGRRRGERHIKGGRRWVRNAIYMPCLGAATQNNPVTKAFYRRLVARGKQPKVALVACMRKLICILNVMIARHQKWDAARYTPA

SEQ ID NO: 346910 - protein, 416 aa, unidentified
MNAAGIDVSSRKSTVAVLRPFGEVVCLPFDVAHSAEGLASLAAQLKELDGETRVVMEHTGRYYEPVAKALHEAGLYVSAVNPLLIKEYGANSLRRVKTDKADALKIARYALDNWADLRDYTPMDTIRYDLKTLNHQFQLASKQRTACSNNLIALLEQSFPGIRKCFDSPVRSDGTQKWVDFAHSFWHVDCVRKQSLNAFSERYQKWCKRHGYLFKQSNAEEVYALAKNAVVLVPKSEVTKVLIQETANQLTSISHSVETYRAEMDRLASMLPEYPVVMEMYGVGKSFGPQLMAEIGDVRRFERKQALVAFAGIDPMPNQSGDKNVRSNKSSKRGSPYLRKTLFNVMGIYLKCAPQNEPVFQFLDRKRSEGKPYYVYMTAASNKFLRRYYAKIRDYLATLEDLPTVDMDSTGLQESN

SEQ ID NO: 346911 - protein, 334 aa, unidentified
MKYQHVVGMDIAKDSVQASCFDGTTFFDFSFPNQEKSFLKKIQKSIPKSDPSHILFVMEATGTYHLKLATALDKEGYSVAVVNPFIIKKYAEMLLKRAKTDRNDARLIAQFGFYQEVTLFAPKENLAEEITQVLKGLDQLKKERTNLKNYQEALTHHNEINSVVRDIYQKQLKEVEKAIKTLEAEAKRLVCQYAPKEYQLLLSIKGIGKCSATALLGFLQKMDRFSRGKEVASFLGLAPQISQSGKDKGKAWLSKKGNGYLRRLLYLAALSASRSNAQCRELYQRLLAKGKPKKVALIAVANKLLRQAFAVLKSGCPYDPHYLKLKSNLEVVLT

SEQ ID NO: 346912 - protein, 400 aa, unidentified
MNDSDEIGVFLGLDVGKSAHHGHGLTPAGKKVFDKQLPNSEPKLRAVFDKLAAKFGTVLVIVDQPASIGALPLTVARDAGCKVAYLPGLAMRRIADLYPGEAKTDAKDAAVIADAARTMPHTLRSLQPTDEITAELTVLVGFDQDLAAEATRTSNRIRGLLTQFHPSLERVLGPRLDHQAVTWLLERFGSPAALRKAGRRRLVEVIRPKAPRMAARLVDEVFDALDEQTVVVPGTGTLDIVIPSLAHSLAAVHEQRRALEAQIGQLLEAHPLSPVLTSIPGVAVRTAATLLVTVGDGTSFPTAAHLASYAGLAPTTKSSGTSIHGEHAPRGGNRQLKRAMFLSAFAALHDPASRTYYDRCRARGKTHTQALLRLARQRINVLFAMLRDGTFYEPRAPRLA

SEQ ID NO: 346913 - protein, 323 aa, unidentified
MQGQIQPEARSAPPVYVGIDVCKAHLDIHFHPLGDCLRFANDREGIKRLKRRMAAHEVALVVIEATAKYHRLAHRSLDQSGFAVAIVNPLRSRLFAEAIGTRAKTDRVDARMLAILGEALTPQATPPAPQALEALQELVHARMAATREHTALANRRASCQTSFLRGELTRRLKSTDTHIARLAKEIASRIDADPVLARRYAILLSIPSIGPAVAAVLIADLPELGRLDRHAIACLAGLAPFADDSGDTTGPRHIKGGRAMPRQALYWAALSASRHNPDLAVFYKRLRNNGKKPKIALTAVMRKLVVLANTLIKENRTWVPNHA

SEQ ID NO: 346914 - protein, 356 aa, unidentified
MPPVAPADVVVGVDTHKPVHAATALSGLGARLGTITGPASAEGYRDLEAWACSFGAVHAFGIEGTGSYGAGLARALAGRGHAVIEVNRPNRQLRHPQGKSDPLDAESAARAVLGGQATTRPKSGTSTVEMIRHLKVARDTAVKSRTRAMITLKTLIVNAPAPLREQLDHLSSRMALIHHLAVLRPGALTSTTASTKVALRALARRWLALDAEIKEHDLALDALTDACAPGLKRAHGLATGTAAEMLILVGDNPERIRSEAAFAKLCGTCPVPASSGKTTRHRLNRGGNRQANAALYRVVITRMRSHPPTLAYVAKRLAKGRTKREIVRCLKRYVAREIFGHLCGPKLRAACRPEGA

SEQ ID NO: 346915 - protein, 412 aa, unidentified
MEEVFTCCAGLDVHKESIEACVRRIEPNGRLHQETRHWGTMTGDLLAMAEWMTAQGVTQVAMESTGVFWKPIFNILENRFSVLLVNARHIKQVPGRKSDIRDCQWIAQLLQHGLLKGSFIPPRSQRDLRDLTRYRTQLANEKVRTANRIHKVLEDTNIKLSSVATDILGISGRAMLEALIRGEEDPVKLADLAQRRLRGKIPQLERALQGHLTEHHRFMLQLLWKQLAEQEKLIDELDGKIKKQTRPLAAELDRLDAIPGVDRRVAEVVLAEVGANMQPFPSHENLASWAGMSPGNEESAGKRQRRRITPGNRWLKRTLAQAAWAASHVKNSYLASQYRRLASRRGKKRALIAVGHSMLVIVYHMLKAGTTYADLRGDFFDHLEPKRLTHYYITRLERLGYKVTLESYAPAA

SEQ ID NO: 346916 - protein, 341 aa, unidentified
MNVKTIGIDLAKEVFQVHGIDEHGKRLFNKQLKRAKMLSFFANIPPCLIGMKACASAHFWAGKLMSMGHNVKLMAPQFVKPYVKTNKHDAADAEAICEAVTRPNMRFVPVKTPEQQAVLALHRSRQSFIKQRTAQANQIRGLLAEFGIVVPRGIQQLQRQLPELLEDADNSLPSLFRVQLSLLQHHMAYLFGVIATLDKQIEQCYRQNALCQRISKIPGIGSITATALIATIGNASNFENSRQLAAWLGLVPRQHSSGGKQVLLGISKRGDIYLRTLLIHGARAVLQSVKRKQDAVSGWARRLLARRNNNIASVALANKNARIVWALLAKDQEYYAPVMNV

SEQ ID NO: 346917 - protein, 348 aa, unidentified
MAIAVLGIDLGKNSCSVAGLDERGRVILRRRMTRDGLVRLGEKLPACVVAMEACCGAHHLGRVLRDQGHEVRLMPPEYVQPYVKAQKNDERDAEAIAEAATRPTMRFVVLKTEEQLDAQILHRARSRLVGQRTALINQLRALLLERGIVVAKGRRRLEEYLIALLDQGGDRPAMLSPRTCLLIEDMRLEWSELDRRIGALTDEFVARARENRAARRLATIPGFGALNATALVAAIGTGESFRRARDLAAWLGLVPRQATTGGKPRLLGITKRGNTYLRTLLIHGARAALPSLSASETGLGEWLRGLIGRAHKNKVIVALAGKLARIAWAVLRSGEGYAKAGRRPAIAA

SEQ ID NO: 346918 - protein, 336 aa, unidentified
MFQLGIDVSKKTLDLCLLREGVKGRVKTRKLKNDVDAACSVIDWLRRQRCEPADVHIIMEATGVYHESLAYGLHTAGARVSLANPHRSREFARGMGIMTKNDSVDAWVLACYGALKEPAPWEPPPENVRYLSALLRHRDALVTDCTREKNRLEKCRATDTPDAIIESIGNVLQSLSAETDHLDNLIREHLEQYPELKKDFDLLTSIKSVGFQLGLNMLVILRGHRFDTAEQAAAFLVVVPVEKFSGTSVRGKPRMSKIGPPEIRAKLYLAALCGLRFNPVMKAMYERLCLSGKAKMCAIGALMRKLVHWCYGVLKTQKPFDAEYLSSDARSACQAA

SEQ ID NO: 346919 - protein, 440 aa, unidentified
MLRFVGCDVHKRTAVFTLLLEDGRLLASYTIPVTREALGAFAERQLASEDHLVMEATTNTWAVAGVLRPFVGEIVIGNPLRVRAIAEAKIKTDKVDSRVLAELLRCDYLPRVWQPDAETQRLRRLTHRRAALVSDRTRLKNRLHSILHHCLIPLPEFDLFSKRGIAWLRAVALSAEEGQARDSDLRLLEQTELEIAELDGKLVREAWQDEKVRLVMSIPGIDYTVAQTCLAAIGDISRFPNAKKLAAYLGLNPSTRQSGPHCYHGPITKQGNAHARWLLVQAAQHLGQYRGPMGQTMRKIIQRKNRSVAVVACARKLAVLLWHVLTTGEPFRYALPKTLQAKYARLRIRATKQRQRGGVAKGTPRSARYGMGRTRAVPSLPQVLATNGLPQIAALAKGERNMLERKKLHDFYYELQTPTRSEANTPKAQIKEREEDVKLS

SEQ ID NO: 346920 - protein, 338 aa, unidentified
MSEYTNFVGLDVSKDKLDYYDFISDHSQHKKGNDGFRDIVKGLLDYFCVVMEATGSYHHLIASYLYDRGVAVSIVNPLSVKRFIQMKLRKIKTDKSDAKLIAEYGREPKPKLWEPAPDYIMMCQMIQRTISQYIKHQTSLKNKLHSLESKGITTGVLVRSLKQNIKNLVSGIKNLEEEILRLIKGYEPELLTNLQSIPGIGKKTALLLISGTNAFSTFENHKQIISYLGLSPMEYSSGTSVNKKSRMSKTGDVRIRNHLFMCSFTACERNPHCKALYERIVAKGKSKKLALIAVCNKLLKQSFAIAKSGIPYDPHYKSKLKNTLIFSFEIVLNKHGIF

SEQ ID NO: 346921 - protein, 310 aa, unidentified
MGVFIGLDVSLAKTAICVVDRDGAVQWQGKVPSEPGPLIKRLAEWSGGIELAGIEACPLPEWLHKGLRDAGVPVVCIETRQAQRFLSSRPVKTDKNDARGIAEMMRLGPYRAVHVKSPAAQSMRTTLTARMQLVASQLQIEGTIRGLMRVYGLKIGAIHRNRFAARVRELLETAALAELSAAIEPLLRVREVMRGERKTVDRTLAASARRCDVGRRLMTIPGVGPVTTLAYTATIDDPSRFGTSKALGAHLGLTPRIYQSGEIDRSGQISKCGDRMLRHLLYEAASALMTLPASGLACGPGVSPSPSAGA

SEQ ID NO: 346922 - protein, 387 aa, unidentified
MQASTIGTPTAGHCGTIFVAIELSQKTWLATLHSPDRDRISRYKLEGGNHTGLLALIAQVRSRAAEKLGSAPGVVSCYEAGYDGFWLHRLLLAAGITNYVFDPASIAVDQRARRVKTDRIDGETMLRTLMAYLRGEPRVVRIVRVPTAEQEDVRRGSRERGRLIKEQTAHSSRIKALLRLLGMAVGNPRRRDWLTWLATQRDWQGQAVPPRMLSEIRHEHARLMLVREQLNALEASAQADPAPAAVEMTERRELLLRLKCLGPAFATTLASEVFYKDFRNRREVASYFGLTPSPWQSGGTDRDQGISKAGNPRARRAAIELAWLWLRHQPDSKLTLEFRKHTLNASKRIKRVAIVALARKLMVALWRYLTTGLVPEGVVLKAVAVKV

SEQ ID NO: 346923 - protein, 353 aa, unidentified
MRCQDGKPLTIIQTLITGVKVMIFVGIDVGCKELVFVIRHQGKSSKAEIVTNTFKGHQAIIKKLKKLSDSVRICVEATGVYHLDLVLALSRAHLDVMVINPKASHNFAKVLMKRTKTDNVDAEILAQYAERMDFTPWQCPSNKALEIRACSRHLEELSYQCTRLRNQIHAMKSNGTTPVYLLKDNQQALVLLEKRIVSIRNKAVQVIGQDELIKMRYELLLSIKGIAQKSAVQILGELLVLPKDMSARQWVAHTGLDPRQFSSGSSVNKKPHLSKAGNQHLRRALFMPALSGVHWEGNVKAYYMHLVNDNGLKKIQAVCAVMRKLLHAIYGMFKVGKPFDGTRFYKFPSGKAA

SEQ ID NO: 346924 - protein, 354 aa, unidentified
MDGKDPVKNEVILGVDTHLDVHVAALLNSAGRLLGTLSVPTTSTGYAQLIKWACSLGVLLRAGVEGTGTYGAALARALRAAGVEISEVNRPDRSTRRLRGKSDPTDAENAARAVLSGTASAIPKTQSGAAEAMRAVSVARRSAVKAKTQAINQLRALLVSAPQEVRDRMWKSKPAECADGCARLRSLGTSEHLQTLATTLRLLAKRWQMLGEELKSLDDMLEQLTRRHARRLREQFGVGPQTAAILVAVAGDNPDRLKSDAALAALCGASPLQASSGKTIRHRLNRGGDRTANNALWTIAMVRMRSEPRTRSYVERRTKEGLSNKEIHRCLKRYIARELYPLILADLTDSAMGP

SEQ ID NO: 346925 - protein, 395 aa, unidentified
MFYCGIDIAKFKHEASVIDSDGKALFDSISFSNSKEGCEKVLALFDKLSIKPDAVVIGMEATGHYWLSVYEYLTGLGYDVKVINPIQSDAFRKMYIRQTKNDSKDSFIIAQIMRFGQYSATVMSDENIIALRQLSRYRLALVDNCGDCKRRVIALLDQVFPEYGSLFSDTFGVTSTELLLRCPMPEDLLAISSKKLVSLLRKSSRGRFGETKAEELKAIAKSSFGIAFAKDAFSFQIRQLMEQIVFIEKQIEELENAISSLLRQINQVITTIPGVGDTLGAVILSEIGDIHRFDAPGKLVAFAGLDVKVNQSGEFIGSRNKISKRGSPYLRRAIWLAASRAAFCDPILSEYYRSLRARGKHHLTAVGAVARKLCNIIFVILSENRAYTPMPPNGR

SEQ ID NO: 346926 - protein, 357 aa, unidentified
MYAIGIDYHKRYSQMTVMKKEDGTIVKEGRVANRPEAVKEFLGPYGGKAQAAVEATLNWTVIFDMVEELLGEGNVKLCHTSKARAIAEARIKTDTLDSRALAHLLRSDLLPEAHVRPKGERTIQQALRQRMFFVRVQTMVKNRIHVLIDRQVGVRERVMQFTDLFGKGGLEFLQTVELPGRERELLDGELTLLEAVRERIAESNDLIRELAEGDALVKLVETIPGFGSFFSVLVAKEIGAIERFASAEKLCSYAGLVPSVHASGGKSYTGRITKQGNKWLRWALVEAVAPAIRSDGWLRGYYERIKRRKGANSAKVATARRLLTIVYRCLKDRREYEERLPGVEYGRRSVRTAFITS

SEQ ID NO: 346927 - protein, 394 aa, unidentified
MTSIIYVGMDVHTTNYTLCCYSMEDDRFFAEVQVEPDAKNILKYLARIEKQQSRDCRIVCGYEAGCLGYSLYHQLHAHGIDCVILAPTTMMTKPGKRIKTDRRDARLISKCLAFHTYSPVYIPTEVDNAVKEYIRMRDDANSALARVKQQIIAFCIRHGKIHDGKSYWTNKHLEWLSSLDLGNKILSEVLQEYLIRYYQLREQVDMYDMRINELAQAEPYRQKVEKLGCFRGIAAHTALSFCVEVGDFRRFATAQQFASYLGLVPGECSSGDKQQYTGITKAGNSHLRKLLVETAQVFGRSATKSGKSVALKERQAKCDSLTVAYADKANARLKKKYFKIAMRSKVNIAKTAVAREMACFIWGMMTDNISCAVKDFYGVKCIFVKNAFEPVIYI

SEQ ID NO: 346928 - protein, 341 aa, unidentified
MNIKRIGIDLAKQVFQLHGVDGQEKAVLRKQLPRAKMLMYFQKLPPCLIGMEACSSAHYWGRELQKMGHTVKLMAPQFVKPYVKSNKNDANDAEAICEAVARPTMRFVAIKTIEQQDIQAVHRIRSELVQQRTAKVNQIRGLLGEYGLVVGQRIDVLRKALPLILEDAENGLTVDFRTLLEGLQQDLITLDQRVDDMDKKIKLLASSNEDAKRLQQIPGIGPITATALISAIGDGKQFKRGRGLAAWLGLTPRQHSSGGKDRLLGISKRGDAYLRTLLIHGARAVLKVVGNKEDPRSRWIQNLCGRRNKNIAAVALANKNARIVWALLTKKTDFLPEGKPA

SEQ ID NO: 346929 - protein, 350 aa, unidentified
MDTPCAPLASIGIDIGKEVFHVVGFGTDGKIAFRRKIKRLALVETFKRLPPSIVGMEACLSAHFVSRALRQLGHQPRIIPAIYVKPFVKGQKNDYNDAEAIAEAALRPNLRIVREKTQDQLDLQALHRVRSRLVSRRTATINQIRAFLIEQGIAVRTGAKALRNSLLAILENRQDEISPRMRGLIAGLYEDWICLDERIETIAGEIETIGEKEDNCRRLMSVPGIGPLISTAVVAAIGTGEAFERGRDFGAWLGLVPRQYSTGGRSVLGRISKRGSKYLRTLFIQAANVILMRPHNWQRFSFGTWLQNAAPRLHRNKLATALANKLARIAWSILHNQKIFDAPHHEVMAI

SEQ ID NO: 346930 - protein, 372 aa, unidentified
MNYNTVYVGMDVHKESFTLCSCKYEDEKASHYQRTPASYKNVLRYLAFLRTIYGEDTRFVCGYEAGCLGYSLYHQLENFNVECVILAPTTMLEQRSKRRIKTDKRDAEIIARSLAQHNYSPVHIPTETDNQTKEFIRMRDDHKAELKKIKQQILSFCLRQGYQYDGSGNWTAKHVKWLRSLKPAGLYKEILDEYLLTYTILTDKLNRLDQRIEELASKEEYKESVSKLTCFLGIKTHTALSVIVEVGDFQRFVSARKFAGYLGLVPGQHSSGDDRNGLGITKAGNTHVRRLLVESAQSYTRGKIGYKSRVLRSRQAGNSPQVINYADRANERLRRRYYKMVLKDGKKYNIAKTAIARELACSIWGMMTDNIY

SEQ ID NO: 346931 - protein, 338 aa, unidentified
MKTYAGIDLHSSNNYIGIMDHDHKRLFGKRLPNNLEKVLMVLEPFKSDLKGVVVESTYNWYWLVDGLHEQGYKVHLANPSAIKQYEGIKHTDDKWDAFWLAHMKHLNILPEGYIYPKEQRAVRDLLRRRLFFIKHRTSNILSLQSTITRNLGIKMSGNEIKKLDMDDACGLFNSSDLVLMAQNNISTIKHLGKIVKGIEKRVKSQVQLRKEFVLLTTIPGIGLILGLTIMLEVGDIGRFPKVGNYSSYCRCVGSNRLSNGKKKGENNRKNGNKYLSWAYVEAAHFAIRHSPKALRFYQRKMARANGAVATKALANKLARASYFIMRDQVPFDENMLFR

SEQ ID NO: 346932 - protein, 335 aa, unidentified
MNQKYFIGIDISKEKIDVAIVLGDFSILAERVVKNEPSKIESFLKAFCRKYKSDHSDLLVCCENTGIYNRPLEKICDRLGIALWVEHAVKIKRASIDMRGKTDRKDALRIAEYSVRYQDRKVLYKEPSGRIAAIKANQKVRETIITNRVAIENQMREAKSHDPELHKQLTKAYSPIIKALNKQLHRCKKEIESLIEEEPQLKKNVQLMKTIPGIGMQNATQMVIETDNFNRFQSAKHLACYAGVVPFANESGTMVRRQKISKMANQKMKSNLHLGAMAAVRADPELKEYFKRKVEEGKNKMSVINAVRRKLVDRIWAVIQRQTPYELETKTILSK

SEQ ID NO: 346933 - protein, 414 aa, unidentified
MSVTLQGVPARVCAGVDWAKDDHAIAIIDPDGEVLDRFAVTHDAAGLKSLVRRLLSAGVDEVGIERGDGPVVEALIQAELTVLVIPPGQLKNLRSRYGSAGNKDDRYDAYILADVVRTDRRRLRPLVRDSAATTALRTTVRARRDLVEHRVAAANQLRAHLQIVFPGATTVFAAIDSAISLTFLERFTTQTQADWLSPKRLGTWLSSESYSGHTDPEILHTRLLTAPYGTIGAEAQTHAVTTLAFVGILRSLNTQIQALAASIGEQLAIHPDAHIVTSLPRSGTVRAARLLAEIGDARGRFPTADSLACLAGVAPSTRQSGKVKAVTFRWGANKELRDAVCDFANDSRHANPWAADLYAKARARGHDHPHAVRILGRAWVHVIWRAWQDNVAYDPSKHGALQALLNCTTTEKAA

SEQ ID NO: 346934 - protein, 402 aa, unidentified
MNAVGIDVSKGKSMIAVMRPFGEIVVSPFEVNHTVEELGKLAEMIRKLDGETKIVMECTGVYHLPIAYALNEAELFVSTVNPIITHNYDNNSIRKSRNDKSDAIKIANYTLTNWLKLQPFIPEEDVRHMLKVYSRQYNKYKKILTMLKNNLISLLDSTFPSANEIFTSLPRKSDGHEKWVDFVAHFWHCKCISSISQKAFVERYRKWCKRAGYYFSQTKAEDVYIDALGHCYIIPMTETTKRLITQATSQINTVSETINNLASEMKSLAASLPEYPVVMEFRGVGDILGPQLIAEIGDIYRYFKKSSLVRYAGLEPVENQSGKFRGSESISKQGSPHLRRALFLVMDCLLKHAPADDPIFQFLDRKRAEGKHYRSYMCAGAAKFLRVYYARVREYLETHFVE

SEQ ID NO: 346935 - protein, 368 aa, unidentified
MTYLGIDLHTRNMTICAVSSNAKKIGEWKLPNHTDQLDALIREISGPVKAVVEATSSWYWLADWAESRDIELVLAHAKMLKAIAYAKVKTDSVDAHTMAQLLAADLIPGAHMVMGRQRELRELLRARLRLVWRRCKVQDSLYNLFFKYNVSIPKYPFRDLNRLEEHLSSHLPPASSLEASLQIDQFRLLEAQVYRIEKQIDGFRSEFPDYDRISQVPGIGKVSSWSILAEIGDISRFKSDKNFVSYCRLVPGAADSGGKRRHKSRNKDGNKYLKIAFSQAAIGAVSFYPPVRQFYNKIRRRSGKHVARTVVAKELARIVYFMLSRNEPYKGFKGKETLKDTYLNWPHSVSPRSLRGRDRADPSQPDAI

SEQ ID NO: 346936 - protein, 349 aa, unidentified
MGEVITIGVDIAKSVFQIHGVDADGTVVIRRRIGRARVLEFFADLPPCRVGMEACATAHQWARELTKLGHDTRLMPPIYVKAYVKRGKNDAADAAAICEAVTRPSMRFVPIKSVEQQSVLMLHRARDLLVRQRTQLTNALRAHLAELGLVAEKGREGLHQLAAVVTECGNERLPSDARFACQAIVTQLNAVQIEISGLDKRIAQTHRANADSKRLETIPGFGVILSTAVVATMTDPKAFKTGREFAAWIGLVPRQNSTGGKERLGSITKQGDRYLRRLLVVGATSVINSARARPYKYPWVIELLGRRPTKVVAVALANKMARIAWAVLAKGERYRAPTRSSNAVVPAAA

SEQ ID NO: 346937 - protein, 416 aa, unidentified
MEVIVERCAALDVHKDTIMAAVRLPGEKGKRRTELKEFRTWTSSLRELRAWLVGHGVTQVAMEATGVYWKAPWHVLAPEPSIELLLVNAQHVKNLPGRKTDVADAQWLASLLECGLLRGSFVPDPVMSRLRDLTRYRKKLTEERGRETQRIQKVLEDAGIKLDSVVSDVLGKGPRHMIEALIAGERDVNVLAEMALTRSRARIPELRLALEGGFSEHHAFMLRTHLDHVDHLGAQIDTLDQRLEAEIAPFERQVERLCTVVGIGRVTAQAIVAEIGVDMSRFPTAAHLASWAGMCPGNHESAGKRRSGKARKGNAALRSTLIEAAWSASHSKDSYYAALYRRFCRRFGKKSESKAIFVVAHSMLVAIWHILTNETDYADLGADWFDRRSDNEHHARRLAHQIERLGYKVTVEPAAA

SEQ ID NO: 346938 - protein, 402 aa, unidentified
MNSVGIDISKGRSTIAVMRPFGEVVISPFEVRHTGSELSKLAKQLKSLDGETRVVMEATGNYHASVAKLLHNAGLYVSVINAKLVHGYGNNELRRVKTDRKDAVKLANYGLDRWLTLPRYIPEEDTRLLLKNCYRQYRQYSKVQTVLKNNLISLLDTVFPNANRLFSSPIRGDGSEKWVDFVAEFWHCRCASEKSERAFTSKYLRWCRKHGYNFREAKAHTIYAEASGHIGVMPKSETTKLLVKQAVSQLRATSTALAALKQEMQSLASVLPEYPVVMDLFDVGPTLGPQLIAEIGDVRRFYSKKALVAYAGLDAPPNDSGDVTGRHKSMSKIGASSLRRTLFLVMSVYLQTAPLDEPVYQFMDRKRAEGKPYRVYMMASANKFLRIYYATVKAYLEILEQI

SEQ ID NO: 346939 - protein, 315 aa, unidentified
MKQIEPGTKVAGLDIGKHWLDLGLCDGQTHLRFANTMAGIAELIRQVQEWAVERIGLEASGNYERDVREALEAAGLEVVMFQPIEVRAFARWHRLRAKSDKADAYLIALATKAYKGTASRRAPEQAELSELLTVYEQISDLLAKSKTQSEHDRLTDSKALRAQIGACLRQAKAQALELIMQRVRQRPDLLKRFELLKSLPGVGQVVALALLIRMPELGHMSPKKPAALLGVAPFDHDSGMMRGRRFIAGGRARPRAFVYIAALAAKCMDTPFRTFAQRLAKNGKPPKIIIVVVMRKLIEAANAVLWRQTLWEKST

SEQ ID NO: 346940 - protein, 396 aa, unidentified
MITVGIDIGGKQHAVARCREGQDQAEREVLRISQDRAGFDRLDAWLARQEEPVGRITMESSGHYWMSLASHLKRGPVPATVVNPLGAKYFAKSRMSRTKSDPADARSLALMAQQDHTIPRDPLAGVELRQASRFAMTLVTEQARVCQRLIRLVELGFPELGELFDDPACRTAREVLRVAPTAAVARRKRTSTLADANAGPGHRRLGETKAERLKAAAVTSVAVAELDDEVTFEVGLLLDQYELYEDQISAAEEHLASLLDGELARRLQTIPGVGPATCAVLIAEIGDIWRFDDVDQLLAYAGVHPAERSSGRKGADPETSWHMSKAGNAHLRAAAYRMAVVGVTHNPVIKAHYERKRKAGKSKMNALGHCMSKALNLVWGVWRNEADWDPDWRLRA

SEQ ID NO: 346941 - protein, 446 aa, unidentified
MKKSSRMSVIHPHAAGVDIGAEFHVVAVPPDADAEPVRTFQSFTGDLHRMSDWLKSCHITTIAMESTGVYWLPAFEILEAAGFNVILVNARDAKNVPGCKTDVNDAQWLQKLHSFGLLRASFRPEHDISVLRSYLRQRERLTEYRAAHIQHMQKALMQMNVQLHHAVSDITGVTGLSIVRAIVSGERDPSVLIQYRDVRCKKTPEVLQQALTGNWQPEHLFALEQSVAFFDFYQEKIRECDDQIETSLLQLSTGTEEPEGVLPSARHRTKQPNQLSFDVRPLLWKITGADLTQIHGFGPYLALKFVAECGTDMNRWPDASHFTSWLCLSPGNKISGGKVLSSKTRRSSSRIAAALRLAATTIGRSDTALGAFYRRLSSRIGKAKAVTATARKLAILFYNALKYGQKYVDPGADYYEERYRNRVLDGLKRRAKSLGYSLQQDPELCV

SEQ ID NO: 346942 - protein, 392 aa, unidentified
MYIVGIDIGKNHHEASIVSPKGKQIGRSLRFATTHKGADSLMSFIFKNIGNSPCVFGMEATGHYWYPIYSFLKAKGYTIYVINPIQSDSLRKMYIRQTKNDSIDSFLIAEVIRFGQFGTTSMADENILAMRQLCRYRDSVISSRTEIKLRIGTIMEQIFPEYEKQFSSLWVSTSMGILEKYLTPENIENAPIDELFEIIKDKSHNKLTMKKAISIREAAADTFGIKIAQDAFSFQLKQLIDRMNFLDKQIEALDCQILEYYEKFDCYLHTIPGIGMIAAATILAEIGDINRFKSSSALVAFAGIDPTVRQSGEFSSTHNHMSKRGSPYLRHAIFLAATTCSFHNSPLNAYYKKKRDQGKHHLTATGAVARKLTSVIYAVLRDSKPYEPKSFC

SEQ ID NO: 346943 - protein, 446 aa, unidentified
MSKQNTEQKFQSLSLGIIYPQAAGLDIGSMNMVISYPGSGGAQTVKEYGAYTQDLQQMAKDLKEAGVTHVGMEATGVYWMAVYEILEENGFQVTLVNARHYKNVDAQKTDVKDCQWLQQLHAHGLLRPSHIAEESYRELRIYIHERRILQQQKSDTLNRIHKVLTQMNVKFQHVISDIEGVAGMEVIERIAEGQTDGEALLEGVHIHRLKTPKEELIKSLQGIFKPHYTVVLKNHLIAYRFYKKQMQSYEQLIEGLLKKLLPETQKGNIEIKGTKSRKNQYHFNLKEYLHKIVGVDLTAIDGLDENTVLTIISVVGLNMHKWPTAEHFTSWLNLAARPKKSGGKVLGHQKRFTNNTATQAFRMAAQTMWQQKGALGNLYRKLSHTKGTKKAIKAVARRLAVIFYHMVKRQTSYDPKMVVIDAEKLRNKKIAQLKKEAEKLGYKLVA

SEQ ID NO: 346944 - protein, 334 aa, unidentified
MDRYIGIDIHKDFCHATVQNQDGEIVKKGEFENSPSGYDEFFKGIGEASVAIEAGDAWQPVYDHLIEKGYDVVLANPYKLRIIAEVKIKTDVRDSEALADLIRADLVPEVYVPYEEMRELRRVVKRRAKLVMERSKFFSRIKAELRKKRIGSDVNLRTQKAKCWLKDLEIDSINDYLEVVTTLDKRIEKLQREIRKTAGEMEETKILMTIPYVSYFSALTIIAEIATIERFPTSSHLCSYAGLVPEVNQSGSKTVYGSIKGGRPVLRWILYQSAWNHVHHANSHLTRFYERLERHKPKKLATIATARKLTKVVYWMLKLGEEFHSEGYDPRGSR

SEQ ID NO: 346945 - protein, 356 aa, unidentified
MDVHKETIQIAYLTSNTKEMVKEQQIKHNEVHIKKFINKLKTEWNEIHCCYEAGVTGYPLYRYLKSLGVNCILVAPGKIPRQSSDKIKTDKRDAIKLARSLRSGDLESIHVPSEEDEAVRDYLRSRDSLRLDLGRNRQRLMKFLLRKGNVYSTTKYWTVSHYKWLNNLHFENEILHETFNDYYSRVRVQEENLKAMDQKIQEIAKSEAFRERVGILRCFRGVDYLTAMFLLSEVNDFRRFETAGSFMSFLGLVPGEYSSGSKRKQTGITKTGSPRLRRILTEAAWQHRFPGTGSKIVAARRTGQPALVVALAEKASLRLHKKFRNLQLRGKTPQVMITAVSRELSGFLWAAMNLVA

SEQ ID NO: 346946 - protein, 368 aa, unidentified
MKKSITFVGLDVHKNSIAVAIADAGRNAEVRNYGIIGGTLDDLDRLVKKLSTPDRELHFVYEAGPCGYEIFRSLTLRGLECAVCSPAHTPKSPADHIKTDRRDAMMLARLHRAGELTYVFVPRADDEAMRDLTRCREDAKKAQRVTQQQLGGMLLRLGFRYSRGNWTKAHFGWLADQKMPTPSQQVVFQECINAIKETTDRVERLTKQIETLVPTWRMAPVVKAFQALRGVSIIVATTTIAELGDLTRFENPKKLMAFLGLVPSEHSSGEKKQRGKITKTGNSHARRVLVEAAHGYSYPARITRPILKRQDGLSQEVRDIAWKCQVRLCARFRRLVAKGKNSNTVVTAIARELAAFMWAIANKTPIAA

SEQ ID NO: 346947 - protein, 409 aa, unidentified
MITYIGIDWSTQKHDVCFVNAAGAAIARQVIAHTPAGFAEFEHQRQRLGVEPAECVIGIETAHNLIVDYLWGHHYHQVYVIPPNQVNRESIARWPSGARSDPSAAYLLAEMLRQDRTRFPVWQPDSLLTRQMRSRVSLVMHLTRQIVSMSNRLWAVLWRYYPAALTVFSELTTQIELAFILAYPTPQAAAQLTYAEFQAFAAQHHYSQPRKLPACYARLQQAQPQADPTTVRTFQDEAVQLAHLLLPLVQAKQAQLRELNQLFKRHPDVATFDSLPGAGDFLAPGLLVKFGDDRQRFPSAASIQALAGTCPVTEGSGKRHLVRFRKACDHEFRTITQQWAKATLNESPWAQAYWHDMRPHCHSDSAAYRRLANRWLAILWKLWQTHQTYDEDYHLQQRAARCKPRPTQC

SEQ ID NO: 346948 - protein, 345 aa, unidentified
MQYLGVDFHKAFSYCTLMDEDGKVLKQGRMENSSEGVKEFVGNGKEEIAGVMEATRNWTLMYDWLEDEIEEVKLAHPLKVKAIAEAKVKTDKIDSRTLAHLLRCDLLPESYVPTKEARFIRQVLRQRIFFVRLQTMVKNRIRTLIDKHPEIGEAPVDDLFGNKGQKWIGEVELPEIGRKIIDSDIELLNSLKERIRQSDRLVEELGEEDQNVKYLLSIPGIGKFFALLLRYEIDDVGRFRDDKKLHAYAGLVPSTYASGNKVFHGHITKQGNKWIRWAMVEAVWPAIRKDAELRAFYERLKTKKSANCAKVATAKRLLTIVYRVLKEKRNYKVRGCPDFFLAVSR

SEQ ID NO: 346949 - protein, 354 aa, unidentified
MSEHYAGRQIVGMDLHRRRSVLVRMTDTGERLETVRISNDPEYLKAVMARAGEAPEVVLEAAYGWYWAADTLAELGSTVHLAHPLGVKMFSYRRVKNDQRDAADLADLLRMGRLPEAWIAPPATRELRGWVRHRAKLVGLRSSLKCQVHGVLAHAGVWVPMSDLFGVAGQQLLAELSAGDRLSIESRSRLDSALRVIGALEFEIELFAKLVNGRLRTDPGYRALQAIPGVGPVLAAVFVAEIGDITRFHRPEQLASWAGLTPKHHESDTTVHRGRITKQGSRLVRWAAVEAIQRVSGHTRLGQHRDRVAARRGRNIGVVAAARELLTLVFYGLRDHHIRALDTPAAPVASTPAA

SEQ ID NO: 346950 - protein, 417 aa, unidentified
MGRSKSSKAKCVNGQEMIVGIDVAKHQHVARILFPDGSESQPFGFSNHRKGFETFLAWLSFNQKRAKCDSIIVGLESTGHYWEPLAFFLEEIPGIRVVQVSPKHVKKTKEVYDNSPGKTDRKDAGVIAMLIQMGRFQKLVLPKGPFAELRGYARLRERKIVELGVQRNLLHSLVDWVFPEYGSLFPKLEGKTSLTILKHYTTPEQILRAGFNRLSKAIHQASHGRLSEACAERLMEAASATIGLQEGIEAAAFAIRNIVASVERIQEEIATIEKELARVLDQIPYASQLFSIPGVGKITVAVILGEAGDLRRYHKAQELIKLAGLNLFEISSGSHQGRRHISKRGRPLLRKCLFFAALRTVKTGGAFREIYGRWTQRNQMQKTKALVGISRKLLSLLFALARDNAAYHSPRVELRAA

SEQ ID NO: 346951 - protein, 385 aa, unidentified
MLKIVYPICCGMDVHKSFLVACIASTNECGVTTYKSRRFSTFTKDLRLCADWLSANNCKDVCMESTGKYWIPIYNILEASCKIVLAHPKYVKAIRGKKTDKKDAKWIADIFKHDLVSGSFIPPADIRQLRDLVRYRWKLNNFIVGEKNRAQNCLTVSNYKLDDVFSDVFGKAATQITSYLLEHLNEPLSDVSNFRTKGMKATDAEIRDAADGNICAEQAEKYTSQLSLVMSVPGIQTFSAISVIAEIGVDMSVFPSSKHFCSWAGLTPQNNESAGKKKTTRISRAGAYIKPLLVQCALCAIRAKRNPEIRNRYLSIKKRRGHKKAIIAIARMLLTAIYNILKKNEPYNAELSHKVDVPPAHRSVTIEEAVFILQRQGYLITPCTS

SEQ ID NO: 346952 - protein, 367 aa, unidentified
MTSVALSADPIHLGLDTSKNAILVGILRPNEVSPDTEKIFNDEASIRRLIDRFDDRSQLRVCYEAGPTGFGLYRLLRSMGVACEVVAPSLVPRSPGDRVKTDRRDCRRLARLHRAGELTAIRVPTEAEEAVRDLCRARADMVADRTRTRHRLSKFLLRHDRIWRGGDAWTGKHEQWLRSQRFDDAALRATYAHYRAMLVARDAELAAVEADLAYWYTHGPFVDAVARLAAYRGIAQLGALSIASEVGDWRRFATARAFMGFTGLVPSEYSSGQSVHRGHITRAGNSHLRSQLVESAWAYQHRPTIGVQLRTRQRGLDPATVARSWTAQQRLCARFRRLSARKTSRNVVTVAVARELAGFLWAELTTN

SEQ ID NO: 346953 - protein, 342 aa, unidentified
MQTISTIGLDIAKSVFQVHGVDAAGQVVVRRQLKRRQVLAFFAKLPPCLIGIEACASSHHWARELKALGHTVRLIPPAYVKPYVKRQKNDAADAEAICEAVTRPNMRFVPIKTIEQQGCLVLHRTRHLLIRQQTATINSIRAYLAEFGIVAPVGRRGVEQLLTLIEGNDTRVPEVARACISALGVQLQALKAQILEFDRRIMAWHRSSEVSRRLDEVPGIGPALATALVASIADPKAFRSGRDFSAWIGLVPKQKSSGGKDKLGNISKQGDRYLRSLFTAGALAVIRYAKIHGTKHRPWLAALLARRPTKVAAIALANKIARMAWAMMTRGEPYREPVALAA

SEQ ID NO: 346954 - protein, 338 aa, unidentified
MSAIKTIGIDLGKSTFHVVGHDYTGQQRYRHKFSRSKLLQFISVHEAVLIAMEACCGAHWLARKCQDHGHQVKLIPPQYVKPYVKSHKNDFIDADAIAEAATRPRMRFVSPKTEQAQLGVVIRRIRTGYIRERTAIMNRIGSILTEFGFSFPRRHANMKRLFQWLADTGQQVPPLLIFELRNQLDHYNELNNKIKEQDKKLETLNSGNELFTILQTVPGVGPMTAACCISSVSDPEDFSNGRNFAAWLGLVPFQYSTGGKARMLGISKRGNKELRELFIHAARAVLWRDGTAEKYFGKWLIELKHRKPFNVALVALANKLARIAWSVMATKKPFEIRI

SEQ ID NO: 346955 - protein, 465 aa, unidentified
MKSKPAKAKKQNKKISVDAVWEPVNLHAAGVDIGAREHWACAPRAAAPQNVRKFGTFTADLEAMAAWFKECGVTSIAMEATGVYWIPLFQILERRGFHVLLVNARQTKNVAGRKSDVQDCQWIQRLHTYGLLQGSFRPEDPYCVLRTYLRYRDELVVARGTQGQHMHKALLQMNVQLPQVLSDVTGVSGLAIIDAILKGERDPGKLAALVDRRVRAGQQTIQAALRGDYREEHLFVLGQAFELYHTYEARLAACDGQIVRALATLPARVEPKPQPLPARKPGRKPYLDKMAGVDLRPELHEIFGVDLTGIEGIGVLTGLVLLTEVGPNVSRFRSEKQFCSWLGLCPDNRISGGKVLSSRTRRVVNRAADALRLAASTLERSQSALGGYARRMKARLGAAEGITATAHKLARILYRLIKHGETYVRQGLEDYEQKFQAGKLRALQKTAHAMGFELIQKQTVPGGVS

SEQ ID NO: 346956 - protein, 402 aa, unidentified
MIDTGGVGVFLGLDVGKSTHHGHGLTPAGKKVLDKQLPNSEPKLRAVFEKLAAKFGTVLVVVDQPASIGALPLAVARDAGCQVAYLPGLAMRRIADLYPGEAKTDAKDAAVIADAARTMPHTLRSLELTDEITAELTVLVGFDQDLAAESTRTSNRIRGLLTQFHPSLERVLGPRLDHQAVTWLLERHGSPAALRKAGRRRLIELIRPKAPRMATRLIDEVFDALDEQSVVVPGTGTLDIVVPSLARSLAAVHEQRRALEAQISELLEAHPLSQVLTSLPGVGVRTAAVLLVTIGDGTSFPSAAHLASYAGLAPATRSSGTSIHGEHAPRSGNRQLKRAMFLSAFAALHDPASRTYYDKCRARGKTHTQSLLRLARHRISVIFAMLRDGTFYESPLPEAATT

SEQ ID NO: 346957 - protein, 454 aa, unidentified
MSNKVIFNLDELFISVGIDVGADFSWMSIALPNQQFVGKPYKILHNSIDSLTTAVSKIKEAEELYSLESRIFLESTGIYHYPLFCYLRDKGFNCSVINPIITKNSTNINIRKVHNDRFDSKKAALVGLKPDLKVSLMPSDLALNCRNLCREYYDLMDNRSAYVNKLQGELRIAFPQYLGIFSKVTINTSLTLLETYTSPSAFLKADKQEIIDIIKSTAHFGLTYAQNKYNAIIQAATDANQFGYIIDSNIKRIRLYISFIRKYDEEINSILESLHELVDANEDSDFVKQIHLIETFKGAGFLSAVSIMGEIGDFSAFSKPKQLFAYFGLDPAVKQSGKFEGTKVQMSKRGSAIARRVIHTLTLQSISISHNGEAKNPVLREYYLKKCDSKPKLVAMGAVSHKVCNMMQQMGYRRCNLAVCDCLGCRMDRTCDWNCNLKATKLRPQPALQLTDTA

SEQ ID NO: 346958 - protein, 371 aa, unidentified
MQEASTFVGLDVHKKDIAVAVLIPGSGVPLEWRVAHEPTAVRRLVQRLLRQAGTQVHCVYEAGPCGYALQRQLVSLGLECDVVAPSLIPIRPGERVKTDRRDARKLAELGRAGLTVVRPPTEDEEAVRDLCRGRDDARLDLLRARHRLGKFLMRHGRAFGTGKQGAWSQAHRWWLGQQTFERMAERVMFEDYLLAVEQTEARRRSLELHLEEVAREPRYAEAVGWLRCFQGIDTITAITLLAELHDFRRFRSPSQLMAYLGLVPSEYSSGTHQHRGAITRTGNRHVRRLLVEAAWHYRHKPRVGIKLAQRRHGQPVNVIALADRAQLRLCRRYRRMERQGKHPTKIVVAVARELVGYLWAALTPGALATKA

SEQ ID NO: 346959 - protein, 337 aa, unidentified
MEKISTIGLDLAKSVFQVHGAAACGETVLRKRLRRAQVLGFFAELAPCVVAMEACAGAHYWGRELARFGHEVKLIPAQYVKPYVKRQKNDAADAEAICEAAQRPTMRFVAVKSAAQQGAAVAFRARDLLVRQRTQLINALRGHLTEYGVVAAKGPAHMRALRGMIEQAPPEARAALALLADMLAEIETKIAALDAELKARVAEDEAARRLVTMPGVGPVIAAALVALSPPPQNFNCGRDFAAWMGLTPRQHSSGGREKLGRTTKMGERSLRRLLIVGAGSIVRWAVRKPPQAGSWLARMLARKPRQLVLVALANKMARIAWALMAHGGVYRASNAPA

SEQ ID NO: 346960 - protein, 378 aa, unidentified
MPSESTVHIAIELSVSSWLVAARLPGAEKSRLHRIEGGDTAALLGLFAELRSRASAKLAGEADVVCCFEAGRDGFWLHRLLTAHGVAAYVLEPTSILVSRRARRAKTDRLDAEGMLRVLVAWLGGDRQVCSMVRVPTPDEEDAKRTHREREHLVQEKLRIENRIQALLFTQGIRARPSLRSWARDMAELRTGDGRALLPLLRTELNRLRRRLVLILELIRELEAERAEAMAAAVNDAMVRKITALQRIRGIGSNFAAVLVREVLYRSFANRRQLASYVGITPMPYQSGGMDRDRSISRAGNPRARTTLIQLAWLWLRYQPGSALATWFRERVGLLQGRTRRIAIVAMARRLLIALWRYVETGVLPEGVEIRAEAAPMA

SEQ ID NO: 346961 - protein, 343 aa, unidentified
MKLSRVGIDLAMNVYQLHGVDRTGKTILKRRLKRHQWHEVLLDKTEPGCVIGMEACASAHHWGRELQSRGYTVRLMPPQFVKPYVKSNKNDARDAEAICEAMSRPNMRFVTVKTVEQQDIQATHRVREGLKVRRTAKANQIRGLVAEYGLVAPKHMSSLRAAIPCWLEDAENGLTHYFRSLLHGLWDDLLILDERMCEMDKTIKRLAKGNEDCVRLEQVRGIGPMTSTAMIATVGDARQYHKSRQMAAAIGITPKQHSSGDKHRLLGISKRGDVYLRMLMIHGARAVVTRAKHKDDPLSRWVTEIAKRRHPNVAAVALANKNARMAWAILRNKTDYDPDFAMS

SEQ ID NO: 346962 - protein, 423 aa, unidentified
MQTDRANQQQYAAYIGLDWGDQQHAIALQAAGADQVEAYTVKQTPESLHDWVLSLRTRFGGRDVIIAIEQSRGAVINVLLGYRFVHVLRVPPKSLARYREAFYPSGAKDDIPDASLLLEWARDHRAKVKVWIPDKPEIRALQKLTEFRRGTVGRRIAITNMLTQSLKEYFPQALSWAGELDTPMACDFLDKWPTLEKLQKAKPAQIRKFYQEHGCRRTEVVQQRLEEIGSARPLTEDSAVISTSITVLETLVPQLRCLIDAIDRIDAQIHKLFNKHEDRDIFDSFPGAGRVMAPRLLAAMGSDRNRYDTALEVQQYSGIAPVTERSGKSKWVHRRFACPKFFRQSFHEFAGLSIRYSSWARAYYQMQINKGKNHHAAVRALAYKWIRIIYRCWQKRVPYNEEIYLEALRRKNAPLLELLEPAA

SEQ ID NO: 346963 - protein, 413 aa, unidentified
MKEGDNVNKLFVGIDVGSRDNAVFIMNSDGSKHSCFNVQNNIGGAQTISKRVVSVLNDMDLDVVDIGMEATSVYGENLTCFLREDGALGRFERRLFVLNPKQVSKFKGMYSDLPKNDPVDAFVIADSLRFGRIGTPIYMDDYRYQALQKLTRARFYAVQNQSREMLRFMNYLYLKCSGLAQEKVFSNSFGATALALYEAFETPDDIVNTDIETLSAFIADAGKNRSPYPDEIAKAVQAAARGSYRLPKTVNDSVNQVLSISISSIRAMKTQIKALDKEIERQFENIPNTLISVPGIGPVLSAGIIAEIGNINRFDSQEKLAKYAGLAWSQYQSGTFEGQNSRLIKSGNRFLKYYLYEAAFHHVRCDTEYKRFYDLKYKEVNKYQHKRALALTARKFVRLVFRLLKDNRLYIPA

SEQ ID NO: 346964 - protein, 490 aa, unidentified
MKSQGAKRNQKNQKTSKKTSGKATPRKWDEMNRNQRREMMRQMQSGDLSLEVIHPDASGIDIGNESHYVAVPPSRDSQPVRCFGCTTAELKKMAEWLTQCGIRTVAMQSTGVYWIAVYDILEAAGMEVYLVNARETKNLPGRKTDVQESQWLMKLHTYGLLRNSFRPSQEIRILRTYWRQRHDLVRSAGRHIQRIQKALTQMNIRLANVISEISGMTGQAILKAILDGERDPRELAAYRDHRVEASEEEIAQALEGNWQEDQLFVLRQEQAGYEFCQQQITECDQQLEKYLARLEDRTQGATLPKETRKGRLNKKKKRIPQFNLREELFRMTGTDLTQIDGIDVTVAMTVVSEVGWDMSKWKTENHFVSWLKLAPDNKISGGKVIGKGRTPTNNRATTALRMAATTLRASDTYLGAQFRRLRTRLGPPVATKAMAAKLARLLYRMLRYGMKYVDKGAELYEAQHRKQQIIHLKRKAAQLGLEIIEVADAA

SEQ ID NO: 346965 - protein, 338 aa, unidentified
MREYCGIDLHSTNCWVTVLDEAFKVVRERKVPNDLATVLAVLEPHRDALEGVAVESTFNWYWLVDGLQDAGYRVHLTNTWAAQQYEGLKYTDDRHDARWLAHLLALGILPEGYIYPKEERPLRDLLRRRAFLVRKKTSMVLSMHGAFECRTGMRVKTNDLKKWSAEDVEAILEDPTISLGITCLLQPMKVLDEQIKVIEKVVLKRAKLREEFGPLQTVWGVGKVLALTIMYEVGQIARFATVGDFASYCRCVKTERFSNGKRKGSGNRKNGNPYLSWAFSEVAHYAARFYPEAQAYFQRKRAATNGIIANRALAHKLARASFYVMRDQVPFDPDKLFA

SEQ ID NO: 346966 - protein, 471 aa, unidentified
MKQRNAIGIDPDSQGFVCAYVRRSNTNVTNKGYLATDSDLKSFLKWVKGEKDVVVAIEGSNGLSKPIEKALREAGIVFYSFKPADTDKFRKAVLGQNKNNQKDAESVARYAMALEAQGKLENYRRVWFADMELQLLTRRYASLAKQLTAEGNRLWKLLRYACPDLYLALSGKNPDVECGQKTIKSQGILNLLISTPDVGQWKSLSDEQILEAMGGCDYKGRRELIEELRKVMGSFQPASDSMALLLSSSANQIQRLKEEQLHLVRMLEELTAGNAAVQALRQMRGIGVVTAATMIAEIIDIRRFAREDSLACYCGLGMREHSTGQTANMVPTELFNHRLKDAFMKAARNVVFYNPDSHIAGYNRNLMKAGMSQLEAMRRVARALVRVIHHKLSALLLTAGTIDTQSADEQGRGEGGMASGITRGGQSHTSDISPSSPYNDGAKGIKRVKSGDTRRGARRPARRKRISKTNT

SEQ ID NO: 346967 - protein, 383 aa, unidentified
MKSVCGLDVHKDSVYLCILSEFGELIEKVFGVLTYQLEEMRDLMLHHHVVEVSMESTSVYWIPIWRVLSPHFKLNLANPYFIKQLPGRKSDVKDAQWIAECTMKELIRGSFVPPETIQQLRQYDRRIFDLNEEIVRKLSKLDAVLQRCNIRLSNYVSNVDSKSYKAVVRAISQGITAPEELVKLIHGRIINHHGIDVITASLKGVVSLAEIDMISQLRDELDMAEAHKEKCQAKMLEICEREFPEELKRLQTIPGIKERAATSLIAEIGTDMNKFETANHLASWSGLKPRNDESNKKIKSRSITHGNVYLRKTIIECAWAASRTKGCFFSRFSYHQTQVRKKNKMKVLVAVARKMLIAVWHVLHDNTIYIDFTTDHKTSRTKG

SEQ ID NO: 346968 - protein, 390 aa, unidentified
MTITNSTEDFVRLIAILRDYGMPVRIGFEATGNYHRVLIYHLGVAGFDLKLVFSVALARTREALHNSWDKNDPKDAQVILHMLQIGAVQIFQDPMVAGTNDFQELSKTHDAVSRTKTELWHRVLTHYLPLYFPEADRFHRSSRTDWFLAFLEMFPSPHMISAMTKEDFINAAWEVVGRKVEKSLLLSDIYETAKASAGFPVAPDSDAIRMFRLMLAEGRSLIRQRNAIEDRAVELLADRPDYLLLRTIPGIGPINALTILAETGDLRRFRHHRQFLKFCGMDLATVQSGMFCGRSKISKYGNARLRRTLWLAGQTAVMKKANSFRDKFERYIAQDRHNPDLRRKAYTAIAAKMARTIHAVVKSGEPYRPFFEGVSPGGRTPLCRAVEGGS

SEQ ID NO: 346969 - protein, 466 aa, unidentified
MKQEAKMGVAKRGRRKKQGKQRRIVKLESLKQLNLNAAGLDIGAAEIYAAVPEDRAAASVRRFETFTTDLKELADWLEACGVDTVAMESTSVYWIPVYEILEERGFELYLVNARQVKNVSGRKTDILDCQWVQQLHTYGLLRGSFRPSQEICELRTLLRHRGNLLRWRAVHIQHMQKALNLMNLHLTNVISDITGVTGMKIVRAIVAGERDPKVLAQYRDPNCKNSEEVIAKSLEGNYTAEHLFVLQQALELYDTYTAKMRACDAEIEKLYLQFEPQVDLAEKPLQAPAKPRRKNKNAPDYDLRTYLYQMTGVDLTAIDGLEVLTVQTIISEVGTDMGKWKSVKHFTSWLGLAPENEISAGKVLRTSTKKVKSRANLAFRQAAMGVSRGQSVLGAFYRRLRARHGPMVAVVATAHKIARIFYAMLKNRREYISPDTTAYEAKQKERAIKHLKRKAAKLGLKVMPAA

SEQ ID NO: 346970 - protein, 461 aa, unidentified
MQVVYDRCCGLDVHKKLIVACVLSRTPQGVQKEIRTFSTMLSDLFRLRDWLKASDCQVVAMESTGVYWKPIWNALEEELELLLVNAQHIKAVPGRKTDTKDAEWIVDLLQHGLLRASFVPPRPQRELRELTRYRSKLVGERARLVNRIQKVLEDSNVKLASVATDITGVSGRAILRALLDGEDDPEVLAELARGRMRSKRDELTQAVQGTLREHHRFLLKSQLRQLDFYDTQIAELDQEIARRLSVQTGPDDLEPQGGGPTSGHRASSADQMPDGVAEPASRSPQPSSDPARSQAEVLRILDEVTGINQRIAQIVVAELGIRLDQFPSEGHLVSWAGLCPQAKISAGKRLSTKTGKGNRWLKQALIEAAHGAARSKNTYLGAYYQRLKKRMGSKKAIVALAHRILVIIYHLLKEQQSYRELGPGHADEQAAESSKRWAIRRLEQLGFAVTLTSKDHEEEVA

SEQ ID NO: 346971 - protein, 411 aa, unidentified
MKRIYDRVCAIDVHRDTVNACVRLPEHPEQDDGVVRKFATTTEDLLGLHDWLSALGVRRVAMESTGEYWRPVYYLLEDGFTLLLVNAQHVKQVPGHKTDTHDCVWLARLLECGLLKASLVPPPAIRDLRDLTRYRKVLTHQRTEEAQRLHGMLQKAGIKLSSVASDILGASGRDMLEALIEGTGDAAMLAELARGRLRSKLPQLEKALRGSFRPHHAILVREMLAHIEYLEQALERVTARIKEEILPFAEGVRRLKTIPGWRDHTAETVLAEVGVEMSVFATDGHIASWAGLCPGNRRSAGKRQREPIRKGNRWLRAALVQAAWAAVRENRSYLSAQYHRLAAHKGKKKAIVAVAHSMLVIAYHLLRDQVDYRDLGPDFFLQRNREAVQRRCLRQLKGLGWEVTLTPQKAA

SEQ ID NO: 346972 - protein, 344 aa, unidentified
MEEITTIGLDIAKSVFQVHAISATGTVVVRRQLKRRYVLQFFAGLKPCLIGMEACATAHHWGRELTKLGHEVRLMPPRYVKPYVKRNKNDAADAEAICEAVTRPNMRFVPTKTVDQQSILMLHRTRMLFIRQRTMTINAVRAHLAEFGIVAGVGRNGLLELLHLIRKGEKPEIPAEACICLAALADQIDLLKQRILEMDRQIMKWHRANELSRKLEGIPGVGPLVATALAASIPDPSVFRSGRDLSAWIGLVPKQNSSGGKEKLGGISKAGNRYLRQLLVVGALAVIKRAKLLGYTRHPWLVSLMERRPAKVAAIALANKMARIAWAMMSRNEAYRNMPATAGN

SEQ ID NO: 346973 - protein, 342 aa, unidentified
MNKVAIAAIDLGKHSFHLHAQDDRGHELCRKKFNRVTLIQYLANLESCTVVMEACGGAHFMAQEAAKLGHTPKLIAPHLVRPYVKSNKNDFADAEAICEAATRPTMRFVPPKTQAQQALAMSNSIRESFIKDRTATVNRIHAALLEVGVSLAAGFKAIKELPALLEVSSFSERIKKNLMLLHGHFNYLDGQVKALDKDVECQAAEDDLAVRLMTMPCVGPITSTVLAAELGDGKQFKCGRGYAASIGLVPKQHSTGGKTVLLGISKRGDRNQRRLLIQCARVYLIQVDRQKGALADWVRQLIASHHHSNLVVCALANKLARIAWAIAAHHTEFDAGPAAMNA

SEQ ID NO: 346974 - protein, 364 aa, unidentified
MLIIGCDYHPGFQQIAFVDTDTGELSERRLEHREQAEQFYRELKQQNPAVRVGMESSGHSRWFERVLHELGFELWIGDPAEIRTKRVRKQKTDRQDAQLMLQLLLENRFPRIWVPDAENRDLRQLLWHRHRMVQMRTRVMNQLHVVPLNEGLRRKKALWRPAGRKELESIALAPWASRRRQDLLDLLDQLTPKIQELTRALEEEVEKRPVARLLMTHPGVGPLTALAYELVIGTPERFHCGKQLASYVGLVPTEESSGDRRRLGHISKQGNVLLRFLLVEAAQVTVRSQQEWRSKFFHLAMRRGRKIAKVAMARKLAVHLYWMWRQGSDYGQTQKLGSHAGEPGHPDGVQSITDVMIGHPAPSK

SEQ ID NO: 346975 - protein, 417 aa, unidentified
MRKARAIVGVDCGEQRHRFVMIDENGERVASYWVENELGKIFQAFDELGSLSETAKLEVVTESIGSLGAMVSQAVRGRGDELFVVSTKALRHYRDLEGQPHKSDDRDAYLAARMQLFGMEGVRTPAPVSEEEQALARLIRLRFRLMDQKKALGLRLRSRLLELAPVMASKDWEGPRHSSRAMVAILQRWPGLVGLERAHRKSIEKLLRKVSRNGDACVKMAKHLREAAKTIALEGMAREVLTMEMTILVAQFEANHKQLEQVRKRENELVDAHPVGQRLLTMPSVGYRTAAVLLAESLPQARVRSEAQLATYSGLTPLSRQSGNSSRSRLCRGVNRFLASAHYMSAVNACSKSPIDKSYHDRKRKDFKGHPAEFKKATIALARQRHKVIYRILAMGEVYDSSRLAASTVNRARKTAK

SEQ ID NO: 346976 - protein, 351 aa, unidentified
MSHKTAATVALTIGIDTGKNTLHLIGLDDKGAIVLREKVARGRITARLANVPRCLIGIEAGMATHYVARELSALGHDVKQVPPAYAKPFRQGHKNDFRDAHAIAEAVQRPSTRCVPVKTDDQLELQALHRVRSRLVGQRTAVINQIRGFLLEHGIAVRQGLRFLRQQLPDILAKRSDVLSPRMIRIMEDLSGDWRRLDERIEHVTEEIEVLAHGSEGCRQLMTVPGIGPIIASAMVAAIGNGAAFAKGRDFAAWLGLVPKQMSTGDRTILGRISKRGNRYLRTMIMQGARVILLRPANWAKHSFGPWLTAAANRLHHNVLATALANKLARIAWTVLMQARSYEARVEPRTA

SEQ ID NO: 346977 - protein, 450 aa, unidentified
MMREPQEIDDEEHEQILQRVAAVDVAKASGVVCTRVPHPSAQGRRRTRVQTVDATTNAVLELAGYLAAEQVEKVTLEATGDYWRIWFYLLEAAGLDVQLVNARDVKAAPGRPKTDKLDAVWLAKLTERGMLRPSFVPPAEIRRLRDYTRLRADLTRERTRYFQRLEKLLEDSLIKVSSVASTLSTVSARAMIEALIAGERDPRVLAGLARGRMRVKHAALVEALTGAFDDHHAELARMLLDQIDALSAQVGRLTARVEEQVATISAAWGADAGGATGPGAGLGEGATALPALDRLDEIPGISRDTAQAIIAEIGLDMTRFPTPGHPVSWAKLSPRTVQSGATNRAGKTGKGNPYLTAILGEAAAAAARTDTFLGERYRRIVRRRGKLPALVAVARTILVIIWHLLTSRTARFCELGASYYASRIDKDKKARGHIRQLEALGFTVTLAPAA

SEQ ID NO: 346978 - protein, 387 aa, unidentified
MAQQLDDLSRSPTPLDQDSTIITVIEMSQATWLVAGIVPGIGRHPLKKIEPNELELLCLLMRWRAEAMKKGRTITRIVVAFEAGRDGFWLARWLRVRDIESYVIHPTSVAVSREHRRAKTDRLDTGLLKRVFIGWLRGEPDHCHMAAIPTLAEEDAKRPNREREGLVRERTRLVNRMKSCLVRFGVRTFKPTLRNAPDRLATLHTPEGVPLPPNTLLELRRDMARLRFVMDQIKEVEAARAQGLKQAPQEKTHAMVNLLARILGIGIDTADMLVHEVLARNLRDRRAVARYAGLTGSPDESGSRRREKGLAKAGSARVRRGMIQLAWRFLLFQKESALAQWYRARTADARGGTRKTMIVALARKLLIALWRMLTTGEVPAGVVLRAA

SEQ ID NO: 346979 - protein, 351 aa, unidentified
MTEETLRHQIVIGVDTHDLIHVAVAVDHLGRRLGDVSIPTSLLGYERFVTWALGHGDVSAVAMEGTGSYGRGPFTLLQSRGVRVAEVSRPSRKNRRNRGKADLSDAEAAARAFLAGEVTAQPRGSDASIAMIRSLRIPREALVNQRTQAINQLRALIVAAPAHLRESLAGLAAKQLIQRVAQFRVGSIATPAEASRFAMRQLGRHVLHIDIQIEELDQQLDPLVAGRAPQLVAVHGVGVEVASSLLVAWDNAHRIRSEAAFASLCGVAPVPASSGKTNRHRLSRGGDRTANRALWRIVLTRMRTDPRTRDYLARRQGEGKSKREVVRCLKRYVAREVYRALQSSSASFLSA

SEQ ID NO: 346980 - protein, 379 aa, unidentified
MRNDSTVYVGLDLHKDSITVAYAIDAGEVEVLGRTGTTGADIDRLCTRLQSKAPHVRVVYEAGPCGYGLYRQFVQKGFDCMVCAPSLIPRKPGERVKTDRRDAIKLARSLRADDLSAVYVPGIEDEAFRDLARAWAAAREDLRRARHRLKSFLLAHGVRYTGSANWGEAHRRWLGRCSFPSAWQHLAFDEHRRTIEDRLAQCARLETALREAVISWRFYPVVLALQAMRGVQFVTAVGMVSEVGDLSRFEHPRQLMAWLGVTPSEHSSGGKRRQGSITKTGNSYARRLLVEAAWSYRHPARVSPEIQARLEGLPKAIIDRAWDAQVRLCRRFRRLIARGKPINITVVAIARELAAFIWDISRLAMSLAIPRSKLPAACV

SEQ ID NO: 346981 - protein, 371 aa, unidentified
MYIVGIDIGKNHHEASIVSPEGKQIGRSLRFATTHKGADSLMNFIFKNIGNSPCVFGMEATGHYWYPIYSFLKARGYTIYVINPIQSDSLRKMYIRQTKNDSIDSFLIAEVIRFGQFTTTSMADENILAMRQLCRYRDSVISSRTEIKLRISTIIEQIFPEYEKQFSSLWVSTSMGILEKYLTPENIENAPIDELFEIIKDKSHNRLTKAKAISIKEAAADTFGIKIAQDAFSFQLKQLIDRMNFLDKQIEALDCQILEYYENFDCYLHTIPGIGMIAAATILAEIGDINRFKSSSALVAFAGIDPTVRQSGEFSSTHNHMSKRGSPYLRHAIFLAATARSFHNSPLNAYYKKKRDQGKHHLTATGAVVRL

SEQ ID NO: 346982 - protein, 409 aa, unidentified
MDLLIQRCAGLDVHQATVVATVRVPDEQGGRRSVTETFGTMTPDLLALREWLQAYGVTHVALESTGVYWKPVYYVLEDGFTLLLINMQELKHVPGRKSDVRDSEWLAQLLECGLLKASFVPPPVIRELRDLTRYRVQQVRDRAQEVNRLCKVLEDAGLKLTSVATDVMGASGRAMLRALVAGTTDPTVLAELARGALRKKLPALRRALQGRFRRHHAFLIEQIFAKIDFLDESLDRLTAEIDSRLGPFEPMLANLDTIPGVNRIGAISIVAETGGDMRRFPSAGHLCSWGAMCPGQNESAGKRRSGKTRKGNRYLRQTLIQAALGATRKTASALQARYHRVKRHRGHKKAVVAVGHQILEIAYYIMRDGTTYAELGPDYFNRRDAERAVRRHVRQLEALGFHVTIEKAA

SEQ ID NO: 346983 - protein, 313 aa, unidentified
MDALVVGIDVSKAELAIAEHPSGTRWTSETTPAALDALVARLSARPPQLIVLEATAGYELPVAAACASAGLPVAIVNPRQVRAFAQAIGRTAKTDAIDASVLALFGARVQPMPRPVADAETRALADLVLRRRQLLDMLLAERRRVEHAPASGPVARNLRSHIRWLERCVRDVDHEMGGAIQRSPVWRVQEDLLRTVPGIGPTVARTLLAELPELGHLDRRAIAALVGVAPFNRDSGQWRGRRMIWGGRASVRAALYMAALVATRYNPVMRLFYQRLRAGGKPPKVALVAVMRKLLTTVNAMLKHQTAWNPVSV

SEQ ID NO: 346984 - protein, 342 aa, unidentified
MKITTVGIDLAKNVLQIHGVNKQGQKVFNKQLQRKLVLSYFAQLPPCLIGMEACGSAHFWARKLQELGHTVKLMAPQFVKPYVKTNKNDAADAEAICEAVTRPTMRFVPIKNGEQQAVLSLHRARQGFVKARTAQANQIRGLLIEYGITIPQGIVHITKRIPEILEDGENELPGVFRQLLQRLGEHLKELNRQAIELDAQIQTWHRKSEASKKLACIPGIGPLTASALIASIGDAKNFKSGRQLAAWLGLVPRQHSSGGKPRLQGISKRGDTYLRTLLIHGARSVIRVAAGKTTPTHNWAINLVERRNKNVATVALANKNARIVWALLTQNREYQSDFVLAV

SEQ ID NO: 346985 - protein, 356 aa, unidentified
MKNSQLDFTGQTLYIGIDVHKKSWQVTILLNGMKVKVFSMNPNPKELNNYLTNHYPNANYHSVYEAGFSGFWANRQLQALGIKNIVVNPADVPTKSKERRKKTDKIDSSKLARELSVGNLDGVYIPSTKAEALRTLIRLRRQIVNDQTRQKNRIKSLLLFLGYSVPEDVETKHWSQRYIKALRNLDIEHEESKATLNELLNNLNFIRSQLVQILEQIKGFIAKDQQADKTVRLLKTIPGIGPILAVILYSEIIDIYRFKKLDELANYVGLSPAIYSSADKEINLGLTKQKNKYIRNYLIESAWIAIRKDPALQMAYGLLCKKMPSNKAIIRISKNLLNRIRTVWINQQEYVIATVA

SEQ ID NO: 346986 - protein, 442 aa, unidentified
MRDHSEAFIGIDTSKLRNAIAIAEGGRGGEVRYFGEIDSADAATRKLVSKLAVKYRSLTFCYEAGPTGYGLYRLIRSLGHECVVAAPSLIPKKPGVRVKTNRRDAVELAKLSRAGELTAVWVPDERHEAMRDLSRARQAAKKHLTSKRQQILSLMLRLGRHYPGKKTWGTAHMNWLTQQKLEHREQRIALEELLEGMRQEAERVERLEQAIREAVPEWSLAEVATALQAMRGIDLVAAVTVLAEIGDLSRFQSPRELMGYLGLVPSESSTGDKVKRGGITKAGNGRARRILVEAAWSYRHPARVSREKQPKVAAAPRRVREIAWKAQTRLCGRFRSLTRKGKLPSIVATAIARELSAFIWAINREVMAPGEGLEIRNVPTARSVTPCSPPSRRGLATADEVAGAPRRPALTAAARGVPAAARVGTKKRASRSNKETGLETLD

SEQ ID NO: 346987 - protein, 411 aa, unidentified
MPKIVYPICCGIDVHKSFVVACVATTDEKLVTTYKSKRFSTFTGDLRRLADWLRQNNCRDVCMESTGKYWIPVWNILEPTCDLVLAHPKYTKAIKGKKTDKRDAKWIADVFKHDLINGSFIPPPDIRQLRDLVRYQFKLTSYTTGEKNRAQNCLTISNIKLDDVFTDVFGKSASAITQHILDHPGESFDVAPFVDGHCKTPMEEIQLAVDGEMCAQQAEKLRIIRSHMDSLNLCKMNLESEILTVAEKFLPQIDLVSTVPGIQLFSAVATIGEIGVDMSVFETSRHLCSWAGLTPQNDQSAGKKKTTRISRAGAYIKPLLVQCALAAIKSNKHPEVMNRYCAIKKRRGHKKAIIAIARMLLTAIYNILKKNEPYNAELYRQSDTPPVQREVSVEQAIFILQRQGYLVTAAT

SEQ ID NO: 346988 - protein, 370 aa, unidentified
MNKSNQTILSSGGNRASVRQHGNRVLKLGLDMHYRQVTVAMQEEGGRIKGAGKMSHQAFGNWVNKKLAEGWQIESCYEAGASGYWLDRQLVALGVKNLVVAPKAMGQGGKQQKTDRRDSAELVDSLDRYLRGQDKALSVVAVPSVEQEEKRALIRYHRQIMADRGRYEARGKGLLCAQGLEVGGRWWQGKGWRELNSDPRLKEWIKEQLEAWRQKVLGAEAEQKGLRRRIEALAPAILPKGVGAYSAAVLEYEMKGWGRFNNRRQVASYTGLCPGIHQSDGRGKEGSINRCGNRIVRWSLVEMVWRLMVWQPHYGPVRQLAAGLVRSKRAKRRLVVKAARRLAIDLWRLSSGQTTAEKLGLVLQSNGQSK

SEQ ID NO: 346989 - protein, 372 aa, unidentified
MGHHTEAFVGIDTSKSCNAIAIADGGRGGEVRYLGEFSATEAAVRKLVAKLAAKYRDLMFCYEAGPTGYGLYRLLKSLGHECLVVAPSLIPKKAGDRVKTNRRDAVSLAKLLRAGELTAVWVPDERHEAMRDLSRARLAVKKDLQGKRQQISSLMLRLGRIFPGKTTWGPAHMKWLMAQKLEHREQRIAFEELLEGIRQESERVERLENAIREAVPEWSLAEVVVALQAVRGIDLIAAVGVLAEIGDLSRFQNPRELMGYLGLVPSESSTGDKVKRGGITKAGNGRARRILVEAAWSYRYPPRVSRDKQPKVEAAPRRVREIAWKAQTRLCGRFRSLERKGKRRTVIATAIARELSAFIWAINRELMAPRQA

SEQ ID NO: 346990 - protein, 394 aa, unidentified
MKLVGIDVGKNSHHFCVMDKETGEFNVAPSSFSNNKEGFDFLINYLKPYSKKSILLGMEDTGHYHVALLKFLLSNGYPVALINPKTTDLTRKMEGGITKNDKLDTITICDVLDTPERKKQYRITKVDRFDLYEQRQLTRHHHNLKEELNVYCNRLQKSIDLVFPEFNTLFSSKYSIVYINLLKTFGSAEAIASTDIRTIRKCFEIKCRGNRISLTPEKLKECAKNSIGISSEVETIQIKHLVSQITLIKEQIAEIDKKIEEFSITNNSPILSIPGISHFSGTSILAELGDIGNYSKPSQIIKFAGAAPYHYESSQYNAQHTGITKKGSKYLRKTLYQIILTVINNNPVFKKYYLLKISQGKGHRCAQGHCIRKLLRIIYHLLETGQSFDPALLR

SEQ ID NO: 346991 - protein, 344 aa, unidentified
MQITTIGIDLAKTVFQLHAVDADGTTVIRKRLRRAEVLSFVSGLEPCLIGMEACATSHYWARELAKFGHTVKLMPPAYVKPYVKRGKNDATDAEAICEAVTRPNMRFVPVKSANQQAVLMLHRARALLIRQQTMLANAFRAHLAEFGIVIPQGIRHVRALIERVFGEGEDPIDLPALARTALRPLVAQLMELRLQIKTIEKELLAWHRTSQESRRLETIPGVGFITATAIAATVADPSHFRSSREFSAWLGLTPRQNSSGGKDRLGRVSKMGNGYLRSLIVVGATAMIRYAREKGAVSARWINALLEKKPARLVSVAVANKTARIAWALLVRKEDYRVPVPVAA

SEQ ID NO: 346992 - protein, 369 aa, unidentified
MEKDTIYVALDDSKRKLVIAILRPGATEPEEQEIPKDPPHIQRLFRRLRREGPVQACYEAGVSGYDLYRQITACDVACHVIAPALTPRRPGQRIKTDRRDARKLVRLLRAGELTPIRVPDEAEEAARDLVRCREAVRRDVVRWRHRLLKLLDRHGRLWVTEKNWTQRHWTWIRAQHFELAALQRAFEATVFALEQALVRQAELDKEIAILAATAPYRQPVGWLRCFRGIDTLSAMVLLAELVDFQRFRRPRHLMAYLGLVPSEYSSGETHRRGALTKAGNTHARRVLVEAAWHYRHRPTVGRALANRSQAQPDEVVKHAWQAQQRLHRRYRHLVGHGKRPPVAVAAIARELVGFLWAAMTRLEMRTHVA

SEQ ID NO: 346993 - protein, 338 aa, unidentified
MNITCIGIDLAKQVFQLHGVDRDGRVLVRKQLRRAQMLAYFSKLTPCLIGMEACGGAHYWARELSKLGHDVRLMAPQFVKPYVKSGKNDANDAEAICEAVSRPSMRFVPVKTVEQQVMQAEHRIRARLIKARTALSNEIRGLLAELGIVVPASLWKLRRALPEILEDGENGLPGGFRSLLSQMGDELRALDGNITEYDARIARAAREDDRIKRLLEIEGIGPVVASALVAAVGDARQFGKGRDMAAWLGLTPSQHSSGGKSRLGGISKRGDKYVRMLLIHGARAALNAAKNKEDGRSRWMMSLAARRNKNIATVALANKNARIAWSILSRGESYRVAA

SEQ ID NO: 346994 - protein, 363 aa, unidentified
MHESTTVTVGLDVHARSIRLAAVRADELLEERTLPYDEQAVERLLRRWPAVRCCYEAGPTAFGLSRNLTEGGIDCAVVAPGLVPQRPGDRVKTDPRDARKLARLLAGGLLEPIHVPTPELEAVRDLVRAREDARLDRMRDRQRLSRFCLRHGRLLPTSAWTVIRRKWLGEQRFEHSAEQITFDTYLHAVDLVDARIGQLERAIRETAEQGPWSELVARLRCLRGIDTLTALALVAEIGDFGRFKCAEEFMAFVGLVPSEHSSGEQRRQGSITKVGNSHVRRLLVESAWHARRRPKVGYELSRRHRGQDAAVIERAWRCQQRLDQRWQRMAGRGKPHQKIVVACARELAGFVWAIATEQPLRTT

SEQ ID NO: 346995 - protein, 341 aa, unidentified
MQQELSVVGIDIAKRVFHLVGMDERGNIILRKRLARGEVLSFMANLPQVTVGMEACGGAHEWARQLREQGHDVKLMAPQYVKPYVKTNKNDMRDAEAIAEAVTRPSMRFVPIKTVDQQDVQALHRVRERLMGARTALINEMRGLLAEYGIVLPKGAKAFRKAVVGKLEAEQDKLTSLSQEMFQRLFEELVQVEAEVAYYDEKVLSLAEAHPECQRLLTIPGIGPITATAVIAAVGDVGVFKNGRHFSAWLGLVPKQHSTGGETRLLGISKRGDSYLRKLLIHGARSTLHWARLKTDGRSQWMRGLLERRGWNRTAVAVANKNARIVWALLSRGGVYRENMS

SEQ ID NO: 346996 - protein, 413 aa, unidentified
MEVFCGIDWAEDHHDVALVDTTGNVVGKRRIGDDAAGFTQLLQLLAEAGDSAENPIPVAIETSRGLLVACLRATGRSVYAINPKAVDRYRDRHGVTGKKSDAGDALVLAHILRTDRAAHRALPADSELAQAIAVLARAQQDAVWERTCAHNKLRSLLREYYPALLAAFAPKRGGILRPEARALLAAAPTPRAAAQLTLEQLHQLLTEAGRQRGVEAEAQRLLEVLQASYLHHPPLVEDAFGAQARALLRHLEVACANADELAAAAVAHFDQHPDAEIITSLPGLGSLTGARVLAEIGDDRSRFADARSLKAYAGSAPITRASGKSLIVTHRRVKNQRLAAVGYSWAFSALSASPGARAHYDRRRNDGDRHAAAQRNLFGRLLGCLHHCLATRQAYHEKTAFPAPTPTANAKAA

SEQ ID NO: 346997 - protein, 345 aa, unidentified
MNNSLSVFDPCGIEVSARTLLVALGREGRASLRREFPNTPEGHQAVLRWLQRSGRKVRVVLESTGLYGLDLALCLHQAGLAVMVANPRAVRHFAAALMQRSKTDRLDAQVLCEFAARMPLVAWCPPSAAAFKLVAVARRLEALTEMLAAEKNRLHAASLSQALPVIIRRDVERSIQTQQHAIERLTRAAQEFVISDPTLARRYQLLLSIPGFGVTSALHVLAELTLLPEDRDVRQWVAYAGLDPRQHTSGSSVEKKPRISKAGNKHLRRALYMPALVAVVHEPHLRAFYEHLLARGKTKLQALVATMRKLLHAIFGMFKHHQLFDGRKTYALTSAATSHLAQEVA

SEQ ID NO: 346998 - protein, 349 aa, unidentified
MSLPQPAAWAGIDTAKATFDASIAHPSQALVFDLALLHVMPVRTFARTRDGVKEFVVWARKQTQEVGTGLRVVMEATGNYSIELAAWITELDSAILPAIANPKRTANYIKSLGLRNKTDKLEARALALYGLQRSPAPYEPLTTERAELRSLLRYRDALVDERVAERQRAEETRACKAVSAMQERRLEQLDRDIKSIEKNMRALLTKTPILKRDYELLTSIYGVAFVTASVILAEIGDLRRFARARQLSAFAGLCPRLVHSGTSQRGSHLSKDGNRRVREALYMAVSTALRGDNQIAQFHRALVLKGKRPMAAHAAAMRKLLTIMRAILITETAYYSQQGIGGKLCGKRP

SEQ ID NO: 346999 - protein, 316 aa, unidentified
MPYVGIDVAKNKHDVTALNVQGKTVLKPLTFSNNKAGFELLDLSLRQLNQDCLIALEDTGHYAFNLLNFLHEQGYKVYTYNPLLIKEFAKSLSLRKTKTDKKDAHGIALKLLSDPNREQFQHNNRQVELKILTRHIHRLKKKQSDWKVQYTRCLDIIFPELDKIVGKHSEYTYQLLTRYPNPQKRIEAGFDKLIEIKRLTASKIQDILSVAPRSIGTTSPAREFEIIENIKHYKRLIDKAEKCVNDLMAELNSVITTVTGIGNRLGAVILAEIQNIHAFDNPAQLQAFAGLDSSIYQSGQIDLAGRMIKRGSPHLR

SEQ ID NO: 347000 - protein, 368 aa, unidentified
MGQKSSKLYVGMDVHKESIDIAVADEGGEVRHHGQIGGDMNALWRAVRKLESLGRELVFVYEAGPCGFGVYRSLTARGHTCWVVAPSNTPRRVRDRIKTDRRDSLKLAGLARAGELTPIYVPDVRDEAMRDLVRAREDAVVMQRQARQRLAALLLRNDVRYTGKTAWTAAHRRWIAELRLPQSAQRLAFEEYVQAVEEASARVQRLTQCIEQELATWRWRSVVVALQACRGIQLIHAVRIVAELGDLWRFSHPRRLMGYLGLIPGEDSSGEHRHQGAITKAGNSSARRALVEAAWAYQYGAKVSALIARRQADVPKTALDIAWKAQVRLCARFRRLAARGVNRNKIVVAIARELAGFVWAIAQHVKPI

SEQ ID NO: 347001 - protein, 350 aa, unidentified
MSTHITIGMDLGDRDHIVIVLDAAGNEIKCARLINTKVALKRFFQPYSGATVAIEAGTHSPWISRLLEELSCQVYVGNPYKLRVIWDSTDKSDERDARMLAMIARLEPKLLWPIRHRDENAHNDLEVIKAREMLVQSRTKLTNHVRSAIKGIGERLPSCSTASFATRAADRIPLALQPALMPLLKTIAQMTDTIRALDKQIKALSLERYPQTRCLQQVQGVGPLTALAFVLTIENPERFVKSRMVGPYLGLTPRRDQSGAIDKQLRITKAGNAYLRKLLVSCAHYIIGPFGADSDLRRHGLAIAARGGKNARKRAAVAVARKLAVLLHRLWISDQEYIPLHTRRKVEMVA

SEQ ID NO: 347002 - protein, 423 aa, unidentified
MAKQQVDAGMQVIFERVCGLDVHKKVVVACLRILSAGGRIRSEVRRFGTMTEDLRKLLEWLKAEQVTHVAMESTGVFWKPIYNILEGHRMEVWVVNAQHLKKVPGRKTDITDAQWIAQLLQCGLLRPSFVPDRAQRELRDLTRQRTRLVQQRATVSNRVQKVLEDANIKLGSVASDVLGVSGRSMIEGLIDGEQDAAVLAELARRRLRGKIPELRLALDGNVTEHHRFLLRELLDQFDYVEGKIQALTERIDSVASPLFKQSATLLDTIPGIASESAQAIVAEIGTNMAQFPSHKHLCSWAGRCPGNHESAGKRRSGQPAKGNKWLGAVLTEVAWAASRTKHTYLNAQYHRLAPRRGKNRAIGALTHSILTAAYFMIRDQVPYNDLGPDHFTRLNPGHQTRYHVRKLQQLGHNVELTPIEEAA

SEQ ID NO: 347003 - protein, 412 aa, unidentified
MSLALPPARWFVGVDWAADKHAVCVLDDSGKTIDEFVIAHSSDGIASLIGRLARLDDPAAVPIAIERPNGRLVDLLLEAGHPVVPVKPNAIKTWREGEVLSGAKSDAGDASVIAEYLRLRRHKLQLATPYSDQTKAVRTVIRTRDDLVEARVAATNQLAALLETHWPGAKAVFADLASPIALDFLTRYPTPASAAHLGEKRMAAFLVKHGYSGRRRPAELLARLRQAPAGTTGEALTEALRDAVIALATVVKSLVGAIKDLDRSSAAHLGEHPDGEIFTSLPRSGQINAAQMLAEWGDCRAAYAGPDSVAALAGCTPVTKQSGKHRAVHFRWACNKRFRRALTIFADNSRRASPWAAALYANARASGKDHPHAVRILARAWIRVIWRCWNDGIPYDPARHRAAAAFLTEAVA

SEQ ID NO: 347004 - protein, 328 aa, unidentified
MVVRMYDAIVGIDVSKETLDVNCARGQRKQGKVFANTPEGWKLVLSWLKAMGSKQAHVCLEATGRHSLGVALALHDAGHVVSIVNPAQIRDFARTKLGRNKTDKIDAALIREYAALFNPQPWKPPSPAMRRLCELQTVRAGILKNRAEWQNRIASGLGDSTATRLAAMTIDHFTTQLEAIDHAIDETINQDTELRSRRDLLLSITGVGETLAGLLLAEMPEPGSLRHSGQIVAYAGLNPSHYQSGSSINHPTRISKIGNATLRSALYMPALSAMRFNPAIAALVARLKSAGRLKPKQIVVAAMRKLLVLCFGVLKTGKRFDPAIAMPA

SEQ ID NO: 347005 - protein, 279 aa, unidentified
MGRKSSKLFVGMDVHKESIDITLAEEGGAVRHYGRIGGEQSALIRTVRKLESLGKSLVFVYEAGPCGFWIYRLLRERGHECWVVAPSNTPRRVRDRIKTDRRDSLKLAGLARAGELTPIYVPDAADEAMRDLVRAREDAVATQRQARHRLAALLLRNDIRYCGKTAWTEAHRRWMARLHLPGAAQRIAFEEYVLTVNEATASVQRLTASMEQELVHWRWQPVVHALQACRGIQLIHAVRIVAEVGDLSRFSHPRQLMAYLGLISCRHEPDHRATTKRAG

SEQ ID NO: 347006 - protein, 409 aa, unidentified
MQPILKSCCGLDVHKSMVMACIAHGPLDKPPIFEIRKFSTMTNDLRSLSEWMKEYGVTAVAMESTGIYWKPIFNILEGDFDVVLANAQHIKNVPGRKTDVKDCQWIAHLFRNGLISGSFIPPREIRELRDLARTRRKLVGAMTSEKNRVQKVLEDANIKISSVVSKVFGVSSLAMICALLEKDELSTDEITKMARGKLKKKVDQLAEALNGNVTDHHRFLLKQHLGHIDFLVEEIKEFDEEIQRRLVPYQKEFKDIQSVTGIKEISAAAAIAEIGVDMSRFSDEAHISSWAGVCPGNNESAGKKKSGKTRRGNNYLKATLTEAAWAASRTKDTAFSAMYRNIAGRRGKKRALVAVGHQILIEVYRVLKTGDQYQDAGAAAVTERRLQNREQRMVRELKRCGYDVSKVVV

SEQ ID NO: 347007 - protein, 323 aa, unidentified
MSATTTTATKVYAGVDVSKGHLEVFVLPTGERFSVPNDDSGVEELLARLDEPSSPALVVLEATGGFERPVAAALAVSGLAVAVVNPRQARDFARATGKLAKTDRIDAESLARFAEAVCPAPRPILDEEARALGEILARRRQLVGMLTAEKNRLLTATTRRVKKRIEAHIRWLEKELTRANGDLQEAIEESPVWRENEALLRGVPGVGPVLARTLLAELPELGELKNKQLAALVGVAPLNRDSGILRGRRTIWGGRGGVRAALYMGALVATRCNPAVKVFYERLLAAGKPKKVALVACMRKLLVILNAILRNRTPWSLSHALAP

SEQ ID NO: 347008 - protein, 344 aa, unidentified
MDHFAGLDVSVKETSICIVDDTGKIAREVKVASEPDALLAVLTNPAYHFKRIGLEAGPLSQWLYSALAEADLPVVCVETRHMQAILKAQINKTDRNDARGIAQMMRVGLYRPVHVKTLRSQKLRMLLTHRKLLQSKAIAIENDLRGTLRNFGLKVGMVGKAKFEARIKELVENHPDLTILVEPLLIVRRALREQIVILHRRLLTIVRDDAVCRRLMTTPGVGPVVALTYRATVDVPTRFRKSKSVGAVFGLTCSKYQSGEIDKSGRISRCGDQMMRVMLYEAAQSMLHSKKWSWLKAWAMQIARRRGMKKAIVALARRLAVIMHRIWVDGTEFRWTREQAAAAA

SEQ ID NO: 347009 - protein, 345 aa, unidentified
MKTIVKQVAGIDVAQKELVVSLGRMYDDWTPEVYSNRSFANTPKGFTDLIGWIQKLTEESIGVGYVMEATGVYHEPLAYFLEAAGYAVSIVLPNKISNYIRTLDIKTITDKTASEAITRFGLERKLNRWKRPKGIYKTLKQLTRERDQLVEERTMVKNQLHAEQAEAEPNVSSKTRLSRRIAFLNEQEKEIKAEIAVLARQDEEVNKSVELISSIPGIGSLTAVTVLAETNGFELISNKKQLVSYSGLDVKEKQSGTSVKGKPRISKRGNRQLRKAMHLPALAAIRHEERFKAIFARLVSKHGIKMKAAVAVQRKLLEMIYIIWKTGNPYDQEYLQKNTTNKGAI

SEQ ID NO: 347010 - protein, 345 aa, unidentified
MTKGMTVGLDLAKNVFFLVTLAGDGHPVGRKKLSRQQMLTHFARLEPCRVAMEACGSSHYWARELTALGHEVQLLPAQHVKGYRRGQKNDYNDAEAIAEACWHGRLRAVHAKSIEEQDRQSLDRIRRLLVQEQTALINQTRGLLAEYGIVIARSKAQFQAALPRLLDETETRLSPVMRELMQRQWQRYRTLREELGWYDRQLKALAESDPRCRLLQTVPGIGPVVATAFVNHVGDGRTFARGRDVAASVGLVPGQHSSGDRTILLGISKRGDKILRSLLIHGARSVVRQAHRKTDALSVWIQHLEARRGHNRTVVALANKLARIGWAVLMHGQPYRTRDTAVAIG

SEQ ID NO: 347011 - protein, 357 aa, unidentified
MGRVRYVGVDVHKKFCQYAMIDDVGRIVGEDRFLNTDEAIQSFISMLVSYGDVRVVMESTGSLWVKLYDIIEEHGLSAVLSNPYKTRLIAEARIKTDKLDARILAHLLRADLIPKCYVPSKKVREVRSLVRHRAKLSKTRTEIKNRIHALLDKHRLEAPCGELFSKEGLEWLKGLKLSSVDDAVLKSDLGILKALDEQVGYVESEIASVALKDPNVELLITVPGIDYYSAMVLSSEMGSVERFSTDKKLVAWAGMAPSLRQSGGVLRVGGITKEGNRMVRWIMVQAALNAIRSDARLRAFYERYCSRKGHHKAIIAVAHEMLRIVWFMLKRKEPYRDENKRLSLRKHNRMSRIAMEG

SEQ ID NO: 347012 - protein, 472 aa, unidentified
MSTSTRPASAGGAGPTIAKGKRGSQNKRADAVFQPNASGIDIGAREIYVAVPSDRDEHPVRKCGTFTSDLDQMAEWLVSCGITTVAMESTGVYWIPVYEAVERHGIEACLVNPRNMKNVPGKRTDFHECQWIQHLHSLGLLHAAFRPDSEVRAVRALMRHRNDLVQMASQHVQHMQKALTQMNVQFQHVISDLTGLTGLAILDAILGGERDPAVLAKLRDPRIKADQETIRKSLEGNWRAEQVLVLKQRLSLYRSYRDQINDCDKEIEKLVAAFEPKVDPAEKPLPEDRKKRQRQRKKKSGSPNFDMRTEAYKLFGVDLTQIPGLMALVLLLFSEVGRDMSRWPTAAHFVSWLGLCPDNDISGGKVLWRGARRTKNRAGTLFRMAASSLYREQTPIGDYLRRMKAKLGPTAGTTATAHKIAVIFYTMVKNQVEYDASLWAKRDVMREQRLEARLHKQAAQRGYKLVPLEDAA

SEQ ID NO: 347013 - protein, 364 aa, unidentified
MKKRSTGNGTEGMGAWTVGMDLGDRTSHICVLDEAGTVVERVKVQTTREGLRKRFEGQRRMRIALEVGTHSPWVSRLLKELGHEVLVANPRKTRLIYQSRGKQDPVDAEALARIARLDPKLLYPVEHRAESVAQDLAVLRSRDALVRTRTQLVNHVRGAVKATGHRLKKCSTRTFSEEAVCEIPEEVREALSSVVATIEVLSKQILALDGQIRELGKKKYPETALLRQVGGVGPIVALAYVLTLEHPGRFRKSRGVGPYLGLVPARSQSGDSDPELRITKEGDNLLRRLLVQSAQYILGPFGKDSDLRRFGQALSARGRRNAKKRAVIAVARKLAVLLHRLWKSAEVSEPLRKTGAHRDAAVAA

SEQ ID NO: 347014 - protein, 410 aa, unidentified
MQVLYERCAGLDVHKKTIVACLMITLLSGQVHKEVRTFATTTAGLLALADWLESQQVTHVSIESTGVYWRPVFNILEAICTVILVNAQHIKAVPGRKTDVRDSEWLAELLRHGLLKASFIPPQPIRDLRDLVRYRKTLVYERSQEINRLHKLLETANVKLTSVVSDVMGKSGHAMIEALLAGQSDPEALAQLARGSLRGKLPQLREALEGRVDAHHRVLLQHLLSHIAFLEQSLHQLTGEIEQRLQPYEQAIERMVQIPGLQRLTASSILAEIGDDMSRFPSQRHISSWAGVAPGNKQSGGKRLHAPTTKGNTRLRAALAEAVWAISHTKGNYLSAQYHRLARRLGKKKAIVAVSHSLLIIIYHLLRDHTDYRDLGSTYFETLDKERLRTAALRRLESLGYTVTLEEVPA

SEQ ID NO: 347015 - protein, 384 aa, unidentified
MNKDNIIFIGLDTHKTFTQIALLKEHRGAKPESLGKINTNKSAFIKLARQLQSKYPKATLHFIYEAGPCGYWIYRLLTSLNNCCYIVAPSLIPKKAGDRVKTDKRDAAKLAKLFKAEELTTIYIPEAEDEAIRDLSRARETAMKDLKDAKFQLKGLFLRNNIKPTVKDNWSNQHLRWLTELVLPHHSQQIVLQEMIQTITERMKRVTRLVNELEHQVKQWRYYPVVKAIQAMRGVRMLVAVGTISELGDLRRFDHPRKLMAYLGLVPTESSSGDKRRLGKLTKCGNGRARRLLIEGAHTYKYKANISTELQKRQEGLSKEIVDIAWQAQLRLCRRYQRLIQKGKHRNLVVAAIAREMIAYIWAISREVVVTPINPKERIARVPA

SEQ ID NO: 347016 - protein, 429 aa, unidentified
MSYRIAGIDVHKKMLAVVVSDVEVDGEYRFERRMFGSNPEQLRSLAAWLLEQEAEEVVMESTAQYWKPVWGALERYWKPIREKREGARRRSGTLHLAQAQSNRGRRGRKRDFPDAERLVKRLVARELTLSFVPDAEQRLWRTVTRKKYQLRRDHVRLQNQVESLLEEAHIKLSSLVSDLLGASARRMLRALAEGETNPTALAALADKQLRATPEQLCDALGACTDLQPLYRRLLKMALEQLQFLEQQIGQLDQEMASLLSEHQDAVQRLAEVPGLGVDSAQQIIAEVGPTAATFPSEKCLSSWVGACPGDDESAGVNYSHRSPQGNRHMRRLLNQAGNAAVKAKGSIFEIVYRRTVPRLGHQQTIGAIAHRQCRLIWLILHQGVRYEERGPAVTKQSKQKRTARIIRQLRSLGYRIEPPNPQPSQAQAQ

SEQ ID NO: 347017 - protein, 348 aa, unidentified
MAIVIGCDLHSCFQQVAVMDLDAGELLKEQRLEHEGDEVRNFYQSWGEPVTVAIEATGYTLWFARLLQESGHRLVAGDAARLRAMEPRKQKTDRRDALLLATVYASGRYPVIWMPDEARRDLRHLLLHRHSLVRTRTRVKNHLHALAMNHGLCRKSALFAAAGRQRLEGIAMARFEGWRRAELLDSLDRLSDKVREADQELEKQLPAWPEAERLMSHPGVGLVTALAWVAFIGEAKRFPTSAQLCSYVGLIPSEASSGGRQRLGAISKQGNTFVRFLLVEAAQTAVRGDAELGRWYRRLAAAKGRPRAKVAVARKLAGRLYWMSVRSMGYSGLRTGGNMQASSRGPLA

SEQ ID NO: 347018 - protein, 430 aa, unidentified
MKSNTQNAKIEAITEKTLVLGIDVGSETHYARAFDYRGVEYSKKPFKFSNTEAGFVTFKAWVLDIKEKHGKDKVIPGMEPTGHYWFNLGKFLQDNEMKPVLVNPHHVKKSKELDDNHPTKNDRKDPKVIAGLVREGRYMIPYLPDGVYADLRTASNIRFQLQAELTRIQNRISRWFNIYFPEYKTVYGKPDAKSGILILKEAPLPEDILTLGIDGVNQIWRDAKLRAVGKARAKTLIEAAEHSVGSKEGAVSARMEIRMLLEDYESRNIRLQEVMALIEELVNQIPMAEKLLEIKGVGIKTVSGFLAEAGDIRRFNDPKELQKLAGLALVENSSGKHKGKTTISRRGRKRLRYLLFEVAMSLVAKNPEFRELHNYYTTRRLNPLKKMQSLMVIAAKLLRVFYAILTKGVGYDPKKMVNDIRRPAAYAQAA

SEQ ID NO: 347019 - protein, 409 aa, unidentified
MRYYVGVDWADQTHAVWVVDESGTKITARTVPHTAEGFVEWGRELDEWRVQGIERWAAIERPDGRVVDFLLDHGVVVYPVNPKALNRARDRFRQSGAKSDPFDARVLADFLRTDHLHLQALQPSSDAAQELKLLTEDCQRHIRQQTRLVNQLTTTLKAYYPRALEVAELTTALAREFLHAYPTPEALTVLTARQWQRWARGRRVSEARIGALWAVLQQPQLPVPAHVVRAKARLMQSLVEQLTPVVVAVAQYRKTIDDFFARMPAAQWARTLPIGKHGITAPTLWARLGDAPGRWESFRHLQAQAGAVPVTKRSGKQRVVHFRFACDKALRHVVDQVAFLSLLSSDWARVYYDQQRARGHGHRQALRALGAKWLKIIFVMWHRQVPYDEQYHLATMTRQQLRQRQTKIA

SEQ ID NO: 347020 - protein, 306 aa, unidentified
MENKNYDYIAIDISKSDLEVRTELHRCSVTNNLTGFKALVKLAGKQEQPLVVCESSGGYERDMMDYLHQKQIAVTRVNPGRIRNYVRSEGIKAKTDPIDALMILGFAREKQLQPAPVPQPIRQELAALLDRRSHLTEQAAREKNRIQNSSKFIKASIERMIKEVEKELQRIEKQIRKLVANDQQLTEETNILQSVCGVGEVTAWTLLSYLSEIGKLKRNQLVALAGIAPFNKDTGIFKGKRRIEGGRAKVRKCLYMAAQTAAIHNPVIKAYVDGLRARGKPYKCAMVAAMRKLLIHMHIYLSKNIN

SEQ ID NO: 347021 - protein, 405 aa, unidentified
MWYAGIDWADQHHDAVVIDEAGKRVGTTHVAHSAEGLDTLVTFLKGSGDVADHPHHLACIVETNRGLLITALLDAGLPVYPVNPKTVDRHRKPSGAKTDAIDAYLLARTGRSDLADLRRLTPDSPLIAELRVLTRDQDTLVQSQTRLVNQLTACLKAYYPVAVDLFGKLQQPTTLAFLQVFPTLEQARAASVEQIAAVLKGAGHPTAEAKARQIHARLSQPQLAADPIVTRTKTRLMLTLVGQVRVLLPEIAAYDEEITRLFRRHSDSRAFASLPRAGTRLAPRLLAEWGDDRGRYTDAASVQARAGTSPVPFQSGNFAKAHRRYACNKPLRNALQQFAWQSTQKEAWALAYYQRKRREGKSHSMAVRALANQWVRLIYALWSKQETYDPATFLAAQQAHAPRAA

SEQ ID NO: 347022 - protein, 341 aa, unidentified
MSLIKAVGIDLAKLVFSIHGVDEHSKCKLRKTIKRNNLLAEIAKLPPCIIGMEACSGAHYWAREFTKLGHDVRIMACKFVIPYRQNEKNDANDADTICEAVTRPKTRFVSIKSEEQQAVLCLHRIRQGGIKDRTARINRLRGLLAEFGIIMPKGRYPAQNAIAGILEDGENNLPFIARELLDDLWQSIKGLNEEILKYDRKLHALANQMKDAKRLMRIPGIGEITATAVVATVSDAKHFETSRSFAAWIGLVPRQYTTGGVARLGRISKRGKKHIRTSLIHGARAVIANCKNKTDRTSIWVKDLVERRGFKRAIVALAAKNARLIWALLHSEKEYQVDYVK

SEQ ID NO: 347023 - protein, 401 aa, unidentified
MAAHRDKAWVGVDIGKTHHWVCMVDGDGKALLSIKVGNDEAEILALVATVGALAEQLVWAVDIIGAPSALLLALLANTGQMVRYASGRVVAAMSAAYSGEGKTDAKDAYVIAETARLRRDLAVIDADTDLVRDLTVLTGHRTDLIADRVRMINRLRDLMTSVFPSLERAFDYSSHKGALVLLTGYASPDRIRRIGQTRLTSWLRNRNVRGCADVAARAIEAAKAQSVALPGHELAANIIAELAGNILALDERLKTLDAQIEETFAQHPQAAIIQSMPGFGPFLGASLLVGAGDLRAFPSAGHLAAAAGLVPVPNDSGRRTGNLHRPLRYSRPLRHVFYLSAQTSMMRAGPNRDYYLKKRAHGATHSQAVIALARRRIDVLWALLRENRTWTAAPPALAHAA

SEQ ID NO: 347024 - protein, 370 aa, unidentified
MKETITSFVGLDVHKDSIAIAVAEAGRQSPRFIGTVVPRLASLHKVLRDIGRASRTLVVYEAGPCGYGLARRLNAEGYSCEVVAPARIARSPIDHRIKTDRRDALLLARESRAGNLVAVVVPDERDEALRDLSRTREDVLAARLRAHQQMKALLLRHGLTCPGRIVWSAAHERTLSTIRLPHPAQQIAFVEYRNAIKDAHERLERLIEALRLQSSQWRMRPLVQALMCLRGFDFIAAVTFVAEIGDPRRFAHPTALMAYLGVVPSEFSSGKSRRQGSITKAGNQHARRMLIEAAWAYCHSPRVSRGLEVRQQGQPKAIRDISWRAQLRLTKRFRHLRMGRKLPQNKVCVAVARELCGFIWDIARQVKPPV

SEQ ID NO: 347025 - protein, 389 aa, unidentified
MGFSMVIIGVDPHKRMHMASVVEPTTNRRIATLEITASLAGYRRLLKWAGGFSERRWAVENARGLGRHLAQWLLARGEVVDDVPSTGARVRELSRGGRRKNDVIDAAAAASVAALQGEANPVLTEDLTTVLALLDERRNNVVTQRTRLVNQLHALFRDLMPGGAPTDLTATIASRLLTGVRPAGPVETARKQLARDVVAEVRDADQRLKTLTAQIADTVAATGSRVTEVAGVGPVVAGRLLARTRRASRFPTASAFANYAGVAPVEVSSAERVRHRLPRGGDRQLNFALHIVALTQVRMRGSSGRAYYDTKIATNKTHNEAMRCLKRRLADHIWRLMIRDERQHSAGPGGHQGATLQSSAAGSTPTTSSSDKSLPEPATPDSTTSRPAA

SEQ ID NO: 347026 - protein, 461 aa, unidentified
MKAFLGTDVSKGYADFVLLNHKGQKLEDTIQLDDTHAGHNLLLRWINELCHQHGIEELYCGLESTGGLENNWLATLKSKPANVPINVARLNPSVVVNASKAELRSNVTDSESAYNIASYLYRFTNIVDFNQQDNLYAGFRSLHNQILMQLKQKTQLSNELKQLIYSAFPELQRYCNKGMPGWVLKLLSIYPTAANLAKAKVDRLVKIKSITKEKATKLIDSAKNSVASRSGETEGYLIKTLVEEIQFKEVKIQQLKAYLEEHCQGEETKLLTTIKGIGAYSASALMAQIEEVHRFESPQKLASYFGLHPVIRQSGDHKGVSRMSKRGRPGVRTILYMCACSAVMHDMHMKSIYHRHRENGKTHRQAIGVIMHKLIRVVWGVLTKKQPYNPETDKQNQQKRKETKEQKDRKSTERVRRLQSFDQNAPISRLASKKRKVHSLSQSGMAEKVRDPEIEPIKTNI

SEQ ID NO: 347027 - protein, 360 aa, unidentified
MGNERTFVGLDVHARSVTGHALDAVTGEVWQRKLCPDPGEVLRWVSGLPGPVKVGYEAGPTGYGLYRCLNDHGTLCVVAAPSKLHRPHGDRVKTDARDAELLAHLLKLGEIVEVNVPSVEQEAARDLVRAREDARADLMRTRHRVSKMLLRQGIVYSGGDAWTKVHDGWLRGQRFDQQSRQLAYDSAYEAMVLTVDRRDRLDRAIDEMAGKSSYTPVVRRLSCLRGISTLTGFALAVEIGDWQRFTGATIGAFVGLVPTESSSGQSRSQGSITKTGNTHARRLLVEAAWHHAKPYRVPGKTMRDRWELAPPAARLRGHEGNRRLHQRWQRFNARKKRPAVADVAIARELAGWAWSLAVLE

SEQ ID NO: 347028 - protein, 371 aa, unidentified
MQYTTVYVGMDVHKESFFLCCYTNEKEKDEYSQKVEAHYSKVLNYLEAMRFHYGQDALFICGYEAGCLGFTLYHQLTSHHVQCVILAPTTMPVSRGRKRIKTDKRDASLIARCLAHHDYSPVHVPTAQDEETKEFIRMRDDHKLALKKVKQQILAFCLRHNLSYAGNHWTQAHVTWLRGLKPDGLYGEILTEYLLTYTSLVDKLERLEKRIGELASDERYAEGVHKLSCFLGIKTQTALCVLTETGDFNRFGSASQYASYLGLVPGEDSSGEDQNRLGITKAGNRHVRTLLIEAAQSYARGRVGHKSKVIKARQEGNPPEVIAYADRANERLRRKYYHLVLGKNKRSNVAKTAVARELACFIWGMMTGNIA

SEQ ID NO: 347029 - protein, 337 aa, unidentified
MKYSGIDLHANNCVVAVIDEQDQVLYCRRLANDLELITHALEPYRDELQGVVVESTYNWYWLVDGLMAAGFAVHLANPAAIKQYEGLKYAGDEHDAVFLAHVYRLGLLPEGYIYPRQERPLRDLSRKRMQLVRQRTQNILGIESLLSRHTGCQFNKDQIQKFNNTEVAKLELAPYVERALQANLAVLKTLGREIEAIKAVIVNEVKLRAEFRTLKSIPGIGKVLAATIMLETGTIRRFAEVGNYSSYCRCVDSKRVSNGKKKGAGNAKNGNQYLAWAFVEAAAFAIRFCPQARRFYDRKKAKTMAVVAMKAVAHKLARAAYYMMRDGTTFDVSRCFA

SEQ ID NO: 347030 - protein, 316 aa, unidentified
MTTNAVVVGVDVAKDRLDVAVRPSGETWSAANDEAGISALVARLRPLGPALLVCEATGGFERAAIAALAAAGLPVVVANPRQVRDFARATGQLAKTDQLDAAILALFAERVRPTPRPLPDAAAQLLDAVLTRRRQLLEMLVAEKNRLGFAPKPVHRGIQAHIRWLERQLDDVTKELATLIEASPVWRAKDDLLQSVPGVGPIVSYTLLGELPELGTLSHKQIAALVGVAPLARDSGTLRGKRLVWGGRASVRTALFMAALCGRRWNPTLKVFYERLKAAGKPTKVALIACARKLLTILNAMMRDQSRWTSNVQYSC

SEQ ID NO: 347031 - protein, 358 aa, unidentified
MQIIGVDLHARQQTITMLDTETGELVEKTLEHEGEKVREFYASLPGPVLVGIEATGSMQWFLKLMEELGIDCRVGHPAKIRAAEPRKQKHDRRDAALLLKLLVENRFPSIWMPSTEQRDLRTLLKHRHQWVRMRTRVQHTLQSMALANGLRRGTSLWSQAGQHALKALPLAPYAGQRRAALLTSYPRLQEQIDDLDRQVSEQAWQRPQARRLMTHPGVGSVTALATEVFLGDPARFADGRAVASYIGMIPSEHSSGRRQRLGALSKQGNALVRYLWCGAAMHAVRHDPELKRFYRRKLVQKGLGKARAAVARKLGIRLWIMLRDRIDYKEFCRRGQLRQRSGDARAGMPAFNSGPALQ

SEQ ID NO: 347032 - protein, 349 aa, unidentified
MPSLAELVDVVIGVDTHKHTHTAAVVDAITGGLLAELTVTTDPGGYARLLEWARDHGQGRAWALEGAGGYGAGLARHLSVAGEQVVELDRPARSSRRNGAKSDSLDAARAAREALGRAHLAQVKTDGPRGELAALMAARRSAVEAATLAQRQLHALVTTAPETLRAVFRGQTTAAMTTTATRLRQRQCWDPHTSTTASVLRTLARRVIALQREARSHEQAMATIVRAWRPDLLEQPGVGVIVAAQVLICWSHPGRIRSEAAFAMLAGTAPIPASSGLRTRHRLNRSGDRQLNRALHVIALSRTRYDQRTRDYVARRRTEGKTDREIRRCLKRYIARDLFRQLEHGQPPA

SEQ ID NO: 347033 - protein, 341 aa, unidentified
MPTMTIGLDLAKHVFQVHGVDATGKVAVRKKLRRSEVLEFFKGLPRSLAGIEACGTAHHWGRELTALGHDVRLMPAGYVKPYVKRGKNDAVGAEAICEAVARPTMRFVEIKRAEQQSGLMLHRTRELLVRQRTALINSLRGQLAEFGLVAPKGVWSIPELHALAQGATPAVLPDAVRSCVELIMGQIDDVQTRVQTIENAIRVAHRASEVSLRLQTIPGIGVITASAITATIGDIKVFKSGRHLATWIGLVPRQSGSGGKVHMGKISKKGDAYLRKLLVLGATAVIRYCRNKPELAGWINALLQRRPARVVTIAVANKMARIAWAVMSRGEAFRQEASAIA

SEQ ID NO: 347034 - protein, 355 aa, unidentified
MTSTKYIGMDVHKESISIAVMNVSGKIGMECVIETKASMILQFFDGLRGDLQVTFEEGTSAAWLYDLLKPHVTKLVVCDPRKNASMREGHQSDKIDARRLAELLRLNHLSPVYHGEHGLRSLKELVRSYLTITKDLVRVMMRVKAIYRSWAIPCTGKQVYAPRHRAEWLGKITEPGVRRRAEFYYQQLDALRTVRQQVRRDLFAESQKHQPWKRLCQIPSIGPIRAAVLLGILQTPHRFRTKRQLWTYSGFGIETQSSADHRNVNGRLERAKKQSSIRGLNRNCNHDLKNLFKGAAIVASSKPGPFQEFYTALLTKGLRPEMARLTLARKIATIVLIVWKRGACFDAQHLKPQTA

SEQ ID NO: 347035 - protein, 407 aa, unidentified
MYYLGIDISKKSFTVSVLDEEGEAITKFLTFPCTRKGFEKLVDKICSLKLEKDKTVIGIEATGNLWENLYSFLEGYKVIILNPYQTRKYHQLLSKKAKTDKVDSLVIAGLLRSKEALASYVPEDEVQVLRELVRLRHHLQKDKKNYLRKAYTLLNLVFPEYTNLIKDPFRKVSSMILKKYPTAVDMARAKKTELVKMARRIQGNNYSSELAEKLIEAAKESIYSGKASEVRGMALRILIDEIQFLKNKIKEIEDKIDEILSSNEPSSPQKRLLSIPGVGPKTVAAFLGEVGDDVSRFSSANKLIGFIGWHPRISESGNSKNSHPKMSKKGPSALRAALYMAAVASLKHNPYLRSLYHRKISEGKESKQALISVGKKIISIMYSMLKYEADYDPQRIFFQLEKEQVLT

SEQ ID NO: 347036 - protein, 345 aa, unidentified
MTIGVDVSKETLEVCVERQRQFTVDNSPDGIAKMLSALDPGSTVAMEATGKYHRLLANTAHCLGFHVLVLNPKDVHKYRDSISPRAKTDKVDSGTIADFAQVRNHTPYRPLPPVVEKLRNLVRLRSSLVKQRVAHNNQLSECPDDCEILSPIVDCIGVCVKQIDKKIVEMAKEFASFAPLLDVPGFGTLTSAYMLALLLSGTFRSSDSFVAFIGLDLRVRDSGKKAGKRCLTKRGDPEARRLLYLAALAASRMDGPFKQLYQRYRLLHPSHCCSRSQARQSGLGNTHQGYPLLLSDRVLNPPLHKRVSLRTAFSIIARSRCRRERSRPQTNRQEAKETLCPNKIT

SEQ ID NO: 347037 - protein, 342 aa, unidentified
MHTTTLGIDIGKRWFHVIGLDTAGIVVRREKLNRAQLYELFATHSPCLIGMETCCGAQHLARLAASHGHDVRLLPAQHVRPFVKSQKNDFNDATAIAEVVRLPSMRAVPLRSLEQIDIQALHRARQRLVEQRTGMTNQIRGLLLDHGLPIPQGLNPLRTAVPEILEDATNGLTPLFRSLLARLLSMWQQTDSAIEELTDEIQSVARASDQCRRLQSIPGVGPLVATALVSAVGNAGTFRSSRDLAAWVGLVPRQHTTGGKPKLLGLSKRGNSHLRRLFVQGARALWVWKEKRNDPLHQWMRRLAQRMHPHKAVCALANKLIRICWALLRNDHMIFRNAAAAA

SEQ ID NO: 347038 - protein, 335 aa, unidentified
MKTYFIGIDISKDTLDICIINSSDEKEIVFKIDNTVVGIEQMLTSVSDYEQNSEFQYCFENTGNYGLLLARMLEDKHITYYQVPALEIKLSQGIQRGKNDQVDAKRIARYAKMYSDDLKPSALPDKELFTVKNLLTYRSFLIKVRTQFKNEKKSFYQVGKVADVNYEMDEIAQQIKELDQKIAFVESKIKQQINEQENLNKNYEKITRIKGVGFLTATYMLVLTDNFTKFKNPRKFNCYAGLAPFEHTSGSSIKGKTKTSKLRNRKIKTVLFSGANSAIMYDEELKTYYKRKKLQGKAHNSIINAVCCKLIYRIFAVVKREEPFVNLTRYNLHMS

SEQ ID NO: 347039 - protein, 373 aa, unidentified
MRFYTQQHQFYCGIDLHARTMYLCVLNQDGEIVLHRNMQAGPEPFLKAVAPYREDLVVCVECIFTWYWLADLCTQEGIPFVLGHALYMKAIHGGKAKNDKIDAHKIAVLLRGGMLPQAYVYPAEMRATRDLLRRRMHLMRKRAELLAHIQNTNSQYNLPEIGKKLAYKANREGVATRFPDPAVQKSIDLDLTLIDAYDRLLTDLELDLVRTAKEHDAQTFYRLRSIPGIGKILALVLLYEIHDIRRFPRVQEFVSYCRLVKCAKESAGKRYGTSGKKIGNAYLKWAFSEAAVLFLRNHPTGQKDRARLVKKHGKGKAFTVLAHKLARAVYDMLKRDTAFDMDKFFNESRSGASEPAASLAAAGISLAMECWCR

SEQ ID NO: 347040 - protein, 454 aa, unidentified
MAQGTGLTRGDRRRNQEIAGLREVVSRDRAVLAIDLGEDKQVATLMDHDNVVLARKIVLVKAHNLGSLLVWAGQHAARHGFVGVTVACEPTGHRWKAVMGLADGAGMGFVCVQSLAVHRAREGDDYTRDKTDHRDSVLIGKLVTRLDCYLPERADAQWARLRHLGARRGRLVAEATACGQQVADLLSCAWPAVLECAAKPLESTTWLACLSVITARCNGNPAKIRKMGRETFVAAVRGELPFWDAKKISHRVLGRVWDALSDTRGVPAQRRGALERVHLVMADWRSARVRLGDVQARMLEVLDQLGLRELVCSIDGLSGVGAAAILAETGDMARFASARSVVKHAGLNPAENTSATMRGQTRVSHRGRPQLRAAAWRAVWGALPHNPVLAAKFAHLTKRDTDRLAAGQARAACAAALLRWLYAVVTKRQPWDQRVASGLVPPTGSAGEELPAAA

SEQ ID NO: 347041 - protein, 449 aa, unidentified
MEQPQEVEDEEHERVWQRVAAVDVAKASGVVCTRVPGDGPAGRRRTHVWTVKATLGAVTELGDHLRCEGIEVVTVESTSDYWRVWHVVLEACGLKVQLVNARSVKNVPGRAKTDKKDAVWLAKLTERGMLQPSFVPPYDIRRLREYTRLRADLVHDRTRYWARLEKLLERALVKVSAVASSLATQSVRAMLEALIAGERNPKVLADLAVGKMRAKRRELAEALEGRFEDHHGELARMLLDQIDALTRQVSTLDERISELIAQIPAAWGVDADGTTGPASGRGPDAAVLPAAARLDEITGCGITAACAVIAEIGLDMTVFGTPGRLVSWAKRCPQTRQSGKKSTAGSAGKGNPWLNGVLGEIAASAARTDTFLGERYRRLARRRGKRKALAAIARSVLVIIFHLLADPAARFRDLGPDYYDSRISRERKISNHVRQLEALGLTVTIAETA

SEQ ID NO: 347042 - protein, 350 aa, unidentified
MVTLGGDSHKQTHTLVAVDDNGRQLAQKTSPATKTGHLEVLQWARRWPERRWALEDCRHVSRRFEADLLVAGEVVVRVPSKLTGGARKVARTSGKSDPIDALAVARAALREPDLPVAKLEGPGRDVRLLLDHREDLVGERTRIQNRLRWHLHELEPEAAIPARMLSRYHSLAEIEQRLGRHRGVVAEIALELVVRVRDLTRRINELEADIEHRVCGLAPTLMNLSGCGALCAAKVVGEAAGVSRFRSRAAFAMNNGTAPVQASSGNQKRHRLNRGGNRQLNVAMHRIAITQLSRPGPGKDYVAKRLAAGNTKTEAIRALKRRISDEVYRRLLQDERASLTNNVSSSVAAA

SEQ ID NO: 347043 - protein, 341 aa, unidentified
MAMTIVFVGIDLAKNVFALHGVDEAGKAALVRPVVRRDQLLEAVAKLPPCTIGMEACSGAHHWARQFERFGHRCRLMAPKFVAPYRISGKRGKNDAADAAAICEAVQRPAMRFVPVKSELAQSRLAIHAVRQGWVEARTACINRLRGLLSEFGIVLPLKAQTVRTQAAEKLDSLPAWMKVAGLDLLDELRRLDGRIEDYDRHIKLMAQTEDRSERLMKIPGIGPTTASALVASVGNGHDFHNGRQLSAWLGLVPGQYSSGGKQRLGRITKAGDSYLRTLLILGARAVLAAAANKQDRLSRWATNLAERRGYWKAVVAIAAKNARMAWAMLAKGEDFKPVNA

SEQ ID NO: 347044 - protein, 336 aa, unidentified
MQVYGIDLSKEKFDVNFLDATGKEKHRTVKNELSAIWRFLSEIPLGSILCAEHTGTYGDLLVFLCNQYGVSIALVPGYTVRHSLGVVKGKSDPIDAARLREYGERFNDKLSFREYQGEHMSELRQLYSLRSQLVKARKELRTGAHARDQLPMQSVSVNLILKTALEALDDQVDQVEKEMSKIIMNESELVENYSLSVSVLGVGPVIATDMIIRTGNFKVIDTARKAASYAGVCPFPNSSGNMVGKSRTSPFADRTLKTLLYMGAKAAVKHNKEYQLYYRKKQQEGKPHFLIMNNVMNKLLRTIYSVVKNKTPYSRDYICLDPRERENVNSSEKNVA

SEQ ID NO: 347045 - protein, 336 aa, unidentified
MSYIGIDLHTTQLTVCYLKTAEEYEFKKYRLEEIEQFLADLTQTDQVAVEATGNTRWLVNLVKEKVGRVVIVNPREFEVIKQSVKKTDKQDALSLARFLAVDMLPEVRARSERAETVQRINETRSKLVRLKTALLNKIHALAVSTGRKLKKESLSSERGLEKVLSFEWTASERVELEIIIEQIRSLKVGIGKLDKVLEEQSKQLSGFENIITVTGIGARSAGVLLSVIGEVEDFADENKLASYFGIVPKVANSNEKVSHGHITKRGSKTGRTTLVQCTLVAIRHNSYLKKYYEQVKARRGHGKAKIAAARKYLGIIYNTLKNKWVFEDFNNFVLAE

SEQ ID NO: 347046 - protein, 422 aa, unidentified
MISFAKRERAQRAAACVGVDAGKFAHTLVVRPTGQPDSRPLSFPTTRVGFEQAVAFIHQPVPGAQTATVLVGIEFAGNYGFTLAHYLRELGFAVVSVLPAHTKRWKDVAHNQPLKTDAKDAGTITDLLAQGHFVSFPFLEPAYAALRYLVTGRERLAVLRRGAITQLRALLQVVFPEYETLFPLVSQRTAVTLLRAFPSPPDLLAAPKAKVVRVLRAGSRGHLGAELYERLVAAARSSLGLPGAQVRLRQEIVLTLDRLALFEQQIRALEVELVAALEAVPETPYLLSIPKVAAVTAAVFLGSIGDPRAYDAGAQILRVAGLSLVERSSGVLHGTKRISKRGRPLLRAAAYLFAVRSITHGGLFRADYEALCARNGGQKLKAVVAVMRSGLQLMYSIARDRRRFTVEPPPRRTRPTLEVTPA

SEQ ID NO: 347047 - protein, 423 aa, unidentified
MEVMHKCCAGLDVHKNMIAACVRLTLGRKVERECRTFDTTTTGLLALLSWLSASGCTRVAMEATGVYWKPVWNILSDGTFELMVANAAHIKNVPGRKTDMNDAMWIADLVACGLIRASFVPDERTQELRSLLRTRKQMTREQTSHIQRMQRTLEEGNIKLDSVISDIVGVSGRCMIEAMIAGETSPVRLADLAHRRIRAPREALCEALRGRVTDHHRFLLRLHLRQYDALATAIAEIDQQVEVLIEDIDEQIEAGQATFRALIMLLCSIPGVGTLAAVVILSEIGRDMSRFPTAGHLLAWAGLCPGQNESAGKRKSSRLRKGAPWLKTLLIQCAWAASRRQDSYYKAQFSRLKARRGPKKAICAVAASILTAIYHMLKDGTGHRDLGASYFDRRSIDAKAKRLVSQLTKLGFQVQLEQIAKAA

SEQ ID NO: 347048 - protein, 436 aa, unidentified
MLESTPYLSVGLDVGADFTWMSIMLPNGTSIGKPFKILHCNPASRELAVSKIKEAQEAYSLKSRCFLESTGIYHIPLLCFLRDKGFDCSVINPIITKNSTNMNVRKLHNDKFDSKKAAKVGLDASLKVSIIPDDEVIDLRNLVRDYYYFKDLQSAVVLKLTAELKVSFPAYRKVFSKVTTKTSLKLLDAYPLAEDLLAAPKETVVETIRSTARFGEKYALARYDALRTAAEDAAIFGRALKSNSVRIRLYIDSYREYQKRLDTIMEAIHATVDGLKDSPVYGRILLLQPLRGVGFMSAVVLVAEMGSFDLFPSPKKLYAYFGLDPAVKQSGKFNGDKVHMSKRGSSLARRILHMVALNNLKVDKGSGMPVNPVIHSYYADKCKAKKKNVAVGAVMHKICNIIFAMLRDNKPFEVITPQEHCKRYLAAHPDKVQSAA

SEQ ID NO: 347049 - protein, 420 aa, unidentified
MNRLIERCAMLDVHKSQITACVRVPDGDGGRRQEIREFRTTTAGLLTLADWLRSWAVTVVGMESTGVYWRAVYYLLEDEFECQLFNARHLRHVPGRKSDVQDAEWGCQLIEHGLVRTSFVPPRPLRELRDLVRYRKAKIQERGREVQRVEKTLQDAGIKLSSVASEVLGVSARKMLDALISGTNDPEILAELAKGALRKKIPALREALQGRFTGHHALLVGQMLAQIDFLDETIATLSARVEELTRPFSREIELLDTIPGVDRRAAEMILAEIGPDMSRFPTEHHLASWGGMVPGQRESGGKKHSAATRKGSKWLRGTLTECSKAVVRTKGTYLSARYHRIKSRRGHAKATVATGHKILTAAYHVLNQKVPYNELGEDFFYRRDTENTNRYRKRLVKQLERLGHSVTLDPLEPPLEPAAA

SEQ ID NO: 347050 - protein, 357 aa, unidentified
MADHFAVARRRREDVEASGAWWRCGRTTGALCATSRESAGEAGKVFPFVVIQEAGLDGFWIDRALQNEGIESHVVDPASIATSRRRRRAKTDGIDGEALVRALLAYKRGEPRVCAMVKAPTPEEEDRRRLCRERKVLIGERVQHVNRVKGLLFSQGISGYEPLRRDRREQLDTLQTGDGRLLPDHLKAQVCRELDRLELLLEQIKAVEAERDVLLAAQQVAAPAPAAMLLDIKGIGPEFAAILWSEGLFRHFDNRRQVASYAGLAPTPWQSGSVDREQGVSKTGNPRLRTTLIQLAWLWLRHQPQSALTLWFEERVRRNGGRLKKTIIVALARKLLVALWKYVTAGVVIEGAVMKAT

SEQ ID NO: 347051 - protein, 382 aa, unidentified
MNVTYKTCCGVDVHKSFLVATIVKTTGGIEPSYQKKRFSTFNNSILEFKQWLLDNDCHDVCMESTGKYWVPVFNLLEDDINVVIANPKWVKAVKGNKDDTKDSKWIGDLFRLGLVRGSYVPCKKIRILREYTRYRYKLISCRSSEKNRYQNALTVCNVALDSVVSDIFGKSSTSIIDYLLEQSGTSINHEEIASKLLRSLKSKEDAVIESVEGYQMTDAQKYRMRLVRAHMDYITAEIGTDMSQFSSSKRLCCWAGLTPGSNESAGKKKSVRITRAGVYLKPALVQCAHAAVKSDKSPYYKKKYDSLVKRRGKKRAIIAIARMILTAIYQMMSTGEQWNPSDLYKIDMPVALVEKQKAKAIKQAKKLLQREGLLPPDEPLAS

SEQ ID NO: 347052 - protein, 313 aa, unidentified
MTDTTRFVGIDISKSSFDICILPDGRSASFANSAEGIADFLVFIEPFCAIERLVLEPTGGYERHVLTALQAAHLPVARVNAKQARQFAKACGQLSKTDKIDALILADYARRMETRLVPQRSSQEGALVDLVRRYRQLSHMIVQEKNRREKQNETLTDWIEEILHVLLEQRQAVIDAMEACLKADPQLARKADILMSLKGIGLRTACFLLADLPELRRIGKGQIAKLVGVAPLNRDSGLMRGKRMIAGGRQPVRDALYVAALPAIRFDPAMKAFFMQLKQKGKPGKVALVAVMRKMIIILNAKMRDAYSTVLDA

SEQ ID NO: 347053 - protein, 386 aa, unidentified
MPESSNSAESVQYDTTLVLAIELSSKSWVLAAQVPGLPKTKAKRTIEPDKLALQSAIDSYRVRAAAAGHSVDRVVATYEAGWSGFWLARWLIAKGIEVHVVQPSSVPVDRRMRRAKSDGIDAELLLRTLLAWLRGEPRVCSMVPIPDEADEDARRCVRERTELVSERVGLVNRIGAVLATLGIEGYNPLLKNRRRRLADLRTGLDGPILPHALAKIERLLSRLELVLDQIAALEKDRDAVAEMPASDDASRMIQQLCSLRGIGVQSATILVRGAFVRHFANGKALGSYAGLTATPYNSGAVEREQGIGKAGNRRLRTAMVELAWLWQRYQPGSIQVAWFRERAGSTGRRVRKVMVVALARKLLIALWRFAVDGVVPEGATMKPAAA

SEQ ID NO: 347054 - protein, 367 aa, unidentified
MSNYVTAIGLDVHARSISACAFDPMTGEVSRARFGYDPASVAEWALGFESPKAVYESGPTGFHLCRALRALGVDRAVGAVSKMHRPAADRGRKNDRRDAEWLARLLACRNVVEVWVPDERTEAARDLSRALEDARDDLQRARQRMSKFLLRHGLVFDETTPTGRRRSNWTEAHWRWARSIEFDEADDAAAYERYTDAVDRCGEAKRELERRVVEAASRPEWAPTVDALCPVKGVDVAAAFPLAAEAGDFSRFPSAPSFAAWCGLAPSERSSGETESRGGITRAGNSHVRRALVEASWHVPMSTRHPKKPRPGHGVAPAASRHAAKRDRRLQDRRDAMSQAGKRPCVANCATAREMACWVWAIAPMVR

SEQ ID NO: 347055 - protein, 323 aa, unidentified
MIQSVLGIDVAKLKFNVCLIGQEGKIRHRVFPNTAPGFIELADWLVKHKVERIHACLEATGTYAEALATDLYDAGHVVSLVNPAVIKAYAGAQLSRTKTDKVDAELIARFCLTQQPLVWMPPAPEVRELQALVRRLDSLVEIHTAESNRLSSGVTSAAVEASIQSVIKSLDKEIKRTEQLIKKHIKHHRRLKEDSDLLLSIPGIGAATTARLLAEINFHKYESARQVAAFTGLIPRLRQSGSSVRGRARLSKMGSTRIRHALYFPAVTAIRCNPVIKAWAKGLRERGKCEMQIIGAVMRKLVHIAYGVIKSGKPYDPLYAQNG

SEQ ID NO: 347056 - protein, 431 aa, unidentified
MPDRLQVGVDFSQKRTDFCLLFPDGQPLEPHVSFANSLPGYALAKQLLLDALDRYSFDGVDLSGEATGYLWLPFFLQLSADPDLAPYDVNLFLLNPRWVKWFKKCFAEDDKSDQKDPFYIAERTRTRRPATTWSPPDCLPLRFYTRLRFHLVQNLAREKCYFSAFLFLKASSYRCLKPFSDVFGATSRLVLTEYPTLDELAELPVEDLATHLYELSGHHLPHPSDNARKLQRVAQESFPLAETLALPVQRILDLTLEHIRFLETQVDQVNDWITTELETHPVITQLATIPGVGPVFSSGIGAEIDDTQRFLQGPKWDRKHKRYRPRNLRDAEDAVAKIAGLWWPRSDSGEFEAEDRRMAKSGNRYLRYYLIQAANLMRQHIPEYAAYYARKFKEAAKHHHKRALVLTARKSVGLVVGLLHRNEPYRSGRDY

SEQ ID NO: 347057 - protein, 356 aa, unidentified
MSRDIKYIGMDVHKEAIVIAVLNGSGKLVMESIVETKASSILEFIHGLRGELHVTWEEGTWASWLYDLLQPQVEQVLVCNPRRNALLKEGSKSDKVDARKLAELLRTGMLRPVYHGENGLRTLRELARSYQTISKDLNRVMNRLKALYRGWGIACAGTQVYSLRYREEWLNKIPHVGVRRRAELLYQQLDGLQGLRRILRPELLAESRKHKAVKLLRQIPCIGPIRAARLMALMQTPHRFRSKRQLWTYSGLGIETHDSAQYRYVGGQLQRSKNPQQIRGLNQNHNHEMKEIFKGAATRASCGRGPLHDFYAALLAKGMQPEMARLTLARKIAAITLTLWKGGKAFDAEQLKPQAA

SEQ ID NO: 347058 - protein, 316 aa, unidentified
MTTTPVFVGIDVSKDRLDVALRPTSDRWALANDAPGVATLVARLQGLAPTLIVLEATGGLAVPLTGALAAAGLPVVVVNPRQVRDFAKATGKLAKTDALDAAVLAQFAEAVRPALRPLPDAATQALSALLARRRQLIEMLTAEKNRLGSALPPVHKGIRAHISWLDRRLADLDADLAQAIRESPVWREKDDLLQSVPGVGPVLATTLLASLPELGTLTRQQIAALVGVAPLNRDSGAWRGKRRVWGGRAPVRAALYMSALVATRYNPVLRAFYQRLCAAGKAKKVALTACMRKLLTILNAMLKYRTPWENNFAHAS

SEQ ID NO: 347059 - protein, 470 aa, unidentified
MAAVMIGVDPHKASHTAVAISAAEEPLGELRVRACVAQAERLLAWAAAWPQRIWAVEGAGGLGHLLAQQLLAAGERVLDVPPKLGARVRLLAAGDTNKNDPNDARSVAVAALRSAGVREVRPDDHAAVLKIWSKRYRDLGRTRTQVVCRLHAVLCDLVPGGVCRPIYAARAARILQQITPPDAVAAARCELAAAFLDDLRRIDAQIRETRKKLATAVQATGTSLTGLFGVGPVIAAAVIGDVRDVSRFPRRDHFAACNGTAPIEVSSGPRKIYRLSRRGNRRLNHAIHMAAITQIHHRHSDGRAYYDKKLAEGKTPKEALRSLKRQISNAIFACLQADARRAATPVKGPGGQQGNDSVASAAGSHPRHRLFGQATPGPDHHTTTTAGHPAPGPVRTQGRDGHSSIAATPPPATPQVQVERPQRSEDERPGGAARRRPHSAARKARGQGSLAKTQHPKGTSRGAEKVDGAP

SEQ ID NO: 347060 - protein, 347 aa, unidentified
MHITTIGIDLAKSVFQLHGVDAEDKVVLKKKLRRGAVLDFLAKLEPCLIGMEACATSHHWAREISALGHEVRLIPPAYVKPYVKRQKNDAADAEAICETVTRPSMRFVPIKSAAQQGVLVLHRSRDLLMRQRTMLLNAIRAHMAEFGIIAAQGPRNVMGLIGELRDNEEIGLPDIARSALLALAAQLDAMGNEIRIIERRLMAWHRADETSQRLQTIPGVGIITATALAASVPDPAVFKSGRQFAAYLGLVPRQNSSGGKERLGHISKMGNGYLRKLLVVGATSVIRRADSSTSATGFWVRSLLERKPARVVTVAMANKTARIVWAVLGLGGNGPRGNISRASDCMS

SEQ ID NO: 347061 - protein, 386 aa, unidentified
MSRPSNILLRAINYDHTLVLAIELSNKSWVLAAQVPGLPQTKAQRTIEPNKNALLAAIDGYRARAAAVGHSVDRVIVTYEAGWSGFWLARWLMPQGVEVHVVQPSSVPVDRRLRRAKSDGIDAELLLRTLLAWLRGEPRVCSMAPIPDEADEDARRSVRERTELLSERVGLTNRIGAVLATLGVNDYNPLLQSRRRRLAELRTGLDGPIPPNALAKIERLLARLELVLAQIAELERDRDKVPAADAPDRAGQMIQQLTSLRGIGVQSATVLVREGFVRHFSNGKALGSYAGLTSTPYSSGGIDREQGIGKAGNRRLRMVMVELAWLWQRYQPGAAQVAWFRDRVGSTGRRIRKVMVVALARKLLIALWRFVIDGVVPQGAVMKPSI

SEQ ID NO: 347062 - protein, 385 aa, unidentified
MTTQSKVSQFMPRDYDIFTGMDVDKRSMLTTFTDHGRLLSAIRMPYSSEHLLNYVRKYYPGKRIAFVYEAGPTGFGLYDDLVANGHRCLVVAPSMVPTPPGKRVKTNRIDSKRLSEGLRGGQLEGIHVPSPKYRELRHLVQLRDTQSRQLTATKYRIKALLLYEGIRFPAENGKWSSRVIAQLKELACSRAVRFKLNQLINTLQFHYESASKAQKEIRRFCNEDPELQESIRLLTSIPGIGSIIATHLAGRLGDWREINNVRQIAGFLGLVSREDSTGDRVKRGEITRTGDSRLRNKLIQGAWVAIRRDGELRAFYRRIYQRNPKNVGAKKAIVAVARKLTTRIYAVLKQRRPYEFRPDNSRAPLTAEETARLRERLAGAQSEQP

SEQ ID NO: 347063 - protein, 311 aa, unidentified
MEKYVGIDIAKRTFDICCLDEQKVQQFDNNTKGIRLAIRILARLKPKLVVMEATGGYETMLAAELHAASLPVAVVNPRRIRDFARANGQLAKTDKLDAAVIAMFADRMRPPRQQQIDHNSRLMKAMVARRHQLIGIRTAENNRREHALDKVIARSINRILKTIDREIDKIEREIQEQLASMPELQTKAQILESASGIGQTTAAMLVTEMPELGRLNRRQIAMLIGAAPINRDSGTFRGKRMTGAGRRNVRSRLYMPTLVAIRHNPPIRRFYQHLLAKGKAKMTAIIACTRKLITILNAMVAKNETWNPNFS

SEQ ID NO: 347064 - protein, 403 aa, unidentified
MRGLTLAPKAGAQCVSSARWDLRGGRPAMVVPTAIARESTLAIFDQATGEVTTKRVMGRPHELLPWLRAVQRPARMVYEAGPTGYGLARRALAEGIELSVCAPSKTERPSDRIKTDQRDAVRLAKLLAASELVLVTIPSVEREELRDLVRCREDIRADLVRARHRIGNFLLRREIYWEGTGEAWTRKHRSWLTSIKFADQASRSTLADYLHAHDVLISRRDQVEADLAKLALTAPCAHTVARLRCLRGIDTLSALGLCAEIGEWGRFDHPDQLSAYLGIVPCEHTTGSQRRLGSITKAGSTHARRLLVEAAYHYRRGPVVGEMLERRQRGHAPEIINISWKAQRRLNARWRQLRDARRKPNGIVAIAIARELGAYCWEIATCTTTSPEPTPTPTTRKRLTNSR

SEQ ID NO: 347065 - protein, 338 aa, unidentified
MELIAGIDLHSNNGYYGIINEEGERVFRKRLPNHLPTILSALRPFQAHLKGIVVESTYNWYWLVDGLMENGYKVHLANPAGIQQYNGIKNADDKSDAFFLAELTRLRILPEGYIYPKEERPVRDLLRRRIMLVQQRTSHILSFQSLMSRQTGAGMSSNLIKKLREEEIKEFLDEEYLILAGETNIAVVRFLTEKIRALEKAALKRAKLKPEYEKLMTVPGIGLILTLTIMLETGEIRRFPSAGNYASYCRAVKAKRTSNSKNKGKGNQKNGNKYLSWAYVEAANFAKRFCPEAQRFYQRKMAKTNQIVATKALACKLSKACYYIMRDQVAFDTEKIFG

SEQ ID NO: 347066 - protein, 339 aa, unidentified
MSDKIMSNSAAISKSEENAACVAQENQPELFLGIDVSKGWIDAYLLPSKQTAHVDTDEESLAKWAESLPKSITLVVMEATGGLEIPVFAALAARQIPVAVVNPFQTRNFAKSLNLRKKTDEVDAYALALFAERMRPTARPFPSEQQRELDEILARRGQLTGMIASEKNRKQQARNAEVLARIEAHIAWMERDVADCDKKISGLIAANPVWNDLDKLLQTMPGIGPGAAHALICHLPELGHSGRRALASLTGVAPFEHQSGQWHGKSFCSGGRATLRSMLFMAARSASRWNPPIRDFYEQLRARGKAHKVAIIACVRKMLTTLNTMVKNNEEWRLVQKNA

SEQ ID NO: 347067 - protein, 463 aa, unidentified
MRDAIGIDPDSKGFVCAQVKASAPVKTRGYLATEAELGKFVKWVKGEGDLIVAIEGSNGLSKPLEKKLRETGVVFYSFKPADTEKFRKAVLGQNKDNQKDAESVARYAMALESQGKLDGYRRVWFPDAELQLLSRGYERKSQAMTAEINRLWKLIRHASSELYLALGGNHPEVEMKDNMLKNQGILALLGQHPNFQEWKDLSEAQFLAAMGGNHNGRRELITQLCKLAGNLTPVRPAMALMIQDSARTIQRLKREEDDIREMLEQLTKDSPAVQALKEKRGIGTITAATMIAEIIDIRRFSRDDNLAGYMGLGMREHSTGDTTRMVPSQLFNHRLKDAFMTAARNYVRFNTDSHLAGYYRNLVKAGMKPLEATKRVARALVRVIFRELYALQGSEANPPEIEEAKEGESDVASGATRSEQSHSSNTSPSSLTSKKAPRPIKVKSTRRLRTTKRRPNAVLKKSC

SEQ ID NO: 347068 - protein, 354 aa, unidentified
MNYVGIDWAYRKAQWCALAPSGEIAGDGRIAADRDGLARLVLELGDEVKACLEMMSGALWVRDELVACGWRVEVADARKVKTVAPLAAKTDKVDARLLAELSRRELVPALWLPSLDERALRERLRRRMHLVRLRTSAKARIAGLQTQWGIRVSLARLRRGDDGLTLLERAGVPEVWRRSVSECLSVIDFLDERIAPLDAELRPFAQADPRAVLLDTIPGVAELLALTIAVEIGEVSRFSSPTRLVSYGRLAPRVHQSGQGRPRSGPLNKSGSRLLGWAAVEAAQQAWRESNPWHDLYLDVARRSGNNNSAKAAVARKILIAAWHMLSRNEPFNPAPRCTRGSSVPASSRLALAA

SEQ ID NO: 347069 - protein, 337 aa, unidentified
MKNYQMGIDISKEKLNICLKEGTHTVREEEIKNTVAAIKKCVKRIEKESGVANDDLLVCAEFTGRYIYPLVCACDEMGLFLWMEDPTRIKNSFGVTRGKDDRVDARRIAEYAFRFSDKAVAYKMPDKTLVSLKNLLTDRDTLANDRKKYETQLRDQKGYMDAEDYRRKKRSWSAVVKTLDKQIALIDDEIQRLVESDEKIKHQAELLKTVDGVGDRIAVRMVVVTMAFTRFETSRQFNCYAGLAPFRYTSGKSIYSKSKVSQRANKQIKSLLHLAAVSVATHMKSGEYKDYYKRKTEEGKHPMCVLNVIRAKLVSRMFAVVKRDEAYQRNYMIFTPT

SEQ ID NO: 347070 - protein, 500 aa, unidentified
MKVIRNPKDFRIVYSRACGIDVHKNFIVCTACIPGSKPDQWKFITRRFSTFYKELEECADWLSKLDCQNVCMESTGQYYIPVHDVLEKKLSNVRVVNPKWVKAVKGNKDDKKDSKWICQLFRFGMTKSSFIPGEDIRTLRGETRYRYKVISMRTSEMNRYQNALTVGGFKVDAVFSDVFGKSAQAIINLVLSGKEYTDKDILSLVHKNCKSSPEKILEAVNGIRMNDTQKKRLIIIKNHLDYLTDEIGEINKQIDCLVKEIPGMEAAIDHACMVPGIDKNLAVIIMSEIGTDMSPWPSQYNLVSWAGLSPGDNQSARKKKSVKISRAGVYLKPALVEAAHAAVKDKEHPYYAIKYNTIKKRRGQKRAIIAIARKLLIAIYHMLLTGEKWNPTDLANVETPTDKRRKYIKKNLSNSFSQLENTGMLPEEIINYLKGQFLDLEASAESEDDSDSSDNDSSKGTEASADSAETNDSESPTEQPALDSDSQTDLTLVKDKSAAS

SEQ ID NO: 347071 - protein, 338 aa, unidentified
MTIVTLGLDLGKNWVHMVGLDADGRIVLRRRVRRDRLLVETVDMPPCLIGMEACCGAHHLGRALAAQGHTARLMPPQYVKPFVKSNKNDHRDAEAAAEAVQRPTMRFVPLKSEAQLDLQTIHRVRQRLVGRRTALINQLRAILLERGITVARRRRVLELRLRAILADESARLSARVRHLIEDMRAEWRDLDARIDAFDAELTAKARQDDACRRLCEIPGIGGATALVAAVGNGAVFDRGRDMAAWLGLVPREYSTGSKQRLLGISKRGNKYLRTLLIHGARAALPYLAARNDRLGSWLRSLLARAHRNVAVVALANKLARIVWAVLANDGCYAMPTTA

SEQ ID NO: 347072 - protein, 363 aa, unidentified
MEGMFYVGVDLHKTQFTICILISGAVLEEGTKFEMNKNGYQAFISLMRGLSSSDTYDDIILAIESTANSRFFRDMMIGCGFKVVVVNTLRFKVVNLSTKKTDKNDARTLAEFLSKDILPVSHLCSAESESLRRILKSRNLMVQDIVALKNQAHAVLLAYGHITKTAQFQSKRERNKILEKLPTEIARTVGIIFETINVVENQKKVLEGKLRTLTSKDPTVNLLMTIPGIGIVNACTIRAYIDDIDRFESYKHFSAYCGLVPWVQTSNESIYYGRITKRGPQELRTALVQCVVAMVRMEDKTSNYKMMRQYHELKNDKSSGKAIIATARKLSRIIYIMLKTNTPFDSRKLTDSTEKPSYRMSES

SEQ ID NO: 347073 - protein, 337 aa, unidentified
MNYSGIDLHSNNSVVTVTDERDRVVAEKRLPNDLSKIVAFLLPWRDELAGVVVESTYNWYWLVDGLQEAGFEVKLANTGAIKKYDGLKHSGDEADARQLAHLLRLGILPTGTILPPEHRATRDLARKRMQLVRSRTSHILAIENILARERAVKITSNQIKRLTAVDVDQMGLSADVALAVQSNLAVVTTLGAQIELLEKRLQEKLGERPEYALLTSVPGIGRILAAIILLETGPIERFDAVGNYASYARCVDSQRLSNGKKKGEGNAKNGNKYLVWAFVEAANFALRFNAEAKRFYERKKARTNNVVATKALAHKLARACFHILKERAPFDTRRCFA

SEQ ID NO: 347074 - protein, 313 aa, unidentified
MPTSYVGLDIAKDHIDVSVRPTEERWRTEQSDDGIAQLVARLEALTPALVVVESTGGYETAVVTALAVAQVPVAVVNPRQVRDFAKAMGQLAKTDALDAAVLALFAERVRPEVRPLPDEAHQELVALVTRRRQLLDMLTAERNRLATARRSVRASVHQHVRWLERRVHDADADLTTTIQRSPLWRAKDDLLRSVPGIGPTTSCILIAFLPELGTLSRREIASLVGVAPLNRDSGQHRGRRVVWGGRAVVRGPLYMATLVAARHNPVIRAFYQRLRTAGKPPLVALVAAMRKLLTILNAMVKHHKSWQPINLES

SEQ ID NO: 347075 - protein, 467 aa, unidentified
MSKGSTKRGASIGSSSSRRTSSKRRDSLKQMNANAAGIDIGSREHYVAVPPDRADEPVRRFECYTPQLHQMGQWLKQCGVETVAMESTGVYWIPVFEVLETYGLDVKLVDARHVRNVPGRKTDVLDCQWMQRLHSHGLLSGAFLPESAMAPLRNFWRQRGALVKEGATQIHRMQKALEQMNVQLHKVLSDITGLTGIKIIRAIDRGEHNPQVLARYRDRRVKRSEQEIADALSGNYRRDHLFALGQALELYDTYQDKIRDCDQRIEAEMAGFDSKADPDQLAGKTKARRRKNQSWFDLRSELHRVTGVDLTRIEGIDALTAQTVVTEGGFDMSRFRTEKHYTSWLGLCPNNRITGSKVKKSNTRKVKNRAATALRVAAQSLHKSQTALGAYYRRMRARLGPAKAITATAHKLARLIYRMLKYGEDYIAKGQQWYEEQYRERALRNLKTRARALGYTIIETQTGEVVS

SEQ ID NO: 347076 - protein, 360 aa, unidentified
MTSMNPDPRLRRVVIGVDTHKYVHVAVALDDIGGRLDDRSFPADRAGYEQLIDWAADLGARRLIFAIEGTGSYGVGLTSAVRRRGIGVVEVLRTDRRDRRLRGKSDTLDAENAARAALSGNATSVPKTNDGTVEMIRQIKVAKDVAVKARTSAMITLKAVIVTAAPELREQLQPLSKMALINRCAALRPGSITTVAAATKHTLRSIARRWQQLNDEIKTHEKLLTELTTQLVPQLVAAFGVGADTAAELLIVAGDNIDRVRSEAAWARLCGVAPIPASSGLTTRHRLNRGGHRQANAALYRSVIVRMQHHQPTRAYVTRRTSEGKTKAEIIRCLKRLLAREIWALLRPLRSTNTTTTAIT

SEQ ID NO: 347077 - protein, 408 aa, unidentified
MNAVGIDVSKGKSMVAALRPMGEVALLPQEFLHTEVGLEQMAYAIVALGEDTRVIMEATGRYHEPIAAALHEYGIYVCVLNPLFIKQSGGGSIRKVKTDKADAMKIAKYGLDNWVELREYTPMDTVRQQLKLCSRQYNLYMKTVVSLQNNLISLTDKTFPGVNELFSSPERADGHQKWVDFVMTFWHCDCICRVSEKAFTDRYQKWCKRKGYHFSTEKALDLYAGSCGHFTTLPKNDNTKLLITTAAQQLISGKMTLAALRAEMTRLAKQLPEYDTVRAMYGVGETTAVQLMAEIGDVRRFPRRSSIVGFAGVDPAVDQSGKHSAKSVPTTKRGSPHLRKTLYQIVCTYLKKSPADEPVYQFLDKKRAEGKPYFVYMTAAQNKFLRIYYARVKECIETFDAQQDTVQN

SEQ ID NO: 347078 - protein, 430 aa, unidentified
MTNREPTPADVVLVAIDIAKLRNDVLIELPDSVRRKRLTVLNTRAEHDRFLELLGNLKRPVVAGFEATGNYHRPLAFRLLQAGIGLRLVSSVALARTREALHNGWDKNDPKDAQVILHMLRIGATQTYCDPIRAGIHNIQELSKTHEVVSKAKTELWHRLLTHYLPLYFPEIARFAGNSRSDWFLAFLEQFPTPASITAFAKEEFVSAAWDVVGKKVSKARLLADIYETAGSSIGLPLELSSPAIAMFRMMVAEGRSLIQQRDVIEAQAHALLSENADYNRLRQVPGIGPINAMTILAEAGDLRRFAHHRQFLKFCGLDLATHQSGQFRGRTMLSKFGNARLRRAFWMAAHVAIRQRDNGFRAKYERYIARDRDNADLKRKALTAITAKMARTVHAVIKTGSDYRPFFEGPIPSGRTSLSKCREGASATL

SEQ ID NO: 347079 - protein, 319 aa, unidentified
MENLSHGRVIGIDVSRDWLDVHCLPDGHVSRVPNTPAGHAVVADLARERDAVVCFESTGGQEWQLWALLESEGVAARQVPPAQVKAFAQCRGTRAKTDRIDAELIARFFAFRPEAGRSLPAAKLRLLRALTSKRAQLVEMRKRLLAQIRAHQKLGTAAMFEDVDTELKQRIDSLIQELEDRITRAIASDDRLSETADVLRSIPGIGPVASTMLIAEMPELGTITGEQAAALTGLAPVAHDSGTLRGKRAIAGGRRALRHVMFQAALVAAHHNAVLKAFADRLRKAGKPHKVVITAVARKLVTIANALCKSRQKWTPATA

SEQ ID NO: 347080 - protein, 313 aa, unidentified
MTVEHFIGIDVSKDHLDIATRPTTDPLGFQNTDEGVDALIHQLRPLQPTLIVLEATGRYHRLVLSRLLAAGLPAIAINPRQARDFARAIGRLAKTDAIDADVLAEFAEKIRPEPRSIADQATQDLEAICTRRRQLVAMLSAEKNRLHTAAKTIRSEIQKHIHWLEKEISQLEKDLDKQIRSSPAWREKDDLLRTCKGIGPITTLTMLSCLPELGTLSGRQIAALVGVAPFNDDTGKHKGRRHIQGGRLDVRAVLYMATLAAIRHNRTIREFHRRLIAAGKAKKVAITACMRKLLTILNAMLRDKKPWQPDFVA

SEQ ID NO: 347081 - protein, 400 aa, unidentified
MNIIGIDVSQGESHATLITEEAEKVAFKFKHNKSGFQILNSYISSNTIIIFETTGVYSAQLTAYLKSKKVKFYELNPLEAKLRMASLRRNKTDKNDSFKLALLGKTQLAEIKNHCNKQSNSLYESLRILSLRYKQLIKCRTRILNFLRSSLELTFPELNQIFKNAYAVLALQVFRMYCHPDFLVGLTLKEMTTRVYQSVSRRIHKDVIQNYCAQVWLAAKDSYPAVPANSLEIEIISEYCDEIESYNKEITYIQNKLIKTAVGLDDFKVISSIPGAGQLNSALLLGFTGDIARFDNYKQLNAFLGLDLNRYQSGKYIKGDTINRRGSSQGRAVETDMIRSMLRNQGKIQNHLVDYYYKLKKPPFNKHDKVALIACANHLNRTIINLVHTHQLYNYSKAIH

SEQ ID NO: 347082 - protein, 426 aa, unidentified
MKYTQNERIMQITEKTLIVGIDVGSEKHYARAFNFRGVEYGKLLIFHNDAEGFAIFEGWIRKLAVQNGFKDVTVGMEPTGHYWFTLGEHIKRTGMRIVLVNPHHVKKSKELDDNNPSKTDRKDPKTIAMLVKDGRYMEPYIPEGIYKELRNLMDSRWRITKELFAIKNRIGRWISIYYPEFTKVFVDWEGKAAMLILKECPTPAKIIEKGIDGIIAIWKEHKIRAVGMKRAVMLLEMARLSIGTKEGMTSAENELQMLLEDYESKMRQYERTMDLVERLAREIPGFEEMLAIKGVGLVTAAGFIAEIGDVRRFSHPKQIQKLAGLSLKENSSGKHKGKTTICKRGRRRLRYYLTFGMMPLLSKNEEFKALHEYYTSRKTNPLKKMQSLVALSNKLVRIFYVILTKKVAYDPQKMMNDIRRTEVKAA

SEQ ID NO: 347083 - protein, 402 aa, unidentified
MISVGIDVAKGKSTVCILKPYGEIVSKPFDIAHNEKDLSELASMLLRFNEEVKVVMEATGIYHLPVLTYLQEKGLFVSVINPYLMKVYRSGDLRKAKTDKIDSRIIANYGIDHWFTMPEFQASEDIYGELKLLGQQYRHYMKLHINSLHELTHLLDYTMPGIKGMFASWNEGNRKDKLSDFVESFWHYDKIICLDEIEFINQYINWAKEKKYHQSQAKAKAIYKLAHESIPTLSSETPSVKMLVTEAVRVLKEVDATLGIILSRMQELAKGLPEYAVVREMGGVGEVLAPKLIAEVGDIRRFHSGKALIAFAGIDTPPYESGQFAGSNRKITKRGSAALRKVGYETMRCIKTHPRPDDPVYQYIVKKELEGKAKKSAKIAGLNKFLRIYYARVKEVYSDISE

SEQ ID NO: 347084 - protein, 431 aa, unidentified
MEPEFAAFVAIDWADQKHAWALEVNMSSDRESGNIDHTPESVEIWAAELGLRFAGRPIAVALEQSRGPLVFMLTKYEHLVIFPIHPSTLANYRKSFRPSGAKDDPNDAGLLLDILVRHRDKLRRLDPDTPETRTLQFMVEERRKLVHEKTRCSNRITAHLKLYFPQAIGWFDEIGSHIVADFLERWPNSERLQKARPATIERFFIEHNSRNAERIAERLEQIRKIVPATKDTAVLRSCSAAVIAWAGLLRQLLNAIKAYDEQIDTLARQHQDYALLKSFPGAGPALTPRLIATLGSQRDRYQTAHEIQCYSGIAPVVASSGKQRWVHWRWSCPKFLRQTFHEWALHSVAYSEWARRYYDEQRAKGKRRNTVIRALAFKWIRILFRCWKDHKPYNEQAYQQALALRRQKQTASQLVEVKWKNVAGFMKITAS

SEQ ID NO: 347085 - protein, 421 aa, unidentified
MNMTSKSAQFAALIGIDWASQRHALCLYDCATAKRESSILEHTPEAIAQWARGLQERFKGKKIALCLEQSKGPLIYALLEYPFFVLYPINPATAARYRMAFKTSRAKDDPSDAQVCLELVLHHREKLNPWLPNDAPTRELSCLLQHRRAAVDLRTLLTNMLRDALKSYYPQALELAAQDLFAPLGCQFLLKWPSLQELHKARKESVRKFYYAHNCRRMDVIEKRLDAIAQMTPLCRDLALLEPAMVQVRMLARQLLQLGGALKEYDSKIEQLFAQHSDALIWESFPGAGPTLAPRLACAFGTQRSRYQSAVAIQQYSGTAPVTEKSGKNQHWVHRRWARPHFTHQSFFEYASQSVLHCSWAKLYLKEQMARGKAYPTAIRALAFKWQRIMFVCWRDRVPYDETIYRQSLQRRGSHLARKLN

SEQ ID NO: 347086 - protein, 358 aa, unidentified
MTDPARTVTGGVDTHKDTHVVAALDGLGQLMGTEAFPATGAGYRALLRWLRSFGALEVVGVEGTGAWGAGLARFLTAQGVPVVEVQRPNRQHRRRHGKSDPADAIGAARAVQSGEASGVPKAATGSVEAIRFIQIARRSAMKARTQAANQLHAVVTTAPDQVRARLAGLGTDELVERAARLRPGTPATPAAAAKLTLVALARRWQRLTQEITELDHHLAHLTATTAPTLVELNGVGTQTAAALLIAAGDNPDRLHREASFAALCGSSPLDASSGRQQRHRLNRGGDRQANAALYIIAISRLRWDPATKAYMRRRLAHGKTRKEVIRCLKRYIARQVHRAITTDLATPNEPRTTQLAAA

SEQ ID NO: 347087 - protein, 272 aa, unidentified
MSLPNPLCVEIDVSKSTLDIAATSEFGQFITGNDADGFDVIIAEPRKHSVALILREATGSLETAMVCSLQVEGFEVAVVNLGRTRDFARAIGYLAKTDRIDARVLAQMAEVINRHPERERFIRALPNAERQALAAMVVRRRQLITKLVAERNSLHPAYPQSRNSINIIIQALENELVRIDEDMNKHIQSHFKELAKRLISIKGVGTMTAAALLAEMPELGSLSIREISALIGVAPVNRDSGTCAVDEPFSVVVLRQEQPCTWLCLWQPDLIR

SEQ ID NO: 347088 - protein, 325 aa, unidentified
MTGATVVIGIDVSKAKLDVAQVPDAEAWSVSNDGAGVRAAVERLAALAPRLIVLEATGGYERAVVAALAAAQLPVVVVNPRQIRAFGRAIGLLAKTDRLDAGLLARFGEQVQPVPRPLPDAQAQALEALLTRRRQLMEMLVSEKNRLGLAPRPVVRSIRAHIRWLEQRVDDLDEELDAQIQASPAWRTKDDLLQSVPGVGQGLSRTLLGALPELGALSRKQIAALVGVAPLAKDSGAFRGRRRVWGGRAPVRTALYMAAVTAAHHNPVLRPFYQRLRAAGKPAKVAFTAIARRLLTILNAMVRSNTAWRVSPDALLAPAGDTVAC

SEQ ID NO: 347089 - protein, 352 aa, unidentified
MEMSIAFDSHKRYTLAFVEDEKGQMIDECRIDHQRGAIRAYLEPFPDGTPVAVETIGNWYWIVDEIEAARKVPRLVHARKAKLMSGEINKTDQLDVRGLSRLQRVGTLPTVWIPPGDIRDKRDLPRTRMIFARHRTRLKNRIHATLAKYALHQFDEVSDIFGKKGRRMVERRLEQLPEQTRYTTGSLLGHLDETQQRVDALEKRMKEIFDPTPEVKLLMTLPGVGPLLAVVIALEVGDVSRFHRPQKLASYSGLTPRVKASGGKVKYGRLRPDVNRYLKWAFSEAANSICVNRKRYPDRYVSRRYAHIRQRKGHAVAIGAVGRHLAEAAYWVLTKREAYREPQNNQARSRKA

SEQ ID NO: 347090 - protein, 342 aa, unidentified
MKKYFIGIDVSKETVDVSFVESDFQRQPEYLAQYPNGKKGYRSMVRDLRLALRGTSIEQWLFCCETTGAYDRQMCHWLVGNGMHIWRESALQIRQSLGIRRGKNDKADSMAIADYARRHHDKANLFELPDKELAALKDLFLYRQTLVDKLKGVKNRLKAQKSQGQAASLAARFIRRDANSELRRLERSISECEKAMKEVIRSDGQLQRNYEHVKSIKGFGLVVTVALMVFSGNFQVVPTANKMATYCGVASFRNTSGTSIDSRQDVRRLSNLRLKGVLTMAARTAIRHDEAMRQYYQRKIAQGKQHGVAINNVKNKLLHIAYALVRNGQDYQSGHVTNGEAA

SEQ ID NO: 347091 - protein, 402 aa, unidentified
MNAVGIDVSKGKSMVAIMRPFGEIVSPPFEIKHTASDIHSLVELINSVEGESRIVMEHTGRYYEVLAHQLSEANLFVSAINPKLIKDFDNDSLRKVKSDKADAVKIARYALDKWHNLKQYSVMDELRNQLKTMNRQFSFYMKHKTAMKNNLIGILDQTYPGVNAYFDSPARSDGSQKWVDFASTYWHVDCVRKMSLNAFIDHYQNWCKRKKYNFSQSKAEEIYGKAKELVPVLPKDDLTKLIIKQAVDQLNSASATVESLRTLMNETASKLPEYPIVMDMKGVGPSLGPQLMAEIGDVSRFTHKGAITAFAGVDPGVNESGIYEQKSVPTSKRGSSDLRKTLFQVMDALIKTKPQDDPVYRFLDKKRAQGKPYYVYMTAGANKFLRIYYGRVKEYLATLPES

SEQ ID NO: 347092 - protein, 347 aa, unidentified
MEQMQLYAGLDMHTETITGTIKDDAGNNVRVLKVETTPEGVKKLFERLQKKNLTAVFEASRNWPRYAELVQKYCNKVVMAHPLKIRAIASARIKTDAIDSNILADLLRANLIPESYMPALDIVELRETLRYRASLSRMRGELKTKAKNILSREGKKCEIDEVTGKRARLWLNNLELNDLNSKELDYTISLIDNLSAEIAKFDKVIDRLQYKYPEADILKSIIGISTFSALMILAEIADISRFSSPNKLACYAGLVPSTYQSSQVQHSGRITKQGNAHLRWILTQCAHASIKSHKSHRLKTFFLRIERKKGKQKAIVATARKMLTTIWHLLNKNEYYAYRDISSKSGL

SEQ ID NO: 347093 - protein, 393 aa, unidentified
MNKSTEGINRIIGLDMHPDVFAAAALEKTTADLSKVLWVQDRQPTAGIERWAKKYLHQGDVLVLEASGNSFEVASRFHRMGYTCLVLESAQAAKIKDNFCNDDRHSAIKLARVYLSGLSKLVWQPDEETRQMREIFFSHRASVKDCTRLRNRIRTFLNEYCVRLPKGTALTQPSGLSHALKAREWTLLQTQLISERFEQLWQTEARRKRLEKVMVELLLERPEWAKLWRLMGVRHIVAFALMAMIGDVKRFPNAKKLVGYFGLSPRKVQSGNDAKGREKGMGNTGRGDVRALLIQAAQNAMTQRSSPLHKWGWKLTMTKNKNVAVAAVARKLTTAIWHLLQGNFTTILEIGKHLQTKLLKLATVLGKGRLKELGFERRQAFVEHHFNLIQLST

SEQ ID NO: 347094 - protein, 433 aa, unidentified
MLKLNYMSTLFVGIDVSSKTNAVYAMDFEENKYISSSFGNNQPGADQLVNMIAECMQKHKNLDTVLIVLEFTSVYSVHISNFLSTSEVLMPYKPYVFCVNPKATSNYRKSYIGMEKTDPTDAYLIADFGRVGRTKKLEPWRGGQFIALKRLTRHRMHLSECITREKTYMVSNLYLKFSELQLLEGDDKPFGSLYGATSSAVLTEFLSPQEIIDMPEEELLTFLAGKSRNRISDLSKTSELLRKAARDSYRLDKCMYEPLSISLASSFNCIHAYQKEIKLIEQAIEKCINGMNPNALLILQSIPGIGPIWASGILSEIGDITVFHSSDALAKYAGLYWPKGDSGDFTSEDNKMSKAGNPYLRYYLGEAANSVRKHIPEYADFYARKYAEVTKHQHKRALALTSRKLVRLVFGLLVKNQLYTGEKLDTEYNIESN

SEQ ID NO: 347095 - protein, 417 aa, unidentified
MKLIVGLDVSSSELDVCFLTDDDNFPVLKEASFENDQISAIQIKELILHYVEELNIDQIIIGMEATSLYSFHPAMFFHEDPELSVLNTSVFVEQPNKIKKYREVFEESKDDRIDAFYIADYFRVNRNGVSILKEEQYVALQHLTRTRLQLVEGLVRTKQHFTENIYYKCNTLPKELKSDDQNTSIFSATIMELMTADYTLDDLKALSLEEFTALVDQLGRGRFKDSKKVAKSISKAIRGSYRLSKTHEESVDRVLSVLVRQIRSFEKSIKEIDKAIEEIVETLPEYQCLTSVPGIGKVYAGGIIAEIGQIERFENQAQIAKFAGLFWPHKQSGKMKSENTKLAKRGNRYLRYYLVEAANSVRRYEPDYRAYYQKKYDETPKHQHKRAIVLTARKLVRLVDVLLRNHQLYTPPKERIK

SEQ ID NO: 347096 - protein, 330 aa, unidentified
MKNKEFIGIDVSKKTLDVFILSIRFHFTIDNSPSGFARLLEVCFSKINNKTDIFFCFENTGRYSRLLSIFLYENQLSFFMANALDLKKSMGLKRGKSDKKDAGTIAAYAWKNRDSIQPTTLQAPHMEQLKQLLCLREKIIRHRTAYKNSISDLQDCFLEGETDFIRESQVRIIAHLNEEVQRIEAQIDQIINALPEWQINYKLLQSVRGIGPILAKYMIIFTENFTVFTDPRKFACFAGIAPFEYSSGTSVKGRTRVHPLANKQLKSLLNMAAMGAIQLDGEYKQYYKRRTDEGKNKMSTLNIIRNKLVFRAFAVVKRGTPYVNLLKFAA

SEQ ID NO: 347097 - protein, 336 aa, unidentified
MDNSTAVVGIDVSKKKLDVALLVNGKMKAKVVDNSAAGHQSLLEWLDKTKLPKAVLQVCMEATGVYYEAVATTLHDAGLRVSVVNPGCIKGFGQSENVRNKTDKADAALIARYCAAMAPPAWMPAPLEQRQLRAWSQRIQALKDIRQQERNRLESYEASGMAEVAEHARSLITWLDAEIKQLEEDVDDHIDRHPGLKHDAELITSIPGIGNTTAARILGQLGDIRRFNSAKALAAFLGLTPRQRSSGTSIKGRTMMSRSGSTSLRAAFFMPGMVASRHNPLLHQFALRLAANGMAKKAVIGAVMHKLVHLIYGVIRTGKPFDANYLSKGLAIQDGI

SEQ ID NO: 347098 - protein, 350 aa, unidentified
MPYETEVGMDIHKMYSMFGVVKCDGNVVSYDKVSNDTRLFDRFFSRFAEGTFRVTLEATRGISWVIDYFDRKNIPYIVSNPFLNRAIANVHCKNDKYDARTLADLARSNYIARCYVPTKPIRELRDLIAHRAKLVVITTKLKNKVHDVLAKYNYVQPISDIFGVSGIQWVRSQKLSDMHKQILEETLALIGAFLPRTMALEKTIKEKVHEHRYFRLLQTVPGIGPINAATIIARVEDITRFPNVTKFIRYAGLSVNTRESAEKMYLGKLNKKSDKFLRTAFVDAEIAAVQKDPGLSMFYQYLLARKGKGIARVAVARKLARSVYFMLRKSQPYHYRQLQNIWSNTTADKG

SEQ ID NO: 347099 - protein, 354 aa, unidentified
MSNKSNATIATMGIDIGKNSFHVVGLDQRGAIVLRQKWSRGQVEARLANMPPCLIGMEACVGAHHLSRKLQSLGHEARLMPARYVRAYLKGQKNDFRDGEGIAEAVQRPTMKFVATKTAEQLDLQALHRVRARLVSQRTGIVNQIRAFLLDRGVAVRKGPRFLRTELARILATRCDVLSPRMVHVIEELAGDWHRLDERIKSVSSEIEALADQDPACERLMTVPGIGPIISSATVAAIGNGAAFSKGRDFGAWLGLVPRQISTGDRTILGKISKQGNRYLRVLFVQAARVVLLKPNSWERYGLKSWIEAAKKRLHHNVLAIALANKLARIAWAVLNKERKFECVRTSAMAPRSA

SEQ ID NO: 347100 - protein, 346 aa, unidentified
MNQIIRIGMDTSKHFFQLHGVDAAERPVLRRKLRRNEVLAFFAKLPPTIIGMEACGAGHYWARELRKLGHEVKLIAPQHVKAYVKRNKNDGRDAEGLCEAMSRPTMQFVPVKSEEQQAALMLAGVRQQLMTRRTQLGNAIRGYAAEFGLISAKGLDKVEPLLADIAQDESLPELAREMFAVHGREYARLQLELKRVDARLMVWHRGNDDSRRLAKIPGIGLIGATALVMKAPDPRLFPSGRHFAAWIGLTPKDHSTAGKTRIGKITRAGDEMLRSVLVAGATAVIQQAKKGRGHPSPWLLALLVRKSPKLAAVALANKTARIAWKLLTTGESYDGARMPVASALAA

SEQ ID NO: 347101 - protein, 355 aa, unidentified
MDNRKYIGMDVHQASISVAVRDAAGKLLMECIIETKAATILEFIQGLHGSLWVAFEEGTSAAWLYDLLKPHVAKVIVCDPRKNALLKAGNKNDRVDARKLSDLLRAGLLTPVYHGESGVRTLRELGRSYLTVTQDLTRVMNRLKGLYRSWAIPCAGQQVYSPRQRSAWLEKLSEAGVRRRAERLYQQLDTLMQLRREARQELLAESQKHPASQLLRQIPRLGPIRVALLIALLQTPHRFRTKRQLWAYCGLALQTRSSGEYRFTGGQLQHSKRAPALRGLNANHNHDLKNLFKSAATQAGACQDPLGDFYQNLLATGMKPAMARLTLARKIAAIVLKIWKKGERFDPAQLKRQAA

SEQ ID NO: 347102 - protein, 323 aa, unidentified
MTSAILGIDVSKATLHLALFRGERRPQKKTIANDLLGFAQLTQWLSDQGVKEVHACLEATNTYGQGIATYLHQQGHQVSVVNPTRVQGFVQGELSRTKNDSTDAAGIGRFCAAMKPKLWHPLAPEAAELQQLTRRLEMLQRMVTQEKNRLGTATVILHEEIEAHIDFMQEQIEKIEAKIQLHIDAHESLKQSLELLVSIKGISTRSGSQILAEISNWKEFRSARQLAAYAGLTPQEKQSGSSVHGKTRLCKIGNAHLRRALYFPALTAIRWSEPIQAWAKQLRAKGKTKMQVVGAVMHKLVRIIYGVLKSGKPFDPDLLMSST

SEQ ID NO: 347103 - protein, 331 aa, unidentified
MQYAEVKLGIDISKASFDGYVINKGQGKHKVFSNDPNGFEALKVWLNKLGVAQVHACMEATGRYGEALAEYLICHGYQVSMVNAYLIKQYREGHLHLNKTDRGDAQLIAEYCLREEANMRLWAPLDEKQKHLRALVRRLDELKEERTREANRLESIIDDVFVDQNIKAHLDYLNVQIKLVRVEMDAFIEQDPDLRAKQKLLKSIPGVGEQSAQRFMAEIGDTSQYEESGQIVAHFGLNPRIFQSGTSVRKQSRISKQGQSQMRASLYMPAVVAIRCNPVIIDLSQRMTKTGHVKMEIIVAAMRKLLTLMYGVLKSGFPFDPDYGKKFNFAT

SEQ ID NO: 347104 - protein, 342 aa, unidentified
MTAIGIDTHKATLAACTVDELGRAIGEATFANDPAGHVAFIAWARSIASEATIGIEGSSSFGAPLAWAVHHAGLSVREVPPHLSRTERQRTRRPGKSDPGDALAIARVTARETNLPPIRLPDRTSELKLLLEAREDLVAETTRVRNRLHAHLLALVPGYGGTVANLVAARHRITVGRLLRGNTAVQAELARALLARLARLERETGALTRRIGALVDGHPLLGLPGAGPITVARLIAEVGDVRRFRTADAFAALAGVAPIPASSGQIQRMRLNRGANRQLNRALYVIAVSQSRFHPPAKAYVTRRIEVDGKTWREAIRALKRLLVRPVFRLLVQGSIVPAEAA

SEQ ID NO: 347105 - protein, 370 aa, unidentified
MKKVATLFVGLDVHKDSISVAHVIGDRRADVTYVGRIGTRGADIDRLVSRLGDKAERLIVAYEAGPCGYVLHRHLTRRGVRCLVVAPSLIPRKPGDRVKTDRRDAVMLARLLRSGDLESVYVPAVEDEALRDLCRAREAAVVTLKAAKYRLQSFLLRLGLQYTGRATWNDAHLRYLARVVCPTPAQQIVFQEALSAVDEQVERLKRIEAQLAELVPAWRLAPVVRALQALRGVQQTVAVTVVAELGDITRFDNPRQLAAFLGLVPSEDSTGDSRRLGPITKAGNGHARRVLIEGAWAYQYPAKVSEHIRKRLEGLPKPVQAIAWKAQVRLCKRFRRLVAKGKHPNVVVTAIARELAAFMWAIAREVPITV

SEQ ID NO: 347106 - protein, 404 aa, unidentified
MTVNVGIDLHKTQFTVCVRGRDGDRFEKYPTTAEGYEAFLKEAALWQGSGEEVRVGVESTGNTRYFKSRMEEAGIGVTVINTLKMKVVNESVKKTDKHDAATIAEFLEKDMLPESQLCSRESEQLRRLLKARTTLVGAEVVMKNQIHALLTAEGMEDVKGSLQSKKGRQQVLDALNQCKNGLVTQPLFETIDRLEENIKGIEKRLRALTEGDRTVKLLMTIPGCGEICAWTIRAYTDDIKRYASPKKFASFAGLAPWVQNSNETVHHGGITKRGPKELRTAIVQAVMGLRRMKEKTFSWRFMQRYEAMKKGKGSGRAIIATARKIATVIWNMLTEDVEFDLNKMTDRKLAKTSESMNGTAGTEKPALNEGQEKTEINEGVKKSKGVKKNVKVSGVASKKRKKVG

SEQ ID NO: 347107 - protein, 407 aa, unidentified
MRYYIGVDWADEEDVVWVANDAGDKVLSRSIPHTVAARGEWGRWLRERQAEGIEIWAAIERPHGRIVDFLLDHAVVVYPINPKSLDRARDRFRVGGAKSDPFDAQVLALFLRSDHAQLRPLYPSSEAAQELKGLTRDHRRQVKLQTRLLNQLTVTLKEYYPRALELCEDLTASWARDFLATYPTPAAAAALTKANWQAFARAHRLGATRAAALWEILQQPQLPLPAHVVRIKARLLQALLRELTPTLATVAEYRQAIDDFFAGMPGADIARSLPVGKSGTTVPSVWAELGDNLDRWTSFRDLQGYGGSVPETVRSGKHLVIHFRFACNTTLRAAIHQLAFLSLPHSTWARAYYDSYRERGHTHHEALRALGAKWLKIIFVLWKRQVPYSETHHLANIGRQHLRHKAA

SEQ ID NO: 347108 - protein, 374 aa, unidentified
MNTIYIGVDFHARQQTICYLTTETGELVTAELKHQDKAAVRAFYQQFEEPVIVGLEASGYSPWFEGLLEELGHHVWLGDATEIRRRARWRQKNDRRDAELILELMLHDEFPRLHRPTVQSREVMRMLRYRQKLIKIRTMSKNSLQSLALQSGLARRGRLFTREGKAELNAAVMSPAMQWQREHWLQLLEPLNQQVLESMVWLKAQSKGDVEVARLRTHPGIGLLTSLCLAHTLQPVDRFRNPRKVAAYAGFDPVERSSAEHKRFLGISKAGSRLLRHLMVEAAHIAIRKDEDLKRFYQRLADRRGRPKAKVAAARKLLIRAYIMLRDEIDYAEFRHRAVAARLARLGHGPKVPEVVIGQPASAERQESTHNRKK

SEQ ID NO: 347109 - protein, 344 aa, unidentified
MKNSNVIGIDLAKNVIQVCKIDKHGELTSNKAISPSKLKALLANSNPSIVAMEGCGACHYWARLAQTYGHDVRIISPRRVKAFLQGHKTDANDALAIAIASTQFGMVFSQVKKEEQQSLQTLETSRKFLDKELTALNNHIRAYLYEYGITIHRGRKSLRETIVIVLDDLDTRLPMCLKNTLKVLWERYQLTVVQLKETEKCRAALVKQLEPCNRLMELEGIGNVCAAMLYASIGDGREFKNGRQASVYIGLTPKQHSSGGKTYMVGIDKRGGNKALRAALYQGALSVISRLPSEPRTVKEAWLLKLIERAGVKRACIALANKTVRTAWALLATGKSYEPVLLGR

SEQ ID NO: 347110 - protein, 325 aa, unidentified
MHLGLDVSKNTLDAALLEEGKPKPAHKVFANTAAGHEQLLAWLSSKSAEPVQAALEATGTWAEKVALALHEAGHTVSLVNPSRIHAFARTQMARTKTDKADSLLIARFVQMHQPEPWQPPAPEVHELQALVRRLEALDEMRLMEENRLGAGGLTASVQASLQEHIAYLQGQIDKVKRQIKNHIDQNPGLKGQRDLLLTIPGVGETTAALLLAELGEVDRFDNARAVAAFAGLVPRIRQSGTSVRSRPRLSKVGSPRLRKALYFPAITALRFNPLVRALGLRLQEKGKPKMLIIGAAMRKLLHLAYGVLKSNRPFDPNFCASALDG

SEQ ID NO: 347111 - protein, 344 aa, unidentified
MKFTRCGLDIAKQVFQVHGVNEHGVVKGRKRLPRAKVLEFFAQLPPCLIGIEACGSAHYWARELTKLGHTVKLMAAQYVAAYRKRGKNDANDAEAICEAVGRPNMRFVAIKSEEQQAVLMVHRARALTVANRTAQVNQIRGLLGEFGLVVPRGLWRLRRELPDILEDAENGVPALAREVLAGLLEQLREADMRIGAYDRQIRALAEASEPARRLMRVESIGAQTATALVATVGDPHVFKNGRGFAAWLGITPRQHSSGGKEQLGQITRQGDGYLRTLLVHGARSYLRVVDKKTDAKSDWARRLKERRHVNVAAVALAAKHARIAWAILAHGTEYRPAGPQSAVA

SEQ ID NO: 347112 - protein, 370 aa, unidentified
MTEVSTIGFDLAKRVFQVHGVDGDGAVTIRRQLRRSEVVTFFAKLSPCVVGMEACASAHYWARTLAKLGHEVRLIPPSRVKPYVKRGRKNDAADAAAIAEAVTRPHMEFVPVKSEEAQAVLMLHRTRRLLVTQRTMLGNALRSHFAEYGIIEPEGQGGLARLVVCALDAPDAALPQAAREAMAMLAAHVREIDSKIDALDHEILRWHRNDADSQRVASIPGIGPLIASAIVAAMGDPKRFKTGRDFAAWLGLVPSQNSTGGKTVLGPITKAGDRYLRSLLVVGATGTLWRRRKEQGTWLAGMMARGAAQTGRTHDCTRPERQREKISLQRRGCPHMTHDDLALCWSLCPSAVLRPFGRSPNARLSVAPHI

SEQ ID NO: 347113 - protein, 337 aa, unidentified
MKHSVISIDLAKTVFQICALNADNTIVSNKKHSRKQLLHAMRQFEPTEVIMEACYSSHHWGREIQALGHTVKLIPAYQVKPFVVGNKNDHNDAIAIAEASRRPKASFVAVKTLEQQDIQSLQRIRERLVKQRTATANQLRGLMAEYGVIVPVGLNKLRSSVPDILEDAQQPLTMTARGFVHRLYRELTAHDQHVKALEAELKSLLANNEDYQRLQTIPGIGPISAATLMPSIGDAKFFKNGRQMAAWMGLTPKQRGSGEKSRITGISKRGDRTLRKLLIHGARTVLNWCEKKNDELNLWLKTLKKRMHPCKVVVALANKLARIVWAVLAKKRPYAIA

SEQ ID NO: 347114 - protein, 338 aa, unidentified
MIVIGLDVHKQSVTAVAVDEAGRPLDERVIQVGSDDLLGWAASLAGERLWAVEDCRQLTRWLERQLLDVGEDLVRVPPKLTVPERRAGRARGKSDPIDALAIARAALREPELSRPRPDERVYWELKLLVAHRDDLVDQRRRTQQRLRWHLHQLDPTFEVPLRMLGRSSHLERVNRWLARRKPELQVRLACELVSTIRQLNRAIAELDQELEQRTTETAPALLELPGCAALTAAKLLVEIGPIDRFNSDAQLARHSGVAPLEASSGRVQRHRLDRGGNRQLNAALYRIAITQARYHPGARAYLERKRAEGKSRREAIRCLKRQLIRVVFQTLKASPALT

SEQ ID NO: 347115 - protein, 325 aa, unidentified
MIKTMQTNNTVVYAGVDVAKATLQLHLQGQQSEFSNTPKGLHQLCVQLQKVPSVHVVCEATGGYERALVKALHQKQLPISVTNPARVRAAAQAQGQRAKTDQIDARGLTDYGQRYQPEPTPPTSATQDQLVALTQWLKQLIHGRALAKTQTEHHHDPFVRRQHAKLMTHLQSQIQAVEKQIKALIEQDAALQERVKCLDEIQGVGLRTAWMVLAHMPELGRLNRQEVAALAGLAPWTRESGTMKGMRCIGGGRPEVRLALYMAALSAARCNPVLRTLYKHLRAKGKLPKVALTAVMRRLLTYMNHCIKGLPSETPTAKAKELKTA

SEQ ID NO: 347116 - protein, 429 aa, unidentified
MAAGQAVMCPGRMLLVLESSHAAVVAAVDPVFVGVDWGNSHHQLCIVDAAGGIVDQGRFAHDVAGLHLLEGRLRRHADIVGVSIERSEGLLVDALQQQGYRLLCVSPKMSARARERYRLAPVKSDAFDAFVLADSLRHEHRHWRSLAVPSPLLAELRALTRDRERLIWNQRDVENQLRAVVQAYHPTVLHLFSSLDRDISLAFLRDYPTPAHAGRVGPARMAAFCARHGYSGRTKPEVLVERLRDNLLSASSGTTAGKALSAVLFVDQLDLLNSQVRTMSKRIRERLTAHPDAQIFLSFPGMGKITAATMLAVMGEDRMRFPTADVLLAEAGAAPVTQASGRTRRVRFRYAANKRMRHAIDWWTFVSVRENDWAREAYRQARARGQQHNRALRGIGARWTRILWRCWTDHSRYNPELHLNKQPTRPVSG

SEQ ID NO: 347117 - protein, 360 aa, unidentified
MMKYMIKTQTLCLTAFKTIVSVNFETPIAIGIDVAKNSLMICYRYADNHILTKNIGNNDSDIKKLIKELKLLNFSGKIVSESTGRFHMLSAVMLSEKNFLMYVINPLMSKKYNSASIRKVKSDKRDAEILAEIAIKEEKLPDVFTADRKKLMIKKKISLVATMDKQIQAMQATVKEYQETAKTLKIKLTKAEKGILGVVKNLKEEKEKLEKEIENIFNEQSSVDAINIRRQEIFSSIPGVSNYAATLATVFFLEDHCQNPKQWIAYSGLDISVKQSGQWIGKGKLTKRGNGYLRKRLFSAAWGTIMHDAKFKEYYNYLREKKHSYVESLLMIARKIIRIMFYLSKNNCMYNPNKIVFTTN

SEQ ID NO: 347118 - protein, 570 aa, unidentified
MAKFLNVSPIPFNRIEETIVDDHVRNCSVGIDCHRDSYHVYFLYLNNDTGKILERYCKFGTLPNDILLVVAFLKDCCRDWDCEIELIILESTGPYSRSLFEALARIWGTCMINPAEFSKYGKKTDKMDARKMALLALQGLFSASFLSSELEEQIKMASRSAMRCRRGVTRESNSLSSFLIQMGVGITRSEARISLLSVSGREILEAIIAGETDPQRAAAAAKYYDPERIRDRNERAVKRLKKHAALVDALQKVRDLRGESREVLRYKLENLRRYERSYEGCLNILWTMLSTYEAEGLNGAQAVDLLATIPSIGTKAAMFILAETGLRIRERYGRQGRFSCDQYISYSGLNPARQYSGDKQTSVRKAVPGNTHLRSMLIECGQSLMKSSHPLGDRCRAIERRNGGARSSVARNIAVCAAAKHLAKAVFWVLLKRERFDDSQFDYSANLRSKEKKLQKLMQEFGNVTGELEQENSSLARMVMQKAAASLTGTPFIVKNTGSFFSNLDGMFRGGTLGALQSVGCRTVSDVWALLSVGELDRQKGIGPKRYAEIVGTLEEMGIISRVGKDNEQR

SEQ ID NO: 347119 - protein, 398 aa, unidentified
MTESSDYESVQVFIGVDVGKDTHHAVAINRSGKRLFDKALPNDENKLRSLISDLKQHGQILLVVDQPATIGALPVAVARSEGVLVGYLPGLAMRRIADLHAGEAKTDARDAAIIAEAARTLPHALRTLKLADEQIAELSMLCGFDDDLAAQTTQASNRIRGLLTQIHPALERVLGPRLDHPAVLDLLQRYPSPEKLASLGEKKLAAQLCKLAPRLGKRLAADIAQALAEQTVVVPGTNAAAVVLPRLALQLITLRKQRDEVALEVEQRVLAHPLYPVLTSMPGVGVRTAARLLTEVACRAFASVAHLAAYAGLAPVTRRSGSSIRGEHPSRRGNKALKRALFLSAFAALRDPISRAYYTRKMSQGKRHNQALIALARRRCDVLFAMMRDGSFYTPQAS

SEQ ID NO: 347120 - protein, 394 aa, unidentified
MKLIGIDIGKNKHFFCVMDQQTGEIISQPVSFSNDKEGFDFLVQKIKSYPKDSILIGMEDTGHYHFALLKYLLDLQYTVALINPKTTDFNRKMQGGITKNDKLDTINICDVLDTPERKKQYRISKVNSFDLYEQKQLTRHHHNLKEEENVYKNRLQKCIDIVFPEFNKLFNSKYGIVYMNILKMFGSAENIANTDIRTIRKCFEIEGRGNRISLTPERLKECARSSIGISSSAEVIQIKHLTAQIELIEEQLTEIDKKIEEFSIQNNSPILSIPGISHFSGTSILAELGDISNYSKPSQIIKFAGVAPLHYESSQFNAQHTSITKKGSKYLRKTLYQIILPVIRHNQVFYKYYQLKISQGKGHRCAQGHCVRKLLRIIYHLLKTNQQFDPQLLR

SEQ ID NO: 347121 - protein, 400 aa, unidentified
MTTVRAGVIAGVDTHADTHHAALISDTGQHLADRSFPATPAGYQALAVFITSHGPLVRVGVEGTSSYGAGLTRVLLATDMPVVEVIRPARTNRRRGKSDPIDAYAAAAAALANDKLPTPKTSADQVDAIRAVLTVRRSAVKAATATMNQIHNLLITAPNQLREQYRTLSGAKLVAALAAQTADDHHHIRTALQRLAHRHQHLTAEVTAADTDLDHLTALANPALRSGYGIGPISAAQLLVTAGDNPDRITTDAKLAALCGISPIPASSGKTNRHRLNRGGDRQANSAFHRIALIRLQHDPRTKAWAEPRQTPHNSNNKHILRCLKRALCREIHHYLLNPHDIPDITDLRPLRHTLGLTLAHAAQQLNTTTATISRLERGQHRNDHLATTYRTWLHTHPTP

SEQ ID NO: 347122 - protein, 454 aa, unidentified
MYTIGLDISKGYADVVFAENKKVIGKPFLVDDTNNGYSTLEKRISELPKEEVIKVGFESTGGYENNFLNFFLKIRDKYNLKVFRLNPLSVKRYSQVDVHNPKTDKTNAKDIAFYLYDKEKLIEIEEINDEMEGLKKLIKRVEKDNKILVGLKNELLMLIQQIFPEIIKYCRYGIPKWVLEIFKKYPTTEKLKKAKVDDLKEIKYIKKNNIEKIIELAKESAGCLKNDNIGVYAKLLCERILEMRKSIDILKEIIEEEYKKIENNKISTIFGIGTYSACIITAYSGNIKRFKDVKQYIAYFGLDPRIEDSGDKIQKRKITKKGSPVIRKILYTSVMSCLINSEHPVTKTYRRLKNRGLHHYSVMVACMRKMLSIIYGILKNNKDFDINYENTEKSEEQSNNDIKKVRTKSCESFDIDAPISKKEKNRRIKAALSQNVEARSLNINNGINATEYNI

SEQ ID NO: 347123 - protein, 355 aa, unidentified
MDNKKYIGMDVHKESISIAVMNGAGKIGMECVIETKASMILQFIDGLRGEVQVTFEEGTSAAWLYDLLKPHVTKLVVCDPRKNASMREGHQSDKIDARRLAELLRLNHLSPVYHGEHGLRTLKELVRSYLTITKDLIRVMTRVKAIYRSWAIPCTGKQVYAPRHRAEWLAKIGEPGVRRRAEFYYQQLDALRTVRQQVRRELLAEAKKHPAWKWLCQIPSIGPIRAAVLLGILQTPHRFRTNRQLWAYSGFGIETHSSADHRSVDGQLQRVKKQSSIRGLNRNCNHDLKNLFKGAAIVASSKPGPFQEFYTALLTKGIRPEMARLTLARKIATIVLIVWKRGACFDAQHLKPQTA

SEQ ID NO: 347124 - protein, 321 aa, unidentified
MTYVGIDVSKVTFVVAYSSVKTNKTRTFKNTVNGVHEFVQTISASEHNCVLEATGNYSALLVYLLSEAGITISLENPLKIKNFARVMLTVTKTDEIDARLIALYGEKMQPAPYKLRSDAILVLKQKRTVLRQLKKQLVATRNLKGSMEVLPFFDPKCKKTIEKTITFLEKQIKEMEEELASLAQGEYKKQMDLLTSIKGIGVTLAAALIVATGRFSYFDNAKQLTRYLGLSPTYQQSGTSVNVKGHINQNGDSNLRSQLYVAAFSSLRCNAECKACFDRLRSNGKPGKVVVIAVANKLVRQAFAVVTQGKPYVDGFKSEKP

SEQ ID NO: 347125 - protein, 438 aa, unidentified
MSNKVFFNLDDLFISVGIDVGADFSWMSIALPNQQFVGKPYKILHNSIDSLTTAVSKIKEAEELYSLESRIFLESTGIYHYPLFCYLRDKGFNCSVINPIITKNSTNINIRKVHNDRFDSKKAALVGLKPDLKVSLMPSDLALNCRNLCREYYDLMDNRSAYVNKLQGELRMVFPQYLGIFSKVTINTSLTLLETYTSPSAFLKADKQEIIDIIKSTARFGLTYAQNKYNAIIQAATDANQFGYIIDSNIKRIRLYISFIRKYDEEINNILKSLHELVDANEDADFVKQIHLIETFKGAGFLSAVSIMGEIGDFSAFSKPKQLFAYFGLDPAVKQSGKFEGTKVQMSKRGSAIARRVIHTLTLQSISISRNGEAKNPVLREYYLKKCDSKPKLVAMGAVSHKVCNMIFAILRDNKPFKIIAPQEHIKQYNAAKCDIAA

SEQ ID NO: 347126 - protein, 402 aa, unidentified
MQATLSPVLVGIDLAKDSFTVAVGHQGHEVLHAFPLDQAGLTSFSQFLGRFGSFPQDFFFGLEASGPYTNLLLNWLRARQARTSLLNPLQLYRFRRAQSLRCTKTDAIDARLTLRYMTQNYQDLQPCPADDDLQVLANAYQEVTRQVARLKTQIRQQVHTLFPELAGTSTLFSRRVLAVLLHFPSAHALAHAKPTNLAHIWASACPASGRPLALTCEKLQELARASIAPRAPQRESVLRSAIRQLLMLLEEQKTLRRALLAAVRSAYPDTWRVLNSIPGLGPVTIALFLARVRSLDRFPGHRQLAAYAGIDPTTYESGQYKAKGHLSKRGDPSLRSVLYLMAQGVIRRTTTFRLYFDQLTARGKAYRVAIIACAHKLLRVIFALARSLTEFRDLPAEEVSHS

SEQ ID NO: 347127 - protein, 421 aa, unidentified
MPVSTLCVGVDVHLNELVLRAVDKTDGHEVLKRFRVTNNLPGSQAVITTLTDTAQRLGYAHLEMGWEATGLLWLPFHQQLVHSPALQSLAPTLICFNPKLVANFKDGLVLRHPKNDERDAWDVAARVRIGELPVSYVPNDFWQGVRRLTRYRYHLARDLQREQLRFQANAFLKCSDWQRVKPFADLFGATSLALLSEFTAADLKAMSPVELVDLITRRGHNSFADPAATARAVREALSSSYPIDPQLDALLTTTLAVSAEHLRMLRRLIQRLDQQIAHAIALVPNPLLTVKGLGPVITAGLLAEIVDITRFPDHPQLAQYSGLTWERRATGRFVSQDTRLTKVGNVYLRYYTILGADRLRQLDLDFQAYYWRKYQEVPKHQHKRALVLTARKLIRLIHALLTKNVPYTVRPQTPIQPEEVH

SEQ ID NO: 347128 - protein, 352 aa, unidentified
MTYYLGVDLHKKTQTWVLLNEEDDMPVFSREYSVSPSEVARACKDVSKFGNIVAAIEPVCGWQWQVVQMRGTGITVQVSNPRKTAAIAKSLQKTDKNDALTLALLVRTGLLYTSIEVSPETKKLRALVRERSFLVQLRASIQCRLEGVVTREGRHLLEGATSSKKGASVILASANHEWKRSIHIKSDITKYIDEIEIELKQEIRTPLLRLLTTIPGVGVITALTWIAEIGDFSLFKTPEKLCAFAGLVPTERSTGGVQKLGHITKAGSTHLRYMAVEAAMHIRNEPKTEKLYEFYEKIKTKKGAMCARVALARKMLSIAWYMVKKNEPYTPQPLHVLSSVHLPLRGDLVHTL

SEQ ID NO: 347129 - protein, 417 aa, unidentified
MEYARSTLRAIPVNGLACGIDWAREDHAVAIVDGGGRQVHRSIVEHSSAGLRALVTVLARAGVTEVAIERPDGPVVDALLGAGITVVVISPNQLKNLRGRYGSAGNKDDRFDAFVLADTLRTDRARLRPLVPDSESTVALRALCRARKDLVAHRVRVANQLREHLNRVFPGAVGLFTKLDSPVSLRFLNRFDCQDRADWLTPRRLQAWLASAGYCGRTDPAVVFGRLSAAPPGLPAAAGAAQIPITRALVATLDNLVKQIATLSQQIGQQLNAHTDAHIFTNLPHVGTVRAARLLAEIGDCRGRFPTPEALACLAGVAPSTRQSGKMRSVAFRWACDKQLRDAVCDFADGSRRSNLWAADLYGRARARGHDHPHAVRILARAWIYIIWTCWQNDTAYNPAQHRALQTVLHQDQPPAA

SEQ ID NO: 347130 - protein, 312 aa, unidentified
MEFTSDIERGCGIDVHKETVVATIAGKGLRKQTREFSTYTSSLTNMRKWLTDNRVTHAAIESTGIYWKPVFNIIGEDVKLILVNARHIKHVPGRKTDIKDSEWICQLLLSGLLKASFIPPTDIRELRDITRYQLKLNQQITAEKNRIIKELEDANIKLSSVLSDVSGSTGSKIVNALIEGENDPEKLMQFYHKNIKVDREEFKEALTGRLTEHHRFMLRQMKQRIFSLEKQIEEIVNEIDKRVASYEKDIELLRGIPGVARKGAIGIISEIGTDMSVFATEHHLASWSGLSPGNNESAGKKKVQEQPLETNI

SEQ ID NO: 347131 - protein, 343 aa, unidentified
MQIKSIGIDLGKTTFHLIALGTRAQVVIRKKFSRSQLLEYTANLPSSLIGMEAGVGSHFLGRALREQGHQVRLIPAQFVRPFVKSNKNDYRDAEAIAEVVERENMRFVPIKTEDQLDLQALHRVRDRLVARRTSVINQIRAFLLERGISFRKGPASLRRQMPEILENADAKLSTAMRRLLDFLWQEWKGLQLQIESLNVELEQVASSNPSCVRLRQIPGVGPLISTAVVSAIGNGAAFKRGREFAAWLGLVPRQWSTGGKAKLLGISKRGNPYLRKMFIHGARAAVLRVKREGSSLGKWMSGLETRTARNVVIVATANKLARITWAVLVLVRAMPPNNRESSS

SEQ ID NO: 347132 - protein, 392 aa, unidentified
MFYVGIDIAKRAHEVCFLSSDGEVLDGNSFKIPNTISGVDKLQRMLDKYGLTPQNSIVAMEATGHYWLVLYSWLLERGFEIKVINPIVTDAFRNMRIRKAKNDRIDAEIVARVLMFGEYQETSVSSDETLSLRQLCRYRLWQVQTVSDLKRKIIALLDQVFPEYENLFTDIFGMSSKELLKLYTTPEEIASVNTLKLTNLLSSHSKGHFGKEKALEVKAVAKGSLGIKIATDAFAFQIRQMLEQLEFVDEQIEGIDVEINAYMDKLNSPITTIPGIGSAYGAVILSELGDIHRFPGGKQIVSYSGIDASVSESGDFTGDQCHISKRGSSYLRRAIWGAAFIASWSDPELSAYYQRLRKRGKPHQVAVGAVARKLCHIIFAVLSENRTYEARV

SEQ ID NO: 347133 - protein, 400 aa, unidentified
MFVGWDWASTTHDVTVIDDAANIVDRWAPEHTELGLDATMARLTHHGPPEQLPVAIERPSGLVVDRLLAAGHPVIPIHPNAFHAARPRWGAAAAKSDPGDSFKLADYLRTDGHRLRRLRPLDAATRELQALSRLRDDHVAAKTAASNQLGALLDAHWPGAKQVFSRIGSQIALAFLDAYPTPQSAARLGEARLAGFCRRRSDRGGRSPAELLGRLRSAPAAPVGLAPEVLAELVGAQVRLLRTLLATIAELDRALGAGLLGHAKAGLLAPLPRIGEVSLAQVVAEVGPILDRASTVEHATAECGAAPVTKASGKSNAVTFRWAANTKARNALATFAGNSRHSSPWAAKVYADARRRGNHHPHAVRILARAWLRVMWACWHNDTIYDPARHGAERRLAART

SEQ ID NO: 347134 - protein, 341 aa, unidentified
MQITTIGLDIAKNVFQIHGIDAAEKVIVRKQLRRGQVTAFFEALAPCLVGMEACATSHHWARELTKLGHEVRLMPAKDVKAYVKRNKNDAADAEAICEAVRRPTMRFVRIKSAEQQGQLMLHRARDLLMRQRTQLINALRAHLAEVGITAAQGREGIKELLAIIAQDEGSRLPVDAHASLTVLAAQLQAVQTTIGSIEKRIVAQHRSNEASKRLETIPGIGVIGATTITAVVTDPKAFRSGRDFAAWIGIVPRQDSTGGKQKLGPISKQGDQYLRRILIVGAHAVLRRARQQPETYPWLTQLLARRPFKVVAVALANKMARIAWALLAKGGTYRAPQLVAA

SEQ ID NO: 347135 - protein, 328 aa, unidentified
MATYVGMDVHKKNCQAAAMDEEGTILKEEKVENSLEGFEPFFRDIEDAEVVIESCYSWRPTYERLKDLNLDVTMAHPKRTEAVTKARKKTDSVDSKTLAHLLRADMVPESYIPPKEVRKLRDLVRMRTKLVRDRSRLKARVRAELEKNRIRVDSGKDIFTKKRKEWLRELGIYTVDQYLPVIDTLDERIKVVSKRVKEEAGENQDAMLLTSIYGVSYFTALLIVSEIGEIDRFPDPEKLCAYFGLVPKVHQSGETVKYGSITKEGSGLVRWALVQAVFTHIKSDSKLTRYYKKVKKKKGSGKAATATARKMLTIMYFMLKRGEKFRPF

SEQ ID NO: 347136 - protein, 411 aa, unidentified
MIKENYVYVGIDLHKETHTAVMIDCYNNKLGEITFANRPADFPKLVTKVKKCNTDGKAVVYGLENAYGYGRPLAVWLIDKGYMVKDVNTAISHRQAKHRGAMYRKSDSDDAEAIALATLNMLDKLPDACPNDAYWSLGQLVHRRDNIMKQRTRLVNQLHEQLCIAYPSYKQFFNDISRPTALYFWEHYPSRKYLKGKTVEDLREELVPVSHNKCSTKTCEKILDAVSGDKVKNIDYQDARDMVTLSIVSDLQHYDKQLAEVDKMLEKMYKMLNCTLTTIPGVNTITAVKILSEIGDIKRFANANKLAQFAGIAPLHLSSSGKGKDFATKQGNRRLQATIYFLAIQMVQVSSKGTPRNPVVRAYYEKRKAEGKSSQQALICISRRLISIIYGMLKNGTEYRMPVVENAGENM

SEQ ID NO: 347137 - protein, 345 aa, unidentified
MYRTRVGVDLAKEVIQVCTYTSKKVQSNIEMTPNEFLSWLINSKPATIIFEACGTSNYWKQKAIEAGHDARLISAKLVAVVRQNQKTDKNDALAIIQAALLPDVTFIGGKTVAQQQLQTIKRLRELAVKHQGAAQKQLVSLLLELNIRISNRKGGILSAIDGVLEDATNDLSAECRKAIYTAKLHLKGLIEAVHQYDDCLEKSASTHPECKKLLKLEGVGTMNAINLYLALGCFDLGVFNKGKDASACIGLTPIQHSSGGMVKLGSIGKHCKNSILRSQLICGAMAAVNQATIREPKTKKDAWLKGLVERRGKKCAAVALANKTVRTAFAMLTQGTEYKAELLAA

SEQ ID NO: 347138 - protein, 339 aa, unidentified
MKYTPVGVDIAKHVIQIHFINEHTGEVVDKQLRRQDFLTFFGNREPCLIGMEACGGSQHWARELTKLGHKVRLLQARFVKAFVMGNKNDVMDARAIWMAVQQPGKEIAVKTEEQQSVLVLHRTRMQLVKFRTAQINALHGTLLEFGETIHKGRAAMAREFPEALERMKERLPPYLITVLENQYNRLNELDSLIEDIEKQLTSVARQNETCKRLLDIPGVGPLIATAAVATMGEASAFKSGREFAAYVGLVPKQTGSGGKVRLLGISKRGDTYLRTLFIHGARAVALVAKEPGPWITELKKRRPASVAIVAMANKLARTVWAITAHDRKYDRNHVSIRPY

SEQ ID NO: 347139 - protein, 310 aa, unidentified
MSTLPPSVLSIDISKDHLDTSAWPTVWHRRLANDKQGVDRIIREAKRRRAFVIFEATSVFDWPLRTALDEAGISYHRANPRKARDFARSSGFLAKTDRLDADMLAAYGRMVPLRIAEPIAPERQALRALIDRRQQLVFMRKQEATRQKQVSDTVIREEMAQSIAALQERIAAYETKIRLHLKAHPHLLKIVQLLSSAPGVALVTAASLVALLPELGSRCSKAISALVGLAPLARDSGRLRGKRKIWGGRRSVRCLLFLAARHAAKNPAFKDFAERLQAKGKAVKQIRIAVARKLLVVLNLMIANNRPFYP

SEQ ID NO: 347140 - protein, 406 aa, unidentified
MIFVGVDWAEAHHDVHVQDEAGQRLGGGRLPEGVDGIARFHELVGNHVDEPSDVVIGIETDRGLFVSALVGAGYQVFAVNPMSTSRYRDRHSTSGAKSDPGDAKVLADMVRTDRQNHRVVAADTGTVQALKVLARAHQSMTWSRGRQTNLLRSTLREFYPAALVAFDDLASADALEVLRLAPTPELGRTLSRSKIAAALRRGGRQRRVDERSGEVQAALRADQLAAGAEVSTAMGASVAASVAVIATMNAQIAELAKELEAGFELHPDASVVRSLPGLGTILGARVLGEFGDEPDRYASAKSRKNYAGTSPITRASGTKKAVLARHVRNRRLADAIYLWSFASLTASPGARALHDQHRAAGDTHHAALRALGNRLVGTLHGCLYHHTLYDEAIAWGHRQEKLPQAA

SEQ ID NO: 347141 - protein, 374 aa, unidentified
MNTIYIGVDFHARQQTICYLKTETGELVTCELRHEDKEKVRAFYAQFPGQVIIGLEASGYSPWFEAMLEQLGCEVWLGDATEIRRRARWRQKNDRRDAELILDLMVHHEFPRLHRPTVQSREVLRMLRYRQKLTKLRTMSKNSLQAIALQSGLAKGSRLFTKAGETEFSAAEMSPVMHWQREHWMQLLQPLNQQLLETMVWFKAQSKGDVCVTRLRTHPGIGLLTALCLVHTLQPVSRFRNQRKVAAYVGFDPVERSSAERQRFLGISKAGSRVLRYLLVEATHTAVRKDEDLKRFYKRLVERRGRPKAKVAAARKLLIRAYIMLRDEIDYAEFRRRAVAARLARRGQRPAVPEVLIGQPASAGCQEQTHGSEK

SEQ ID NO: 347142 - protein, 344 aa, unidentified
MSEVITIGLDIAKHVFHAYGADERGRAVFSKRLSRGKLLDFFTAQPSCTVALEACGGAHHWARQLTQLGHEVRLIPPAYVKPFVKRQKSDAIDAEAICEAAQRPNMRFVAVKSEQQQAAGLVFRTRDLLVRQRTQLINAIRGHLTEYGWIAPKGPSHVAMLADLIEEEEMASSLPEAAHAMFRLMLDLLASLNGKITDLDKEIARRAREDEVSRRLMTIPGIGPITATAIAALAPPVETFTKGRDFAAWLGLTPLQRSTGGKQKLGATSKMGERTLRRLLIIGSSAVVQQASKRGAPEGSWLEQMLARKPRMLVTVALANKMARIVWAVLIKQENYRAPVAAKA

SEQ ID NO: 347143 - protein, 386 aa, unidentified
MELLYRRCAGLDVHQKLVVACVRIAGEEGKVAEEVRTFETTTTGLLALSNWLEESECSHVAMEATGIYWKPVWHILEPTFELVLANAAHIKNVPGRKTDVKDAQWIADLLAHGLIRGSFVPPTPIQDLRALMRTRKQLVREAARNTQRIQKTLEDANIKLTSVISDILGRSGRAILDALVAGTTDPTELAKLTSGRLKASRAQLVEALRGAVREHHRFLIKLHLEQVDGLNNAVRELEARVGEELEPFQRSVELLKTIPGVSDTAARTIVAEIGLDMTRFATAGHLISWAGLCPRSDESAGKRRSSRIRHGAPWLKTALVQCAWAAIRTKDSYLRAQFHRIKARAGAMKAIIAVASSMLTAVFHMLGSDSAYKELTGSHFDRRDAS

SEQ ID NO: 347144 - protein, 430 aa, unidentified
MKTLQKRIERITPRTIIVGIDVAKEVHYAQITDYRGSPLVKPVKVHNSIDGFESLVSKVEKLRIKHGCDSVIIGTEPSGHYWRALGWYLKTHESRPELVGVNPYHTKQAKELNDNSQTKSDPKDALVIAHLIRNGNYFDTYLPEAEYAELRLLNTERQRIMKELNRSNNTLIAMLDEFFPEYSGIWGNVTCQTSLALLRKYAFPLEILAAPQEKLLEDIKGASSGTEGIKLMGKMRTAASRSVGVTEGLKSARLRINNLIDDMEHYGKKKVVVEAEMETVMNALELGEVLQSIPGIGSIISAAFVGEVGDVSRFDNWKQVRSLAGLNLVENSSGQHKGKTKVSKRGRPYLRHMLYLAGECGCRNNPEMNRYYQYLRNRKSNQLSGNQAFVATGLKIMRIMFHLAKTGEKYDSSKALGTVRLQQIATLNAA

SEQ ID NO: 347145 - protein, 360 aa, unidentified
MVVQRTNVGLDVHARSVVACGLDRQTGEVFEQRLTPSHEEIAAWIRSLPGPAAAVYEAGPTGFGLARSLRAVGIDCEVAAPSKLMRPSGDRVKTDTRDARHLARLLMLGDVTAVAIPSREQEAARDLVRAREDCRGDLMSTRHRLSKLLLRQGIVYRGGKAWTGKHELWLRCQRFDDPALQLAYDTSFEAMLATIARRDRLDRAIEQMAADSEFTAVVSRLCCVRGVATLTAFGLAVEIGDWHRLTGRSIGAYLGLVPTEYSSGASRVQGGVTRTGNGHARRLLIEAAWHHRARYRPGATLRRRWDAASAPARARGQLANQRLHARWQTFDARKKRAVVANTAIARELAGWCWSLAVLDG

SEQ ID NO: 347146 - protein, 415 aa, unidentified
MRIVYARCCGLDVHKKSVSACLLTPDDQGGTQQQVRRFGTMTRDLLELSDWLASNQVTHVAMESTGVYWKPVWNIFEGIFTVLLVNAQHVKAVPGRKTDAKDCQWIADLLQHGLLRGSFVPPSPIRQLRDFTRTRASLRQDHTAVANRMQKILEDANIKLASVASDWLGVSGRIILDQMLDGEEDTVKLAHFCRGRLREKIPEMQLALEGRMTEHHRWMLRLQREQLEFLEAQIAKLDTKILEHMSDYQKAVDLCTTIPGIEAIAAANLIAEIGVNMDQFPSAQHLASWAGLCPGNNESAGKRLSGKARNGSVWLRRNLCQAAWAASHSKNTYLSAQFRRLAARKGKKRAIVAVGHTILVIVFHMLKNQQPYRDLGADYFDRRNAEQLKRSLVRRLERLGVKVTIVSTAPAPQPA

SEQ ID NO: 347147 - protein, 364 aa, unidentified
MTKSDDHRVVIAVDPHKASWTAAAVDGQLQPLATIRVPVSRDGYRALRRFARRWPNASWAIEGAAGLGAPLAERLWAEQITVIDVPAKLAARVRLLSTGHGRKNDDADALSVGVAALTSRTLNSAQIDASTSALRCIVEHRDDLVKIRTQTVNRLHVVLTRLVPAGAGRELTADQAAELLRSVRPRDLAAKTLRTLAVDLVSEVRQLDRRIKKAATDIEAAVATSGTTLTQLHGVGALTAGKILGRVGTISRFRSAATFASYTGTAPIEVSSGDVVRHRLSRAGDRQMNYCLHVMALTQIRQNTPGRAYYLRKRSEGKGHKEAMRCLKRRLSDSVYRQLVRDATSLAADPEGHPGTTLKSCVAS

SEQ ID NO: 347148 - protein, 411 aa, unidentified
MRLFVGDDWAEDHHDVEVMSEAGKVLARRRLPEGVAGIAGLHALIGAHLGEDPDATEVIVGIETDRGPWVTALVTAGYLVYPVNPLQASRYRERHGVSRAKSDAGDAHMLADMVRTDSHQLRLAAGDSPEAEGIKVLARTHKTLIWERTRAVQRLRYQLREYFPAALEAFDDLDAPDTLELLAKAPEPGRAARLTRAQVSAALRHARRRNIPGKATAIMAALRSEQLSQPAALTAAYAATARALIAVIATLNEQVKTLQGQVEENFGRHPDAEIYRSQPGMGAILGARVLGEFGDDPHRYADGKARRNYAATSPITRASGKKKVVAARFIHNDRLIDALNAQAFTALNASPGARAFYDELRARGIEHNDALRRLANRLVGILHGCLKARTLYDEATAWGHRKNLPQSSEAA

SEQ ID NO: 347149 - protein, 346 aa, unidentified
MEHYAGIDVSLEFSSVCVVDAQGKIVREVKVASEPEALVAFFASLGFAVKRVGLEAGPLSQWLHAGLKRAGFDTLLLETRHVKAALSAMMVKTDRKDARGLAQLIRMGWFRPVHAKSMGSQEVRALLVARKQLLGRLIDVELSIRGFLRGFGLKVGVVTRKSFEGRIRELVSGHITLERIAAAMLSARATLKVEYEKLHKSVLTIVREDAVCRRLMTVPSVGPLVAITYKTAMDDPNRIAKSKAAGALFGLTPKKYQSGEKDLTGGITRAGDEMVRTALYEAANVLLARITRFSKLKRWGMDVAKRRGSKRAKVALARKIAVILHRMWVDGTTYRWTNAQPTAVQV

SEQ ID NO: 347150 - protein, 412 aa, unidentified
MRRVIGIDVHRTFGEVVIWEDGVLRHVGRVDMTRTALEGLGKKLRSTDEVVIEATGNSMAVSRVLTPFVARVIIANPLQVKAIAQAHVKTDKIDAGTLASLQAAGYLPQIWTPDAVTERKRRLAARRYQVVRHRTRIKNEVHSILHAHLIPKCPHADLFSARGRAWLARQSLPEDECAAVERHVRELDRLAEDQAVLDREIAQAAIDDPAVRRLITITGVNLTVATGIVAAIGDISRFKSPQKLVSYFGLNPRVRQSGLGVAHHGRISKIGRSHARAMLVEAAWAAAKAPGPLHAFFVRIRARRGHQIAAVAVARKLTVLCWHLLTRGEDYLWARPALVANKTRAMELQAGHPQQKGSRRGPAYAYNVKALRDQEMLVAAQAERSYERFVAQWKPRRPKEPARGRLKSAGHK

SEQ ID NO: 347151 - protein, 375 aa, unidentified
MRSVALDFGGNVSFCEVANGKVIRRTSVKDFWDLEPELGPQTAKAKVAVEACREVWFLVEQLRRWGHEPLVVDTTRSAKLGIGHHKRKNDRIDAEVLAHAVERNLIPTAHVLSPHRQSLRHWQSVRRALVETRAQYIVCVRGFVRAANLQRLPRCEPESFAKLARKTPMSANTRELITALVDTIADLSERIAQVDKRLEAISSEEPATLLLRTTPGVAAVVSTAFVSVIDEPRRFKRAHQVEAYLGLVPSEHTSVHRQLGSITKQGNKYLRALLIQAAWSIMRTRFTDPLRIWAQRIAQRRGKKIAAVALARRLAGILWAMWRDGTVYEPARVGQVGAQGVERRAQQELAVAAAMRRAGLKGQRRIATSRRAQMS

SEQ ID NO: 347152 - protein, 344 aa, unidentified
MIYIGLDVHKRFSRMGCFDPATGEVQDLGSVSNEVSSLQGALEELPCPKTVVLEAGRSSYHMAGLLESMAEEVWIVDPGEVRRLQHTISKTDRRDAAALAWWAAKGVLSPQWRPDAETMDLRELTRGKTALTRMSTQARTMIRMLLARHGHECPHRDLMGERGQLWLEEVELEGHAGQMLASLREILMIVQAKADDFERMVEQTSREHPVARRLRTIPGIGPFLSLALAVEIGDINRFPGPTQLRGYSGLVPAVYQSGDKDARGPLTKAGNKWLRYAAVLAAQRIGQMKAPDPRLKRIFLSVAFRHGRNPAKIAVARRLLDLIYHLLKKGQDYRAPKPRAVTTA

SEQ ID NO: 347153 - protein, 377 aa, unidentified
MIYVGTDIGKEKFDVCSLDNDGDLISTEQYTNDSKGFENFIEYLKTMTGLTGNDTKIGLESTGVYHIPFCQYLSDHGYRVKVLNGIETKGLKDSRVRKGKSDRRDAEAIARYLIIASNVDMPFPIELENLREYAGIYDRVRKKIRTTQNNLMRDIDLVFPGLTTSVNIFYEKILDLLERNCTPEGILKMGVSELKELMPKNKAERIINLAKESSSPRGRKEAITLEVRSLIRTLRFLESEKEAALKALTAEFQKNETPLKSIPGIGDVTGAIIVSRIGDIRRFSTPEKLVAFSRLDPVIYQSGKSRKESRISKRGDHLLKYAIYQSALAATRTDSPIREFYERKSKEGLSGKKLITACARKQCHIIWAVWTENREYS

SEQ ID NO: 347154 - protein, 360 aa, unidentified
MKKHNTERREQKGRGRKTIGLDLGDRTSRYCVVDEQGEVILEGSVATTESALRSWVEEMGPCVVAMEVGTHSPWVSRLLKESGQQVIVANARRVRLIIESSRKNDRLDARTLARLARMDAALLAPIRHRSAQAQQHLIMIRARAALVETRTKLVNTVRGMVKATGKRLRKCSARSMGPAAARQIDDALAQVIKPLLASIESISGQIQQYDRQIVEVAKQYPEVARLDQVWGVGTLIALTYVLTIEDPGRFERSRDVGCYLGLRPRQRQSGARSPELGISKEGDRYLRTLLVQAAHYILGPFGPDTDLRRWGLRLAGHGGKNAKKRAVVAVARKLAILLHRLWVSGERYQPLRDAEIATAA

SEQ ID NO: 347155 - protein, 407 aa, unidentified
MEVLYPRCAGLDVHAKTVVACVRIASGATVTYAHRTVSTNTRALLELTDWLTAQGVTHVAMEATGVYWKPVWHVLEGHATLVLANAMHIRNIPGRKSDTNDATWISDLLALGLIRSSFVPPAPIQDLRDLTRTRKQLVRAIARHTQRIQKTLEDANVKLTEVISDILGASGRAIVTALVAGETDPEKLAGLTSGRLKATRAELVEALHGRVTAHHRFMLQLHLTQIAALDAAVADVEARIREALVPFRAAVNLLTTMPGVSETAAAVIMAEIGDDMTRFPSAGHLLSWAGLCPRLDESAGKRRSTRTRQGAPWLKTTLVQIAWPAARKKHSYFQAQFLRLKTRRGPKKAIVAVAASMLTAVYYMLRDGTEFHDLGDQYFVHHDKARLTNRLLKRLRDLGVEVEVRAA

SEQ ID NO: 347156 - protein, 414 aa, unidentified
MESSYKIAGMDVHKKMLAVVISDVAQVGEFRFERRKFATGAMELPALAQWLAEQEVREAVMESTAQYWKPVGQALEGQCRRQLAQAHSNRAPKGRKRDFADAERLVRRQVAGELILSFVPDPEQRLWRTLTRTKQQWTRDRVRLQNQLEGLLEEARIKLSSQVSDLLGLSGRRMLQALADGENDPVQIAKLAAPGLRASQKQLADAMSAAATLSPLHRQIMKLFLQRLKLIETQIDALESRVAEQLRPFQDAVKRLAEVPGLGADSAQQIMAAVGPRAATFPSPDQRASWVGCCPGREESAEVSTSDSSPKGNKHMRRLLSQAANAAVKAKGSVFEILYRRLAPRRGHFKAIWAVAHRLCRIIWKILHEGVDYEERGYRTNPHAVQKRTNRLVRELRRLGYQVQLTSSKAGAPA

SEQ ID NO: 347157 - protein, 368 aa, unidentified
MNDLIRIGIDTSKSVFVLHGVNAAEQPVLRRKLRRRQMGEFFAKLPPVQIGIEACGAAHYWARELAALGHEVRLLPPQYVKPYVQRGKNDAADASAICEAMSRPRMRFVPVKTAEQQAALMLVGVRDQLVARRTQLSNMIRGYAAEFGVTAAKGLDKIEPLLVRIAREPGVPEKAKALFALLGEEFVALKPKLRKLEAELQSWHRHNELSRRLVEIPAIGPIGSALLTMKVTNPHAFRCGRDFAAWVGLTPKDHSTAGKQRLGVITRAGDETLRRVLVVGATALIQQARKGRGNPSPWLIGLMRRKPPKLVAVALANKTARIAWKLMVSGERYDRARSGFVPPAGSLAPGARRQGRVAPPAAVACGQP

SEQ ID NO: 347158 - protein, 387 aa, unidentified
MPQPNDLGRSLVALDQDSTLIAVIEMGQASWLIAAIVPGLNRHPLKKIAADEEQLLQVLRRWKKEAETAGRMIKRTAVAYEAGRDGFWLARWLGARGIEAYVIHPSSVPVSREHRRAKTDRLDTELLKRAFLGWLRGEPDHCSMAAIPTLTEEDAKRPGRERESLVSKRTRIVNRIKGALARLGIRNFRPMLRNASQRLETVRTPEGVALPPNTLAELRRDMARLSFIKQQIKEVETARLERLQRAPGEGANAMVQLLTRVVGVGVETADMLVHEVFSRNLRDRKAVARYAGLTGAPDESGKRRRERGLAKSGNARVRRGMLQIAWGFLVHQKDSALAAWYRTRTADARGTTRKTMIVALARKLLIALWRLATTGEVPSGLVLRAAA

SEQ ID NO: 347159 - protein, 365 aa, unidentified
MFSERTSVGLDVHARSVAAAAIDGVTGELFQARLTPSHEHIRGWIGALPGPVAATYEAGPTGFGLARALKADGIRCVVAAPSKLQRPSGDRVKTDARDAVHLARLLRLDEITAVVIPSEDQEAARDLVRAREDCRGDLMRARHRLSKLLLRHGIVYDGGQAWTGTHDGWLRRQHFEAPAVQMAFESDYDAVLATDARRDRLDAAITAMATDSEFTPVVRRLSCLRGVSTLTSFALAVEIGDWHRFTGNTIGSFVGLVPSEHSSGARRVQGSITKTGNTHARRLLVEAAWHHRARYRPGATMLARWDLASPAARARGDEGNRRLHARWVRFDEHHKRPVIANVAIARELAGWCWSLATLEDHTTAR

SEQ ID NO: 347160 - protein, 428 aa, unidentified
MNNEKIIRREQFCQIKSEIRGSDQYLVVGIDVAKDKHHAFMGTATGNSLLRKLVFENNLEGFRKLQERSEAIRTQNALSKVVFGMEPTGNYHKPLGAYLIGSGHHLVMVTGKAVKNNRELLDGRWDKNDIKDPANVADLICQGKCLYYDYPSASINQLRQLLSLRRRLKKEEHSLRMRIRNNLLAQYFPELDRFYNACETESLAIVRWFLDPSMIAAMEFDEFFSLVTRTQRGIAQKQRLQKIHRLAAESVGCPMGPAAEFEAELLVVKLKEVRQQLKKIADLMEDYCMEFTEYSILLTIPGFGPYIAARVLASISNPWRFDRSNQLIKMAGYDLGAQRSGKKSNDAVPVISKRGNGELRYALYQAAHVASTRNPYFIRYFTRTLRGRERERGIKTKMKVKLAAKMLKIAWTLMKKNQGFDPDYLITE

SEQ ID NO: 347161 - protein, 309 aa, unidentified
MKQSVVYIGVDVAKANLDVAWAAASRRFPNDRNGHAALVLWIKQSAAPVQLICEASGGYEQGLLESLEQNNLAVTLVQAIRVRQYARAAGILAKTDTIDAKVLAAFGAAMQPKPTPPFSAEQKRLRQYEAQRRHLSKVLLAEQNRLAQVSCAELRSLSRSLISKIKKQIDTLDTGIANLIAQDQVLCVKAQKLTAISGVGARTAALLLAQMPELGQLNRGEAAALAGLAPFNHDSGSIRGKRAIFGGRRALRSGLYMAALSAARYNPILSSFYQRLRAKGKPHKLALTAVMRKLLLALNSSLKPEPILA

SEQ ID NO: 347162 - protein, 422 aa, unidentified
MVEERKWFIGIDWGSQEHVVSLCDDRGKKIGQRKFAHGGVGLSDMIAWLLQASGGEPGEMHVAIETPHGPIVEALLERGFNVYSINPKQLDRFRDRFSVAGAKDDSLDADVLADSLRTDMRLFRKLTIAEPLIVELREWSRIDEELKVQRVRLTNRLRDQLWRYYPQMLELADDLGADWVLDLWEAVPTPEKAARVREAAVARILKTYRIRRFNAAHVISELRKPALSVAQGTTEAATAHIRVAVQQLRLVNRQLANAELQLDGLCKKLAEPVDGDEGEKVPGQQQEYRDVTILDSLPGVGRTVLVTMLAEAQDALQRRDYHALRNLCGSAPVTRRSGKSCIVMRRRACSRRLSNAVFYWGRTAIQRDPTSRAKYEALRARGHGHARALRSVVDRLLYVACAMLENRTLFDSSVMEKKNAAA

SEQ ID NO: 347163 - protein, 353 aa, unidentified
MKLYAGIDLHANSHYLGIIDEQTKVLFRHKVANDLRKTLSVLESFRSDLEGIVVESTFNWYWLVDGLIDHGYRVHLANPAAIQQYEGLKHLDDERDAIWLANLLRLGILPEGYIYPKQERPLRDLLRKRLQLVRHRTSHILSIQNILSRSLGLRMRANEVKGLDEERVRDWIKEENLFLAVQSSLGVMRYLGEKIKGIEEVVKSRVELRKEYEVLLSLPGVGKILGLTIMLEVGDIYRFLEVGNYASYCRCVRSTRISNGRSKGEGNRKNGNKYLAWVYVEAAHYALRFHPEVSRYYQRKATETNRIVAIKAISHKLARASYYIMRDQVFYDPRKLFGYGEGRETQSGVGSKP

SEQ ID NO: 347164 - protein, 323 aa, unidentified
MNKGIKYFGIDISHLVFDVTDSDGHYYQFKNNVSGFKKFVKLLDADSHCVMEATGYYHYQLAYFLLESGIKVSVENPLAVKRFIQMKLSKLKTDKSDSKLICAYAEQVELKLWKGNSKHQTECLQMTRLLSVYTKQKTMLKNKLHGEAVLGNPSKAVVSSLKRSLKHLLKEIETLEDKLLILVKQEHQDLLTRLKTIPGIGRKTAIMLVVLTGGFERFSSASELCSYAGLTPVIRQSGSSVKGRSRISKIGNGKLRNLLFMCSFTACKYNKACRDLYERIVAKGKSKKLALIAVCNKLLKQAFAIAKSGLIFDDTYRSTLVKI

SEQ ID NO: 347165 - protein, 348 aa, unidentified
MESVAGLDVGVKYSTLCVVSRDDRSMKLVSRHRTVTTPLAIGEWLTAQGIGRVGLEAGGQSAWLARELEQRGVAVTVMETRRQHAFGSYSKIKTDERDARLIGEALATGLYTKVHVRSAWSQEVRALLGARLQLKRQAQQSRQFIRGQLRAVGVELGRAIGKKWLLAAETAMAERGGVLGLALKALLASCRVLAEQITVLDKEIRRLARQDAPCRRMMTAPGAGLLSSLALRASLDDADRFARSAEVGPYLGLTPARWQSGAIDRRGGITKQGDGLVRAYLYEAAVSLLERQKRDCALRRWGLQHQARLGKRRTRVAVARKLAVLMHKLWRSGQTFDWDRGMEVPSTY

SEQ ID NO: 347166 - protein, 342 aa, unidentified
MDEVSTIGLDIAKSVFQVHGVDAAGAVLIRKRVSRAKVLEYFGELPPCLVGIEACPSAHHWGRELQGLGHTVRLIPPSYVKAYLKRGKNDANDAAAICEAVTRPSMRFVPIKTKEQQTVLMLHRTRQLLVRQRTMLSNALRGHLAELGIVSAKGRNGTAELLRIIADGRVSPAVCGILEVLARQYGAIGTEIASIDKNIMVLHRACEASRRLAEIPGIGPIGATALIAEIGDWKAFSSGRSLAAWIGLVPKQCTTGGKDRLGSITKQGNRYLRWLLVVGAMAVIRYARKHGTDKRPWLGRLMERRPTKVAAVALANKIARMAWAIMVRGERYKEPKLLLAAA

SEQ ID NO: 347167 - protein, 349 aa, unidentified
MTQQRISYAGERVYVGVDVHKETSTVTCVCHKQIVKTATVPAEPASLAASVLQWFPGAMLASAYEAGFAAFVLHRALTQVGITNIVVNPASMAVAANDKVKTDRRDSKRLAIDLADGRVRGIYVPTEGEELARLLPRTRAQIVDHRATIARQIKAKLHQFGVIAPASRRMISNRYLREIAAWSLPPELRVSLTLLAEQWRFGTRQLIEIRRLLRTQAAAQAELAHVYRSVPGIGAVVARTLATERGDMPRLANERALFSYTGLTPSEDSSGPAVRRGHSSRQGSGRVRHLLIETAWRALPRDKVLQEIFDRIAATRGKKRAIVAIARRLTGRMRACFRQGTTYAVGTYA

SEQ ID NO: 347168 - protein, 348 aa, unidentified
MLTTAFPKITVGLDVGDRQSRTCEIDASAQVVREAVVSTTTAAIAGYFAEREPCRVVLEAGTHSPWISRQIERLGHEVIVGNPARMYPHKRRKNDRRDASFMARQGRADPELLCPIRHRSAHAQEHLELLRARNQVVSVRTKLINHVRSAVKTAGARVGSSSAESFALRARSQIPPELRGALQPILSMILGTNEQIDALDREVSQVAREYPELSRLQQIPGVGELTSLAYVLLVEDPSRFERSRDVGPFFGLVPRLDQSSDSSPQLRISKAGDVMGRRLLISAAHYILGPHGRPCDLRRYGEAIAARGGTNAKKRAVVAVARKLSVLLHKLWVSGATYDPDRQLKRQV

SEQ ID NO: 347169 - protein, 343 aa, unidentified
MHITSIGIDLGKTTFHLVALGERNKVLVRKKFSRAQLLAHTANLPASLVGLEACAGAHFLGAALRGQGHQVRLIPAQFVKPYGKSNKNDFLDAEAIAEAVTKQNMRFAQIKTQEQLDLQAMHRVRDRLVQRRTSLINEIRGFLLERGITFAAKPIHLRNNLPLVIEDLEQNLSPRMRWLLERLWQEWKQMEIDIKTVTEEIERISNEDAHCRRLRQIPGFGPLVSTATVAAIGNGAAFRRGRDFAAWVGVVPRQYSTGGKQKLFGISKRGNVYLRRMLIHGARAVLLRIKYDTGGFGQWVHRLEARAPRNKVIVAIANKLARIAWAVLSSGNEYRHQPLHSAA

SEQ ID NO: 347170 - protein, 373 aa, unidentified
MDQQVIFVGLDVHKATVAVALAPDGRSNEVRFQGSVPHRPGAMADLGKRLQGKHPGARLSFCYEAGSCGYGLARELTEAGHECLVIAPSLIPTRPGDHIKTDKRDATTLAKMHRAGELTTVWVPDASHEAVRDLVRAREAAMYWRNRARQALSSFLLRHGYHYGGRSAWTASYWRWLATLKLEHPAQQITMQEYILAIQEADARHDRLVKQIEGIIPTWSMAPLVIALQAMRGVAMITAATIVAEIGDLARFTTPRKLMAYLGLVPAEHSSGSKIRRRGITKAGNPRARRLLVESAWTYAKPPRIGQEIQRRQEGVELEIVRIAWKAQLRLHDRYRRLAATGKPKNVVITAIARELVGFIWAIGQRVAAPAAG

SEQ ID NO: 347171 - protein, 324 aa, unidentified
MAKRTTICAGIDTGKRKLDVAIDGSSSQLQVKNTAEGHRVLLERLRRHKVKRIGIEASGGYELPVVTELRRKRFVVVVFQPAQVRAYAKFHLQLAKNDKIDAALIAACTAAVKKIHDAPDPRLQPFAEHLTLIDQIGEDIQLYKNRLETCRDPRIQKLWEEEISRLAKRARAELKALVAAIRQHRDLARRLDLIYSVSGAGMPTAVAILVRMPEIGKLSREQVAALAGLAPYDDDSGERSGARHIDGGRKRLRRALYTAALPASFRWNPHLIALYQRLRAAGKVHKSALIACARKLLIFVNTVVARGTPWQKEQPVRATNPAAA

SEQ ID NO: 347172 - protein, 406 aa, unidentified
MLFVGDDWAEDHHDVEVQDEQGRAVKRVRLPEGMAGMSRFHELVASFLPEDAEPSDVLVCIETDRGPWVRALIAAGYRVFGVNPRQAARHREVMGNSGAKSDKGDAHALADMVRTRRHQLAQVAADSEVAEAVKVVTRAHQTLLWERTRHMLRLRNALRDYFPGALEAFTPLGLTSPAVLRLLAKAPSPAAAARLTAGQISAALKGRRDIPGKAAAVQRALRAGQLGQPEPVTAAYASTVRALVAVITTLNTEIKTLEGEVEAHFGRHPDAEIYLSQPGLGVVLGARVLAEFGDAKNRYASAKARKNYAGTSPITRRSGKTKTVHARFVHNDRLVDALHLQAGCAILHDPEVRAYYDELRARDVGHNSALRQIGNRLVGILHGCLKTSTRYNQATAWQHRHDSLAA

SEQ ID NO: 347173 - protein, 391 aa, unidentified
MINIGIDVGKFKHCAAVLDDKTGEVLIKPFFFRNDQEGFELFCSKTKQYFRRKHLIGMEDTGHYMINLTNYLLDKNLTVKYINPRSTSLRRKELGMSAKNDRKDALLIAEMLSEKKFWRSVSKQSLEIDKLREITRLYHQLQEQQNQDMNRLQRALDITFPEVNSLSWTRYSKSYMQFLSLYSSAASIASQDIRNLRKALKTTGRGRQCKVTAEEIKQLAKESIGDNNVAVELEIKSVIAIINTREDQIHSLEKKIEEFSRQLNSPIISIPGISHITGMTILAEIGDIRDFPEAAKLISFAGMEPLVHQSGKYDAAHTPISKHGSKYLRKALYQAIFTVCNYDPTFQDYYTKKRNQGKSHRCAQGHCVRKLIRVIFKLLSSNSSFDSELIH

SEQ ID NO: 347174 - protein, 346 aa, unidentified
MNNSNSTFDPCGIEVSARTLLVALGAQGRAASLREFPNTPPGHQALLGFLARSSPRVRVVLESTGLYGLDLALGLHQAGLALMVANPRAVRHFAHALMQRSKTDRLDAEVLRQFAARMPFVAWRPPSAATLQLVAVARRLEALTDMLTAEKNRLHAASLSAALPAIVRRDIERSIQNQQRALERLSRAAQEFVLSDPELARRFQLLLSIPGFGITSALHVLAELALLPAALDVRQWVASAGLDPRQHSSGSSVEKKTRISKAGNKHLRRALYMPALVAVRHQDHLRAFYQHLQARGKTKLQALVAAMRKLLHAIFGMFKHDQLFDGAKVYALLHIPTPIPQEVACT

SEQ ID NO: 347175 - protein, 412 aa, unidentified
MTEESFTWFVGVDWGSEKHHACILDTRGTVVGERQFPHSGVGLAELGDWLLSIAGTTATVAVAIEVPHGPVVDSLIDRGFVVYAINPKQLDRLRDRFSVAGAKDDRRDAYVLGDGIRTDRRLFRRLHVADPRIVELRAWSRLTEELQEERVRLGNRVQQQLWRYYPQMQKITNDLAAPWFLELWAMAPTPGKARQLRKSTVEQILKKHRIRRIDADTVLRMLREPAIKVAEGVAEAARIHLRSLIARLHVVNRELRQAEQKLDQLCAGIGETEGAPGECLQRQDIMILKSVPGIGRINLAALVCEASGPLRSRDYPALRTLCGAAPVTKRSGKSQIVVMRYAAHARLRETVYHWARTATQHDAKSRCRYAALRQRGHSHGRALRGVADRLLGLTCVLLQRQTMFDPHFGQAG

SEQ ID NO: 347176 - protein, 415 aa, unidentified
MKDGEKSSTCRYIALDIHKHYSVVAGVNREGEEILPPCRVEHLNLEDWLGKHLLPSDRVVIESTTNAWHVYDLLEPLVAEVLVANPIKVKQIACARVKTDKKDTFILARLLAANLVPTVWVPPQHVRELRQLISQRRRLVGMHTQVVNRMHSVSHRHHLGHPKGKRFQEKDMGWRESLRKMERFQLDLDLETKKYLKGQIDQITKVLGNMSVEEPWASQMMYLMQIPGFGVVTGMTVLAAIGDIARFETPKALASYSGLTPGVEQSGVKLRGKGITKEGRREFRWAMVEVAQRAVKADPYWKRLFIELERRMHRNQAIVAVARHLLTVVWSVLGQGKSYRHYSDERIAYKYYTWSWQLDEAQRKGMTRPQFVRYYLMRLGVGADLQCVALDPKHPHRLASQAEILELMPDLQPPG

SEQ ID NO: 347177 - protein, 343 aa, unidentified
MEQYVGLDVSLQQTAVCVVDQTGKIVREAVILSDPGAIAAFVKSNAKNVVRMGLESGPTSTWLWSELDRLGLPVICIDARHAKAALRMQINKSDRNDAAGIARIMQTGWYREVRVKALDSHAIKALLIGRALLVKIKRDLENQIRGLLKNLGLVIGRAKMNTFTLRAKELIEDKPTLAAVVEPLLKAREVIEQQVADLDRKVMRLARSEPQVLRFMTAPGIGPITALCYLATIDDPIRFNKSRNVGAYIGLTTRRYASGEVDWSGRISKCGDKLLRSYLFEAANVLLTRVAKWSTLKAWGMRIARRSGIRKAKVAVARKLAVILHRMWIDGTEFQWSSKDATA

SEQ ID NO: 347178 - protein, 337 aa, unidentified
MKRYLGVDLHRTQFVVCTRWENGEQEIRQWRIGELPKFVEQLRSEDQIAVEAMGTTARFYDAVVGRVGRVVVVNPHQFKVISESVKKTDRKDAQALALYLEKDLLPEVRMKPKQNRELMHLAETRDLLVKQRSALKGKINNLLAMQGIELKREALSSKIALARVLALPVSGMVQLELRILVEQIRALSESIVELDERLEEEGQQLPGYENLTSIKGIGALSATVLLTVIGKISDFADENKLASYLGLVPKIANSNESERSGRITKQGNKLARTALVQCGLVAKRYSPYLNQFYDRIKQRRGGGKAKIALARKLVKIVYDTLKNQWVFEDFPSFTLAA

SEQ ID NO: 347179 - protein, 343 aa, unidentified
MKKLYYIGLDIHKKIIAFCIKLSDGTIVDEGKVEATREALGEWVKKIKNPWDGAMEATLFTGWVYDYLKPHAHELKVAHPAMLKAITAAKKKSDQSDAQKIADLLRVGLIPESYMATSEIRELRRVLRYCTHVVHTAVKMKNKIAGLLMETGISYSKRKLHGKKYFQEVLGRVEDISPSVRELLEMSRGGMEIFEAGQKKLIAALRHNERIKERVERLMTIPSIGEITALTWVLEVGDPERLGSVRRAVSYCGLCSAYRESAGKEQRGPISKKRNKHLQTVLIEAAKIAPLWNTQLAALHARELERGNRNRATLAVARKMVAYLLAVDKRKTDFATLAEAEVA

SEQ ID NO: 347180 - protein, 465 aa, unidentified
MNSAIGIDPDSRGFVCALVMEGKAQATNRRFSVSQEGLREFLDWVSARGTPLVGIEGTHGQSRPIEKALREAGVVFHSFKPADTDKFRKAVLGQNKNNERDAESVARYSLALEAQGMLEQYRRVYSPDMELQLLTRRYESLSGELTGEVNRLWKLLHDACPDLYLLLGGENGEIEQRGKVLKNQGILNLLISKPHIGEWKDLSESQMREAMGGGDYKGRCELIAELQEAAARFPSVSAGIAMVIRHSAGQIQRFKAEQGELVRMLDSLTEGNRAVQCLKSRRGIATLTAAKMVAEIIDIRRFAREDSLACYSGLGMREHSTGNTTMMVPTRLFNHRLKDAFMTAARNVVLYDPGSHLAGYYRNLVKTGMRPLEATKRAARALVRVIFRELSGLMETKAEDVEQKRAKEGEGDMASGVTRSGRSRKSNISPSSRRVSKSKRTKKVKTTRALVVRTGAAKKKGALTE

SEQ ID NO: 347181 - protein, 516 aa, unidentified
MIPPRGKLYTDATMVLSSPFRSLVLEAVLSVIGGESAQAVPTPFRRLPNCFTLRAAAVRIIIPIMAKSNPALRKKKKSPTQVRPEPRPDAAGIDLGATVHYVAVPPERDAQSVRSFGTQTGDLQALADWLIACQIKTVAMEATGVYWVPLYQILEERGLEVCLVNAGHAKNVPGRKTDVQDCQWLQYLHSVGLLHASFRPPAAVCAVRALVRHRDSLVRSGCEHLLRVQKSLDQMNVQVHRAVTDITGETGLAILEAIIKGERRPESLAQHRNYRCKKTEAEIIAALRGDWRDEHLFTLRQSFEAWQYHQKLIAECETELRKQMDGLADQTKEPVPPRARPDKRCDEKTRQHLFAKFGVDLTAVDAVNVQTAYLFLSEVGPDLSKFASGEHFASWMGLCPDNRKTGGRQIGVATRAVANRLATALRMAAQSLHRVESPLGEWFRRMKAKLGPAGATTAAAHKLARVLYAMIKYRKPFDPERLGNPALRRARKENALRRAAKELGYDLQPIQAVAVS

SEQ ID NO: 347182 - protein, 418 aa, unidentified
MRTAADYCIRKETVFIMISIGIDVSKLKSTFCILNEYGEVLQAPYEISHTEKDLKELSERIKGYGGKSDVRVIMEATGAYSRPVLYYLLDEDIFVSEINPLAMKKYRADINFRGVKNDSIDAMAIASYGIDKWHRLKEYERADEEYAAMKALSRQYLSYMKSHVALAQNLDHLIDQVMPGIKKEFNGYDPVTGKDRLTDFLEEFRHYDCITSLGPKKFEERFNKWAQKKGYRPRQNKPGKIYSLAKEGIPTLAYDPIGKLLVRQAVEAVRGMNQVLNEILSQLRSLAEKRPEYSAVRAMSGVGDVLAPLLIAEVGDPRRYYSGSALIACVGIDVPPYESGQFKASERKITRKGSKQLRKIGYLLVKNLRKIKPTKDTAVYDYYLKKKSEGKKDKQAIVAAMNKFFRIYFARAMEAYRS

SEQ ID NO: 347183 - protein, 346 aa, unidentified
MLYAGLDLSRKRLDFHLLDADGGTVEVGAAPPDADGLRGLTERIDRHGAPIRAAIESMNGARFVHDRLELAGWQVEIADAQKVKGLAPLACKTDRIDAWVLAELARRELVPAIWLPDPTVRGERERARWRLHLVRHRSSLKQRVHAVLLAHGKPCPVSDLFGVRGRQLLARLDLPEPWQGTLEASLRLIDELDREIGDCERELRRLGADHRYVPLLLTVPGIGWVLAYTIAAELGDINRFPTPRKLTGYTGLCPRVYQSGERDLRGPLSKQGPRYLRWALVEAATHACTHPTYRDRYQQTKARIGKQRGAKVAQIDLARRLTEAIWHMLSRGEAFAPKGATDPLAA

SEQ ID NO: 347184 - protein, 344 aa, unidentified
MEISTIGLDLAKSIFQVHAVGEDGKVVVKRSLRRSQVLPFFRKLGPCMVGMEACGTSHHWARQLAALGHEVRLMPPAYVKPYVKRGKTDANDAEAICEAVTRPTMRFVAVKSPQQQAALALHRTRDLLVKQRTQLVNMIRGFLAEQGVETPRGLHHALALSARLVDGDGPQVPALVQRVVEGLARQIAALQTELGAIEKEILPWHRSSEVSQRLATIPGIGIISATALAASVTDPQQFRSGREFAAWLGLTPLQNSSGGKERMGRISKMGDKYLRRLLVVGMTSLVRRARVSPTSVDPRITDLLARKPVRLATVAMANRTARIAWAVMARGETYRRPAKMALAA

SEQ ID NO: 347185 - protein, 406 aa, unidentified
MLLVGIDWAERHHDVCLMATDGSVLARERITDGMAGVARLHELIASWVEEPAEVVVGIETDRGLLVGALVAAGYQVIAVNPLAASRYRERHTISRAKSDRGDARMLADLVRTDRHHHHRPVRGDSGLAEAVKVLARGHQQLVWARQRQANIVRSALRAFYPAALAAFGSDPGGRDAVAVLGLAPTPELGRRLSEAELVAALRCAGRRRQVDARAAAIRAALVGQQLEAPPVLAAAYGQVVAAAVAVIANLSEQLAGLEAALMAAFTAHPDAGIVRSQPGLGVVLAARVLAEFGDDPNRYASARARKAYAGTAPITRASGLRQVVLARAVGNRRLSTACHPWPFAALTGSPGARRSYDAHRARGATHHQALRALANRLVGILHGCLRHRQPYDEQLAWPTSTASAAA

SEQ ID NO: 347186 - protein, 429 aa, unidentified
MTKTYILKTQTVPADRSAVETYLAPPPPSKGKIIGLDCHPDTFTAAFFVGQTPHDARKIGSRENLSLDALLKWAAAELTPQDIILMEAGSNSFELCKRLGNLGLKACVLESCHVGKHAKTYADNDKMAAARIALVYLAGNAPCVWVPDEQSRERRELLHAYRKAVDEHTAATNSIKSYLNGRGLRLCKHSLDEKTTSQWILDQADWSVLQKNILAEHLANITESKERRKRLYRLIAAEMAADPKMMRCMKVLGVGIVSAFALLAVIGDIGRFHSPEKLVAYIGLNPGQRQSGKGKDIRLGVGRRGRGDIRNLLIQGAHAIMRSGRNTPLGQWGWKLFARKGNRNVAVAAIARKLLVQVWHLLHGNPPLALESDTSFRIKLQKLAVALGSTLRTGIGLGKTLEDSVKTLISRCQTHAEPSASPCETPQPA

SEQ ID NO: 347187 - protein, 392 aa, unidentified
MTTSVGIDVAKEVHWVCAIDSGGKVVLNRKLLNTPEDLQQLVVELLALPAPLRVGIDVLGGIASLAQAVLLHAGVSLVHVPGLAVNRARQGTVGGESKSDPRDARVIAEQVRTRADLRAVTAQTELDIELRLLVSRRGDLSTEQTRRLARMHDLLVGIFPELEHALDLTSKTALTLLSRFVTPLELRQASDDQLRAALGALANRSFARKLINAARAVAARQTIAVPGEALTARLIKELAAEALRTIEQLAALDRELEQRLALHPDAALIRSLPGMGALMTAEFIAEAGTIERFRSPDALAAAAGLAPVLKQSGKSRRLHRPHGGNKGLKRVFYQSAFASLHSPDSRAFYARKRHEGKRHHQAVIALARRRVNVLWAVLRDRQPFHLNVTANA

SEQ ID NO: 347188 - protein, 347 aa, unidentified
MESYVGLDVSLKRTSICVVDRTGKVLCEGTVNSTPEAIVEFVKSKAAGAVRIGLETGPTSTWLWTEIKALGLPVICIDARHAKAVLKMQINKSDRNDAFGIARIMQCGWYKEVRVKGLDSHAIKAVLVSRALLVKIKRDLENQIRGLLKNLGLVIGQAKMNVFVVRATELIEDRPELVAAVEPLLKVREGVEKQITDLDRKVMRLARNDVQVRRFVTAPGIGPITALCYLATIDDPTRFKRSRSVGAYVGLTSRRYASGEVDWTGRISKCGDPMLRSYLYEAAGVLLTRVAKWSVLKAWGMRIAKRSGLRKAKVAVARKLAVILHRMWVDGTEFKWSSKEEVATQPA

SEQ ID NO: 347189 - protein, 402 aa, unidentified
MNAVGIDVSKGKSMVAIMRPFGEIVSAPFEIKHTASDIHSLIELINSVEGESRIVMEHTGRYYEILAHQLSEANLFVSAINPKLIKDFDNDSLRKVKSDKADAVKIARYALDKWQNLKQYNVMDELRNQLKTMNRQFGFYMKHKTAMKNNLIGILDQTYPGVNTYFDSPARSDGSQKWVDFASTYWHVDCVRKMSLNAFIVHYQNWCKRKKYNFSQSKAEEIYGKAKELVPVLPKDDITKLIIKQAVDQLNSASITVESLRTLMNETASKLPEYPVVMAMKGVGTSLGPQLMAEIGDVSRFTHKSAITAFAGVDPGVNESGTYEQKSVPTSKRGSADLRKTLFQVMDALIKTHPQDDPVYQFLDKKRAQKKPYYVYMTAGANKFLRIYYGRVKEYLASLPES

SEQ ID NO: 347190 - protein, 332 aa, unidentified
MSSFTLGIDISKDKFDVALIDVALLDDERYQLGTFDNSKKGCLSLAKWLKKRQAQSAHVCIEATGRYGDALATFLHERGYAVSVVNPARVKAYGASRLKRNKTDPEDAKDIAHFCATQKPRLWTPPPPEVQELQALTRRLDSLKADRTRELNRKKSGISSEAVLQNIEEHITFLDEQIALLEQQIDGLIKGQPDLRQKHGLLTTIKGVGDITAAKFLAEVPDISHFGSAPELAAYAGLTPKVHRSGSSVRRRAHLSKTGNKHIRTAFFMPALSAMRFNPIVRALAQRLEDRGKERMTIVAAAMRKLVHLAFGVLKTGLPFDPNYLVNMRETA

SEQ ID NO: 347191 - protein, 411 aa, unidentified
MDIVYPRCAGLDVHKTTVVACVRKPGPQPDARHAETQTFTTTLQGLRALVAWLSAHGVTHVAMESTGVYWRPVFAVLEGTVQVQLVNARHVKMLPGRKTDVRDCEWLAQLLECGLLRGSFIPPAAVRDLRDLTRLRKTLIRERGHHVNRIAKTLELANIKLGTVVTDIMGKTGRAILDALSTGLDDPAQLAARAQGSLRKKQAALREAVEGRLTPHYAFLLAQHLALIDTLDVHIATLDTRIEAAMVPFAEAATLVQTMPGVAERATQAILAETGVDMDRFPTAAHFASWARLCPGTHESAGKRRPTPTGKGATWLRATLQEAAWAAVKTKKSYYRALYYRMKARGGPKKAIVAVQHAMLVALWHMLKRRVPHQDLGADYFDRRHTERRRRHHVRRLEQLGYQVVLVEPAA

SEQ ID NO: 347192 - protein, 399 aa, unidentified
MLAVGIDISKSKSVAAILNQDGSMHTSPFEFHHTQPELDAFIKYILNSNQSATILMENTGHYHYPVLKAFQEAGLPVCIVNAYQIKKFGDMDLRKAKTDKKDAVRIARYALEKSYSLVPYTSMEQKYEDLRFLARQYNQRMLTLKTNKVFLLNLLDETMPGITNILPLTTRTPETSLSVLFINRFKSYDRIKKMGKNRFLDAFEKIARKSRNRQTKTYGLAIYEAALRNITTRGENEYILAAQDQCLELVCESQKAADSIILKMQTLAETLPEYAVLRSMAGVGDRLGPLILAEIGDIRRFHSGKALNAYAGNDAPPYQSGTFESHNRHISKRGNAALRKYCFEVMQALKLTQPQDDPVYLFLLKKEQEGKPYNVAKMAGVDKFLRIYYARAMETLKQQ

SEQ ID NO: 347193 - protein, 358 aa, unidentified
MKKRPARFVGIDVSKDHLDLACRPEDTRWRVANDNAGIAQCLVQLRQRKPALIVLEATGGWQGALVAALAVSTLPFTVMNPRQIRDFAKATGQLAKTDALDAGVIAHFAEAVRPTPRPLPDATTQHMNAVLQRRRQLLEMLVAERHRVALAHPAVRASLARPMDDLQHMITETDAEVATIIRTSAAWRAQDALLQSAPGIGPVLSATLQAAVPELGVLNQREIAKLVGIAPLNDDSGKRAGARHIRGGRAEVRTVLYMATLTATRCNPVIKAFYQRLRARGKAQKVALTAAMRKLRIILNAMVKTRTPWNARVNHVPVLEQASCARAAAGQLGAPPQPIKHRPARPRTAKQCRGAQGS

SEQ ID NO: 347194 - protein, 392 aa, unidentified
MAGKVAGIDVHKKVLMVVVIDADAPAAKPERLRFTTMPSELCRLSTWLKEHGVEEAVMESTAQYWRPVWLELEPHIRLHLAQAFSNRAPRGRKHDFKDAERLVRRLIAQKLILSFVPDGEQRIWRNLTRMKLQLVRDRVRLQSQIECLLEEMRIKLSVVVTDLLGLSGLRILHALANGETDAKNLALLGDHRLKCSEEQLIEALTGSSQPMHPQMLAMQLERLRLIDEQMAKLNVLIAQAMNPHQDTLIRLAEVPGLGIDSAQQIIAEVGVTASTFPSAAEFTSWVGTCPGKQESAEENSSSRSAKGNKYMRRILNQAANAAARSKGTHFQAVFRRLLPRLGYQSAVWAIAHRLCRLVWKILHEGIRYIEQGIDSEPRLLIYRARSLVSRCT

SEQ ID NO: 347195 - protein, 392 aa, unidentified
MKTTAKGVLQTGGEQVAVGVDPSRNALQLAILAPHGTTTKRFPLIPASLASIDAVLGQGQGVRIGIEGAATCGAMVLLHWLRQGYDIREVNPQISKRLRECLTESHTDISDAQGLAWSVRFHPHLPKVRLTVTTAAWKRLSRLRARLVKARTGLYNRLHSLLAESYGAVYKRLFPNLKSKRALEFFQAFPTLDDALDDLPQVRSLLGEERARLLEEAGRWGEGLYLETLRLEICLTIQLIFAHRTAIEGVGAKMAELSQADPQVGRLRAVPGMGTTLALTILGHSGDFSRFESHDAYAAYCGLAPAVWQSGQSRVYAKRRRRYSRPLKQAFLQLALTQLRLNPESRAYYERKRREGKPHWVALIALARQLCKKVYKLMAEKAPPNPPLDIDG

SEQ ID NO: 347196 - protein, 316 aa, unidentified
MTSTPVFVGIDVAKDEVVVALTPGGERWTSGTGGPELQALVARVQGHAPGLIVLEATGGLEAPLVALLAAAGLPVAVVNPRQVRDFARALGRLAKTDAIDATVLALFAERVRPAVRPLPDAAARALEALLARRRQLLEMLVAEQHRLARAAPAVVRDVQAHITWLQKRLAGLDADLHGAIKASPVWRVQDALYQSTPSVGPVTALTLIAELPELGQLNRQQIAALVGLAPLNRDSGQWRGKRMVWGGRTHVRTALFLCAMAAVRCHPTLRPFYQRLLARGKPKKVALVACARKLLTTLNAMARSGTPWQLDFQHSC

SEQ ID NO: 347197 - protein, 345 aa, unidentified
MRYYAGLDVSVKETSVCILDETGRVCLERKVASDPADLALVLQDPRWPLHRVGLEAGPLSRWLHAGLGQVGLPVICIETRHAKAFLKARVNKSDRHDARGIAQMMRVDLFRPVHVKTPASQSRRALLSARRICQEKALAIENDIRGLLRNFGLKVGLVGKPQFETRIRDLVVDEPELQPVMESLLSARAGLRASEAALHRRLLQLVRQDPVCRRLMSVPGVGPVVSLAFVATIDDPGRFLNSKAVGPALGLVPRLSQSGETERIGRISRCGDAMMRGLLFEAATVLLTRVRTWSWLKAWAVNLAKRRGMKRAIVALSRRLAVILHRIWVDGSRVPMDTGNGMSRL

SEQ ID NO: 347198 - protein, 402 aa, unidentified
MNKPCISIDISKGKSFYQGFENYNQIFTKAKEVLHDIKGFSEIKGLTNRLLNKTGNIPIVVFESTGIYHKPLQTYLDEHKIKYTIVSPLLSAKVRKSQIRSTKTDKKDCQNIAKVFYMNDCKISDKQETIYDEIRNKSRYYNTVTEEKKRLKVEFRRLLDIVYPNFDTLYTKIYGVIPLLVIKEYPHPELIRKKSVKAITANLRNKSTHKETYCQKEAEKVKIFSENCASGCVKESYTVLQMKKVLNNLILKTDELNDELERLISLAKETINFRLIKSISGIGENLAARLTAEIGDIKKFKSADSLVAYAGIDPKIYQSGKISGEGLRITKKGNKHLRTLLYLAVTSMVKTKRDNIIVDFYNKKKRQERAMSSKAAFIACSNKLLRIIYSMCKTGCLFNNHK

SEQ ID NO: 347199 - protein, 286 aa, unidentified
MKNLFIGVDFSKEKVDVAIIFADGLTETAPRVFNEFKTTVSGYKQLVKWVEQNSYGIDSSLWLFCGENTGDYSKGLCNFIYGKGYDMWLENAKSIKDASGLRRLKSDRADASMIAEYAMRNYDKAVMYEPLSESLAQLRELFLYRQMVVRHRCSFQVRRGEKRLTMEKSPVKTMISQSGRHIVSELNKEVEKIDKRIAELIKSDEELTEVFTIVTSVPGIGTQNAVCLMVYTDNFRRFNYDSRKISCYYGIAPFGKDSGTSVHSDPHVHYMANRHADAGSTGCRQV

SEQ ID NO: 347200 - protein, 394 aa, unidentified
MKLVGIDIGKNSHHFCVMDKETGELNVTPSSFSNNKEGFDFLINSLKPYSKKSILIGMEDTGHYHVALLKFLLSNGYTVALINPKTTDLTRKMEGGITKNDKLDTITICDVLDTPERKKQYRITKVDRFDLYEQRQLTRHHHNLKEELNVYCNRLQKSIDLVFPEFNTLFSSKYSIVYMNLLKTFGSAEAIASTDIRTIRKCFEIKGRGNRISLTPEKLKECAKNSIGISSEVETIQIKHLVSQITLIKEQIAEIDKKIEEFSITNNSPILSIPGISHFSGTSILAELGDIGNYSKPSQIIKFAGVAPYHYESSQYNAQHTAITKKGSKYLRKTLYQIILPVINNNPVFKKYYRLKISQGKGHRCAQGHCIRKLLRIIYHLLETGQSFDPALLR

SEQ ID NO: 347201 - protein, 375 aa, unidentified
MTKILFVGMDVHAETIAVAVAEQDGEVRSHGVIPNRVESIRKLVRKLGPSKRLRVCYEAGPTGYALYWQLAALGVACEVIAPSLIPRKPGERVKTDRRDAEKLARCYRAGELTAVWVPDAEHEALRDLVRAREAAKKDQLRARHRLSKFLLRHAQRPPAGVKAWTKKYLEWVHAKVRFEQPALEATLADYLHEVEHAAERIVRLEKAIDEAVGQAPLEMRAVIEALQALRGVAQTTAATIVCELGSLSRFPSPKQLMSYAGLTPSEHSSGNRIQRGPITKSGNAHLRRVLVEAAWAYQHRPNVSGFLLRRQKALALSDEVKRIAWKAQVRLSGRYRKLTARGKNKNETVTAVGRELLGFIWAIAIEAEAQAALAA

SEQ ID NO: 347202 - protein, 343 aa, unidentified
MDHFAGLDVSVKETSICIVDDTGRIVREVKVASEPEALLAVLANPTYHFKRIGLEAGPLSQWLFSALAEAGLPVICVETRHMRAVLQAQINKTDRNDARGMAQMMRAGLYRPVHVKTLRSQKLRMLLTHRKLLQSKAVAIENDLRGTLRNFGLKVGVVGKVRFEARIRELVENLPDLAVLVEPMLIVRRVLREQIGILHRRLLAIVRDDDVCRRLMTIPGVGPVVALTYRATVDVPARFKNSKAVGAVLGLTPSKYQSGEINRSGAISKCGDEMMRVMLYEAAQVMLTRTNKWSWLKAWAMKIARHRGMKKAIVALARRLAVIMHRIWVDGTEFRWTREAAVA

SEQ ID NO: 347203 - protein, 438 aa, unidentified
MKVMYERVAGIDVHKDMIKVAVRSPGDKPWTRKTEILTFRTFYGVLRAMARELRRRGVTHVVMEASGVYTEPVYYALCEEDFTEVAVVNPAHAKALKGHKTDAKDCARLAELFECGLLQGSYIPAAGLKEMRDLSRYRMKTVQARTSEIQRLAKALESAGIKLGSVASEITGKGPVAMIEALISGERRGAVMADLARGRARTAGKLADLSMALEGRFTDHHALMCRLHLDRITALDAAVADLEARIAATAADWQREIDLLKTIPGFGDIVAWAWIAEIGPAPHQWFASHHKLASWVSLAPGNNVSAGKRKYGRTGDAGTYIKPMLIQAAWAATQVRGRLQARYNRLVRRMGGPKNPAAKKKAIVAIAHTLLKIACTVLKTGTGYQEPGADFYTRRESPGHRQAWLERQIQKLHPGCTVTITISPSPDPAPEAALPPGA

SEQ ID NO: 347204 - protein, 386 aa, unidentified
MRDTTFIPQEYDVFAGLDVSKKSIAATFTSQQGFIRSLQMPHSVEYLLNHVRKHFANQKIAFVYEAGPTGYGLYDGLAAHGYSCMIAAPSMIPRAPGHRVKTNRLDSRGLSESLRGGQLKSIHVPSPVYRELRHLTQLRDTMVRQAAAHKQRIKALLLLEGIDFPPAAAGSQWTLRVKAQLRKLKCSRTVRFKLDQLLDTLEFSEKQVVNSTKEIRRFCKEDAELSQSIAYLMSIPGIGSIVASQLLARMGDWREIDNVRQLGSFLGLVPTENSTGDRVDRGSITRLGDGRLRSKLIQAAWSAIRQDTELREFYRSVCRRNPRGKGARIAIVAVARKLSTRIYAVLKNQRPYIVREQVHSAPLTQEETSPQGTTRRCAEPGETDDS

SEQ ID NO: 347205 - protein, 370 aa, unidentified
MGKSVLYVGLDVHKMSMDVAIAEAGPGAEVRFYGQIGGDLDSLDRVIRKLRATGAQLQFAYEAGPCGYVVYRHLTAQGFPCLVAAPSLIPRRPGDRIKCDRRDALSLARLFRAGELTPVKVPDPDDEAMRDLTRAREDAVSVERRAKQRTGALLLRHGRRYPGKTTWGRGHWRWLLQQAMEHPAQQIVLQEYLDAVREASARVQRLTGQIQELLPQWRRETFVTAYQALRGVSLIVAATVVAELGDLSRFKNPKELMAYLGLVPSEHSSGASVRRGRITKTGNGHARRVLVEAAWAYRLRARVTRPLLQRQEGLPENIRQISWKAQLRLCARYRRLLARGKAKQTIVTAIARELTAFIWAIGQAVEPLTA

SEQ ID NO: 347206 - protein, 398 aa, unidentified
MKRLSGGIDVGSESHHIIILDEEDNFLYNQKVAHKLNEFTESIKLFRKIEKQEGGKISFALEGKNGYSAPFDKILLDQGFTLYNVDNFKLKRFREAFAGEWRDDERDSLMLSKMLKLKEHINSEREKVFIKIEKPSLITESLKLLSRHQQTLIDERVRLTNRLRKKLLEVCPQILELGKLKNKKIVAILAKYPDFSKYKRITLFSLLKIKGIGKKGVPFLLKRLNNIEYVPGLTNIYKTIILSYAQRILELQKEIEDIDKKLDEIGNQNREVNHLKTIPGVATKLASRFVGEIGDINRFPSEKQLAIYCGIACIDNNSGKVTKARVVYKANKICKQTLINMAGCSIRFSPQCKTYYLKKRTEGKNHNHALRCLARQLIKVIYRMLTTRTLPCISGQTS

SEQ ID NO: 347207 - protein, 348 aa, unidentified
MSISSHAAVSTQLNAIFVSLELSRSTWLVTSLSPGRGERISRHQVKGSDVPALLERFVQLQAKARERTGEQYPLVVIQEAGLDGFWIHRCLVREGIESHVVDAASIAASRRSRRAKTDKLDGEALVRTLLAYKRGEPRVCAMVTVPSAEDEDRRRVCRERRSLVVERIRHVNRIKGLLFAQGVGDYEPLRTNRRARLEELVTGDGRPLPSHVKREIERELDRLELVMRQIKEVERERDAMLEAATDEAPEPASARLLQLRGIGPEFAGVLHAEAFFRSFSNRRQVACYAGLAPSPWQSGNMDREQGVSKAGNKRLRTTMIQVAWLWLRHQPHSELTRWYAERVQANGP

SEQ ID NO: 347208 - protein, 355 aa, unidentified
MTVTIVEEARPVTCRTAITGGVDTHADTHVAAALDPVGGLLGVEEFPATAAGYARLLGWLGGFGTVCLAGIEGTGSYGAGLARHITAAGIRVVEVDRSDRQDRRRQGKSDPLDAVSAARAAQSGRARGAPKGRDGAVEAIRTLMVARRSAAGERTRTINQARALVLTGPDDLRARFARHKPAALITGLAALRPRPGDVAGHATRIALRELGRRAQFLDGQLVRLDELIIPLVTARAPGPLAIYGAGPRTAALLLIAAGDHPERLRSEAARAHLCGAAPIPASSGKVTRHRLNPGGDRQANHALWRIVFTRLGSDPATRAYAERRTAEGKSKAEIIRCLKRYVAREVYRQLRLAAG

SEQ ID NO: 347209 - protein, 417 aa, unidentified
MADDIHWFAGVDWASEIHQVVLVDTHGTVTGEHAFPHGGEGLGAMCDWILTTAGAPAKAIGVAIEVPHGPVVETLLERGFLVHSVNPKQLDRFRDRFTVAGAKDDRLDGRVLGDSLRTDRHCFRLLRPADPVAVELREWSRMTEELQQERTRLSNRVREQLWRYYPQMLELTDDAGADWFLALWALAPTPAKAARIHGSSIERLLKAYRIRRIDADKALPVLRGKPIQVAPGTTEAATAHIRTIAVRLKVVNRQVKEAHRQLDVLCAKLADPEETAPGQSPEQRDVTILRSLPGVGRIVLATLLAEAWEPLRARDYHALRSLCGVAPVTRRSGKKCVVVMRQACHMRLRTAVYHWSRVAIQHDELSKRRYRELRKRGHSHGRALRTVADRLLAVACAMLRSRTTFDPARAGVLKQAA

SEQ ID NO: 347210 - protein, 320 aa, unidentified
MGTEKVYVGIDVSKETLDMAVHASDQRWRFANSDKGITETLSCLEELCPTLVVLEATGGFQYPLAAALAVASVPMVVVNPRQVRDFARATGRLAKTDAIDARVLAHFAAVVHPPSRLLPDTQGQELKAILTRRRQLIEMLTAERNRLHSARSRSVKEHIQAHISWLEEELAHIDHDLGHSIRQSPVWQEKDDLLKSVPGVGPVLSTTLLADLPELGLLNRREIAALVGVAPFNRDSGHTRGQRAVWGGRAVVRSALYMATLVATRHNPIIRDFYRHLLSAGKPKKLALTACMRKLLTILNALLKYKTPWHYPISRTPQTS

SEQ ID NO: 347211 - protein, 366 aa, unidentified
MQEISTMQASGSDNFKGPQVTIGLDLGDRTSNYCVLNATGDILLEDKLPTTSQAMKQLFGRMLRSRIAMETSTHSPWVSRLLKELGHEVIVAHAQKVGLIVKSRKKDDRIDARTLARLARIDPQLLSPVQHRSAQAQIHLTEIRARAELVRARTALVNSARGLAKSYGERLRKCGTQQVGRELAMGLSAELRAALEPLLREIESLNEHIKEYDRRIEKMAKDTYPEVKLLQQVKGVGDLIALAYVLTIEDPHRFKKSRDAGCFVGLQPGRRNSGESEPQMHITKEGDRYLRTLLVQGAHYILGPFGEDSDLRRWGKKLAERGGKKAKRRAVVAVARKLAVLLHRLWVSGEVYEPLRNSKKAMSTAA

SEQ ID NO: 347212 - protein, 379 aa, unidentified
MEAKREDPLSIRHRCARVEMSSNHSQDRGSDMQVTTYGVDLAKSVFQVHWVETDSGEVRRKMLTRGQLQAFFACRAPGVVAMEACGSAHHWGRTLKALGHQVRVISSQFVRPFVKSNKTDAADAQAIWEAAQRPEMRFVALKSEQQQALMGLHRIRAQLVKQRTMQANQVRGLLYEFGVVVPKSWRALLAQAAPILADASRGEIPDLIRGELQQQLQGLRDLTGRIEQLERSIGAYRAQDEQCRRIEAIPGVGLLSSTAIVGSVGDARTFRSGREFAAFLGLVPRQSGTGGRVKLLGISKRGDPYLRTLLIHGARAVVNHSSRPGRSMPRWLRELLSRRPKNVAIVALANKIARTIWALLAHERTFDDRWGQAMPIPVL

SEQ ID NO: 347213 - protein, 315 aa, unidentified
MARFVGIDVSKEHLDWAVHAGPEGGQVAYDDDGLDALVARLRELGPACVVLEATGGLEMSALAALSVAGVPVAVVNPRQVRDFARAAGHLAKTDRLDAKCIAHFAATMQPALTPMPEAETLELELILARRRQLVLMLVSEKNRLSGLLGPRRVARVVSSIQRIVETLTKELEELDEELKTKIEQSPVWRAKDQLLRSVPGIGPGTSRTLLLDLPELGTLDRKQIAALVGLAPFNRDSGKLRGRRTISGGRATVRSMLYMASVSSLRCNPVIRPFYERLRAAGKPVKVALTACMHKLLTILNAMVKADRPWQAVSA

SEQ ID NO: 347214 - protein, 344 aa, unidentified
MSKVITIGLDIAKNVFHAHGADERGAIMFSRKLTRGKLLEFFAGQPPCTVALEAWGGAHHWARQLQALGHDVRLIPPAYVKPFVKRNKNDAVDAEAICEAAQRPGMRFVAVKTEEQQAAGLVFRTRDLVVRQRTQLINAIRGHLTEYGWVAPRGTASMAMLADLLEDGDMASSLPEAARPMFKLMIDLLAELDEQIATLDREIARRAKEDEAARRLMTIPGIGPIAATAIIALAPPIETFRKGRDFAAWLGLAPRQHSTGGKQRLGSITKMGERTIRRLLIIGASSVVLQASRRGAPGGSWLERMLARKPRMLVSVALANKMARMVWALLTKREDYRAPAAVSA

SEQ ID NO: 347215 - protein, 338 aa, unidentified
MLSNNIIAIDLAKNVLQVCHISVHGEMLSNKPLSRQKTKEFLAKANPSIVAMEGCCGCHYWGQLAEQFGHEVRLINPKKVKGYLEGHKTDHNDALAIANASYSRPKSLEQQSMHSLESSRRFLSRSVVSLGLHIRGTILGYGVANPRGEKGLKASIQTVLDGETSIPANVVSVLSMLWEQYKELKAKLIAFEKEKNALTRQIEPCQRLMEIEGVGETTAAMLYTTLGDGKQFKNGRQASAFVGLTPKQHSSGGKVFIIGIDKCGGVKELRSLLYLGAMSYVGRLPEKPKTQKDAWLRGIIDRIGFKKACIALANKVVRTAWAMLRYETEYKPVLLINH

SEQ ID NO: 347216 - protein, 429 aa, unidentified
MEINSTNVAGIDIGAKKVFVAIEGQPVVSYFTFTEDFLLLRDSLLKHKVKTVAMEATGIYWVILYEILEEAGIDVWLVDGRQTKQVPGRKTDVKDCQWIQELHGYGMLNRCLVVKADIKELRSYLRLREDHIRSSSMHINHMQKALTEMNIRLTEVLSEIHGKSGMAIIESILGGERDRDVLVNLCHTSILKGKKDLVYKSLNGIYTKAGLFALKQAHDGYQFYLQQILECDAQINIVINRMGNSGKDQDLKNKRKPIRHHRPNIKNLGPNLLNIFGGKDATLISGITDYTWMELLAETGPDLTRWPSEKHFTSWTGLAPGQNNSGKKNRNAKKRGSPKAGQIFRTIAQGLINSKKIALGAFGRRLRGRKGPAVAIKAVARKLAELYWRVGVKGLEYAENGIKKYEEQLVKQKYKTVMKLANELNLQVS

SEQ ID NO: 347217 - protein, 321 aa, unidentified
MHLGIDVSKHRLDCCLLLNNGKTAEITIDNYPEGYARLRKWLQAHNAEEDLNICMEYTGIYYEQAADYFSRFYTVSVVNPYWIKSFGMAVFKRSKTDKQDAKLIAQYSKMVQPEPWQPLTEKQRQLRDLNRYLIRLKRQRAAEETKRQTAPDYLQGYLNQNIDHLDEQVKAVNRQIKQLLKQDKEHSDKIKQLQTIPGIGLTSATILFTLLQDGRFSKASELVAYLGLDPRHQQSGSSLNKPSRISKFGQNDLRAALFMPAMVAYRDNAFPAFIERLRQKRKPPKVIIVALMRKLAVIAFHLIKTGQDFEPKRYQAGINSE

SEQ ID NO: 347218 - protein, 330 aa, unidentified
MTTHTSQSNLKTTPETTSAPSWIGIDVSKSELQICSRDPSLKLPAKLPYHAAGIKLLISKLLPLSHPHIVFEATGSYDKPLLKALQSHGIHCSRINPRHARSFARAKGRLAKTDAIDASVLAEYGAVMQPEITPPADPRLEELNALITYRRHLLEELAREQMQLEHPKPSAITTIIKSRLRTLKAQIEKFNRLIASYVAAHPSLKRAVDALSAVKGVGPLTAAGLLAALPELGTLNRHQAAALAGLAPVNRDSGTLRGKRCIQGGRREVRHALYMSALVATRYNSVLSKAYQAMVSRGKVRKVALVAIMRRLLIHLNSIMANVLKETVTP

SEQ ID NO: 347219 - protein, 351 aa, unidentified
MNYYAGIDVSLECSSVCVVDRTGKIARETKVASEPEALIAWFGSLGLSLERIGLEAGPLSQWLYAALREAGLAVELLETRHVKAALSAMPVKTDRNDARGIAQLMRLGWFRPVHCKSAEAQEIRALLTARKLVQSRLYDAEMSLRGILRGFGLKVGRTTPKRFAERIRELVVGHATLEAVGAALLSVHAVLLREFNGFEKRVRAIARSDGRVRLLMSTPGVGAIVGLTYISAIDDPARFKSSKSVGAHFGLTPTKYQSGETDVTGRISKLGDSSVRTALYEATNVILTRPIKGGGLKSWAMKLAKRAGMKKAKVALARKLAVILHRVALVRRGRLAFAGNSSTVRQRENAS

SEQ ID NO: 347220 - protein, 395 aa, unidentified
MKMAGIDVHKKVLMVVVVDARMPEEKPARRRFVTMPSELHRLLTWLREQGVEEAVMESTAQYWRSVWMELEPHMRLHLAQAFSNRAPRGRKHDFKDAERLVRRLIANELILSFVPNGEQRIWRSMTRMKLQLTRDRVRLQNQIECLLEEMRIKLSIVVSNLLGASGLRILHALANGESDPKKLAQLGGERLQCTEEQLVDALTGRAQPVHGEMLALQLQRLQLIDQQMARLNSMIAAAMKAHQDAVIRLAEVPGLGVDSAQQIIAEVGAQASTFPSAAELTSWVGTCPGKEESAEQNHSSRSAKGNKYLRRVLNQAAHAAVAKKGSHFQAVFRRLLPRLGYQSAIWAVAHRLCRLVWKILHEGVRFIEQGHEVGPREKRKRAQMLARALRKPAMR

SEQ ID NO: 347221 - protein, 343 aa, unidentified
MYVGIDAHKKYCKSIVMDKKGAKKQTAVFDTTLDGMRGFSQSLDAKAKIVVEASTSGLYVYDYFHGQGFDVVMAHPQQVKAIANAKIKTDDISAEILAHLLRTDLIPEAYVPPLEIRELRDIVRHRVALVRVQTSIKNRIHAILTREGIRHGFSDLFGRAGRSFLESVELKGQNRMVVDNFLVVLDTLESRIAEVSRCIDREARAKKSKEVEALTTKIKGLGLYSSLLITAEIGDIRRFSHYKKLCSWVGLIPSTHSSGGVTYHGKITKRGNKLMRWSLIQATWRIIRFDNTLRQNYTRLEKRIGKQKAIVATARKLVKRIYFILQEVHENQAYGLSGKIAPY

SEQ ID NO: 347222 - protein, 353 aa, unidentified
MKYDKYMGLDVHQAMTVAVVIDAEGKVVLETMVATEAAAVLRLVKSLSGPMRVTFEESTQAEWLYELLRSHVTQVVGCDPRRNKLLSEGSKADKVDARKLADLLRTGMLRSVYHGHQATRKLKELVRAYETFSLDTQRTMNRIKAIYRGRGIATPGRGVYQARTRDQWLAKLAEPGLRQRAAWLYQQLDQLKPLRKQAKQVMLAESRAHRAVSLLRTIPQLGPIRAAFIVATVDTPHRFRTKRQFWSYVGLAVVTHMSAEYEMKAGKVVRRRKPVATRGLNRCCNHRLKEVFVSAATGGTRDESYKLYLERLINNGMRADMARITLARKIAAVALILWKKGKEFDPRELNRTT

SEQ ID NO: 347223 - protein, 349 aa, unidentified
MGMRTDRVDHLIGVDTHRDAHAVAVVAPSGAVGAQATVVADARGDRRLLRFARAEAPGRGVWAIERRGSFGAGLTTFLLERGEWVVEVDRPTRPARRRGAESDQLDAARAACEPLAREHLAQPRRRGEREAIRVLLATGEGAILARTKAIGQLKALIVNAPEGIRRQLRRLSTEEQLARCARLRTSASQSAEHRATTIALRFAARRALALEAEAADLESQLEPLGGELAPTLLAQPGVGVISAAQILTAWSHPGRFRSEAAFASLAGGAPIPASSGQTIRHRLTRSGDRQLNRALHTITLSRLAHHKETRTYAARRTAEGRRPREIKRCLKRHLARRLDRLLEASAVST

SEQ ID NO: 347224 - protein, 259 aa, unidentified
MTEEKTWVGIDVSKEVLDIYVLPQGLTLQQPNSDVGVQSLIEQLHPLSPSLVVVESTGGLERALVSGLQAATIPVAIANPRKVKGFATALGKAKTDKLDAQVIAQFARAVQPQPQPVVAPQAQQLSDLVRRRQQLVEMQVAEKNRLSRASETVQLDIKAHIEEIQQRIESLNEQIQSLAQQQADWQRKNEILQSVKGIGKVSSALCLAELPEMGTLSEKQIARLVGVAPINHDSGQHKGKRMISGDAPRFAVACTWPHW

SEQ ID NO: 347225 - protein, 351 aa, unidentified
MPRASTVHAVIAIGIDMGKNTLHMVGLDSCGAIVLREKVSRGRIASRLVNLPPCLIGIEAGMATHYVARELAALGHDVKQVPATYAKPFRQGHKNDFRDAHAVAEAVQRPTTRFVPAKTDEQLDLQALHRVRSRLVSERTAVINQIRGFLLERGIIVRQGLRFLRQLLPDILPKRADVLSPRMVRIVAELAGDWRRLDERIETVTDEIEALAKSDDSCRRVMTVPGIGPIISSAMVAAIGNGVAFARGRDFSAWLGLVPKQMSTGDRTILGRISKRGNGYLRMLFMQAARVILLRPANWPKHGFGAWLARAAQRLHPNVLAAALANKLARIAWTVLAQERSYETRVTKAAA

SEQ ID NO: 347226 - protein, 339 aa, unidentified
MKNTKYYIGLDVHKKSTTYVVRDKTGNIVTDGEVATLYSELSERLEPYLNASIIGLESCTSYYTLYQNFLKNNYNIKVANTIQLRQLIAKNDKLDAKRLSEMLRLGTFPCSYIPDEKIQRLRSLLQVRHSLMEEKTRCNNRIQAFLDRNGIVMPDQEAFGKKWRQQLLQYIGSGEVSLELRYEYDHFVYLEKKAEHLGQEISGYAIKHWTKEYRLIQSITGFGPVLSCYVIAHILPISRFPSNRKLRRYAGVVPAFHESGDKKSKGHIPKTSSRKHLRWALIQAANAAGKTNTKLGRYYRKKKKQKNNAGIAHVAVASSMIDIIYKVLTTNKPYSPQIC

SEQ ID NO: 347227 - protein, 371 aa, unidentified
MKQSTVTYVAMDTHKNTISVAIAERGRGGEVRFIGEIPSRPESVAKMVDRLAAKHDKLSFCYEAGPCGYGLYRQITMLGHECVVVAPSLVPTRPGDHVKTDRRDAVTQASLFRSGELTPVWVPDDAHEAMRDLCRARQAAMEALRRARQQVLSFLLRHGRVYSDSGHWTRKHRLWLSAQRFDHPARQIAFEELVQAVEEAQGRRDRLAKQMQELTPSWSLAKVVTAIQALRGVALIAAITLVAEIGDFHRFANPRQLMAYLGLTPSERSSGAKTLRGAITKAGNTRARRMLVESAWTYRLPARIGAQILERNEKLPQPIKDIAWKAQVRLCARHRRLARGGKPANVVNVAIARELAAFVWAIATNEHVGLA

SEQ ID NO: 347228 - protein, 468 aa, unidentified
MLRKELRLQENADAETQGTTGREIEGLPVIRPDVAGIDLGSERHWVCAPTMDRKGREIAQFGATTPELMRMEQWLKERNVQSVAMESTGVYWIAPHEVLEAGGVEILLVDTRQLSRVPGRNNKTDAKDCEWIQRLHSCGLLKGSFRPPEDVCMLRTLVRDKANLVAESADWLRRMQKSLDQMNVRVHRAVSDLDGVTGMAIVRAIAGGERDPRQLAKLRDWRCHKNAEEIAQQLTGHWREDHLFSLQQSLQMYDAIQERIADYDREILRKLAEMQRQDCRADPPPNVKNPHKARAIKKRGEEPMREALWRMSGVDLTSIDAIGVETVQVVLSEYGCDLSDFPTEKHFVSHATLAPRRPISGGKPIRKKRRNSASTRVAAALRMAALSLRNSPTALGAYYRKIARSCGGDVAVFATARKLATVIYRLLRWGQPYVDEGAAAFEKRYLEIRIRSMRTKAKELGYELVRTA

SEQ ID NO: 347229 - protein, 273 aa, unidentified
MQLYCGIDLHSNNSVISMIDESDRVISEKRLDNDLDIITQHLKPFAQDLTGIVVESTYNWYWLVDGLIENDYAVHLANTLAIKQYNGIKHTNDETDARFLAHLLRLNILPTGYIYPKAQRHVRDVLRRRLLLVKQRTAQLLSLQSMITRHTGKRLTSHQVKRLNQSNLADYFDHAASLFAARHAFELMQQLNTQIEEIEDFVLSHCKNTENYSLITSTPGIGKILGMTILLETGPIERFTQVGHYSSYARCVPTDKISNGKSKGKGNAKNGGQ

SEQ ID NO: 347230 - protein, 415 aa, unidentified
MKVVFPTCCGVDVHKTFLVATIITTPADSLQPNYQKKRFSTFNSDLNRFADWLLEHNCLDVCMESTGKYWVPVFNVLEKRGIRVVIANPKWVKAVKGNKDDTKDSKWIGDLFRIGLVKSSFIPDLNIRILREFTRYRYKLVSMKSSEKNRFQNAFTVCNVALDSVVSDMFGKSATAITDYLTSDESFDPKHCVSLLQRSLKKKADLVLESIEGFSIPDEQKARIKIVREHYSFIEKLIAKVDTCVNEMVAKYEGEINLLCTIPGIDRNSAITIISEIGTDMRQFGSSKRLCCWAGLTPGNNESAGKKKSVGISRAGVYLKPALVQVAHAAVKDKASPYYALKYERIAKRRGKKRAIIAIARMILTAVYSMFCTGEVWNPVDLYKVDMPEHLKEQQLAKAIKQATRFLEKQGLSVA

SEQ ID NO: 347231 - protein, 367 aa, unidentified
MSKAETGRLCVGVDLHKTQFTICALNEDGEYLLEKQYPTKEEGYSEFAREMHRFEEQGCSIELAVETTGNARFFKNRMESEFFAVKVVNTNRFKVITMSTKKTDANDAATLAYYLMKDMLPEAHLCSQTSEEIRRLLKTRSVLVQSMVKIKNQIHGMMLGYGIETKAAQLQSKRKRQELINDLEDHNFSAYTAPSLKVMLKILDDLSAEIKGIEKLLEEMVASNEDVALLMTVPGIGINTATVIAAYTAELERFEGNYKKFASYVGIIPSVHNSNETTHYGRITKHGPQELRTAFVQAALGMIRLTNVSSEWRIIKEYQRRKGDKGSGRAIIALARKITRIVFVMLSKREGFKPELMRCEEAIQQTA

SEQ ID NO: 347232 - protein, 350 aa, unidentified
MIIIGADYHPGFQQIAFVDTDSGEFQERRLQHREEAEKFYRELAVQGMQVRVGMEASGQARWFERLLSELHFELWIGDAAKIRTKRVRKQKTDRQDAQLILQLLLEDRFPKIWVPSSENRDLRQLLWHRHRMVQARTRIMNQLQSVALNEGLRCKKRLWRQHGREQLESFRLAPWASRRRRDLLELLDRLNPTIAELSHAVEQEAEKCPAAQRLQTHPGVGALTALAFVLIIGQADRFDCGKQVASYLGLVPLEDSSGNRRRLGHITKQGSSMMRFLLVEAAQVTVRSVPEWRSKYLHLMMRRGRKTAKVAMARKLAVRLYWMMRKGWDYQQWSKFGSHAGQPGHRDGVQ

SEQ ID NO: 347233 - protein, 344 aa, unidentified
MQINSVGIDLGKTTFHLVALGEAGKALVRKKFNQRQLLTYTANMPTSLIGLEACSGAHFLGRALRKQGHDVRLIAAQFVKPFVKSNKNDFVDAEAIAEAVERKNMRFVPIKTDDQLDLQAIHRVRDRLISRRTAVINQLRAFLLERGLTFAKTPAKLRNALPDILENPEVDLTTQMRNLIDLLWAEWKAVEDQIEGLSRELERISAGDAGCTRLRRIPGIGPIVATAIVAAIGNGAAFRKGRDFAAWLGVVPRQYSTGGKTRLRGISKRGNVYLRKVLIHGARAAVLRMKRDRAPIGAWLDALDARAPKNIVVVAMANKLARIAWAVLSSGEDYKPASNLVTAS

SEQ ID NO: 347234 - protein, 341 aa, unidentified
MYYIGLDVHKKTISYCVKDASGQVKSEGTIKATRTDLDLWMKSLPQPWAAAMEATIFTGWIYDHLLPHASQLKVAHPVMLRAIAAAKKKNDRIDADKIADCLRCDFLPECHMVSTEIRDRRRTLRYRHLLVRQLVQMKNRVSGLLLETGVSHNKQRLHKVGYFQELLTTNQEVKQSIRPLLELSRETIVRLQKMDYALVSSLQRDPLLAKRVKHLQTIPGVGPITALTWALEIGEVERFPSVKQAISYCGLCGDEKSSGESVKRTPISKQRNKHIQSVLVEAAKLAPRHSPEMALVYEKEKQKGNANRATLAVARKLVAYLLAVDRRQQDFVLPENKKTAA

SEQ ID NO: 347235 - protein, 333 aa, unidentified
MGFEPGPSKEGSWMMAQNDLVVAGIDVSKDKVDVCIRSLSLRRTFPASAQGRRQLIAWLRKHKAGKAVMEASGGYERDWAKALREAGIEVRIVDPKRVRSFARSAGRLAKNDAIDAEMIAWFAETFDEAKGQVYDAAREKLVQIVHARQGLLDLQTSLQNRGEHAAPEVVQKMQGRLLRQLAREIAGLEAAIAALIKATAHFAELAAIIESVPGLAETTAAGLIAAMPELGQVSNKAISALLGVAPYDDDSGKRRGERQIKGGRRRVRNLFYMACLGAATRHNPMLKAFYQRLLAKGKEKKVALVACMRKLIVILNTLIARGEKWDASRYAVS

SEQ ID NO: 347236 - protein, 355 aa, unidentified
MNEAKYIGMDVHQATISVAVRDSRGNLVMEAILETKAETILQFIRGLRGSLYVTFEEGTWAAWLHDLLQPHVARVLASDPRKNALLKAGNKSDRIDARKLSELLYLNKLSPVYHGEQGIRTLKELARSYITITRDLTRVMSRLKAIYRSWGIPCAGQQVYAPRYRAEWLAKISEAGVRRRTELYYQQFDALAALRQGTRRELLAEARKHPAMRLLRQIPSIGPIRAALLIALIQTPNRFRTKRQLWAYCGLALRTYTSGEYRFVGGQLKRSKKVLAVRGLNINHNHDLKNIFKGAATRAAAVAGPFQDFYQACVVRGMKPHLARLTLARKIASITLLVWKKGVRFDAEHLKQQAA

SEQ ID NO: 347237 - protein, 398 aa, unidentified
MKTSGLDVHKDSIFCAIYDGKRHSSVKEFSTTTNSIRSPGEYLQSEKVKKVAMESTGTYWVPIWDILYEMGFEQKLVNPLHIKQMPGRKSDSKDAQWIAGLLHKNLLKGSLVPSPLIQELRTYTREYRTLTQEVTKVLTKIDRILVMCGIRLSSCISNMHSKSALQIVDALIRGETSPDKLVTLVYGNRRNKESGKLKECLTGNMKEHHRIKLMTCKQQYDLFELQITFYLSKMQELCNEHFSEDIANLTTIPGVSHISAMIIIAETGGDMSAFENSGKFTGWTGLRPRNDETAGKMKSTATTKGNKHLRAIIVQVGWGAARNKGSYFMDKFQKLAIRKPGKKALVAIGRKILVIIWHLLKEKTQYNPNLVHIYDPVKVEHKIKYHQREIEKAKKLIV

SEQ ID NO: 347238 - protein, 364 aa, unidentified
MKKLTTAATNWIGKQERLTIGLDLGDRSSHYCVLDESGRIVTESKTATSPKAMEAVFGGMTRSRIALETGMHSPWVSRLLSQHGHEVIVAHARNVRLIGESRKKDDRLDAQTLARLARIDPELLCPVKHRSAKAQADLSLIRARAGLVRARTALVNTARGLAKSYGQWLRGCNVRNLNPEKAEALSPELQVALQPLLAGIEAVSEQIGEYNERIEKLAQESYPEVKLLKQVKGVGTLIALTFLLTLEDQHRFSKSRDVGCYLGLQPGRRNSGQSEPQMHISKEGDPYLRTLLVQGAQHILGPFGPDCDLRRWGLKLAERGGRNGKKRAIIATARKLAVLLHHLWVSGEVYEPLHNNRTAIAVAA

SEQ ID NO: 347239 - protein, 388 aa, unidentified
MNVGADKSEPLTAIRTDLGAIFVSLELSRSSWLITSLSPGGGEKMSKHSVPGGDFAGLMARFAQLQEKARLRTGQSFRIIVIQEAGLDGFWIHRALQNEGIESHVVDAASIATSRRRRRAKTDKIDGETLVRALLAYKRGEPRVCAMVKAPTPGEEDRRHLCRERKALTAERVRHVNRIKGLLFSQGISGYQPLRRDRRQRLEELQTGDGRAFPQHLKALVNRELDRLELLLKQIKTVEAARDALLAVRQTAKPAPAAMLLDIRGIGPEFAAILWSEGLFRHFENRRQIAAYAGLAPTPWQSGAVDREQGVSKAGNPRLRTTLIQLAWLWLRNQPRSALSLWFHERVSRNGGRLRKTTIVALARKLLVALWKYVTAGVVIEGVTMKVA

SEQ ID NO: 347240 - protein, 346 aa, unidentified
MLADELDYVIGVDPHRDTHALAVVDVRSGGVVFEATAVADGEGYASVLRLADQHAPGRRAFAVEGTGSFGAGLARFLVSQEERVLEVGRLRRERLSGKSDALDAIRAARSVLGQTRPARPRAGGEREALRALSAAREGAVTARRAGLCQLRGLLVSAPEPLRAELRSLTRAQLLRRLAAVRPEGRQDPELRGTLLALRALARRVKALTVEERELAREIETLTRKLAPQLLAQPGVGPLAAAQVLISWSHRGRITSEAAFARLAGCAPIPASSGQTVRYRLDRGGDRRLNRALHMILVTRRRAHAPTIAYIERRIQEGKSRREATRCLKRYLARNLYRLLENPPMPT

SEQ ID NO: 347241 - protein, 340 aa, unidentified
MEQVIGIDLAKRVFQLHIASPLGKMIKNTVVTRDKLMTFIAQQPPSKIVMEACGSANYWSRQFKRFGHEVKQISPQYVAPFRMGSKNDKNDAVAIVEADSRPGIRYVPEKTQKQQDIQCLHRVRQRLMKNRTALINQIRGLGLEYGIAIPESVHKVEQCLPEHLENAENDLTPLSRELFQELLLELKEQQQRLKILDKRLNPLNAREEDIRRLLTLPGIGPLGASALMIALGESTDFKNGRHFASYLGLVPREHSSGGKVRLLGITKRGDGYLRGILIHGARSVVYRVQKIPDEQCNGLQRWLKGVIARSGLNKAAVALANKNARIAWALVSQQSSYEPR

SEQ ID NO: 347242 - protein, 266 aa, unidentified
MLIIGCDFHPGFQQVAIFDKRTGEIEEKRLQHREEAEPFYQSLSEQQVRVGLEACGHYPWFEQWLAEVGIELWFGDAAKVQAAVVRRQKTDRRDAEHVLQLLLENRFPKIWVPSLEVREVRQLLVHRHKQVQARTRTKNQLQAMALSQGVQKKWKLWTKAGREELEQLPLLPYTAQRRQQLLRALDGLEAEIGELDRRVAEEARQRPEAVRWRTHPGVGPVTALAMVLTLGPAERFGSAKQVGSYFGLIPSEESSGGKQRLGRISQ

SEQ ID NO: 347243 - protein, 402 aa, unidentified
MRHAPTLLIAIGVDVELDQGLGPQRVQLGRLEKWMLKTLTHQDAVALEMTHVPAHSAGATNAFQLYDDLLPHVHSVTLVHPPHVKLITRAQVITDKIAAMILARLHAVGLLPPVWVPPVEVRDQRALLAQRSKMVRLRTQAKNRLHAVLHRHHILPCEGGLFTADAREWWLGLPVTPLERVRVQGDLDTLTFAQSQVDRLQKTLVELAAQDERVVLLVQLPGISIVNALTLLAAIGDISRFPSAKHLVGYAGLGARVHDSGQTRRTGKITKAGRRDLRTAMVEAAHTAARVHPHWGRELRRLEPRLGRNKAIVAIARKLLVAVWHVLTKECADRFTDPARIARKLTQHTNCLGKANRPAGQTVGEYVRRQLDRLGLAADLDAIQWGKRRIPLPPSQLVSADL

SEQ ID NO: 347244 - protein, 358 aa, unidentified
MQNKVKTISFQGQNIYVGIDVHLKSWKVTIMLEHSFYKTFSQDPEPGILSDYLHRNFPGGNYCSAYEAGFCGFSVHRELEKYGIKNIVVNPADVPTTDKERKQKEDKRDSNKIARSLRNRELDAIYIPDREMEELRSLVRYRKTLVKDIGMNKSRAKAFLHYYGIRIPTELDSASQHWSARFTSWLKTVETTTSCGGFVLSEIINTTEQLRLRLLKVERQLREISKSGSLAKTIKLLRSIPGVGLIVSMTLLTELGDITRFPNLDHLCSFVGLVPTTKSTSDKEKTGNITPRSNKILRNSIIESAWVSIRHDPSLALRYNELCKRMQPNEAIVRIAKKLLNRIKYVLKNEKEYVYSVI

SEQ ID NO: 347245 - protein, 357 aa, unidentified
MSPQINQLDFKGQLFFVGLDVHKQNWRVTILSEERELGTFSMDPDPKQLARHLQQRYPGGVYKSAYETGFSGFWIHRKLVELGIDNIVVHAADIPTTSKEKSYKSDSVDSRKIARELRNGSLQGVWIPDQKLQDLRSLCRLRLKLVRDQSRVKNRIKSYLHFSGIAIPERSEIWPWTGAFITWLEGIPFENPPARDCLLGYVQELKNLKTQIAEVLKKLRYYTQEPGIKEVVLDCLRSIPGIGFITAITLYTELGDINRFPKLDALASFVGLVPSVASSGDKEIVHGISDRHNRYLRNLLLEAAWVATSKDPAMLLAYKELSKRMSKQKAIIRIARKMLNRVRYVWRTKKTYVASVC

SEQ ID NO: 347246 - protein, 352 aa, unidentified
MIVLGADTHKRSHTVAAVAAATGELLGEQTVQVGRRGFGALLRWARSLDGDRVWALEDCRHVSGSLERFLIERGERVLRIPTHLSAKARKSARQRGKSDPIDALNVARAALQEGLESFPTALLDGPELDLRLLVDHRERLIRHRVELNSTLLWHLHDLWPELTLPGGALFSKRWSTRIGRRLARAEQTMRVRIARDELRRLRELTLAVRQLEREITALVTQIAPQLLEQPGFGPLIAAKLVGEIAGAQRFATAAKLARAAGVAPIPASSGNTRRQRLDQGGNRQINAALHRVIVTRARCHTPTRDYIARRRAEGKSTREAIRCLKRYLTRHVWRLLQPSHPVPETPPHPSIS

SEQ ID NO: 347247 - protein, 407 aa, unidentified
MRVIGLDVHRSFAVSAVLEDGKLSAGGRITLEREEVLAFAGGLRPDDEVVLEATGNTAAVVRLIAPHVRRVAIANPIQVRAIAWAKVKTDKIDAGVLAKLHASGFLPEVWSPDEETQALRRLVAERAQLVSHMTRLKNRIHSVLHANLIPPYGGKLFSKGGRAWLEAQPLPDDQRRAAVRHLGELDRVGAEVAALDHGLAEQALGDERVRLLMTIGGINAVVAVSLLAAIGDVGRFSSPGKLVSYFGLNPSVRQSGDRPAYHGRITKQGRAHARAMLVEAAWSAAAGPGPLRAFFIRIKDRRGCQIAAVATARKLAVLVWHVLSKEQDYAWSRPALVQWKRRQLELKAGRPSRRGGNTPGPARDYSLKTTRDKEREWLNMAEEEYRRFVSGWKDQPPADRKKPKRTH

SEQ ID NO: 347248 - protein, 450 aa, unidentified
MPTAELDFAAFIAIDWADREHAWAMQEAGCTQRETGKLEHTPEAIEAWAMHWATRFSGRAIAVALEQCRGALVYALSKFQHLVLFPIHPSTSCDYRKAVFPSGSKDDPKDAGILLDLLTLHRDRLRVLQPDTEQTRKLQVLVEKRRQMVDERTAQTNRITDQLKLYFPQVLGWFDELSAPLVAAFLDRWPTLPQLQQEDPAVVRDFFHQHGSRSSQRIDGRLQEIRQAKALIHDAAIIEPGVLIVRTLLRVVAVLNDGIRTLDKNIQQVSSTHPDYFIFSSFPAAGPAMAPRLLAAFGSRRERYTSAQEVQAFSGIAPVTEASGRQRWIHFRWACPKFLRQTFHEYAGLSIQRCKWARDFYDAQRAKQKTHPAAVRSLAFKWIRILFRCWQSRQAYNETSYLAVRRDRAVPRQATAVAIVPSTRPAACGKHQDFRLKTVGEILKSLIDNA

SEQ ID NO: 347249 - protein, 377 aa, unidentified
MEVVHAHCAGLDVHKDTVVACVRHMTDGKVTTTIKTFNTATQELLALSDWLSAEDATHIAMEATGVYWKPVWNILSDGEFELVLGNAAHIKNVPGRKTDVKDAAWLADLMAHGLVSGSFVPDQTTQEMRDLLRTRKQLVRERTSHTQRIQKTLECANIKLDSVVSNVVGVSGRRMLEALIAGQTDPKELAAMAHGRLQATPAELEAALRGRVTAHHRFMLRLHLDQIDSFDEAIARIDKEVKDNDKNFRAAVELLKSVPGVGSLAAEVIVSEIGIEMNRFATAGNLVSWAGLCPKNDESAGKRRSNRAESRSPMAEDYPCSVCLGRRSLQRNLSSCPVRSHPCSSRKSKSHLRRGRFYPYHRLSHAQRRDILRRSRS

SEQ ID NO: 347250 - protein, 436 aa, unidentified
MRGCRCSMIMGFTKPIEHFNLQRKKVITMNTLYVGIDVSSKSNVVYLMLPNGDKHSNFSVANSHEGSTLLVKKIYSALTSHSLDTVLIGLEATSVYGDNLVYFLREDATLAPFNRKIHVLNPKQVKKFHDTYNDLPKNDYVDSFVIADCLRFGRINKEVYMGEYRYKALQNLTRARFFAVQNLVKEKQRFMNVLFKKYSTMTQEKVFSDAFSTTALAVYDEFESAEALANMDLHELTDFIMEKGKNRFPDPDAVAKAIQKAARSSYRLPKTMNDSVNQVLSISITSMKALESQIKEFDKAIKAQMELLPNVLISIPGIEPVYSAGIMAEIGEIDRFNSQAALAKYAGFVWKQHQSGGFEAEVTRLIPSGNRFLKYYLCEAAFSLVRCDKEYSDFYHLKYKEVNRCQHKRALTLTARKFMRLVFRLLKDNRLYCPAK

SEQ ID NO: 347251 - protein, 357 aa, unidentified
MLSMGDSAPRKGADAMTFVGCDLHTRMQQVAVLDTGTGEVSEHRLPHDGLTVEEFYAALPQPVTIGIESTGSAVWFHTLMQRLGHTLLVGDAAKIRAMVVRKTKTDRRDALHILDLLRHDRFPTIWVPDPATRDLRALLTHRMRLVRIRTMVKNGLHAIALNSRLTCGSKLLRQAGLVQLQALALPPHTAQRRDQSLELLAGLTTQIRVLDDAITTAAGGHPEAPRLMTHPGVGALTALTTIVVLGPTSRFHDSKHVVSYVGLAPALNASADKYHLGHITKQGSPLLRFVLGQAAAHAARMDPDLKRTYGALVHRRGRPKAKVAVARKLLVRLFIMLRDRIDYDEFRRRGRPAPAAA

SEQ ID NO: 347252 - protein, 348 aa, unidentified
MTLVGCDLHARDQQVAVLDTATGEIQERRLVHEGSSVEQFYAALPGPVTVGIESTGYALWFHALLHRLGHQVIVGDAAKIRAMVVRKTKTDRRDAAHLLDLLRHDRFPTVWLPDPAVRDQRTLLAHRMRLVRMRTMVKNGVHAIALNYRLALGPSLFTRAGVAQLQALSLPPHTSCRRSESLELLSWLNTHIKGLDDQIAKAAAAHPEARRLMTHPGVGPLSALATVLVLGAVSRFPTSKHVVSYIGLAPAIESSAGKHRLGRITKQGNALLRYVLGQAGQAAIKRDPDLTRLYFAVLHRRGRSRAKIAVARKLLVRLYVMLRDQIDYQTFLHRAPATARRKEMTPTS

SEQ ID NO: 347253 - protein, 409 aa, unidentified
MEVMYRRCAGLDVHQHTVMACARVVDKHKVQQEVETFQTTVKGLAALRSWLQGHGCTHAALESTGVYWKPVWQALEGSLELVLANAHEVRNLPGRKSDVNDAMWLADLLAHGLIRGSFVHPGTVQALRELSRTRTQLRREVTRHTQRIQKTLESAGLKLTGLISDVLGVTGRAILEALIAGESDPETLAQLKRQGIKASHEQLRDALQGRLLEHQRLLLRLHLEQIDALDLATRQIETRMAELLDPFRDCVELLKTVPGIQETTARIILAEIGFDPQRFPTAGHLVSWAGLCPGSDESAGKRRSTRLRKGNRWLRTAMIQAAWAASRKKDSYLQALYHRLRARRGSKKAIVAVAASMLTSIYFMLQRQQEYADLGPAHFDQRQRDRVARRLIRRLEELGLHVEAKSVAA

SEQ ID NO: 347254 - protein, 317 aa, unidentified
MTYIGIDISKSWFDCFNSTTGTHHQYDNTIQGWNEFAGSLTDEAWAVMEASGPYYLGLAGFLADRKIPVSVLNPLVIRRYSQMRLSRTKTDAKDAWLIAEYAAQQPLTRWNPPSSVNQTMRQMISVCQGLIRQRAMLLGQKEAFTNSPATDPLVIDVIDEQIHRISSALSTLEGRLRQLIVTHYQHCFDAVTSIPGIGPKTAVLLICLTDGFSKFDDARKLASYVGICPRIFNSGSSIKGRGSICKLGSSQLRKLLYMCTWTAKKCNPGCKQMYDRMKQAGKPERVIKIALAHKLLRQTYAVGTSGEHFAKEKALAA

SEQ ID NO: 347255 - protein, 387 aa, unidentified
MSVTQNEKIRQVTDTTMVIGVDIASEIRWARAFDWRGLELGKAVKFENSAEGFNFFLRWASELAAEQKKDSVIVGLEPTGHYWFTLATHLQGGDFKLVLVNPYHVKCSKELDDGHPSKSDKKDPKTIAKLVLEGRYVYPYIPQGMYAELRVAMNCRRRVRKELASLQNQIQRWLKIYFPEHGKVFGRFTGAGSMALLHSAPFPSDLISLGVEGISGIWKQMKLRGIGRKRAQRIYAAAQTSVGCTTGMEAARMELQILLEDYDAKLQQYERVMQVVENLCSQIPAVAELLKIQGLGLVTVAGLFAEIGDIRRFESPRQIQKLAGLAITENSSGKHKGPAEISRRGRSRLRAVLFRAAIPLLAKTGSFSFFTVITPHGKIIRCKNSSR

SEQ ID NO: 347256 - protein, 392 aa, unidentified
MYIVGIDIGKNHHEASIVSPEGKQIGHSLRFATTHKGADSLMSFIFNNIGNSSCIFGMEATGHYWYPIYSFLKARGYTIYVINPIQSDSLRKMYIRQTKNDSIDSFLIAEVIRFGQFTTTSMADENILAMRQLCRYRDSVISSRTEIKLRISTIMEQIFPEYEKQFSSLWLSTSMGILEKYLTPENIENAPIDELFEIIKDKSHNKLTMKKAISIREAAADTFGIKIAQDAFSFQLKQLIDRMNFLDKQIEALDCQILEYYEKFDCYLHTIPGIGMIAAATILAEIGDINRFKSSSALVAFAGIDPTVRQSGEFSSTHNHMSKRGSPYLRHAIFLAATTCSFHNSPLNAYYKKKREQGKHHLTATGAVARKLTTVIYAVLRDGKPYEPKSFC

SEQ ID NO: 347257 - protein, 352 aa, unidentified
MKRYSGQKEKGKELYVGVDLHRLRWQVTERTVEEELFCGSIPGCWEALRKRLERYRGWKITVVYEAGYFGFWLYDKLVEYGAECIVTPPSLIPGEYGNRVKTDRRDSRKLADYVAKGLLKRVWVPTPEERGHRQVIRRRRQLIGDRVRTQNRIKAELRFYGIEIPQPGGRWSKAYEVNLHRLKFADRWMRESFQRLLEEYQHLGELIKQQTKVLQELAQTELYQERVKILMSVPGIGLIAAMELLLELQDVARFRRANQLAAYVGLTPSQYSSADKVRMGRITAIGKNDLRGTLVEVAWRLIGKDRAMRKKYERIKARAGSKRAIIAIARITLLRTRRMLLDKRPYIVNKAA

SEQ ID NO: 347258 - protein, 316 aa, unidentified
MNTSSPFVGIDVAKDELVIALGPSRDLVAVPNDESGIRHVLEHLQAASPALIVLEATGGYETAAVAALAAAGLPVVVANPRQVRAFAKAMGKLAKTDNIDAHVLALFAERVRPPIRPLPDEALRMLDALLTRRRQLIEMLVAERNRLAHALPPVEKSLKQHIRWLERRLADVDSDMDQAIQQSPVWRAKEDLLRSVPGVGPVVSRTLLADLPELGALNRKQIAALVGVAPLAKDSGTLRGKRMVWGGRAPVRAVLYMGALIASRHNPVIRDFYQRLVAAGKPKKVALTACMRKLLVILNTMVRNNTRWGERYALSA

SEQ ID NO: 347259 - protein, 392 aa, unidentified
MEVMIETCCGIDVHQKTIVCCILDGPLDTNKPKKSYKIFGTRTSELRKALEWLEENEVTDIFMESTGQYWVPVFNIFSEGNFNMVLANPEHIKNVPGRKTDMKDAEWIAQLGRVGLIQNSYIPAPEVMELRLMTRRRQSYTQKRTQSKNELHNILQRSNIKLTGYLSNIFGKTGQALLQLFIDGEVLTLESVEACLHGRVKASPKDILQAMDGKISLTDRRLLDDSLDEYQFYTRKIKKIEHDIEQYILSHFPLEYELLQSIPGVKQHSAAIILAEIGPSIDAFRTVSYLASWAGLSPGSYESAGKKKSSRVTRGNKYLKTALITSGGMAGRSRDPAFGSLYHRVSNRGTKMKAVVACGHKLLRMIYKILDDKVPYDEKRALGLRQQKLVLN

SEQ ID NO: 347260 - protein, 344 aa, unidentified
MDHFAGMDVSVKETSVCILDDAGKIVQEVKVASEPQALLKVLGNPAYCFKRIGLEAGPLSQWLFSALAEAELPVICVETRHMQAVLKAQINKTDRNDARGIAQMMRVGLYRVVHVKTLRSQKLRMLLTHRKLLQSKAIAIENDLRGTLRNFGLKVGMVGTVRFEARIQELVETIPDLAVLVEPLLVVRRVLREQIVILHRRLLAIVRDDEVCRRLMTIPGVGPVVALTYRATVDAPARFRKSKSVGAVFGLTSSKYQSGEIDWNGRISRCGDEMMRVMLYEAAQSMLHSKKWSWLKAWALQIARRRGMKKAIVALARRLAVIMHRIWVDGTAFRWTREPTAATA

SEQ ID NO: 347261 - protein, 319 aa, unidentified
MSEKYVGIDVSKARLDVAIWPGGESWEEEHTEAGIAGLVEKARKAGPQIVVLEATGGLEMDVAVGLAQAGLAVAVVNPRQVRDFAKSLGKLAKTDRIDALVLARFADAVQPEARFMVDEQQQRLSALVARRRQVIDMRVAEKNRLCTVHEEVREGLELHIEWLSKEIEDLDGKIQEEIQSSPFWREKEQLLRTVPGVGPVASATLLAELPELGHLNRKQIAALGGLAPFNRDSGTMKGKRCIWGGRVEVRTSLYMAALSASRFNPVFKEFYDRLIKQGKVFKVAITACMRKLLTILNAMLKANRPWNPVFAYPKPALVP

SEQ ID NO: 347262 - protein, 345 aa, unidentified
MLIIGCDYHPGMQQIAWFDNESGECGEQRLEHGSGEAERFYRELKGRGVRVRVGIEASGHTRWFERLLAELEMELWIGNPAKIAAQRVRKQKTDRGDAQLLLQLLREDRFPAVWVPSPENRDLRQLLWHRHRLVQMRTRVKNQLHAIALNEGVQRRSRLWSKAGRAQLESFALDRWTARRRHDLLQLFDQLTPQIAELSQAVEQEAERRPEVQRLMTHPGVGPITALAFVLVLGTPDRFRCGKQVGSYLGLIPCEDSSAGKQRLGHLSKQGNTLLRYLLVEAAQAAVRCDPQWRRRFMHLAMRRQRNIAIAAMARKLAVSLYWLWRKAEDPPAAFQSGSHVGQLD

SEQ ID NO: 347263 - protein, 429 aa, unidentified
MNYTQNEKIMQVKVSTLVVGVDIAKNRHAARAFNFRGIEYDKAIFFENNEAGFKKLLHWISRVSEEENKTNVIVGMEPTGHYWLPLEEYLRRKTDFLRVVVNPAHVKKSKSLDDNSPTKTDRKDAKVIAKLVIDGRYSIPHMPEKEYADLRVAMTHREKLVKDIVNLSNKIQQLIDKYFPEYQTVFKKWSGKASIAVLKELFLPELILKKTDEEIVEIFKKGANRSVGIKRARKLKKAALNSIGIKEGGEFTRYELRNLLEQYELLNNQKELLEEKVEKLFNSMEEAKYMESVKGVGIITVAGFIAEVGDINDYDHPKQIQKLAGLNLKEHSSGKHLGQTRITKRGRPRLRALLYRVMLPILAKNQEFRQLHEYYTTQRDNPLKPKQSMIALACKLIRIFFALGQKHVMYDGEKLMNDIDRNLDLQEVA

SEQ ID NO: 347264 - protein, 350 aa, unidentified
MLIIGCDFHTRYQQIAMLDEATGELVERRLEHETGQARAFYAGLAPPVRVGIEATGHTQWFERLLTELGHELWFGHAAQIRATAVRQQKTDQRDAAHILDLLLTNRFPRIWVPSPAERDLRQLLWHRHKLVCLRTLVTNQLHAVAMSQGLCRKKKLFTAKGRAELASLPLGPWASRRRAELVHFLDQLDPPIAELDRAVLKEAQRRDDAVRLMTHPGVGPVNALAFVLTIGPVSRFRRSKQVASYLGLNPSEHSSGGKQRLGAISKQGNTMMRWLLVEAAQTAVRFDPQLQQDFQRLKFRRGNAVAKVAIARKLAVRMYWMLRSAADYAQLVRRQGSPGATLVDASPSLG

SEQ ID NO: 347265 - protein, 340 aa, unidentified
MNTTQIGVDLAKSVFEVAVSHIPGRVHERHRLSRTRFRRFFADRAPTEVLLEACSSAHHWGRELQALGHRVALLPAADVARYRDGNKTDRADAKALLEAARNEAIHRVPVKSVEQQALSALHRLRQGYLQTRTARINALRGHLREFGVTIPLGAAQVLPRARAALAEERLPSYLRHALTEVLEEIATLQAKAAALQDQLDRLARQLPEASLLMSVPGVGVLTATALLAFVGDIHRFRSGRDFAAYLGLTPREHSSALSRRLGGITKHGNSYLRMLLIHGARSALRAGHVAACPDDLRTWALALQHRKGHNIAAVALANKLARVCWRVWRDQRPFERRDAA

SEQ ID NO: 347266 - protein, 350 aa, unidentified
MMIIGCDYHPGFQQIAFVDTETGELQERRLEHRGEAEKFYRDLAAQGIKARVGMEASGHARWFERLLSELQFELWTGDAAAINAKRVRKRKTDRQDAQLILRLLLKDDFPQIWVPSGENRDLRQLLWHRHRMVQARTRIMNQLQAVALNEGLRCKKRLWRDAGREQLESFRLAPWASRRRRDLLELLDRLTPSIAELTQAIEQEMEKCPEAQRLQTHPGVGALTALAFVLIIGRPDRFECGKQIASYLGLVPLEDSSGQRRRLGHITKQGNSLLRFLLVEAAQVTVRSLPEWRSKYCHMALRRGRKIAKVAMARKLAVRLYWMMRKEWDYEQLRKFGSHAGKPGHRDGVK

SEQ ID NO: 347267 - protein, 418 aa, unidentified
MQTELSQFTAIIGIDWADKKHDICIQVTETGRREVLQIPHRAEKIDEWARSLYRRYGGPMAVALELSKGPIVAALQKYDFFVLYPINPSSLASYRRTFTPSGAKDDPTDAVYILDLLLRHPDQFRPLEPQSVEMRALMTLVEQRRRLMDDRVRLTNRLRNALKQYYPQALEWFDHIDTKLFCDFIRRWPSAPQARRARKATLEKFFRTHNMNRKTLLEKRIADIKSTVPLTTDEGVVLPYRVLALTLVEQLEVMLVCLNRFDEEIASLAPQHPDFALFNSLPGAGPSYAPRLLVAFGEQRERFGNAAELQKYSGIAPVTERSGQSTWIHWRWQCPTFLRQTFVEWSAQTINKSYWAGLYYYQQRAKGCSYQAAVRALAFKWIRILYRCWITRTPYDEAKYLKTLQERGSPLLKIAETA

SEQ ID NO: 347268 - protein, 348 aa, unidentified
MKYYIGLDAHSTTSTFAVVDENGRCVLRETVKTAEQSLVHVINRIQGERHMTFEESSISQWLYVHLKDKVDKLIICNPTYVAKKQGAKTDFRDALHLAQELRTNHLQPVFHDTSHWMEIRTTVSGYLDIVEEIVRFKNRLKALFRAEAIQTDENSFYKNKSRVKDLKNPSAKFVAEKLFDQVEYLEAEKEKYREVFERNRKKYKPIRNLMTIPGVSIIRANIIAAIVCQPARFQNKHKFWGYCMLVRHIQVSGGKIYGNKRFFGRRELRNVFVGAAENVIRLDGELRDRYDALRAKGVDHKDAKLNLARQVASIALCLLKNNDKYNENYGEYLKERKKLRKEFFEQAL

SEQ ID NO: 347269 - protein, 383 aa, unidentified
MSIAPANSTEVRRYGIIGGTLAAVDKVIKKLAAASIELRIVYEAGPCGFVLCRHLRSQGLECAVVAPSLIPKKASDRVKTDRRDADQLARLYRAGELTAIHVPDQEDEAVRDLVRARTSAMVEQRKARNRLKGFLLRLGFRYTGKSSWTEAHQRYLAGLVIPQPPQQIAFQEYLHAINDATERLARLTQAVEDALPGWKRAPVVRALMSLRGVQALTGMTLVAEVGDFNRFGDARSLMNFFGLTPSEHSSGGSRAQGGITKCGNAHCRRVLTEAAWQYRLKPKVSEAMQKRQENQSQEVRLIAWKAQQRLHQQFGRLAAKKKIVIAATAVARELAGFVWAIACKVKATDQPAAPEIVRTCRGKVYRLDAAKKLAAANKPELTK

SEQ ID NO: 347270 - protein, 340 aa, unidentified
MTPIRIGLDIAKNVFQVHGVDDKGTVLIRKRLRRPDILQFFASLPPCLIGIEACSASHYWARELIRLGHDVRLMPARYVKPYVQRGKSDALDAEAICEAVSRPTMRFATIKTAEQQAVLTLHRARELLVKQQTMLANLIRGCLGEFGIVAPLGIRRVCELIAVINDDADTRILPEARIAMRAVADQLCDLQKRITKLEQAIRAWHRSNDASRRLATIPGVGSITASAIVATVADASEFKSARHFAAFLGLTPKQCSTGGRQRLGRISKQGDVYIRRLLVLGGTSLVRYARGAGGSVWAKQLLARRPTRIVTVALANKAARVIWALLTRGEVYRAPQPQAA

SEQ ID NO: 347271 - protein, 311 aa, unidentified
MDAVFIGIDVSKDRLDVHGRPGVTPFSVTRNGDGIAELIERLRLATPTAIGLEATGGFETVVVAGLAAAGLPVVVVNPAQVRSFAQALGKRAKTDLIDAAVIAHFVEATKPEIRPLPDDETQALSDLVNRRRQIIAMIGAESQRDKRASSRMKKSIGRLLKALQKELDTVDKDIDDAVRGNPVWKQKEALLTSVPGIGPTIARSAIAELPELGSLDRRQIAALVGLAPWTRQSGQWRGKSFISGGRAGIRSALFMGAMVAIKHNPVLKAFRDRLVAAGKPKLVALIATARKLLTIINAILRDNQPWREENA

SEQ ID NO: 347272 - protein, 419 aa, unidentified
MKVEYPICCGVDVHKTFLVATIITTTQGFTPHYSKKRFSTFNNSILQFKQWLLDNNCFDVCMESTGKYWVPVSNFLEDVIHVIIANPKWVKAVKGNKDDVKDSKWIGDLFRLGLVPGSYIPDKPIRILREYTRYRSKLVSCRSSEKNRFQNAFTVCNVALDAVVSDMFGKSATSITDYLIASDSFDPEHCKSLLQKSLKKKADTVFESIEGYQITKEQKERMLMIRSHLEFIEQSTKTLDEKLDNMVAPYQNAITHYCTIPGVEKASAITIISEIGTDLSQFANSKRLCCWAGLTPGNNESAGKKKSVRITRAGVYLKPALVQVAHAAVKSNKQPYYKIKYERISKRRGKKRAIIAIARMILTAIYHMFLTGEEWNPSDLYKIDMPQEMLEKQKEKAIKQAIKLLTAEGIIKSSDISVA

SEQ ID NO: 347273 - protein, 400 aa, unidentified
MSGLKGRFDSFVGIDVSKDKFDACGVTRDEVKLFQFSATMDRKGFEKLKGHLAVVSASSVLIGMESTASYHVNLFSYLVSEGYNVIIINPLLVSNYVKMQLRKTKTDKKDAVVIALFLLANGDTLIQRVTPSLISDLRDLSRQRVSLVDEMTALKINIKRLLNITFPELEHMTLVFTKSMLKLLRRYPSAFALRSADLVQLSQMLIADSYGRKREVFAAELMKAACSSVGTNSHAKEIILKQQVTLLLHLEEALQEITGVLIEMSRKLMEEDMNILTSIKGIGDKSAANFLIEMGGNINQYEGPGKIIAMAGLDPAVYQSGQHEGKGRITKRGNRHLRRIIWLMATRVIHYSDMFNVYYLKRSKEGLPYKMAVLATAHKLIRVIYAMLTQRKTFCPQVNS

SEQ ID NO: 347274 - protein, 398 aa, unidentified
MLSIGIDVSKGKSTVCGMKPGGEIVYTPFEVQHTREGMSELVSLLRGSGEEVRVVLESTGSYHCPVVAALLENGIFVSVVNSLRMKRFCSQSIRRVKTDQIDAMQIALYGLAYWQELQPTRLPENTYRELQLLARQYYQMTSLLIKAKVDFNALCDQVLPGMQELMNDHAGRHKLSDFVLRYRHTTHILEMGETRFRKDYCKWAEKKGYRNRERMAALIFATAQNGIPVLPDAPSTQIVITEAIRVLHTVEASRDAILTQMQALAKTLPEYSLVREMPCIGDTLAPRLIAEIGDVRRFHSKRALIAYAGIDAPPYQSGKFSANNRHISKRGNRYLRKTGYEVMQSYVMHKPANDPIFTFIEKKRSEGKSGKLAMVAGLNKFLRVYYGKVTELYRSLPQ

SEQ ID NO: 347275 - protein, 334 aa, unidentified
MEKDHYIGVDISKKTIDVAIYVKDQAKKGTFPHETFQNTAEGFKDMKRWLRKQGVVLSKSLFCMEATGNYTYELCLFLEQMGVAYSIQSPLHLKRSFGLTHGKNDKVDASRIAYYAYLHREDIKLSKLVSGNVRKLKSLIAERKSLVIEIARCKAQLKETGENAPSPGTIKRTEALQLFLENQVESIEEEMAQTIETDEQMRNNFNLLLSVDGIGIVNAINTIIATHNFEMFDNARQYASYIGVAPFEHTSGTSVRGRTHVEPGAKMLKADLTGAVRSCINHDKEIRKYYDRKIAEGKAYGVVANAIKFKLLLRMFAVIKRGTPFVRKPDFIYQ

SEQ ID NO: 347276 - protein, 422 aa, unidentified
MLAKTQDNEEIIERVAALDIGKAELVCCVRVPDEDHPGRRLQEVEAYSTMTRPLLSLADRLACLGVTRVVMEATSDYWKPVFYLLEAAGFETWLVNAKDVKHLPGRPKTDRLDCIWLCKVAERQMIRPSFVPPPPFRRLRDLTRYRAGLVAARTAEKNRVEKLLEDAQIKLPVVVSDIFGASGRDMLAALVAGERNPKALAQLARRTMRKKITVLEEAFTGYFTDHHAFLLGRMLARVDAITGGIAALDARIEEQIAPFAAAVRQLDEVPGISLAAAHAIIAEIGLDMSRFPTARHLVSWAKYAPGAGESAGKNKGKNSTGHGNTYLARILGNAAAAAGRTDTFPGERYRRIARRRGAKKANVAIGRSILVIIWHLLSDPETRFTDPGAGYHAARTDPERRCRNHVRQLEALGYTVILERAA

SEQ ID NO: 347277 - protein, 354 aa, unidentified
MKKNSIPASEIPELTIGLDLSDRSFQFCELNAKGEIVNEGQLKLDRATLRKYLAAQAKARVALETGGQSAWVKQVIEELGHEAVVANARELEAVTGRSHRTDHHDAQQLARLARVDRGLLNPVELRGAAEQVDLFVIRARAVLVEARTMLINFARGITKTLGHRLPASASHRFVERVREAVPKVLEPALTGLLDVLQEITAQIEDYDAKIEALAVERYPQTRWLKSAPGVGTLTALTFVLTVGEPGRFAHSRDVGPFLGLVPRRRQSGEQDPHLRISKCGDRYLRKLLVQCAHVAMGRFGPDCALRRWALDHARQSRTAKKRTVVAVARKLAVLLHRLWSRQEMFQPFPAAVAA

SEQ ID NO: 347278 - protein, 464 aa, unidentified
MRTDKRLWRNRKAKKELARRLQSENPGLEVVHAHAAGIDVGNGAHYAAVRPDRDLQPVRRFECFTADLYRLADWLQNCGVKTVALQSTGVYWIPLYDILEERGFEVYLVNARHTKNLPGRKSDVQESQWLLKLHTYGLLNNSFQPSSKIRILRTYWRQRLQHVTGAATCVQRMQKALTQMNIQLANVISDLSGVTGQLIVRAIVAGERDPQKLAELSHPRIQASRGEIAKSLEGNWRQELIFVLQQEIEMYDTYQRRVAECDQELQKHLRAFADTVAPVQQELPPKKKKKQNKNNPHFRLADELQRITGVDLTRIDGVDVMVAQTLVSEVGLDMSRWKTEAHFASWLGLCPDNRISGDKVLSRGTRHVLNRAANALRLGASTLLRSQTYLGAQYRRLRSKLGAPKAITAMAHRLARLVYRMLKYGQQYVDKGAEYYERRNRQQQIEFLKKKAARLGLQLTPVYP

SEQ ID NO: 347279 - protein, 356 aa, unidentified
MTKVTANFENQTVYVGLDVHKRSWNAAVFLGDHYLRNIHQPPSPQALHHFLVTHYPGAHYMCAYESGKFGFWIQRHLQQVGIECLVVNPADIPSTHRDEVYKTDSRDARGIGQALCGGQLKSIFVPNFDQEADRQLVRQRKKLWSDLVRCKNRIKAFLDFLGMDVPDRFDNSNWSNNFLLWLRQIEFNQPSNRVTLNYMLDELELLRKQMLSICNTIRKLMRSKKYNRLYYLLRSIPGIGPLTAASLITEIGDINRFNDFYHLNSFIGLLPMEHSSGEKEIRSRITVRKHRQLRSDLIECAWTAKRSDPALALYYSEQLKKGKNGKAAIVKVARKLVSRIRYVWRSQQPYQCSVVK

SEQ ID NO: 347280 - protein, 384 aa, unidentified
MNKHSILFIGLDTHKEFNEVAYIEEHRGAKPVHLGRVSSSKVAVQKLVRQFESKYPGATLHFVYEAGPCGHWIYRLITSLGHCCYVVAPSLIPKKPGEKIKTDKRDALKLAKLLKSEDLTPIYVPEPEDEAVRDLSRAREVAMKDLKDAKYQLKALLLRNNINYRGTANWSQKHLRWLTELVLPHPAQHIVLQEFLHTINERISRLERLDNELTHHVHQWRYYPVVKAIQAMRGVRLLVATGVVAELGDLSRFDHPRKLMSYLGLVPSEHSSGGKRHIGAITKCGNGRARRLLVEGAHTYRYAANISTDMQKRQEGLPKDIIDIAWKAQLRLCKRYKKMIAKGKHYNLVVTAIAREMIAYIWAIAKEVVLTPVNTKLRLARVPA

SEQ ID NO: 347281 - protein, 365 aa, unidentified
MDTIYIGVDFHARQQTICYLKTETGELVTCELKDQDKQKVRAFYAQFQGQVIVGLEASGYSPWFERLLEELGCEVWLGHATEIRRRARWRQKNDRRDAELILDLMLHDEFPRLHRPAVQSREVLRMLRYRQKLIKIRTMSKNSLQAIALQAGLAKGSRLFTKDGQQQLSTAEMSPVMHWQREHWLQLMEPLNQQLLETMGWFKAQSKGDVCITRLRTHPGIGLLTSLCIVHTLQPVSRFRNTRKVAAYAGFDPVERSSAERKCFLGISKAGSRLLRYLLVEAAQTAVRKDEDLKRFYKRLAERRGRPKAKVAAARKLLIRAYIMLRDEIDYAEFRHRAVAARLARRGQGPANVPEVLIGQPASPE

SEQ ID NO: 347282 - protein, 434 aa, unidentified
MPTEFAAWVAIDWADQKHAWALEIPGSSKRESGSLDHTPEAVEVWAMELRRRFGGQRVAVALEQSRGPLVFMLTKYEHLVIFPVHPTVLVNYRKSFRPSGAKDDPSDADLLLDILRLHRDKLRRLDPDTAETRTLQFLVEERRKLVQEKTRYSNRLTAHLKMYFPQALLWFEEIGSNIAAEFLECWPSLEKLQRAKPATIKRFFIDHHSRDPERLAERLEQIRQAVPATTDSAVAQSSSTALVVWAGLLKQVLAALAIYDQKIGELARAHPDYALLKSFPGAGPALAPRLIAALGSQRERYRSAEEIQCSSGIAPVVARSGKQRWVHWRWACPKFLRQTFHEWALHSMARSEWAREYYHRQLAKGKRSNTVIRSLAFKWIRILFRCWKDRKPYDEATYQRALVARRPNQARTGQPVELQWKTVAGFWKISPSGA

SEQ ID NO: 347283 - protein, 348 aa, unidentified
MRFYTKQHKYYCGIDLHARTMYVCILDQTGKTLVHRNMKASAEVFLKVIEPYRADVCVAVECMFIWYWLADLCAQERIPFVLGHALYMKAIHGGKSKNDRIDSQKIAALLRGGMIPMAYVYPQKMRPTRDLLRRRNHLMRKRAELLAHIQNTNSQYNLPQFEKKIAYKTNRQRIGEHFSDPAVRKSIEVDLQLLDFYDELLTQLELSITRTAKAHDPHTWYLLRTIPGVGKILALVLLYEIHDIHRFPRVQEFVSYCRLVKCTRESAGKKFGTKNSKIGNAHLKWAFSEAACLFLRNNQLAQTYHNRLVSKHGKGKALTILAHKLGRAVYFMLKRKESFNMNTFFKPE

SEQ ID NO: 347284 - protein, 402 aa, unidentified
MNCVGIDVSKGKSMIAVMRPFGEVVVSPFEVLHTDSELSKLAGLLKSLDGETRVVIESTGNYHAPVAWLLHDAGLYVSVVNAMLVHDYGNNSLRRAKTDKKDAVKLANYGLDHWLILPRYVPEEDTRLMLKTCYRQYQQYSKVQTMLKNNLISLLDTAFPDANRLFTSPPRADGSEKWVDFVATFWHCECVCGLSKKAFTAKYQKWCRKHGYNFSQDKALDIYASACGRFGVMPKTNTAKLLVEQAISQLQTTSAALAALKQEMQSLAASLPEYPVVMEMFGVGPTLGPQLIAEIGDVRRFHSKKALVAFAGIDAPPYQSGQIDVRSRSISKRGSASLRRTLFLVMGVLLQCAPMDEPVYQFMNKKRSEGKPYRVYMMASANKFLRIYYASVKAYLESLEHD

SEQ ID NO: 347285 - protein, 342 aa, unidentified
MNQVNQSIGIDVSKDAIMCCIGTLESGQHCFSKSKSFPNTPKGFEALLEWSTPGKTSAVFVMEATGVYYENLAYWLDSQGYQLSVLLPNKMKHYAKSLNVKTKTDAVDAQVLSRVGLERTLHYWHMPSAMMREIKFLSREYRETKAKLVVIKNQLHAKKHSFACPLSVEKRLIGQMALLETQLLEIESELRAAAISDPQFYDKVTRLNTIPGISFITIITILAETNAFALIKNAKQLASYAGLDVEHRQSGAKEGKTKISKKGNRFIRNALYMPALCATKHNPHMKPFYTRLCERKPAKKVAVTAVARKLLVLTFTLWKNNQEFIENYTEESRQALKPAYTG

SEQ ID NO: 347286 - protein, 338 aa, unidentified
MTILMGLDQHRAQITAEWVDTSTGEVSRARVAPADRAGVRRFLARFRGQQLEVALEATTGWRFVVEELHRIGAVVHLAEPADTAALRGHKKRAKNDRADARHVRELLMAGRLPESWIPPAHILDLRARVRLRHTLSEERGEWQQRIQSVLYHHGCPQRGDLINQAGLAWLAAQALPACAREQVTAALAMIDALERQLAPLDKELRRYARRQPGCKALMRHYGIGALTAVTILAELGDPTRFSSSREAVRFAGLDITVHASDQRRAPGHLSRQRPPALRWAPFEAAQCARRPNSPDHTYYQEAAKRLGGNRACLSIARKLLKRSYHTLRELGEEALQPA

SEQ ID NO: 347287 - protein, 345 aa, unidentified
MFVAGIDAHATYSVIAIVSNTGQLVQAPIRIKNTEEDRLVELLEPYRPLEVVVETSPAWPWLFDRLEDRGIHFVLAHAKRLRVIAESNYKSDDIDAELLARMRLAGLIPEVHPKSIEQREQAVLLRNRARLVRERTRMVNRIHAQLHNVGLHLERGRLLTQDGRQWVRTEAWPLLGEERRLFIDMQWALIDQIIPMIKTLDRRVERMGREIPAVALLETVPGIGPYRALLIATEAMPIERFRTPGHLVSYAGLAPRSSQSGLRPIRHGSIPAGANRWLRGTFVRAVVSHITHAPDSWLSQSYEQIRQRLGWQVARVATARRLARAVHAMLRTGEVWRDEPVTQAN

SEQ ID NO: 347288 - protein, 386 aa, unidentified
MPKSNDLSKSLVTLDQASTLIAVIEMSESSWLVGAMVPGLRREPRKKLPADEAALLELLQRWRGEAQKAGAKIARLVVAYEAGRDGFWLARWLRARGIEAHVIHPTSVAVSREHRRAKTDRLDLALLKRALLGWLRGEAKHCSMAAIPTLAEEDAKRPSREREKLVGERTRLVNRMKAALARHGIRGFNPKLKKAPQRLEALRTAEGVLLPANTLAELRRDMQRFGLVGEQIKAIEATRLKTLQEAPAEPGHAMVRLLARVHGIGIETADILVREVLARGLRDRRAVARYAGLTGAPDESGKRRREKGLARAGNARVRRIMIQLAWRFLNFQKDSALVQWYQARTEATRKSRKTFIVALARKLLIALWRMVTTGEMPEGLVLRPAT

SEQ ID NO: 347289 - protein, 411 aa, unidentified
MRRVIGMDIHRTFAEVVFWEEGRLRPAGRVSMTRSGLEGFGRGLGKEDEVVIEATGNAMAVVRTLSPYVARVIVANPLQVKAIAHAHVKTDKIDAGVLASLRAADFLPEVWLPDPDTERLRRLVARRNQVVRHRTRIKNEVHAILHAHLIPPCPHADLFGRLGRVWLAQQVMPDDECAAIERHLRELDRLGADLGVLDTQVAQAGSDDPAVKRLLTITGVNLIVAAGLVAAIGDVRRFTSPQKLVSYVGLNPRVRQSGLGLAQHGRISKRGRSHARAMLVEAAWAAAKAPGPLRAFFLRIRARRGHQIAAVAVARKLAVLCWHLLTKSADYQWARQPWSPANCAPWNCKAGQPVRKGNKRGTAYAYNVKALRDAEIELARHAEKAYERFVSQWQRRGTAKQRTGAAIEERR

SEQ ID NO: 347290 - protein, 426 aa, unidentified
MDVIHKCCAGLDVHKKTVHACIRQLTGDGRVIKEQREFGTMTRDLLVLGDWLAAHGVTHVAMESTGVYWKPVWHLLEGRVTQCLCNAQHIKKVPGRKTDTKDAEWLAQLLQYGLLEPSFVPPTPMRELRDLTRQRVQLTHQRTAITNRMQKTLEDANIKLASVASDITGVSGRSMIQAIIAGEQDAEKLAGLARGRLIKKTTDLQIALQGRITEHHRFLLRTLLEQLTHTEQQIASYDDRIDQVIASEVLDASMEAPEALPFAEAVELLDTIPGIDRTSAKAILAEIGTDMSRFPSAGHLASWAGMCPGNNESAGKRKSGKTPKGDRWLRRSLTQAAWAATHTKDSYLGAQYHRLAPRRGKKRAVIAVAHSILVAAYYMLKTHSAYEELGKDHFDQLQPDRLKHRLVRRLEDLGYNVTLDQERKAA

SEQ ID NO: 347291 - protein, 340 aa, unidentified
MTHRTSVIVDHHKSVFVCAVLDEETGELRHETLKARRAEVEPFLTALAGPTRIFVEACRGWEWVSNLADDIGATFKLVNPREMPEIAKSIKKTDRKDVEKMLRRLQVEGELPESRCLSREERMLRSISRERSDVSKNKRKLMVRIHAVIDSHDLPSVKAEFVKPEWRSRMEAALRPDEWLVFEMQLSQYDHALGVIGLLDQRMIEMASQSPYYALLMSIPGMGPVLSSIVIAEVGRMQDFKDARQFAAFIGLVPRVRSSAGKARCGSITKAGPSDLRWAITQAVTVSSRCKSQSAVTKMYHRKRRKGKPARVAICAAANKLARVIHSMLTNSVQFSHKAA

SEQ ID NO: 347292 - protein, 347 aa, unidentified
MRPKLLMENDYILRQCVGIDVSKETLVVTMCMFSFAEEAHYSDVKTFKNNKTGFNQLVKWSRKEAYTDKPLRYVMEATGVYHEELANHLVKIGCTVIIMMPNKAREFAIWEGMISKNDTIDSRVLALVGCVKRSMRPWQPSKEIYHELRAMTRFAQDTKKLRLALKNHLEALEHSHQAEKSVVKHYEAMVSYLDKRLEMNLKNMKEKVASDEALNKKVENIITAPSLGFTSVITVIAETNGFALIQNRKQLTSYAGFDVKDNQSGNVKGTSRISKKGNSRIRAILYMPAVQAQLRSKHLKEAYDRIVQKHPDKKMIAVTAMERRLLLLIYALWKSDKPYDEDHNKKK

SEQ ID NO: 347293 - protein, 313 aa, unidentified
MIIPLRCVGIDVSKQYLDIFDEGLAFPERIANATQAITQIAARWRCDVLVVFEATGVYDLELREVLSQAGIRFARINPARARDFARASGQLAKTDPIDARMLAAFARAMQPATEQVANPARNALAGLAKRRDQLVLMRAQEKNRRSEADSHAMADRIGRLIEVLDSEIAEIEADISALIKAEPEIADDARLMRSLPGVGPVACMQLIAKMPELGHVGAKQIAALAGLAPFNVDSGAFRGKRKIAGGRKRVRDALYMAALNAVRRADPFKVFYARLRQAGKPAKLALIAVARKLLTVLNAMMRDRKPYLKAKPT

SEQ ID NO: 347294 - protein, 356 aa, unidentified
MITIGGAAHKQVHAAVALDDAGQTLSHWRGPNTRAGWTALHAWAVGVGAPRQWGIEGAWNYGRGLAQHLVDADEMVYEVNPRWTAEGRRSARRPGKSDTLDAQAVARLVLREAATLPRVGADDETAVLELLVTERDGAVAEATRLRNQLHQLLLQSDPEYQAHLPAIRTPAGVAALEHYTVPSPRPLDQQRAAAVRRLAQRLQLAMDQAEALAAQIRQRAHEHCSLLAGLCGVSLLTAGALAGILGPGHRFQTDAQLAAYAGVAPLEASSAGRVRHRLNRGGNRRLNAILHRIAIAQARSSPAARTYLARRASEGKTRREAMRALKRFLVRALWRLWQECVSDSPAQAANSITTAA

SEQ ID NO: 347295 - protein, 321 aa, unidentified
MTRMICGVDVSSAWLDASIGRSGTPQRFANTPEGIAELAAFCHAHQVDRVAMEATGGYERQAFALLSEHGLQVAILNPRAVRQFAQSMGRLEKTDSIDAAMIAWFAEVKRSQPNLLSQPEQQQLRALVTRLRQLTDLRTAQKNQQRLITDPRIQASFTEILDLLKRQISSLAEAIAQHIHADPLWRELDLAFRSIKGVADRTVARIMAEMPEIGTLSNKAASKLAGLAPLAQDSGKHQGKRAIRGGRATVRDLLFIVASVCGRHEPDFIAFRQRLAAAGKPPKVVRIALAHKLLIRLNAKARDARHRLHASTKSQPPAYAA

SEQ ID NO: 347296 - protein, 346 aa, unidentified
MLYAGLDLSRKRLDFCLLDELGERVEVGAVPPDVDGLRGFAARVGRFGEPVRAAIESMNGARFVRDQLELDGWTVEIADAAKVKGLAPLACKTDRIDAWVLAELCRRDLVPAIWLPNLQVRAERERARFRLHLVRHRSSLKQRVHAVLLAHGQPCPVSDLFGVRGRRLLERLDLPEPWAGTVAATLRLIDELDREIAACERELQRLGADHPYVPLLRTIPGIGWVLAYTIAAEIGDINRFASPSKLAGYTGLCPRVYQSGDSDRRGPLAKQGPKYLRWALIEATSHACRHPAYRARYQRTKQRLGKQRGAKVAQVDLARRLAEATWYMLSRNEPFAPKGAANPLAA

SEQ ID NO: 347297 - protein, 378 aa, unidentified
MGKYTTYVGMDVHARSIDAQAMNIETGEHFRKTFTGCPSAADVAEWLGTLPQPVYSAYESGCTGFWMARELTVLGFACDVIAVSTLPKSTKDKQHKCDKLDAKAILREVANPASDYTTVWIPDEKTEAERDLVRAYRAAVDAAKHAKQRLLAFLQRHGRVWCEKTKAGRAKKAWTREFDAWLNNIAFQEISAEKTFEAYRRQVRDACREVKELKALVRELAGSSEHKPYIDALTLLKGIEVENAMLARVEFGLFSRFDTGRKTSCWLGTIPSNGSSGPAESHGHITKAGNKHLRRALIEGYSGIAAWKSGRKAVPEGIGVSGAVQAIAAKANARLYERYTHLRTCGANANKAKVAVVNELVRWIWVIGCAIEKEQANA

SEQ ID NO: 347298 - protein, 436 aa, unidentified
MEEVEDEPLFAERVAGIDIGKREIMVTIRVPSDTRRGRRQQETREFRAVRKDLLALADWLRAWGVTKIGMEATGDYWKPVYFLLEREGFDCVLYHAAQVKALPGRPKTDKLDSAWLAKITERGSLASSFVPPEEIRRLRTHTRYRRHLVQARTAEKARCEKLLEDAHLKLSSVITDIHGVSGREMLAAIIAGQRNPKVLAQMARTRMRGKITQLEEALDCSFFTEEHAFVLAMMLANIDHLTAQIKELTGKIEALCQPYLHQIAQLDAIPGFGVITAQDIIAEIGVNMAVFPTAGHLCSWARQAPQVSQSGGKRKGKNATGRGNPYLGGALGESAVNAGRTQTFLGTKYRRLVRHMPKKKAQGAISRTQLVICYELLSDPEAVYQDLGTDHYERRANIRREVRSHARAIERRGYKVILEPIEPGLDPDILPVTKAS

SEQ ID NO: 347299 - protein, 411 aa, unidentified
MDTIVERPGALDVHKAQVTACVRTPGAGRVREAHFAEFQTTVAGLLTLRDWLAAHGVTQVTMEATGVYWKPVWAILEDDFELLLVNARHVKQVPGRKTDMSDAAWLCQLAEAGLLRASFVPPKPIRALRNLTRYRKTQIQERAREANRLHKALEDTGIKLDCVASDILGVSGRAMLDALVSGTTDPQVLADLARGRLRAKLPALREALQGRFDRMHALWIGSILAHIDFLDEQITGLTEMIAEQIAPFEKAVELLCTIPGVQRRTAETIIAEIGIDMSIFPTAKELASWAGQCPGNHQSAGKRRSGKTRNGSKWLDWGLEEAALAATRSKDTYLAAQYARLRPRRGHKKALGAVKHSIIVACWHMLSTGEIYNDLGGDYFQRRDPTKTTKRLVAQLERLGHTVTLHDAKAA

SEQ ID NO: 347300 - protein, 341 aa, unidentified
MGIAVLGIDLGKNSCSVVGLDGTGQVILRRRMQRKSIAVLGAKLSPCVIAMEACCGAHHLGRVLSTLGHTVRLMSPEYVRPYVKAQKNDDRDAEAIAEAATRPTMRFVALKSEEQLDMQTLHRTRDRAVGERTSLMNQLRAILLERGVIVPQGRARLRLRVTELLRQSTEQLSSRIRLLIEDMLAAWQALDERIAAFDAEFAAEAKRNESARRLTSIPGIGALNATALVAAVGDAQTFARGRNLAAWLGLVPRQATTGGKPRLLGITKRGSKYLRKMLIQGARAALPTLSRGNTRLGQWLRGLLARAHSNTVVVALAAKMARIVWALLRYGTTFEPQVIAV

SEQ ID NO: 347301 - protein, 331 aa, unidentified
MSNYSNAIGIDVSRDKIDVRDYKVENHKEYPNNESGFKQLLSKARKDHGNELKGIIICFEHTGLYSLPLSVFLSQKKIAYTMVSGLEIKKSLGMARGKNDKIDAYQIARYAYLRREEIKEFELPSEDILKLKGLLSLRERLVKHRASYLGHLKELKAFYQKGKNPLLFKTQQDMVKELSIQIKRIESEILEIIKNDPKLKRLYSLVSSVKGVGLIVGVTLLVYTNGFTAFETWRKFATYAGIAPFSDESGTCRKKPMRVSHMANKRVKALLTNSATSSILHNPEMRIYYEKRISEGKSVMSTINVIRNKIVARVFAVVKRGTPYVDTLGYV

SEQ ID NO: 347302 - protein, 338 aa, unidentified
MPLYGGIDLHANNSVVVLLNEQDQVIYQRRLANHLPTILEPLARYQADIKGVVVESTYNWYWLVDGLMEAGYRVHLANPAAMQQYSGLQYTDDHSDARWLAHLLRLGVLPEGYIYPKAERAVRDVLRKRSHLVRQQTATVLSLQNIIVRNTGVRLSAKRIHAVPLEEIERLLPEPEQVLAVTSSLAVLHCLEQQIKTLEQLVHTRLKHTPAYEQLQTVAGIGTILAQTIVLETGDIRRFPTVGHYASYCRCVQSTKISNGKRKGQGNVKNGNPYLAWAYMEAAQFAIRFNPRVQRFYQRKQAKSPLMVARKAVAHKLSRACYYVMRDLLPFDIHRAFG

SEQ ID NO: 347303 - protein, 353 aa, unidentified
MNDDKYIAFDLHQSTTVTSVLNSTGRELDGSIIATKAQAILSYLEGFRGRLHLTFEEGTYSAWLYDLLQGRVAELIVCDPRHNALLKEGSKTDRGDARKLADLLRTGMLRAVYHGSRSLRNLQELARAYQALVQDTTRVMNRLKAFYRSRGIDCAGHGVYSPKQRESWLERLPAGASRLRAQLLHEQLEQLRRLRRRAGSALLAESRKYTVAARLREIPGFGPLRVALLIARMQTPHRFRTRRKLWTYAGLGLVQEGSSEYGWVEGHAVRRPRAVQLRGLNRNHRPGLKEIFKSAALVAIRQPGAFQDYYQSRLQRGADPAILRVTVARKLAALVLSLWKKGGRYRAEGVKQA

SEQ ID NO: 347304 - protein, 397 aa, unidentified
MIAVGIDVSKAKSTVAILNGDGSIRAKPFDVHHVADELQALVDYIKRTSEPPTILMEPTSHYHYPLLKAFQEAELPVCLINPYQMKKYGDTELRKAKTDKRDSLRIAQYALEKSYSLIPYTPLDQKYEDLRFLSRQYSQRISTLTVAKVQLLSLLDETMPGITIILPLKSRDPDNCVLLRFIKRFKSFDVIRKMGKTRFLDSYQVLVKKTKDRFAGSKGLAIYELVLNSVTTRGENPLSAMTQDQCVDLVSTSQKAADEINLQMRIIAETMPEYKVLRSMAGVGDRLGPIILGEIGDIRRFHSGKALNAYAGNDAPPYQSGQFESRNRHISKRGNPALRKACFEVMQALKLTKPQDDPVYLFLLKKEQEGKPYNVAKMAAVNKFLRIYYARAMELYK

SEQ ID NO: 347305 - protein, 348 aa, unidentified
MDYYAGIDVSLEYSSVCIVDASGKIVRESKIASEPEALIAWFASLGYVLTRIGLEAGPLSQWLYAKMKEAGLAVELLETRRVRKGLEVMPVKTDRKDAQGIAELMRLGWFRPVHCKSLGAQEVRAVLTARKLVQSKLLDVENSLRGILRGFGLKVGETTPRSFAGRIRELVAGHPNLETIGEALLSVRDVLLRELNAFEKRVRAMARSDAKTKLLMSTPSVGPIVALTYASAIDNPARFKSSKRVGPHFGLTPKKYQSGETDRSGRITKIGDAAVREALYQAAHVMLTKPLKGCTQLKGWAMRIANRAGASKAKVALARKLAVIMHRMLVDGTTFNPNAKVKAMAVAA

SEQ ID NO: 347306 - protein, 355 aa, unidentified
MNSEKYIGLDVHQATISVAVMDSMGKLIMESILETKAATILEFVAGLRGTLSVTFEEGTWAAWLYDLLKPHVDELVVCNPRKNALLKDGNKSDRIDARKLADRLRLNDLKPVYHGETGVRMLRELARSYLNLVKDQTRVMNRLKAMYRSWAIPCAGRDVYYARHRAEWLGKIREAGVRRRAEHLYQQLDMLQHLRQQARRELLAESRQHPITAKLRQIPSLGPIRSALAVALIRTPHRFRTRRQLWAYSGLALETRTSGEYRCVEGQIQRSKKQISIRGLNKDHNHDLKALFKGAATRASVQPGPFQDFYQRSLAKGIKPTMVRLTLARKIAAITLTLWKKGENFDAEKLKSQAA

SEQ ID NO: 347307 - protein, 320 aa, unidentified
MKSILGIDVAKAKLDVALQLVDGKIRSKVVDNSPQGFAVLSTWLNKHGVTDLHVCMEATGIYWEAVAEFLADAGHTVSIVNPAQIKAFGAAELVRTKTDRVDARLIARFCVAQRPEPWQAPSPAIRELRALVARRDALNSMRTQESNRLLVAREAVRAGIETHLAYLEKAIAEIDAALRQKIDDDPGLKEQRVLLDSVPGLGDKTIPVLLSYYGGAPRFDNAREAVAFAGLDPRQHESGSSVRGKPRLSKVGHAPLRRALYMPAMVATTRTVWGRAFRDRLTAAGKPPMLILGAMMRKLVHVAFGVLKSGKPFNPALHIS

SEQ ID NO: 347308 - protein, 346 aa, unidentified
MNQIIRIGMDTSKHIFQLHGVDSAERPVLRRKLRRSEVLAFFAKLPPTVIGMEACGAAHYWARELRKLGHEVKLMAPQHVKAYVKRNKNDGRDAEGLCEAMSRPTMQFVPVKTEEQQAALMLAGVRQQLIARRTQLSNTIRGYAAGFGLTAAKGLDKIEPLLARIAQDETVPALARELFAVQGQDYAQLQIELKAIEVKLMAWHRANACSRRLAQIPGVGPIGATALVMKTPDPRAFRSGRHFAAWLGLTPKDHSTAGKTRLGKITRAGDEMLRSLLVAGATAVIQQVRRGRGRPSAWLLALLKRKPPKLAAVALANKVARIAWKLMTTGESYDGARMPGAQAFAA

SEQ ID NO: 347309 - protein, 393 aa, unidentified
MRFVGIDIAAERHTVAAVDEAGTVVLKPTTVTEDAAGYAKLLELLGAPADTLIVLEATGHYWKNLVAALVATGFAVAVVNPLRTHRFGGEDLERAKTDTIDALTLARFGQQKRPVASRLPERATEELRELVRFRDRLVQDFGDRVRQLHRLVDLGFPEFVRYVRRLDSELAVAILHDYPTAAAFHGVSARQLANLRYDGRHAVGHVLAAALLKAAEQSVGRHHGDVYAIQVRYICEDLGVLRRRLRKVEADIERLLDEHDIGSLLTTIEGIGPQTAARLIAELGDPAQFRSAAALAAYVGVVPATWQSGKRMPLHRPLSPLGHAALRAKLWMPVLTAVRKNPWLRAHYESLVARGKAPKVALVAAMRRLLVAVYWVAKHRQPFVSRIDAGAPA

SEQ ID NO: 347310 - protein, 391 aa, unidentified
MSLYFVGIDISKYKHDCCIISATDQKVISKFSIKNDKVGFEELITTFNSLSSPEDIRIGFESTAHYALNLELFLENAHHSFMEVNPVLIKEYKKSTTLRRTKTDSVDCESIARWLMTVEYKPHSKGFYHAYSLKSLTRLRDRLVRQRSFYLVKITNVLDHTFPEFKPFFHERLSKTALYLLENYGSAEKIARMNSASYEKLRSISRGKFSPQQFIRLKELAANTVGVNNSIFDVELNSLLTLYKSLVDEIKTLESEINRLVDEVHPHYMSIPGIGPISAAIIYAEYGDISNFSSPNQMLAFAGIEPSVHESGTEAYNGKMVKHGSSQLRYVLINCCLPLIRFDVTFATYYARKRSENKPHRVAITHVAKKLVRVIYALESQDIDFDPKKLR

SEQ ID NO: 347311 - protein, 271 aa, unidentified
MKLHVIGIDLGKTIFHLVGLDSAGRVVIRKRCSRTQLLAFTANLQVQLIGMEACSGAHFLGRALREQGHEVRLMPAQYVKPYVQTNKSDYLDAEAIAEAVQRPRMRFVSIKTEEQLDLQGLHRVHERWVMRRTAVVNQIRSLLLERGLTLPKGRSHLDEHLPCILEDPALRLSGSFRVLLAQLKLGLEQLAARMEQMDRVIQRTAKENEACQRLTEIPGVGMVTATALIAAVGNASAFGKGRKLSAWMGIVPTEYSTGGKQKLLGISKRGN

SEQ ID NO: 347312 - protein, 472 aa, unidentified
MFSWLGHHRVLPVSNARLFGVLHIVDALIHSEMKGCVSLSKFINDFVVGIDVSSEFSVVAMLEPNGSLIRKPFRIDHNPKGFNKLLEILKKEEERLKQKPIYFVESTGIFHLPLFFFLRSNDLKGFVLNPLCVHSTKNFDLRKVKNDAKDAESIARLAKFQEVKYSLVPEPQILALRMMSREYYAMSDMLTEMKNRLCTDLYLLFPGYLDVFGNPFGKASLEILKTYSSPRALSEADCSELALMISKLSRKTVSWAMKKVDALFEITTQALSMPMEFDILSLKIKTHVENIESFQDRLDGLIKQLKMMIQSPDFPAKERLYVELLEDMPGIGFITAVTLIAEIGDFSKFHSPKAFVAFFGIDPSVNQSGKFNGDRNKISKRGTRFGRRVLFTAALASIRTTRNGDAINPVLRDYYHQKCENKKKKVALVAVMHKLLNYIFAVLRDEKPFALRSPKDHQSWRHTKETVLKLVA

SEQ ID NO: 347313 - protein, 327 aa, unidentified
MHYIGIDVSKATFMVAYPLNEKEYKTREFKNTAKGIHEFIRTLEADDHCIMEATGNYSYLLLYLLNQANITTSMENALKVKNFARTMLSVTKTDKADAQLLSLYGERMRPTPFKLPSDSILLLKQKRTAMRQFQKQLHSVTNLKKSLEVLPQKDPATFKSINKIIETLEKQIRKIEEDLIALTHKEFERQMQKLTSIKGIGASLAAAIIISTGGFTYFDNAKQVSRYLGICPTYQQSGTSINVKGHINRNGDSYLRSQLYVASWSMSQHNKECHNLYLRMKEKGKPGKLIMIAVANKVMRQCFAVVKHDTDYVDGFVSQKPQSFNFS

SEQ ID NO: 347314 - protein, 430 aa, unidentified
MEVVHPRVAGIDVHKKVIWVAVRLPGQGPGQRAVTVRRFKTFWRSLQKMAGWLAELGVTGAALESTGVYWWPVYHALAGAGIEVCVCNAAHMRNVPGRKRDITDCQWIAELHEYGLLRPSFIPDAQVTALRQRTRYRKKLIEQRTSEGQRLAKVLEDAGIKIDSVASRLLGKSGRAMIEALIAGERDPARLAGLALGVLRRKTDELAMACDGRFTASHGQMCRLHLDAYDHLTGQIAGLDALIAEAAAPFAAIIGRLVTIPGVGQRTAEVIIAETGGDMARFATAARLAAWAGLAPGDNESAGKRKKAPARQGNRQLRTAMVEAAWATWRTATRPGARFRRLARRFGKGNEKKAAIAVAHTLLSIAWAVMRYDSDYIDAGTDYYEQRDQRNREHLVRYHQNALARLGLQVIITQPGDGTPPPPHNPGQAA

SEQ ID NO: 347315 - protein, 429 aa, unidentified
MTRISVGVDVSKNRSTVCIMDQDGKFIMRPFLVWHSTEELDFLADTLKRLNGEVRVIMESTSIYQYPIALQLKERGLFISIVNAYEMKQFANTDFRGGKTDKKDSRTIASYGISYWDKLVEWQIPKDTYFNLDLLNRTYMNAKKHRQIILQELQHYIDCAMPGMDKELHSLNLSTKKDFMLDFVEKFWHRDEIVNMTEAEFTEVFTAWAKKKGYRPVEGKAAKIYAIAKSCIPYYPANPTVKTILQCIVDKLSGVNRTLVTIVTQMIEEAKKLPEYQIVREMPGVGDPLAARFFGSVGDIRRFKNSKALVAYAGIDSPPDESGDFSSTHRHITKKGSKVFRDTGYEIMMALRAQKRTWEKVRKNPEVYDYMLREEAEGKPRKVAKIAALNKFLRIIYARIKELYDNMALAERAKTKTRSKTRAKTKVTA

SEQ ID NO: 347316 - protein, 408 aa, unidentified
MELLYKRCAGLDVHQKTVVACARIVNDGKVTEEVRTFETTTKGLLELASWLEAEGCTHVAMEATGVYWKPVWHVLESKFELVLANAAHIKNVPGRKTDVADAVWIADLLAHGLIRGSFVPPTPIQDLRALMRTRKQLVREAARNTQRIQKALEDSNIKLTGVVSDILGKSGRAVLDALVAGQTDPEKLTDLTGGRLKAPREVLVEALRGNVRDHHRFLIKLHLDQIDALNKAVRELEARVEEHLTPFRKNVEILTTMPGVSDVAANVIVSEIGYDMARFPTAAHLVSWAGLCPRADQSAGKRRSSRIRHGAPWLKTTLVQCAWAAVRTKDSYLRAQFYRLKPRVGPMKAIIAVAASMLTAAFHMLTTGTKYRELTGSYFDRRDHAKIAKRLVRRLEDLGLKVTVEQAA

SEQ ID NO: 347317 - protein, 484 aa, unidentified
MAKRRKKSTFERLNSGRMNRAQRKELGRKVAAGDPGLTIVNPNAGGIDVGNESHFVAVPGDRDANPVREFGCWTAALKDMAAWLKSCRIDTVAMQATGVYWIALYDVLEQHGIRVVLVNARHTKNVPGRKTDVQECQWLMKLHTYGLMRDSFRLRQDMEYVRTIWRVRDRHVKEAAEEVQHMQKALTKMNVQLANAISDITGVSGQAIIASILQGERDPYKLAELADYRIKASREEVARSLEGNWRADVLFELKQAVDAHLFAQLQMRECDEQLTPYLASLPTRMPDIPEQSKGAPETPAQKRKKAKKPQGNEPRRMDMKEELKRISGVDLTSIDGINVMTAFTVISEVGVDTSRFQDEDHFTSWMGLAPSKDVSGGKIVGRGKKKVKNRVAVALRMAATSLLHSDTYLGARYRHLRRRLPTFKAAVKAMARHLAVLIYRLLTHGQAWVDRGAAQFERRRTERELASLHSKAKAQGFTLVPIEA

SEQ ID NO: 347318 - protein, 363 aa, unidentified
MLYTGIDLHRRSIVVCTVDESGTIIDRRSMKTQPELVIMYFRQWTVEHHAVVESTTGWYWLCDLLRSLGVTIILAHAKYLKAISYAKVKTDAVDAQTLAQLLRMGYIPEAHQLPPEYRAMRDLLRQRMVMEHKRTNIIQRVASIMAQFNRRVEVSPSATGFATFLSGCDLPLEYRMTLLMYHQQCLQATEHRKQLEKYFKTQLRPTPTLQLLMSIPGLGEITGAIIAMETGDIHRFADAKHYCSYCRLVPGSKDSGGKHRHRSGSKDGNKYLKYAFTETAIKAMMYYPEIKEFAVRLEQRSTKAIARTVVAKELAKITYYVLTRKQEFKTFKGIAIEKLRDWPRARKPVRITEEEPASVMSVA

SEQ ID NO: 347319 - protein, 428 aa, unidentified
MIAAEIERCAGIDVGKQRLAVCIMVGPLAGEPRVEYREFGTVNAELEQLRQWLEAEGVTHVVMESTGPYWQPVFNVLEDKVKVYLAKPADVKNRKGHKTDKQDSWWLAHLLRHSMIRPSFVPPRGLRELRDLTRRRRKMIGVASSERNRVDKILQHANVKLSNALSDIFGVSGQLMLEALLEGKAPPEQIAEFAQRSARRKIPEIIAALEGHRMNEHHRRMIRYSLEHWRFLEEHILELDAQIVAKIEALGYTSQWQLLQTVPAIQANTAATVLAEIGPDMGQFEDPKHLSSWAGVVGALLSSAEDRNTVSGARLGGAERKAKTEAYLSSYAPSGQAGNSGAFAGFGWRSGQAQTERWEGVGGKEGEGKREDNAGICVDCRIYFSEDANWGEWRGKEMGPVAAVPDAARKGGGSAEALTPQFALGNQA

SEQ ID NO: 347320 - protein, 384 aa, unidentified
MHKHNIVFIGLDTHKVSTEVAHIEDQRGAKPVHQGKIKTTKAAITKLARQYQSKYPQATLHFVYEAGPCGYWIYRLLTSLGHCCYVVAPSLIPKKPGDKVKTDKRDALKLAKLLKSEDLTPIYVPEDEDEAIRDLSRARETAMKDLKDAKYQLKGLFLRNNITCKVNDNWSNQHLRWLTELVLPHPSQQIVLQEMIQTISERIKRVERLVNELMHQAKQWRYYPVIQALQAMRGIRFLVAVGTIAELGDLRRFDHPRKLMAYLGLVSKENSSGDNRKQGGITKCGNGRARRLLVEGAHSYKHNANVSTELQKRQEGLPKVVIDIAWKAQLRLCRRYKRLMQRGKHRNVVVAAIAREMVAYIWAISREIVLVPIAPKTRLSRVPA

SEQ ID NO: 347321 - protein, 439 aa, unidentified
MKILALDLGKFNTMCCFFDSKSRKHSFLNAVTDRNYLTTVFQSHDIDLVVMEACGPSGWISDLAMSLGLKTLVCSTNEDAWKWTNVKRKTDKDDALKLARMAAMEELKAVHMPSESHREFRSLVKYRKTLDQRINKMKCTIRAWFVNHGIAIDKGEKAWCTGRTLINSFRKPLIECQPEELWKGELDLELTQLDALMQQLDMVVKKLETIGKSDSRIQRIRTIPGVGPRTAEILVACLDDPHRFTNGRQVSAYFGLVPRQFQSGETDRNGRITKRGNPLARTILLECAWASLRYNPWAKAIYERICGKQITRKKKAAIALARKIAVLAWAMLRDKTDWDPQKMLSVAQSFGTIPSPIQAALKGMKPKENSDQRKKRLRKEAREAKSNQAVATASRRQSKIKAKPTGPKSVPRKKKAEPTENFNINPKKPRRARKPVAAV

SEQ ID NO: 347322 - protein, 441 aa, unidentified
MAMRKRDEEAVFPNAAGIDVGASSHWVAVPRQATEEPVREFGAMTDDLNALADWLLGCGVDVVALESTGVYWIPIYEVLERRGLQVWLVDARQMKYVPGRKSDVQDCQWLQKLMSLGLLRAAWRPGDEVCVVRAVVRQREVLLTEQASWVQRMQKALVQMNIQLTEVLSDVMGMTGQAIIRDIVAGQRDPQALARHRSGRIKASAEAVRKALTGNWREEHLFVLTQALAMYDSLAQRIGECDAKTQALLAPLGRQDVDLGKAPKERSKQRAAFAVRQALANWAGVDLTRIDGLGVAAVMKILSEIGPDLSRFANVKHFCSWLGLCPGTKISGGKVLSANTKRSANRVRQALKMAAMSLSRSDSALGAFYRRLCGRMDKPRANTAVAHKLARMVYFMLTRGESFVDKGQQHYEQQQRQRSIAALKRRAATLGFNITPSSATA

SEQ ID NO: 347323 - protein, 343 aa, unidentified
MRFIGVDLHKQTIVLCVIKVVEGKRKVMATKRFPCRDTIGIRSFFEKQGTFRVVVEATANYEWFLLLVEDLAERCVLAHPKKLRIIAESTRKSDKIDAKVLAEFLAIDMIPEAYRPSPRIQQYRVLVRHRRWLQGRITSVKCKLRNKAAYYNADIADLFTKKGQDHLAAIAMSASDRFECLHLQELRQVFESQLKAVDKELAKFRESAPLAEREARAVLSTIPWVGPVTIDIILSELGDWHRFRGAKRVVSYAGLDPGCRESAGKAHQLKISKEGSRLLRWAMVETAWRLVNTCRRWRNIFEKLVRNTGSKKRAIVGVARRILCVIFAMLREGRAYDMPARAA

SEQ ID NO: 347324 - protein, 351 aa, unidentified
MLIIGVDYHPSFQQIAFLDQETGECGERRLTHSDGEAERFYRELKQRGVSVRVGMEATGYSRWFERLLAELGIEVWIGDAAKIKTKRVRKQKTDRQDAQLLLKLLLENNFPKIWVPSPENRDLRQLLWHRHRLVQMRTRIMNQLQALAMNEGQRRRKKLWNEQGRAHLEKLPLATWASRRRKDLLELLDRMNPTIEELTRAIEQEAKKWPEVVQLMTHPGVGPLTALAFVLIIGTPERFKCGKQIGSYVGLIPCEDSSAGHQRLGHITKQGSSLLRFLLGEAAQAAARWDADWRRRYVHLAMRRQRNIAKVAMSRRLAVRLYWMWRNGWEYSEWVKFGSHAGQLGIRHGVN

SEQ ID NO: 347325 - protein, 370 aa, unidentified
MLDTTTFVGLDVHARSIKAVSLDVMTGEVRAATFGYDAGAVAEWVRSVDPGARCVYESGVTGFDLQKRLSGLGVDCVVGAVSKMIKPSADRRRKNDRNDAEFLARMLSVGNVVEVWVPDDECEAARDLTRALEDARDDLSRSKQRLSKFLLRHGLVFDERTPTGRRKGNWTRAHWSWIESIRFAEGADEEVLAYYVDAVRRAAEEKARLEGLVEAEARKPRWRKRVDSLRCLKGVDTASAADLVFEAGEFSRFRNARSFAAWVGLTPSEHSSGESDRRGAITKAGNKHLRKTLVEAAWHYLTCSGRPKDLAKGQAPDRGARRHAAKGVRRLVERREALLARGVHGSKANVATARELACWVWAVGLMAEEA

SEQ ID NO: 347326 - protein, 337 aa, unidentified
MFYAALDVSLRSVAICIIDEFGKVRLERSVPLDVPDIVRCFHEFGEPIHQVGLEAGTLTQHLTYGLTEAGFDVVCMEARQVSAALSAMRNKTDKNDARGIAQLLRSGWYSRVHVKSVESHYTRALLSSRKVIQRKCLDLENEIRGLLKVFGVKLPIRLRGGAFEEAVRGTIESDPALSHALLPMLDARQMLLETFLELDRRVRKAASQDAVTTRFMSVPGVGYVTALSFKAAVDDPARFKSSRTVGAHFGLTPRRFQSGEKDNPGRISHAGDADVRATLYAAANAMLMRSIAWSSLKAWGVRLMKTKGRRRAIVAVARKIAVLLHRMWIDGTEFRFA

SEQ ID NO: 347327 - protein, 345 aa, unidentified
MKITTVGIDLAKSVFHIHGVDERGKTLLRKQLKRGEVLKFFANLPVCLIGMEACGSAHYWARKLIERGHTVKLMAPSFVKPYVKTNKNDRNDAEAICEAVTRPNMRFVPIKSAEQQALLALHCARSGWVKARTAQANQIRGLLGEFGIVVPQGIARLRCTLPELLEDARNGLPGLMRSLLNTLLAHIKVLDEQIQALEREIVVWHRRNEDSRRLERIAGVGPITASALVASIGNAKNFRNGRQVAAWLGLVPGQDSSGGKTKLLGISKHGDVYLRTLLIHGARSVLRHLKSRGDQTQSWVARLVVRRNRNVAAVALANKNARIAWALLAHQREFNPDYVSAAPTR

SEQ ID NO: 347328 - protein, 363 aa, unidentified
MTYYQGLRYNSPVDLKIKFMKQKYVIGIDISKSKVDCAVIDFGYGLKLEKEVFNKEKTLDAFIKTIAKRLQINQEELLVCCENTGIYNRPLEVVCTRLGITLWVEHALKIKRASTDMRGKDDKKDALRIAHYAVRYYDKMVPYQEPSEIVKELNVLTKARDTMLTQKVALENQLREAKTHDTFEYELLARAFKKSISSLSKSIKEIEKQIDLLIQKDEQINQNRQLITSIPGIGNQGAINLIIATNNFQSFKSAKHLACYAGVVPFKNQSGTIVKKERVSKMANKTIKKLLHLSAMAAIRSDKELKGYYLRKVAEGKNKMSVLNAVRNKLVHRIMSVITRKQAYLSQEDYFYQKRNNFACLLT

SEQ ID NO: 347329 - protein, 348 aa, unidentified
MQFYTNLHPFYCGIDLHARMLYVCILDARGEILVHKKIKDSPEQLLNLLAPYIGNIVVGAECMHCWYWLSDFCEHHNIDFILGHALYMKAIHGGKTKNDKIDAYKIAKLMRGGNFPLAYVYPKEKRAIRDLLRRRTHAMRHSAELKAFIKNALSQYNLPVPEKSDLSYTTGRDAMRGYFPNPQVQRSIDMNLRLIEVYDHEVSSIECYVEKLTKHDNGRDYYLLRSLPGVGRVLALTILYEIGTIKRFDSVQKFASYSRLVKCKAESAGKAYGTQGNKIGNAHLKWAFSEAAVLFLKGNPPAQAYLAKLQKRMSKAKALSALAHKLGRCMYFMLKNQTVFDSERFLAG

SEQ ID NO: 347330 - protein, 274 aa, unidentified
MDIMYYIGLDVHKKTISFCVKDASGQVHQEGKIGATRRELDRWIETLPQPRTIAMEATIFTGWIYDHLRPHAQQVKVAHPLMLRAIAAAKKKNDRIDANKIADGLRCDFLPECHMASTEIRDRRRTLRYRQLLVRQMVQMKNRVSGLLMETGVSYNKQRLHKVGYFRELLSSHEEVHESIRPLLKLSRETIVRLQKTEYGLVSSLERDPLLADRIRRLRTVPGVGPITALTWALEVGDVSRFRSIRQAISYCGLCGAEKSSAEGDAHTAVQTAQ

SEQ ID NO: 347331 - protein, 346 aa, unidentified
MEQISRIGMDTSKRFFQLHGVNTAETVVLRKKLRRKEMVTFFEKLAPTVVGIEACGASHHWARLLQSFGHTVKLIPAQLVKPYVKRGKNDMADAEALCEAMSRPTMRFVPIKTAEQQAALMLVGLRDRLIRNRTQLCNAIRGYAAEFGFTAAKGVANVRPLLERIQADEGVPDLARELFAAQAEEYAQLEEQIAEISGKLMAWHKADECSRRLAKIPGIGPIGAALLMMKTPAPELFRSGRQFAAWIGLTPRDHSTAGKVKLGVITRAGDEALRAVLVSGATAVIRHAVGCKGRASPWLIDLLKRKPPKLAAVALANKLARIAWKLMVTGEAYAATSTPIASAAAV

SEQ ID NO: 347332 - protein, 373 aa, unidentified
MPRYSTAFGMDVHLRSTTVCALDAETGEAVTRRFRGNPWGEVAEWMSGFPGPSLAAYESGYLGFAPQRELSGLGVDCVVAAVSKVPRSAADLSSKNDRNDAARMAKAILSHDISPVWVPSPEIEGLRDLAGAHDAATARLAAAKQRLLAFLARRGYAYGGTTPAGNPRRYWTYGFLRWLDKVRPADDGGIRALAALRNEVEAAAETRDDLLAEYRAAVAAGPLSAEVEALQSIKGCGFALAAAFASEVGDFSRFRSGRQVTAYFGLAPKQRSSADSVRLGGISGAGNALVRRLAVEGSWCYAQAGHQPKLMPKGSGVPLEVRMHGRKGSERLLRRREEMLARGMPQAKANAATAAELVRWLWALGAMCREATE

SEQ ID NO: 347333 - protein, 387 aa, unidentified
MLLDHPSDGLAAIRTQFGAIFVSLELSRSTWLVTSLSPGKGEKMSRRSVEAGALAGLLKLFAELKRKAQMRTGESYPIITVQEAGLDGFWLHRALQQEGIESHVVDPASIATSRRRRRAKTDRLDGETLLRALLAYKRGEPRVCAMVVAPSPEEEDRRRLCRERRTLIAERIEHVNRIKGLLFAQGISDYAPIRRDRRARLEALRTGDGRLLPAHLKAQISRELDRLELLLDQIAAVEREQEALLAESKPTGEKAAPDPVTMLLALKSLGPNFAAVLWSEAFYRQFPNRRQVASYAGLAATPWRSGGIEREQGVSKAGNPRLRTTMIQLAWLWVRHQPQSALTQWFKAHSQRGRKRAIVALARKLLVALWKYVTQGVVIEGAVMKTA

SEQ ID NO: 347334 - protein, 421 aa, unidentified
MPNIEIGVDSMVKENFIYVGIDLHKETHTAVMIDCYNQKLGEITFPNRPADFPKLVTKVKKCNTDGKEVVYGLENAYGYGRALAVWLIDKGYLVKDVNTAISHRQAKHRGAMYRKSDSDDAKAIALATLNMLDKLPDACPNDAYWSLGQLVHRRDNIMKQRTRLVNQLHEQLCIAYPSYKQFFNDISRPTALYFWEHYPSRKYLKGKSVEDLRAELVPVSHNKCSTKTCEKILDAVASDKVKNNAYQDARDMVTLSIVSDLQHYDSQLAEVDKMLEQMYKMLGCTLTTIPGVNVITAVKILAEIGDIKRFSNANKLAQFAGIAPLHLSSSGKGKDVATKQGNRRLQATIYFLAIQMVQVSSKGTPRNSVVRAYYEKRKAEGKTSQQALICISRRLISIIYGMLKHGTEYRMPVVENAGEKL

SEQ ID NO: 347335 - protein, 349 aa, unidentified
MRFYTKTHKHYCGIDLHAKTMYLCILDRDGKTVVHRNMRSRPEDFLAAIDPFRDDLVVAVECIFTWYWLADLCKKEGIEFVLGHALYMKAIHGGKAKNDKIDAFKIATLLRGGNLPKAYVYPPEMRATRDLLRRRLHLVRRRANLLAHIQNTHHQYNLEPPAAKIAYKANRVGVAEAFPDPDVRKSMEIDFALIEHYDATLRELELHLERRAKQHDPQAYYRLRSVPGIGKVLALTILYEINDIRRFERVQDFLSYSRLVKCEHSSAGKKLGTGGSKIGNAHLKWAFSEAAALFLRNNPEGQKHLRRLAGKHGKGKALSILAAKLGRAVYLLLSKDRVFDMDRFLARTN

SEQ ID NO: 347336 - protein, 400 aa, unidentified
MNIIGIDVSQGESHATLITKEAEEIAFKFKHNKSGFQILNSYIKPGTIIIFETTGVYSAQLTTYLKNKKVKFYELNPLEAKLRMASLRRNKTGKNDSFKLALLGKTQLAEIKNHCNKQSNSLYESLRILSLRYKQLIKCRTRILNFLRSSLELTFPELNQIFKNAYAVLALQVFRMYCHPDFLVGLTLKEMTTRVYQSVSRRIHKDVIQSYCAQVWLAAKDSYPAVPANSLEIEIISEYCDEIESYNKEIAYIQNKLIKTAVGLDDFKVISSIPGAGQLNSALLLGFTGDIARFDNYKQLNAFLGLDLNRYQSGKYIKGDTINRRGSSQGRAVETDMIRSMLRNQGKIQNHLIDYYYKLKKPPFNKRDKVALIACANHLNRTIINLVHTHQLYNYSKAIH

SEQ ID NO: 347337 - protein, 323 aa, unidentified
MTCAIGIDIAKHTFDIAKPLERDKYRTKAKVANTPEGFKQLDQWLEKHAEPHCWVLMEATSVYHEALATHLHHQGYQVCVINPARIAKYAQSELRRVKTDKTDAKLIARYAQRHLEEMRPWEPEPESIRQLRGLVRRLADLKALAQMERNRLDVSAESAQASIRIHLEHLDGQIALISKAINDHIDNDPDLREQKQLMKTIDGVSDGTAATLLAELGSPLRFDSARQLAAFCGLNPRLQESGIYRGKSTISRTGSGRMRAALYMPALSAMTYNPVIKAMKVRLAERGKTGRLVVCAAMRKLLHLIYGVLKSGQPFDPIRALAH

SEQ ID NO: 347338 - protein, 452 aa, unidentified
MVKKSKRRCDTLPILHPDAAGIDVGASELYVAVSADRDPHPVRSFPTFTRDLHALADWLEQCGIHSVAMESTSVYWIPIYQILEARGLEVYLVNAQHVKNVPGRKTDVSDCQWLQYLHSVGLLRASFRPPGFICAIRSLWRHRSSLIQMAAEHVLHMQKALDQMNLQIHRVLNDITGVSGLKILDAILAGERDPLTLARLCHGGVKNSEDTIAKSLEGDYRPEHLFALRQSLAAYHYYQRLVLEVDQEIKLQLGELHTAATAEKSTPARTKASAYQRRRYEPKTFDLRGELYRIFGVDLTNVPGISAITAQTILCEIGTDVSRFRNASAFASWLGLCPEKKVSGGKVLFTKSRRVRSRVATALRMGAQSLHHAKDYLGEFFRRITRKLGRPQAITATAHKLARIVYHLLGTKEAYNESVFHKSEADTIRRAESRLRRQAAQLGFQIIPSENG

SEQ ID NO: 347339 - protein, 348 aa, unidentified
MIAIGADVHKQQCTLAVQRPDGKLSMLPSMDNTRENWLDLLTQLPPEAQIALEVSTSGHFVMSVLEEAGWRDRAHWVHTAGIDSLRKQKTDRLDAKRLARKLSVMEQDPLPEAWFPPRPIRELRLRARQRCWVAVLRTRVKNRVRSLLQMAGRCAGTNPFTAAGRTWLKEQKLSEATRESVEQLLRFHDFLTTEREKSETSLRGMEKDFPEIARLQTLPGLGHILSAVIWSEIGDLKRFDSPRALVNYTGLAPSLYESGERSVRGGITRQGPVWLRWALITAVNAATRGDNAFARRYRRLRRHKLPNVAKTAVARSIARCAYGVLKHGVDYQEQRWGRKAGIEMEQEA

SEQ ID NO: 347340 - protein, 329 aa, unidentified
MKKDWYVGIDVSKKWLDVAIFVENCDLMGYFHTQVSNDKTGYKELLRWLKEHDVDASTCMYGMEHTGFYSDGLQHFLDKKGYRYTMLEPAVIKHYPIQPREKNDRLDAAKIADYLFRFKETINLSRVPDKTMEELRNLHRERKFYVEDRVVYLNRRQVVGKEEAKRLDKMIALLDKQVESIEEKIREIIRNDESLMENYLYLTSITGIAFVNAVNAIVITQNFTVFKTARDYASYIGVAPHTKKSGTTVRWKPKPYKHCDLTAKADISQAAKIAVVHDVELKRFFERKLGGKEDADTIRKAMNAVKFKLVLRMFAVVKQKHEYRQFATI

SEQ ID NO: 347341 - protein, 456 aa, unidentified
MNPKRSKPRNDRTMPMIHPNAAAIDIGATMHMAAVRADRTPEPIRSFGTFTTDLHRLVDWFTECGVETVVMESTSVYWIPIFELLDARGFAVFVVNARDAKHVPGRKTDVSDAQWLQRLHSYGLLRASFRPKGQIAELRAYVRQRERLLEYAASHIQHMQKALTEMNLQLHHVVADVTGATGLRIIRAILAGERDPKVLACLRDYRCHSSAEAIEKALTGNYRAEHLFALEQALALYNVYQDKASACDARIEAVLKELSISRGRDAGPLPSPRRRLHGKANGPDFDVRAALFKLLGKDLTQIDGLGSYLSLRLIAECGDDLSAWPSAKHFTSWLCLAPSNKISGGKVLSSRTRSGSRASALLRLAAVTVGRTDTALGAFYRRLSARIGKAKAITATARKIAVLFYNAVRHGMEYVDPGSSYYETRYRTRVVENLHRRAKAFGFVLLPLESKAGAVS

SEQ ID NO: 347342 - protein, 341 aa, unidentified
MYPIKAVGIDLAKLVFSIHGVDKHSKCNLRKTIKRNKLLAEITKLPPCIIGMEACSGAHYWAREFTKLGHDVRIMASKFVIPYRQNEKNDANDAEAICEAATRPKTRFVSIKSEEQQAVLSLHRIRQGLIKDRTARINRLRGLLAEFGLIMPKGRYPAQNTIGGILEDAENGLPMLARELLHDVWQSIRTLNEEILKYDRKLYALANQMKAAKRLMSIPGIGEITATAVVATVNDAKHFETSRSFSAWIGLVPRQYTTGGVVRLGRISKRGEKHIRTSLIHGARAVIANCKNKTDKTSMWVKDLVERRGFKRATVALAAKNARLIWALLHSEKEYQVDYVK

SEQ ID NO: 347343 - protein, 364 aa, unidentified
MKRKLYVGMDVHKETIQIAYLTSNSKEILKEQQIKHNEVQIKKFIKKLKLEWNEIHCCYEAGVTGYPLYRYLKSLGVNCILVAPGKIPRQSTDKIKTDKRDAIKLARLMRSGELESIHVPSEEDEAVRDYLRSRDSLRLDLGRNRQRLMKFLLRKDIKYSTTKYWTVSHYKWLNNLHFNNEILQETFNDYYSRVRVQEENLKAMDKKIQEIAESEPYREKVGILRCFRGVDYLTAMFLLSEVCDFKRFKTAGSFMSFLGLVPGEYSSGSKRKQTGITKTGSPRLRRILTEAAWQHRFPGTGSKIITARRSGQPALVVALAEKASLRLHKKFRNLQLRGKTPQVMITAVSRELSGFLWAAMNLVA

SEQ ID NO: 347344 - protein, 346 aa, unidentified
MDYYTGIDVSLECSSVCVVDAAGKVVREAKVASEPEALIDWFRSLGFDLARIGLEAGPLSQWLCAAMKKAGLAVELLETRHVSDAFKAMPVKSDRNDARNIAQLMRLGWFRPVHCKSMSAQEIRAMLTARKLIQSKLQDIENSLRGILRGFGLKVGKTTKRSFATRIGELVAGHPALETIAAATLAVHMVLLREFNGFEKRVRAMSLLDAKARLLMSTPAVGPIISLTYASAIDDPTRFTSSKRAGPLFGLTPKKYQSGETDYSGRISKNGDASVREALYEAAHIILTKPIKGCAQLKSWAMRIARRAGMNKAKVALARKLAVIMLRMLKDNVPFNPATSATAAAS

SEQ ID NO: 347345 - protein, 348 aa, unidentified
MDHYAGIDVSLEYASVCIVDASGKIVREGKVASEPAALIGWFGALGLGVERIGLEAGPLSQWLYAAMKEAGLAVELLETRHVRDAFKAMPVKSDRNDARGIAQLMRLDWFRPVHCKSIGAQELRAILAARKLIQSKLRDVENSLRGILRGFGLKVGHTTARSFAGRIRELTAGQTNLAMIAQALLAVHAVLLREFTALEKRVRIVARQHAQAKLLMTTPAVGPIVALTYACAVDDPARFKSSKQTGAHFGLTPKKYQSGQTDYTGRISKIGDAAVREALYQAAHVMLTKPLRGCSQLKSWAMRIARRAGMRKAKVALARKLAVIMHRMLADIKPFNPAASTAAFAAAA

SEQ ID NO: 347346 - protein, 393 aa, unidentified
MTTNAPQNIPTTAAPQGVKPHRVIKLGVDVHWRQYVVVRQIDGASPQPPQRFTPEEFVAWAKKQTQLADEVHCCYEAGPFGFVLHKRLVALGVKSLVVRPRNWDEYGRKVKTDRRDALALVSCLDRYLAGNTEALTVIRVPSDAEEKARSDTRQRDQLLAERKRLAAEGLSAARYYGHDLPEEWWRAKKFEALRTELPEFLFILLGRFQRLLLAIHDEFTTLSAQIESAQSAELPTGLGALTAQVLDREIGDWNRFGNRRQVASYTGLVPSEDSSGERRFRGAITKHGNPRVRHILIEASWRLQQFQPEYKAVKQRRAAIDEARARSNKATKKKLSVGLARQFIVDWWRIRTGRTTPEKLGLQMSWPAAYVLRGKAPANAVTPAAESAQPAAA

SEQ ID NO: 347347 - protein, 363 aa, unidentified
MMTAPVGGIDPHQDTYTIGLVDTNGVELAHESFPTSAAGYLDGIELLSAHGVERVGIEGSAGWGAHAAIALVAAGFDCREVPAQRSAAQRRSRRLDKTDVVDAVAAARALLAEPTLGPVQTLEVYDPLVAKIEAVLEHRRMLVTVRTLVLHHVQDQLSKLPVEIRDQLTTSGKIEGRLRRLETIDTTVVSTTAGEYRLSWLIPLVDQDRAARRQIRQLEADLDALLDEHGTTLRDEPGIGPIAAATLLVEVGDPFRFARESKFARWSGTGAVAISSGEGDGRPVKHRLDFRGNRRINSVLYIASVTQHRDLDDARVYIDRKLGEGKTRREARRAHKRHLANRVIRRMWKDESRRRETNLRLAS

SEQ ID NO: 347348 - protein, 370 aa, unidentified
MGSIAFVGMDVHKATIAVAVAEGVRGGEVRQLGIFPNRAEVVAKLAGRLAGDGRELSFCYEAGPCGYGLQRQLEGLGHACVVVAPSLIPSKPGDRVKTDRRDALSLAKLHRAGELTAVWVPDAAHEAMRDLVRARATAVRVLGKARQHLQGFLLRHGRIYAGRTTWTLAYRRWLTTLRFAHPAQQIVLQDYIHAVEDAERRVARLAEQITTLLPSWSLAPVVRALQAMRGVGQIVAVTVAAEVGDFSRFANPRQLMAYLGLVPSERSSGGTVRRGGITKAGNALARRVLIEGAWTYRMQARVSRKLHDRIEQLPSAIRDTAWKAQLRLCGRYRHLVAAGKAKVVVTTAIAREMVGFIWAIARQVQLQPTG

SEQ ID NO: 347349 - protein, 419 aa, unidentified
MNSSKTKKVKIINEKTMIAALDIGKEAHFAYFRAPKGKDIKPFSFHNARKGFDTFWMRLCQFKREQGLEETVIGFESTGPYGEPLLHYLRKKPVTLVQINPVHSKRVKELTGNSPHKTDTKDPRVIADIISLGHALTLVVPEGPAAQLRRLTQARERAIRSRTAMSNQLQHLLFVIFPEFVQVFQDISTKTAIYLIQHHPTPESITAMGLESLTEVLRTISRGKVTHSRIKELFEAAQSSTGIDEGKESICMEVSHLASTIAYESCFIEKLEQQMDQSLDQIPYSHSILSIKGIGRITVAGLIGEVGDFTRFHTISEMMKLAGLDLFEVSSGKHRGKRRISKRGRSLMRKLLYFAAINVVKRNGILHEPYQQMLSRGMAPVKALIAIARKLLRIVFALARDNTVYVEDYVHKCHFKLAA

SEQ ID NO: 347350 - protein, 340 aa, unidentified
MVHVGVDLDKRSSQIAVLTEEGEIAQQRLPNDPGRLEKFFAELPPHTPVAIEASGTWWWLVDLLEHLGHDPILSHPKQTKAIAAARLKNDRVDAERLALLLRGDLLPTVWIPSAALREARELVRHRVQLVWLRGIVRNRLHAMLARRNLQPVSTKTWLTQRGQRELQRLPLADTPSRIREDCSALLPLLDAQIRRLDGELGARWGRDPRVQRLTTIPGIGPFIAIVLVLELGDIARFPSAKQVASYVGLTPRIRASAGRIRAGHISKEGNRLLRWVLVLAATQAVRRPGPLRTWFHAVKKRRGKKVARVALARRLAEIVFHVWKHECDYFTVVRHGVVRG

SEQ ID NO: 347351 - protein, 343 aa, unidentified
MSITMIGLDTAKSVFQIHGVNETGKVELRRKLRRSDLIAFFEKQERCTVVMEACGAAHHWARILSGLGHTVKLIAAEAVKPFVKKGKKNDAADAAAICEAASRPDATFVPVKSVAQQGILALHTTRSLLVKQQTMLANAIRGLATEFGLVVPRGLHNLEPLVALVEADEAVPAQARQAIAELYKRFGELATGIQAFETAIVAHARSDATARRLATIPGIGPITASLIAATVVDISRFKTARQFAAWLGLVPRQNSTGGKTRLGRITKAGNREIRKLLVLGATSMVGRAEGWHSALGAWLRDILQRRPVRLVTVALANKMARIAWAVMTRDEVYRPQGGVAAKA

SEQ ID NO: 347352 - protein, 411 aa, unidentified
MDVLYERCCGIDVHKKMVVASLITPDATGTPTKETRTYGTMTADLLEMLDWLVDAGCTHVAMESTGVFWKPLYNLMEGTLEVLVVNAAHMKNVPGRKTDVKDAEWIADLLRLGLLQASFIPDRPQRELRELTRYRTSLLQERSAEVNRRQKTLEGANIKLASVATDIMGKSGRDMLAALVAGRTDAAALAQLARGKLREKLPQLEKALRGQFAAHQRFLVAQQLAHIDGLDDIIERVSAEIAERVRPFEEAIEHIDTVTGVGRRTAEVLVAEVGTNLTRFPTHRHLTSWAGLCPGNNESAGKRHGGKTRKGSPWLRAALVEAAKAAGRSKKTYLGAQYRRIAARRGAKRAAVAVAHSILVSVYYILTRHEPYRELGVAYFDERDRQAVERRLVKRLQGLGYEVSLRPVAAA

SEQ ID NO: 347353 - protein, 387 aa, unidentified
MTQADDLSRCLSAFDQDSTLVVVVEMSERSWLAAAMIPGIDRRPLKKLEPDAPGLLRQVERWRSEAVKAGRTISRAVLAYEAGRDGFWLARWLRGHGIEVHVIHSTSVAVSREHRRAKTDRLDTGMLHRVLLGWLRGERGHCSMVAIPTLEEEDAKRPSRQRESLVGERTRIINRMKAALARLGIRGFKPELRKAPERLDALRTPEGEAIPPNTLAEIRRDMARLALVREQIADIEQARLTRLEQAPDRGPDAMVRLLARVVGVGVETADMLVREVLSRKLRDQRAVARYAGLTGSPDESGSRRREKGLAKAGNARVRRGLIQLAWRFLRFQPDSALAQWYRSRTTGPAGARKTTMVAALARKLLIALWRMATTGSVPEGVVLRPAA

SEQ ID NO: 347354 - protein, 371 aa, unidentified
MGESSKTLFVGLDVHKDTIAVAYAAEDRSTEVVSLGMIGTRQCDIDKLIRKLESKGAPFAIAYEAGPCGYWLYRYLTRRGLSCIVVAPSLIPRKPGDRVKTDRRDAVTLARLLRSGDLSSIYVPTVDDEAIRDLSRAREDAVRDLKRSKVRLKAFLLRQDIRYEGRANWNAAHRRWLARVVCPTAAQQIVFQEYVHTVTEQTERVQRLEVELHTAVKTWRLHPIVEAVQALRGVDLTGAVTLIAEVGDLTRFDTPRKLMSYLGLTPSEYSSGERRRQGGITKAGNGHARRALVEGAWAYRYPAKVSRHLQLRLENVPTEVRAIAWKAQLRLCKRYRLLSARGKHVNQVVVAIAREMAAFAWAIARTVPMAS

SEQ ID NO: 347355 - protein, 340 aa, unidentified
MSLVLQSLLPFPDSCQGMSPHQQGRGTKMTEHCYGGIDVSKDRLDVMVLPERKSFSVDNNAAGYSELVKRLRGLSIAAIGIEPSGGYERAVIRALLAADLSVRRINPNKLRQFGRARGVLAKNDRLDARLIAEYVAIMPTRVVQRDSATEQLAEVVTMRRQLCDEHVAVENQTAQLEDAMLRRLNKRRLARLAADILLLDRRMAQIVVSNANLTRRYELLTSMQGVGPTLAFTLVALLPELGQMSRKQIAALVGLAPYDFDSGRLKGHRCIYGGRLPVRNVLYMAALSACRYNPALKVFHHRLAATNKKPKVIIVAVMRKMITTLNAMLRDNVAWQPRAA

SEQ ID NO: 347356 - protein, 405 aa, unidentified
MAVIVDQQDVDVFIGLDVGKSGHHAVALDRAGRKLFDKALPNDEVKLQEILAGLTGHGRILLVVDQPATIGALPVAVAQAAGAAVGYLPGLAMRRIADLHPGQAKTDARDAMIIAEAARTMPHTLRSIALDDQLLAELGVLCGFDDDLAGQITAVSNRIRGLLTQIHPALERALGPHLDHPAVADLLTRYPTPAALRTAGRGHVRARLKKHAPRAADRLTEAVFTALGQQSVVVVGTSAAGIVLPKLAEQLLSLRRQRDEITAQVEALVEAHPLYRVLTSMPGIGVRTCARILTEVTGKHFASAAHLASYAGIAPVTRRSGTSIRGEHTSRRGNKKLKRAMFLSAFAALHHPPSRAYYDRKRAEGKRHNQALIALARRRSDVLFAMLRDGTLYQDPQPRNLPSAA

SEQ ID NO: 347357 - protein, 342 aa, unidentified
MSIVGAFDVHRRQLTFEYLDTVTGELSRGRVAPADRQHLREWLARFAGQRDVAFALEGCTGWRYVAEELAAAGIEPHLAEPADTAALRGKKRHAKTDQADACHLRVHLMAGDLPESWIPPGHVLEARAVVRLYKDLVDERGGWHQRIAATLFHQGVPAGIGSMCTAEGRAAVTGMDLSAAGRQAVETGLRQIDRLTAELDPLRRQLGMLSRRQPGCAALRTACFGIGPVTSVAIWAELGDVRRFGNSDDVVRHTGLDITVYSSDTKRSPGHLSRQGPPLLRWALYEAAKSAAKPASPDHRYYAAARDRRTAGLATVSVARKLARRCYHILRSLGEEALTPAA

SEQ ID NO: 347358 - protein, 344 aa, unidentified
MTSMHFIGLDIHKKTISYCVKDVSGTVLSEGTIAATRAQLDDWVKTLPAPWTVAMEATMFTGWIYDHLLPHAAAVKVAHPLMLRAIAAAKKKNDRIDASKICDCLRCDFLPECHMVSAEVGERRRTLRYRKLLVRQNVQLRNKVSQMLMESGVVYNKQKLHKVGYFKELMETNPDISRELKPLLAICRETIVRIGKTESALIRSLRRDPLLHARVERLMTIPAVGPITALTWVLEVDDVARFHSVKQAVSYCGLCGAERSSAETIKRMPISKQRNKHLQSVLIEAAKLAPRLSPELALVYDTEKQKGHANRASIAVARKIVAYLLAVDRSGREFVVAGERRAAA

SEQ ID NO: 347359 - protein, 335 aa, unidentified
MSPPRSIPSAGCPGPGIPRSRSRLRRLLGWLGGFGTVALVGIEGTGSYGAGLARHVTAAGIRVVGAARSDRQDRRRQGKSDPLDAVSAARAAQSGRARGAPKGRDGAVEAIRTLMVARRSAAGERTRTSGQARALLLTGPGDLRARFTRHTPAALVTGLASLRPRPGDVAGYAVRVALRELERRAQFPAGQLGRLDELIVPLVTAHAPGLLTVYRLGPRTAALLLIAAGDHPGRLRSEAAWAHLCGVAPIPASSGKVTRHRLNPGGDRQASHALWRIAFTRLGSHPATRAYAERRTAEGKIQGGDHPLPETLRRPRGLPPPPPGRRLTPKAPRTA

SEQ ID NO: 347360 - protein, 420 aa, unidentified
MKPQRNKVCGVDVHKKFLVATILSRDGTKDTKRFSIVIEDLLRFKDWVMENNCEQVALESTGIYWYPIQAVLEGKIDLIVANAYKIKHTPGRKTDISDSEWIAELCLNGMIEPSRIFPKEDRELRRLTRARESYVKEITQEKNRIHHALDSSCIKLASVLSDIFGKSGRYILSCLMRGMSVEDIIEGLPSKRIKRKADLIREAIMSSLEVSQIIQIRGSLKVIDAIQERIDELDIEIRSRVIRRKNDLRIAMSIPGVGFISAAAILAEMGDYADFKNAEQLAAWCGLVPSLYQSADKAISGRITKHGSKHIRRMLVQVAYAISRVKDSRLKRFFLRIQKKKGSKIAAVALARKVLCILFHLLTNQEIYLEGTSKRNRSVKIDKAQPFAEISLKEMIDCIVRAGYVVEKKLTKGEDMVSKG

SEQ ID NO: 347361 - protein, 343 aa, unidentified
MDHFAGLDVSVKETSVCIVDDTGGIVREVKVPSEPAALLQVLKSDDYSFKRIGLEAGPLSQWLFSGLAEGDLPVICVETRRMRAVLQAQVNKTDRNDARGIAQMMRAGLYRPVHVKTLRSQKLRMLLTHRKLLQSKAIAIDNDLRGTLRNFGLKVGVVGIVRFEARVRELLDGFPDLAELVEPLLIVRRTIRDQISILHRRLLAIVRNDDVCRRLMTVPGVGPVVALTYRATVDVPARFRSSKAVGAVFGLTPARYQSGEIDRSGAISRCGDEMMRTVLYEAAQSVLTRMERWSWLKAWAMKIARHRGMKKAIVALARRLAVVMHRIWADGTEFRWSKEAAAA

SEQ ID NO: 347362 - protein, 467 aa, unidentified
MKNYDYNLFVGIDVSKGKADAAVLAVPELRSVKPRFLRKKLSFKFIKSEVVEFLNSVRKYSSDQHCLHTYFALEVTGIYSTNVYSFIKENCNSDEEIHQLNTDFVNKWRESHNISKSDPLDAQTISTIIGTDDDVRYVSDSVFENKNGYQDLKALVHRHYQIKKLHSQETNRLIALCDCYFPELQYVFEPKSAAFLAVLSQYPTSHDIINASKNEVFYLVYEATKHRCSLDKIDKLFNYAQDTLVPHVSDHIRCVISNTVESIMNIRTQLKLIEKDIRKLAATFNVYSLLMSITGCGPLTAAVIIAETGDIFRFKNADHYVSYSGSSPRNKRSGKSVEIMGKISKKGSRYLRHALYMIAEFARRHNPVLKHLFERVKNGNKKRHKLAVIAVANRIARYIYSIMKSESSFVIMHEHIMRLPEETRNTFFNSISLDFPKNTRKQIYQYSDINNEIHRFVYKNEATELIA

SEQ ID NO: 347363 - protein, 371 aa, unidentified
MNFIGIDLHTNKFTCCYRDEHSSVENPQKGKEIKTFDLDAIGLALFAETLTEDTYVLVEATITTFSFVRLIRGMVKEVIIANTYELKQISLARCNTDKIDADKLCRILKAQIMSGEMLVSPVVLASEEIQDLRSLFTTYRLYKKQNVQLKNRIHSLLKEQLHGFTQEKIFGKKGREYIRSISPGTAMHFQVNQLMNRLERDEADVEELEKQVLLQASPFIKEIEILTSMKGISVFIAIAVIADIIDVRRFRNSKAFTSYLRSAPRVSNSNTTVNISGTNKKGRKLAATLIVQSLNHVLDCSPKLLRWYDKKCENKKPGLVRTGLRRRVFAEIFQMLKKGEYHYGRDKQKHEAKMSQYINLLQKSKFILKVA

SEQ ID NO: 347364 - protein, 367 aa, unidentified
MMGWMAPLRHLSAKLLSDRISSEWEPSMGEVTTIGLDLAKHVFQVHGVDAEGATVLRKQLRRAQVLAFFSRLPPCLVGLEACATAHYWGRELRALGHEVRLMPAQYVKAYIKRNKHDAADAEAICEAVERPTMRFVPVKTADQQAAVLLHRGRERLVRQRTGLVNALRGHLAEFGVIAPQGLRNVGKLIAIVRDEGDARLPELARQVLQVLAAQIEQLEAAVAAIEKQLMAWHKSNPVSQRLASVPGIGPIIATAIAATVVEPSGFRSGREFAAWLGLVPRQNSTGGKHRLGGISKRGNQYLRRLLINGASANLLRSKATKADPWVIGLRRRRPPLVVAVALANKTARIAWAVMHRHENYQRVAAAA

SEQ ID NO: 347365 - protein, 387 aa, unidentified
MAQVIIGVDPHKRSATIEIINAREKTVGQGRFGTDRDGYQAMLAAGRKHKDRLWAVEGCNGIGRHVAQRLVADGETVVDVPAKLSARARVFATGQGRKTDPVDAHSVAVVALRTEGLRQVVTDDTTVALRLLVDRRDQLGRARTDVVSRLHHLLLELVPGGAKKDLSAQQARALLGTVRPRDVVGKTRRRLASELIGELVVIDKKIKTAKQELTDLVNNTGSRLMNLTGIGPSGAARLLGDIGDIARFASRAHFASWNGTAPIDASSGDQNRHRLSRAGNRRINRALHIMAIVQLRRDTEGRRYYRRRLAAGKTPMEALRALKRRLSDIVYRQMVADAKLVKTGPGGHAGATLQSSAADPNPKIDTSEKSLPGPATPQPRTTLAAAS

SEQ ID NO: 347366 - protein, 361 aa, unidentified
MLYRTGIGLDVHARSIAATAFIPETGEMVQKAFPYDAGEVAEWAKGMPQPAGCACGSGPTGSGLERKPGKAGVPCVVGAVSKMLRPSGDRARTDRRDATFLARMLAVGNIAGVAMPTEAMEAARDLARAREDCRHDLMRARHLLSKFLLRKGIVYPGKTAWTKAHREWLGRPGFTDPCERLVFGEYPESVRSPGLRRARLDRAIEERAAGEDMAPAVSALRCVRGISTVTAFSIAAEIGDFSRFPDARSFMSFVGLVPSEPSGGESVSRGSITRTGNIHVRTLLVEAAWQHARPLRPMSAAAMGDAAGVPADVAEAAARANRRLHSRAAHLRGRGKPASVVNTAIARELAGFVWALARMAG

SEQ ID NO: 347367 - protein, 333 aa, unidentified
MKVEKVAGIDVAAKTLALAIRTGEQTGKVRELENTPSGHQAVIKALTNAGVQRVCLEATGIYHLDLALALDAAGVSLMVVNPTAAKRFAQALMTRSKSDAVDAGVLAQFAQSMPFQPWQRPATPVLEVRACARRLAALTKARTQAKNQLHAASQTLSTPEIVLADLRLSVTQCDDHIEQLRAGACALIEADAQLREVFTLLNTVKGIAAASAIQIMGEILVLPADMQAKQWVAQAGLDPRHATSGTSVNQKPHLSKAGNRYLRLALYMPALSAARHEKHVNGYYRHLIKDRGLKPIQAVCAVMRKLLHAIHAMLKARQPFDGSRFYALVETPA

SEQ ID NO: 347368 - protein, 360 aa, unidentified
MSEIPRSEIVRAGVDLAKHAIQVHAVDANGRVVTARLLSRDKFMPWCAQLPPGCLVAMEACAGAHHWGRKLLALGLDARLISASFVTPYRLEGRGGKNDANDAAAICEAASRPKMRFVPIKSIDQQSVMTVHRLREGFKEERTACINRIRGLLTEFGLVFPQSPKALRQVLASVLEDAGNEMGGIARMALQRAQQHWQELDEHLAWGDKRIGHHVKSDPQAKAAARLHGIGTIGASALVASVGEFKQFKSGAQFGAWLGIVPRQNSSGGKVSLGRITKRGDDYLRTLLIQGARSAVMTAHKRTDRISRWVVQLRDRVGWQKAAVALANKNARILWAVLTKDVRFNADHVSVKPEVPVATG

SEQ ID NO: 347369 - protein, 338 aa, unidentified
MSIYAGLDVSDKTTHICVVDADGKVLRRDVVASDPDALAKWLKRHCADLVRVVLETGPLSTFLYHGLVERGVAIECICARHAKGVLSARVNKSDVHDAEGLAQLARTGWYKRVHMKASATHIDRAALRIRAQLITARTSMANQLRGLLKLFGLRMGTARTPGRRAERLSAFYAQRPDLKALFAPLIASIEAIEEQLRASNRLLNDRAKADEVCTRLMSVPGVGPITALTFTATIEDPHRFARSEDVGAYAGLVPRRSQSGERNVSGHISKAGDPMLRKTLYEAANVALCQVKRPFALQEWGRKMAEAKGAKRARTAVARKLAALLHSLWLNETEFRWA

SEQ ID NO: 347370 - protein, 344 aa, unidentified
MDNHTQYSGFAGVDLAKKVMQIHFVSGDGEITDKQVKRAEFLDFFRNRSKRLIGMEACGASQDWARKLEAMGHEVHLMSPKAVKPFVSGQKNDYNDAIGIYKAIFNGVRRVPVKSTEIRDLQTLRRIRSQVTKDRVKEINHVRGLLAEYGIVMGKSLNAFNKDISSALEILTERGDVSPLVAEELRTTVEAIKTKIERQKKLDQEIEQLARGCKNYENFLKTPGVGPFTAAMLCVLLCDPAIFANGRQFAAYIGLAPRSRGSGGKNFIIGIPSKFNCDSESRAVFVECAQALARYKNKSPWVDGILRRKPKKVAVIAIANKLARQVWAMANKGESFKQMAVLTA

SEQ ID NO: 347371 - protein, 350 aa, unidentified
MTTKTSDLTIATVGIDIGKNRFHIIGFDERGAIILRQKLSRSQIVVRFANLPQCLIGMEACVGAHHLSRRLQALGHDVRIMPAIYVKPYLKGQKNDFRDAEAIAEAVQRPTMRFVPTKTVEQLDLQALHRLRTRLVRQRTAVINQIRAFLLERGIAVRQGLHPLRQALPDILAEPTSDLSSRMIRMIEGLCEDWRHFDGRIDFLTREIDALVKDDEACQRLLTIPGVGPLTSSAMVAAIGDGSAFRRGRDFAAWLGLVPRQMSTGDRTILGGISKRGNKHLRTLFIQGAWVVLMRAKNWPQYSFGAWLEAASKRLHRCVLVVALANKLARIAWSVLRQGKPYNTTAPIAA

SEQ ID NO: 347372 - protein, 497 aa, unidentified
MSTQSISPEERLRHLEGHYADRVTAFRQRLARVGLDRTLVILLDIGKNTHWATAWTASGLELIRPHRLPATASGLSQFIQRTNGLIADCSPRLVLLGHEPSGVYHEPWARALMDYYAPFLNGAQPAFEYRFFNPYQVKLARQQTHLRQRKTDPRDLAAMLDLMLRGLGQPAFLPTGTELLIRQEVGFIRAQSRLLGHLERQLRQQLDRLWPHAVVNLQQFSKAHPGLPRPTPIVQTRPLQRDRIRVLLAHCPNPYDLIAMSDQQILDLYRQHAGRAGPALLDTLRTWAANAVLLPPDVAAPLAEQLQRLFHQYVAAETLIEEGRARLLPLLPHTPARHIPAIPGLGEMDAAAYLAALGSIHRFHRAAEIWAFAGFDPIADGSGDRPDRVGHLSKHGDPAFRDALFQMGYRTALHYSPVSITFLDAFDRGKSEVEATIHAAHRVNRICFHLMKNDEPFENRSTPQLEAEKARRWREFKAEKKRRGSRRKRGKRRSRRR

SEQ ID NO: 347373 - protein, 391 aa, unidentified
MIYVGIDIAKDKHDCFITNSDGEVLFKAFTIANNWDGFNELYQKIESVMEDVTKVKVGLEATGHYSYNLLGYLIDKGLAAYVINPLHTNLYRKSLSLRQTKTDKVDARTIASMLMSDVNLKSYSNTSYHNEELKSLTRYRFDKVKERAKLKTSISRLVCILFPELEKLVPTLHMASVYAMLSEFPGAKQVANAHLTRLTNLLSEVSKGRYGKDTAITFREAARTSIGSNMPAKSLELKHTIKLIQELDSEIDEIENEIKIIMDEINSPILSIPGINYRMGAMIIAEIGDFSRFDSPDKILAYAGFSPSTYQSGQLDGAYAHMEKRGSRYLRYALYNAAKYVCHWDPTFAAYLAKKRAEGKHYNVAISHAVKKLVRVIYHLEKSNQQYIKAA

SEQ ID NO: 347374 - protein, 346 aa, unidentified
MEHYAAIDVSLEWSSICIIDPSGRIVREAKVSSEREAVVDFFRASGLTFARIGLEAGPLSQWLHAGLVEAGLPTICIETRHVKAALKAMTVKTDKNDARGMAQLMRLGWFRPVHVKTLMAQEIRALLTARRLLLAKLCDLETSLRGILRGFGLKVGTVSKRRFENRIRELVAGQAMLECVVAPVLRVHAALRGEYTILHRTLLAVVRDDQVCRRLMTVPGVGAVVAMTFKSAIDRPERFPRSKEVGAHFGLTPRKYQSGEVDRTGRISKVGDAAVRVVLYEAANIMLTRAARWSSLKAWAIRIASRQGMKKAKVALARKLAVVLHRMWLDGTQFRWGIQAAPGSVT

SEQ ID NO: 347375 - protein, 377 aa, unidentified
MNDLIRIGMDTSKSVFQLHGVDTDERPMLRKKLRRRQVVEFFEKLPRTQIGIEACGAAHYWAHQLTSLGHTVLLLPPQRVKPYVARNKNDAADAEAICEAMSRPTMRFVPVKTAEQQATLMLAGVRDQLVRRRTQLSNTIRGYAAEFGLVAARGLDKIEPLLARIAADETLPALARELFAEQAEDYAELTRKLRRIDARLQVWHRQNALSRRLAEIPAIGPIGASLLAMKVSDPAAFKSGRDFAAWLGLTPKDHSTAGKMRLGVITRAGDESLRRTLVLGATALIQQVCKGRGHPSPWLIALLKRKPPKVAAVALANKTARIAWKLMVSGGRYDRNRAAASRAERGASLAGGFAARPALEANTLPHRTAAPVAVPEA

SEQ ID NO: 347376 - protein, 396 aa, unidentified
MRFAGIDIGGERHAVAIVNDDGALLVRSTLFGEDVFGYQQMRELLGDPQDCLVAMEATGHYWRNLFAFLVTQGFKVALLNPLRTRRFAEEELERTKTDSVDALGIARFAAQKRPAPTPIADEVTAELRELVRMRTRYVDEHSDRMRQLHRAVDLGFPEFTRHVRIKTLKATAILARYPTARSFASVSVRKLAGLSYDGRHQVGEVLARALIESAKVSVGSHHSEAYELQVKYTCSDMESLRNRVKQLDQEIERTLQDHEVGTLLTTIGGIGARTAACLIAELGDPSCFRDAAALASYVGVVPRLRQSGKRAFSGARGLPLGNARLRHRLWMPTLVAVRKNPWLRAHYDRLLAAGKRPKVVLVACMRKLLTAVYSVALNRRPFVPMLPLQVARSSAS

SEQ ID NO: 347377 - protein, 337 aa, unidentified
MPTLTIGLDIAKHVFQVHGVDRGGRPVVQRKLRRAEVLKFFSRLDPSLIGIEACHGSHYWARELTTQGHTVRLLPTQYVKPFLVGGKNDANDASAICAAVSRPGIHPVPIKSAEQQSLQSAHRMRERLVHERTAKSNQIRSMFAEEGFIFPTGIVQLRQGIVALVNDADAGITTLLRRLGSMYLEQLAALQRWIDELAFEIAEIFKRNESCQRLATIPGVGPLVATALFSGVGDPLQFKNGRQFAAWLGLTPKQRSSGGKSKLGGITKHGDTYLRTLLVQGARAVMRFVGRRDDRHSRWIKAVMQRRHVSVAAIALANKTARIAWAVLTSNECFKLA

SEQ ID NO: 347378 - protein, 318 aa, unidentified
MLIHYIDIAKRNFVIAVSSLSKTKTETNNPKGIAHTIEYLKKHKVALVVTESTGGLEIPAAKAIRRAGIAVIIANPRQTHQFAQSQPLTKTDAKDAKMPAFFAQMTAQKEDSQTMPYQPPTEAEEVLEALVNRRNQPADMRTAEKNRLHQVHETQVGSVKQLIAHFDRLIDELDKQIDNHTHTHFDGKAQVAEHIKGIGSITTATLMAMLPELGRLSHKRIAGLAGIAPHPRESGETKFKSRCFGGRSAVRKALYMATVAATRFEPLIRDFYQRLPSEGKPYKVAVTACMRKLLTISNARMRDYFAENDTAENGIRTA

SEQ ID NO: 347379 - protein, 350 aa, unidentified
MTFYIGVDFHPYQQTLCWCDEETGETGALKLFHDIEKVREYYSSLGKQAVIGIEASSRCGWFERIVAEAGHTLLVGNPVSIRKTALSRHKNDRIDAEHMLWLLMRNEFPAIWRRPIQSTEILDVIKLRSSLVGRRTQIYNRLSAVARDIGMPKSLMRTVAAQKVIKEVDMCEASALCRDQLFSTLEHLKARILEVESWLKQKATADTKAQLLMTQRGVGYLTALIFVHTVGDVTRFDKGTKAVTRFAGYDPVERSSAEKIRFGRISKAGPRLLRFHLGQASQIAVRSDARLNAFYKRLSKRKPRAVAKTATARKLLVKLSIMLRDSITAEEFDLRGRTVGNARKNRMVRK

SEQ ID NO: 347380 - protein, 390 aa, unidentified
MDQLIERCCGLDVHRDTVVACVRGPGPNGRRQHEVRTFGTTAVELLALRDWLEAHAVTDVAMESTGVYWKPVFYVLEEAFTCLLVNAAHIKQVPGRKTDVKDCMWIAQCLEHGLLRGSFVPPAPIRELRDLTRHRKVLIQERTRAANRLHKLLEDAGIKLASVATNILGVSGRAMLAALVHGTTDPAVLADLARGKLRKKLPALRQALAGRFRPHHAFLVSQLLAHVDYLDEAITTMSEEVEERLAPFAAQLTQLDTIPGINTRTAEVIIAELGVDMSCFPSDRHLASWAGICPGNNESAGKHQSGKTRKGNRWLRMTLIEAAGAAIRTKDSALGARYRRVMRHRGHKKAVVAVAHAMLRAVYHLLAEGTTYREPGADYYDRHHKRLTST

SEQ ID NO: 347381 - protein, 350 aa, unidentified
MIVLGADTHKRSHTVGAVAAVTGELLGEQTVPVGLRGFGALLRWARSLDGERAWALEDCRHVSGSLERFLIERGERVLRIPTHLTANARRSARQRGKSDPIDALNVARAALREGPESFPAAHLDGPELDLRLLVDHRERLVRQRVEVNSTLLWHLHDLWPELQLPGGALFSKKWSTRISRRLARAEQTMRVRIARDELRRLRELTQAVTGLEREITELVGQLAPQLLSEPGFGPLIAAKLVGEIAGAQRFATPARLARAAGVAPIPASSGNTQRQRLDRGGNRQINAALHRVIVTRARCHPPTRDYIQRRRSEGKSTREGIRCLKRYLARRVWRLLQPPTPPRISPRSIS

SEQ ID NO: 347382 - protein, 428 aa, unidentified
MDQVDRNRLEEFRQLRQEVRHSEVYLIVGIDIAKDRHHAFFGTATGKTLLRRLVFSNDYEGFRKLLDYTEALRVQNGLKKVVYGMEPTANYHKPLGEYLITLGRTVVLVSGVAVARNRESLDGRWDKNDTKDSANVADLISQGKCLYYEYPGAELRGLRGLLSLKKRLKKQEVSYRVRIRNHLIAQYFPEMDRDYERLGAEGLSVVRWCLPASQIAQLDVEPFIERVSSRRILMEKRRRLEGIWEKAGESIGCEGVPGIEHEAKVMVEGLRQIREMIKETEGRIQELCEHFPEYGSLLSIPGFGPDVSAKVLGAIGDPDRFENGKQVLKLAGLDLSADRSGKDSDKAIPEISKRGKADLRYALYQAAFIASTRNQDLMRYYTRKLQGREKEKGIQMKMRVKLSAKMLLIAWTLMKKKEVFNPAYLNAE

SEQ ID NO: 347383 - protein, 311 aa, unidentified
MHLLGDKPSKRTFKNCKSGFKELDEWLMKRGVSKVLVCMEATGRYGEALAEYTYSHGHLVVVANPAFISRHKESLNQHNKTDPTDAEAIADYARCFRNRLRQWKPMDPDHKRLRDSIGQIYLLKKTLTAFRNRGACGLVDESVKDSNLATIRDLEEQLEAMEQLRDRLFEQLPALEMIRKIVDQVPGIGPEISNALAAKIDFEAFPTGRELACFVACSSSEWKSGKQKRRGKQKKAGDKQLRSLLRMGAASALRTPFYRDFVDRLRRKGLSEKQIIGAVARKMLLIAHALVRKKQDFNASFEHPLAKQRAA

SEQ ID NO: 347384 - protein, 321 aa, unidentified
MLWIGIDVAKLSFTAAQRCSQTFTIETFPMTAAGWRSFCDWAPDGGFQVCLEATGPYWLRLADWLEQAAVPYSVANPRKVRRFAQASEQRSKTDSIDAAILLRFAEAFQPDPVLPATGPSRALRALSRRILQLQMELDRERDRLEKSQADPATPEIVLSTHAILHNELKRLINELEFQAKKLILQHSTLEPAYQLLLSIPGIGDKTARTLMAEYGQQLLSASPKQMTRFAGLDVVLFESGSSVRKKPRISKQGNWRVRRALYLAALSAIRYNPTLAPYYQRKRQQGLQPKQALVAVMRRLLHLVYGVLKHQQPYDPDYKMT

SEQ ID NO: 347385 - protein, 431 aa, unidentified
MKNRTSQRIEEITIGTLIVGVDVAKEVHWARFVDYRGVEHGKAVSFKNNRQGYEKILAKIEEICKTKTLRYPIGTVMIGMEPTGHYWKPLANYMMIEGYRVVCVNPYHTKKAKELDDNSPTASDKKDAITIARLVKDGRFFDPYLPQETYGELRGLSNARMSAMKRNNAVKNTIIAILDEYFPEICSVFKDPVKGKASRQVLRSCPFPAFILAMSEGEILAEIKKAVKKTVGIKKVRALISAAQGSIGVGYGLDAARMRLKWLLDELELLEGQVSEIEHAMEAALSKTGYAEQILGIKGIGIVTAASFLGEVGDPLRFQNARQIANYAGYNLTEDSSGKSKSGTIISKRGRKQLRSVLYQMAFTMVGTNAEMKELYRHLTTRKNNPLKKKQALVVVSKKIITVIYILLKKQETYKPELVLGTARRELMKAA

SEQ ID NO: 347386 - protein, 331 aa, unidentified
MDVSKLTLDVSLVWVEGHLRYARGSITVGNTAEGLKELRRWLKQQGVSFNETTKVVMENTGMYHRLLVSWVKKSGLHYCVDNAARIKWSLGITRGKDDKVDAQRIAMYAAKNLQELHWNNASEEKLMLLKDLLTTRESLIQQIQQLRVPLNERKQYLDEKQIQEMEKLLAPAIMGLKKSLKNLNATIQKAIASEMELLRLYNLALSVPCIGPQTAAALLCDTRAFTGYENAGQLSSYCGVVPFGYRSGTSIRGKTKVHPMANKNLKRLLHMCVLSGIRKYPEFKDYYERKIAEGKHVMSVINALRNKLVIRVAAVVKRGEPYVDNYVSKAV

SEQ ID NO: 347387 - protein, 370 aa, unidentified
MLNVTTFVGLDVHARKIVAVALDAMTGEVRSATFGYDAAAVADWVKAIDPKAKCVYESGVTGFDLQKKLAALGVDCVVGAVSKMIKPSADRRRKNDRNDAEFLARMLSVGNVVEVWVPDDECEAARDLVRALDDAREDLKRCKQRLSKFLLRHGLVFNETNARGQRRKNWTAAHWAWIRSVSFAEKADNDALAYYVDAVRQAAEDKARLERLVEAEASKARWKKRVDTLRCLKGVDTMTAADLVFEAGEFSRFKNARSFAAWTGLTPSEHSSGESVRQGGITKAGNKHLRRALVESAWHYLGCSPHSKDLAKGQAPDPGARRHAAKGVRRLVGRRAAMLERGVHKNKANVATARELACWCWAVGCMVENG

SEQ ID NO: 347388 - protein, 348 aa, unidentified
MRFYTKQHKYYCGIELHARSMYICILDKEGKTVLHKNRKTTPEAFLRAIAPYREDIVVAVECMFVWYWLADVCAKEKIPFVLGHALYMKAIHGGKSKNDRIDSHKIAALLRGGTFPVAYVYPRKMRSTRDLLRRRNYLVRKRSELLAHIQNTNSQYNLPELEKKIAVKANREGVAEHFPDPSVRKSIEVDLQLLDFYDRLLGDLERYIEKSAKGHNVHSWYLLRSIPGVGKILSLVLLYEIHDIRRFPRVQDFVSYCRLVKCPRESAGKKFGAKNSKIGNVHLKWAFSEAACLFLRGNEQAQHYHSRLVSKHGKGKALSILAHKIGRAVYFMLKRKEPFSMETFFAPA

SEQ ID NO: 347389 - protein, 457 aa, unidentified
MSKVQRKRPNIQYQEGLKQIRRDAAGLDVGASEIWVDVGIENDAEPVRRFETFTADLNAMADWLKSCGIRTVAMESTGVYWIPVFQILEAKGIEAVLVNASYAKNVSGRKTDMLDCQWVRTLHSYGLLPASFRPAKEIAVLRSYMRHRQMLIETAAAHVQHMQKAMAQMNVQLQHVISDITGITGMRIIRAIVAGERDRQKLAAMRDIRTKANEQTIAKALEGDYRPEHVFALKQSLELFDFYQKQISDCHQEIASHLRTLETKAEQGQTLKPARTKKKKKRNQPAFNIREEAFRISGVDLTEIDGINESATLSLIAEIGVDMSRWQTEKHFASWLALCPNNKISGGKILQRRTRKSASRARDILRLCGQSLMGSRSALGAYCRRMCMRLGEPKGITAAAHKLALLVYRMMKFGRHYVDIGQDRYEQTYKERALKNLARKAKDLGFQLVPQPETQVP

SEQ ID NO: 347390 - protein, 349 aa, unidentified
MKKIVKQVLGIDVAQKELVVCLGRMYDDWTPELYSHRTFANSKKGFDAMVKWVKKLTIDATAVRYVMEATGVYHESLAYYLEGKGYEVSVVLPNKISNYFRTLEVKTITDKTASEAIARFGLERKLDKWKRPKQIFKNLKQLTRERDQIVETRTMAKNQLHAELAEAIPNPSSLHRIKAHIKFLDKQVAEILKEITDLVKQDGQVNESIDVICSIPGVGRLTAATVLAETNGFELIRNKRQLTSYAGLDVKEKQSGTSIKGKPRISKKGNRHLRKAMHLPALAAIRHEKKFKAVFVRLVSKHGIKMKAAVAVQRKLLEMIYTIYSKNKAYDKKYLNQYEAELDKQPSLA

SEQ ID NO: 347391 - protein, 365 aa, unidentified
MFTERTSVGLDVHARSVAAAAIDGVTGELFQTKLTPSYEHVESWIGGLPGPVAVTYEAGPTGFGLCRHLTAAGIRCEVVAPSKLQKPAGDRVKTDMKDAIHLARLLRLDEITSVAIPSVDQEAARDLVRGREDCRADLMRARHRLSKLLLRHGLVYYGGDAWTGKHDIWLRHEALPQLTSRATRLTFDNDYEAVLAVKARRDRLDATIEEMAAGSEFTPVVRRLGCLRGVSTLTGFGLAVEIGDWHRFTGNSIGTFVGLTPSEHSSGESKARGSITKTGNGHARRLLVEAAWHHRARYRVGKTMRDRWDLAPAAARIRGDEGNRRLHHRWVRFIDRKKRNTVANTAIARELAGWCWSLAVLDDMD

SEQ ID NO: 347392 - protein, 412 aa, unidentified
MQQIYGRVAGLDVHRDTVVTCFCRLGPRGGVVFEKERFGTTTAKLRELEAWLTERQVELVAMEATGVYWKPVYYALESRFTVWLCNARNVKKVPGRKTDLTDAEWLADVAAHGMIRPSFVPPPPIRELRELTRYRKTQSAARAAEIQRLEKVLQDAGIKLTSVASRVLTQSGRAMIEALIAGERDGAKLADLAMGKMRPKVPALTEALTGHFGPHHAVACRRILGHLDFLNESIQALTEQIDARTAAFAPVYTSLLPVPGFDRLTIDVIIAETGADMSRFPTPGDLASWVGVCPGSHESAGKRRRVGTTKGNPWLRQALIESARAAARTKGSYFGAQYRQIARRRGPNKAAMAIAHSLITLVWHLLSTGAVYTDLGDDYFASREDPDRRARRLVAQLEQLGFKVTLEAAAAA

SEQ ID NO: 347393 - protein, 457 aa, unidentified
MFRTKRTRQSRELPRVHPAAAAIDIGATMHVAAVGPDRDQDPVQTFRTFTDDLHRLADWFTRCGVKTVVMESTGVYWIPVFEILEQRGFEVMVVNARDAKHVPGRKTDVSDAEWLQRLHEFGLLRASFRPQAEIAGLRAYLRQRERLLDYAAAHIQHMQKSLMQMNLQLHHAVSDITGVTGMAIVRAIVAGERDPAILAAHRDRRCHVTTQTLCQALIGNYREEHVFVLTQALELYDFYQTKVMACDKQIEAILTRLRKAVPAPAHKLPPARRRGRQQNEPVFDARDALHAILGVDLTQINGLGPYLALKLVGECGTDLSAWPTAKHFTSWLGLAPHNKISGGKVLSSKTRRTGNRAAALLRLAAGTLGRTDTALGAFYRRLSARVGKAKAITATARKLATLFYNTLRHGMTYIDPGAGYYEERYKKRVLSNLQRRAKSLGFMLEPVEPGGTQEAVS

SEQ ID NO: 347394 - protein, 409 aa, unidentified
MQEATQHDAVDVFVGVDVDVDVGVDVGRGRHHAVALDRNGKRLYNKALPNDEVKLRALIAELKTHRRLLFVVDQPSTIGALPVAVARAEGVLVAYLPGLAMRRIADLHAGEAKTDARDAAIIAEAARSMPHTPRSLRLADEQLAELTMLCGFNDDLAAQVTQTSNRIRGLLTQIHPALERVLGPRLDHPAVLDLLERYPSPSALAAANEKTLANRLTKLAPRLGKNLAAEIVQVLNEQAVIVPGTQAATIVMPRLAQQLAALRKQRDEIAAEVERLVLAHPFWPVLTSMPGVGVRTAARRLTEAAQKALATAAHLAAYAGLAPVTRRSGSSIRGEHPSRRGNKVLKRALFLSAFAALRDPVSRAYYSCKIQQGKRHNQALIALARRRCDVLFAMLRDGTIYPPKSAPDA

SEQ ID NO: 347395 - protein, 347 aa, unidentified
MRFYNTQHPFYCGIDLHARAMYVCILNQAGETLLHRNMKTTPDAFLKVIAPYRPNIVVAVECMFTWYWLADLCADEDIPFVLGHALYMKAIHGGKAKNDKIDSQKIAVLLRGGMLPQAYVYPAEMRATRDLLRRRMHLARKRGELLAHVQNTNSQYNLPAIGKNLAYQANRDGVAERFADPAVQKSMEVDLSLVSHYDTLLRDVELTILKTAKQHDPNTVYLLQTVPGIGKILSLVILYEIHHIERFPRVQEFASYCRLIKCAKESNGKRSGTSGSKIGNAHLKWAFSEAAVLFLRDNPEGQKFLSRLEKKHDKGKALTILAHKLARAVYYMLKRKVAFDMKRFLHD

SEQ ID NO: 347396 - protein, 434 aa, unidentified
MEEVTGEPLYRDRVCGIDIGKAELYATIRVPSDKDPARRASETRRFATTRRGVLALADWLRCWQVPAAVMEATGDYWKGPFYRLEAEGFECVLADAKQVKNLPGRPKRDPSDSSWLAQCSERGAVRPCFVPDPEFRVIRLHTRYRRDLTEERTREKNRAEKLLESAAIKLSSVVTDLHGVTGRDIMDHLIAGERNAKALAQLARARARRKITELEHALEGAEFFTPELAALLKAMLERIDGLTAEIGKLSEVIERLLAPYEEPLAQVESMPGWGRRSAEDAVAETGAGMSKFPTGGHLSSWGGRTPLDHQSGKRNGRARHKKGNKYLGAITGETAVAAGKTQTREGARYRKLARSRGKNKACVAVGNTQLKVSRKLLSNPGMRYQDLGPDYYERRAQTRRKIAYHVRELEELGLEVTLCRPGPAQDDPEPTQAA

SEQ ID NO: 347397 - protein, 311 aa, unidentified
MDQIYIGVDIAKSWLDIYHPARGARRIENTPGDARSFARAAAREGAWVIFEASGGYDRVLRDGLEVARASFSRVNPRQARDFARAMGVIGKTDRVDARMLATFGQRLQPPQTPPVSPTRQVLLAQITRRRQLVEMRKQEITRLQQTTDRDSRSDIKSLFLLLERRIEKVGTRIAEIIRSSPELAETDRRLQSVPGVGTIVAATIMAELPEIGTTDRRKIAALAGLAPIARDSGQRNGRRVIGGGRATVRTVLYLAALHASRHSTMFRAFRQKLQAAGKPVKAALTATARKLLCVLNSMVADGSYFREVQST

SEQ ID NO: 347398 - protein, 358 aa, unidentified
MKNGNAKNKAVQAGIPVWTIGIDLGDQKSDYCLVNQAGAVIEEGRVATRAKELVELLGQWAGARVVIEASTHSPWVSDLVSEVGQEVVVANMRELPRQRQKTDRADARRLAQWGRVDVAMLKPIWHRPAGERGDLAVLRSRGELVALRTGLVNHVRGLVKSHGGRLPGCSPEAFARRNWAQVPEALRTAVEPVLRVLLSVNEQIAVLNQAIARLCRKYEETRRLQTVPGVGELTALAFRLTLSDPTRFDDSRSVGAYLGLVPARAQSGQQDPHLGISKNGDRELRRLLAQAACYILGPFGPDSALRRWGLQLKQASVQRNGKSKGHRRAMVAVARKLSVILHRMWVTGEDYRPFPQAL

SEQ ID NO: 347399 - protein, 408 aa, unidentified
MNAVGIDVSKGKSMVAALRPMGEVALLPQEFLHTEVGLEQMAYAIIALGEDTRVVMEATGRYHEPVAAALHEHGIYVSVLNPLFIKQSGGGSIRKVKTDKADAMKIAKYGLDNWVDLREYTPMDTVRQQLKLCSRQYNLYMKTVVSLQNNLISLTDKTFPGVNELFSSPERADGHQKWVDFVMTFWHCDCICRVSEKAFTERYQKWCKRKGYHFSTEKALDLYAGSCGHFTTLPKNDNIKLLITTAAQQLLAGKMTLAALRAEMTRLAMQLPEYDTVRAMYGVGQTTAAQLMAEIGDVRRFPRRSSIVGFAGVDPGVDDSGKHIAKSVPTTKRGSPHLRKTLYQIVCTYLRKAPADEPVYQFLDKKRAEGKPYFVYMTAAQNKFLRIYYARVKECLEAFDAQQDIAQS

SEQ ID NO: 347400 - protein, 384 aa, unidentified
MSKHSILFIGLDTHKEFNQVAYCEDVRGQKPTHLGRIPNSKASIKKLCKQLQSKYPYATLHFVYEAGPCGYWVYRLLTSLGHCCYVVAPSLLPKKPGDKIKTDKRDAANLANLLRNGDIEPIYVPEPEDEAIRDLSRAREVAMKDLKDAKYQLKALLLRNNIQAKIKDNWTKQHLRWLTELVLPYPSQQIVLQEYIQTITERMKRLQRLDNELEHNVRLWRYYPVVKAIQAMRGVRLLVAVGVVSELGDLSRFDHPRKLMSYLGLVPSEHSSGGKRNLSGITKCGNTRARRLLVEGAHSYRHSANISTDLQKRQESLSKEIVDIAWKAQLRLCRRYQRLMKRGKHYNLVITAIAREMVAYIWAIAREVVLTPVDVRQRLSRVPA

SEQ ID NO: 347401 - protein, 310 aa, unidentified
MNSEAYVGVDVSKSSLDLNVLPGGQTQQFSNDDKGVTQLVKFLRKVDPTLIVFESTGGLEMLAVSCLVERQLPVVVINPRQVRDFAKATGRLAKTDAIDAGTIARFARDIRPTIRPFKDEQTQALTALNTRRRQLVDMLVAEKNRLHTALKPNHKNIEQHIRWLEKALSDINSDIDQMIKQSPTWRKNDKILQSFKGVGPVTSATLLCDLPELGSLDRKKIAALVGVAPLNCDSGKYRGRRRIMGGRAEVRRSLYMSAVAALRYNPSIKSFYDRLIDAGKPPKLALTACMRKILVTLNAMMKNRSYWIAS

SEQ ID NO: 347402 - protein, 309 aa, unidentified
MNIAPGLIGIDIAKQHLDVFDAALGRAVQIPNTQAAISALIARWPNKPACVLFEATGVYDAALRHALDQNGIRFARVNPKRARDFARAAGFLAKTDAVDAKMLAAMAQSLSPPAEPPAQPERERLARLHKRRDQLVATRQQERTRRHDAPAEIACDITRHIAWLTAEIAALQTRIDQLIAASSALKQTCRLLRSAPGVGPVTATTLIALLPELGDRSPQTIAALAGLAPINVESGQFRGKSQIRGGRKRVRDALYMAALAATRSQSRFAKLYQALRAAGKPTKLALVAIARKLLVTLNAIVRDNLAFQS

SEQ ID NO: 347403 - protein, 333 aa, unidentified
MRLIVGSLPSGEGSSVDVMGIDISKADFHVCLLQGGQARPKSFPNNGTGYRQLQRWLRGREVAQVHACMEATGGYWLGLATALFESGMRVSVVNPSKTTFFARSQLRRTKTDKVDAEMIAEFCKTQEPGSWEPPAPETLELRALLSYRHQLVDQRVSLKQTARDIHAGKELSKLHSTLLKSLAKTLAAVERQMRELVKAHDHLKTGVARLEAVRGVGFLTAVTIVAKLPVERLRNGKAAAAYVGLSPSERQSGTSVHGKPRICKTGDAELRRDLYMPALVAMRHNPILAEFAARLKERGKPSKVVIVAVMRKLVVLAYELLKAPEVANLAATP

SEQ ID NO: 347404 - protein, 349 aa, unidentified
MIIIGVDFHPEFQQIASVDTESGEFEERRLQHREEAERFYRELGSRGVAVRVGMEASGHARWLEHLLKELQFELWIGDAAEIQTKRVRKQKTDRQDAQLILKLLLEDRFPRIWVPDAENRDLRQLLWHRHRMVQARTRIMNQLQAVALNEGLRCKKKLWRERGRQQLESILLLPWASRRRSDLLQLLDRLSPTIAELTDAIEQEAEKRPEARRLMSHPGVGALTALAYVLIIGDPERFRCGKQVASYLGLAPLEKSSGRRRRLGHITKQGSSILRFLLVEAAQATVRSDPNWRNKYFHLAMQRGRKTAKVAMARRLAIRLYWMWREGRDFEQQIKFGSHAGQPENRYGV

SEQ ID NO: 347405 - protein, 337 aa, unidentified
MQAVTTIGLDIAKSIFQVHGVDAEGNVVVRRKLKRRYIVAFFQKLPPCLVGIEACASSHYWSRELQALGHTVRLMPPAYVRPYVKRHKNDAADAEAICEAVTRTNMRFVATKTPEQQSCLMLHRTRHLFIRQQTAVINATRAHLAEFGIVAPVGRNGVEELLNVVADSTDKRVPEIARACLAALGAQLRMLKTQVLEFDRLIMAWHRSNETSKRLDEIPGVGPALATALVASVGDPRAFRSGRDFSAWIGLVPKQNSSGGKEKLGNISKRGDRYLRSLFTIGALAVIRYAKLHGAKHRPWLTALLARRPTKVAAIALANKIARMAWAMMATVHPPAD

SEQ ID NO: 347406 - protein, 400 aa, unidentified
MRTVFGIDVSKASSEVAILVNGERVHSYTMPNDIIGFSHLLKDLKTVSNPEIIFEATGVYSRRLQAFLEENSYDYTRLNPLEAKKQLDSLRVRKTDKIDAEKLASSQFVLNRKPTYVQEEVYQNLHDLSRFYQNLTEDIVRTKNRLHKVLQVAFPEIENLLSTPTGEQYWNLVSIFPTKHWVLELSEVELKETIRNSTSKRISENRVGNLAEKLVGLAKQSYSAISKTSPMIEEVKYNAQELIRLTNRREQVLQQLIALAEPLPEYEILLSIPGIAETTATSIIGELGDIRRFKSANQINAFIGIDLKHYESGDFLGQEHITKRGNPYARKIMYKCIHNIASASHTNPCHIADFYEKRKRQSQTTSTKPHTIASIHRLIRTMYYLIRHNKLYDYTLAQSH

SEQ ID NO: 347407 - protein, 355 aa, unidentified
MNQEKYIGMDVHQATISVAVMDSSGKLIMECILETKAAAILEFLDGLRGSLAVTFEEGSSAAWLHDLLQPHVSRLVVCDPRRNALLKDGSKSDRIDARKLAELLRGNQLHPVYHGEHGVRTLKELARSYLALTQDVSRVMTRIKALYRSWAIPCSGTTVYAPRYRAEWLAKIPQPGVRLRAERFYQQLDLLQPVRQDARRDLLSESRKHPAVKLLRQIPAIGPIRAAMLVGLLQTPHRFRTKRQLWAYSGFAVETHDSGEYRYVQGKLRRNRERITVRGLNGNHNHDLKNLFKGAALSASTHPGPLYDFYVALLEKGMRPTMARLTLARKTAAITLTIWKKGVSFDAKQLRRQAT

SEQ ID NO: 347408 - protein, 312 aa, unidentified
MREHCYGGIDVSKDRLDVMVLPDSKSFSVDNNAAGYSELVKRLRDLPIAAIGIEPSGGYERAVIRTLLAAGLSVRRINPNKLRQFARARGVLAKNDRLDARLIAEYVTIMPTRLVQRDPAAEQLAEVVTMRRQLCDEHVAVENQTTHLEDAMLRRLNKRRLARLEADILLLDTRMAQIVTSHANLTRRYQLLTSMRGVGPTLAFTLIALLPELGQMSRKQIAALVGLAPYDFDSGRLKGHRCIYGGRLPVRNVLYMAALSACRYNPALKIFHSRLAATNKKPKVIIVAVMRKMITTLNAMLRDNVAWQPKSA

SEQ ID NO: 347409 - protein, 411 aa, unidentified
MRLFVGDDWAQDHHDVEVMNEAGKVLAKKRLPEGVAGMAGLHEVIGQQLGEADQDAEVAVGIETDRGPWVLALVAAGYTVFGVNPLQASRYRERHGVSGAKSDSGDAHMLADMVRTDSHQLRAVAGDSAEAEGIKVLARAHKTLIWERTRQVQRLRHQLLGYYPAALDAFDDLDAPDTLELLGKAPDPARAAKLTRAQVSAALKRARRRGIPDKATAILAALRSPQLGQPAAVTAAYAVTVRSLIALITVLNEQVKTLQGQVEENFGRHPDAEIYRSQPGMGAILGARVLAEFGDDLHRYADGKARRNYAATSPITRASGKKKVVAARFVHNDRLVDALNAQAFASLKASPGARAFYDQQRAKSLEHNDALRRLANRLVGILHGCLKTRTLYDEATAWSHRQSLPQSSVAA

SEQ ID NO: 347410 - protein, 412 aa, unidentified
MTAKDQFAAHVGLDWADKKHDVCVQFKNGDRIFHVIEHTPEALDSWLNELHQRAKGRIAIAVELKKGPVVYALQKYPFVTVFPVHALSLARYRQAFWPSGAKDDPQDAELALDLMLRYPHKIKAIEVDNPDIRLLQQLVEQRRLLVEDKRRFVNRLINTLKQYYPQPLEWFSHRDSSLFCELIIRWSSLQQLKRARSDTVRHFMNAKGGPAVAYTEQRVASIASAIPLTTDKTVIEANALMATALASQIKLTGDLIRTYDERIESLFDTLPDAELFKSLPGMGPCMGPRMLAALGDNRDRFNNAEEIQNYAGIAPVTERSGQKSWVHWRWQCAKFVRQTFVEWTAKTVNSSYWARLYYQSQREKGKSHQSAIRALAFKWIRIIYRCWKTRTRYDEAKYLLALEARKSPLLKP

SEQ ID NO: 347411 - protein, 360 aa, unidentified
MISQRTSVGLDVHARSVVAAAIDEQTGEVLRRRFGYDPAEVVAWVKSLSQPAAVTYEAGPTGFALARLFAVAGIWCLVAAPSKLQRPTGDRVKTDARDALHLARLLRLDEIVEVRVPSIEQETARDLVRAREDNRGELMAARHRLSKLLLRHGIIYDGKQAWTGAHDAWLRRHHFEHPGLQAAFDADYEAVQQVGARKDRLDKLIEQMAVTSDYADVVRRLGCLRGVSTLTAFALAVEIGDWDRFTGSTIGAFLGLVPSEYSSGQSRVQGSITKTGNTHARRLLVEAAWHHRKPYRPGAVMQARWAQASGMAVARGDAGNHRLYRKWQQFTVRKKRPVIANVAIARELAGWCWSLAVMPD

SEQ ID NO: 347412 - protein, 343 aa, unidentified
MECYVGLDVSLKQTSICVVDQTGAVVREGVVDSDPEAISVYVRSKALNAVRIGLETGPTSTWLWTELKRLGLPVICIDARHAKAVLKMQINKSDRNDAIGIARIMQTGWFKEVHVKDIDSHSVRALLASRALLVKIKRDLENHFRGLLKNLGLVIGRAKFNVFAVRAEELIEGRPELVVAIRPLLEARSAVEQQVSELDRKVMKLVRRDAQVRRFMTVPGVGPITALAFKATIDDPARFARSRSVGAYVGLTSRRHASGEVDWTGRISKCGDAMLRSYLFEAAGVLLTRVPKWSAVKAWGVKLAKRNGLRKAKVAVARKLAVILHRMWIDGTEFNWSKKEIAA

SEQ ID NO: 347413 - protein, 385 aa, unidentified
MVYIGIDIAKFKHFASVVSSDGEVIVKPFPFENSRLGFMKLVEEIENFQDCLIGLESTGHYAENLIYFLYERGYRIGVINPIQTDALRDSNIRKTKTDKIDTKLIVQCLMLKKYSLVNSQDINIIKLRRLSRFKLETIQQQTRIKTQLTACLDIVFPELSSFFKGNLHLKVSYALLEKYSSAKAIAHCRIDGLTNLLYDNSRGHYNQDKALQLKELAKQSIGLDNPAIELQIQCLIKQLRLYQKQIKDIDLAIMTLMELLNSPILTIPGVGYTLGAMIISEIGDIKRFSNPSKLLAFAGLDPVVKQSGDFQASSMKISKRGSTYLRYAIYRVAFLIIYNNETFHNYYISKRAQGKTHRVALGHVCNKLVRVIFKILTDETPFNLS

SEQ ID NO: 347414 - protein, 342 aa, unidentified
MNVTTIGIDLAKSVFQIHGIDERGKAVFRKKVSRKKLLPTLANIGPCLVGLEACAGANYWTRKIEALGHTVKVMNPRFVAPYVMNQKNDANDAEGICEAVGRPTMRFVPGKSIEQQDIQALHRSRDLLIKQRTAQGNQVRGLLGEYGIVIPLGRKQLRKEIPLVLEDADNELTFLGREIFAKLYEHLVFIDQLIDDLEDQILIVFKNSPACQAVEKIGGIGVMGATALVSSIGDANTFKNGRQFAAWLGLVPKQHSSGGKTRLKGITKQGDQYLRRLLIHGARAATYWAKRGSTRRSQWITELEGRAGTNRTAVALANKNARIAWAILAKGEAYQLDYQPAT

SEQ ID NO: 347415 - protein, 403 aa, unidentified
MNSVGIDISKGRSTVAVMRPFGEVVISPFEVRHTDSELSELARQLKSLNGETRVVMEATGNYHAPVAKLLHDAGLYVSVVNAKLVHVYGNNDLRRVKTDRKDAVKLANYGLDRWLTLPRYIPEENTRLLLKNCYRQYRQYSKVQTVLKNNLISLLDTVFPNVNRLFSSPIRGDGSEKWVDFVAEFWHCRCVSEKSEKVFTNKYQRWCRKHGYNFSEEKAHTIHAEASGYIGLMPKSETTKLLVEQAVAQLRATSAALTALKHEMLALAAQLPEYPVVMGMFGVGPTLGPQLIAEIGDVRRFYSKKALVAYAGLDAPPNDSGDVTGKHKSMSKIGASSLRRTLFLVMSVYLQNAPLDEPVYQFMDKKRAEGKPYRVYMMASANKFLRIYYATVKAYLESLEHTA

SEQ ID NO: 347416 - protein, 346 aa, unidentified
MTIVEDTRAITGGVDTDSEVHVAAALDPVGGLLGTREFPATAAGYAGLPGWLGEFGDVALVGVEGTGSYGAGLARYLAARGVRVVEAARAGRQDRHRKGKSDPLDAVSAARAAQSGRASGVPKGRDGAGEAIRALMADGRSARGERTQAVNQARALILTGPDELRARFAGKRAAALAEAVAALRPRPGDAAGYAVRTALRELGRRVEFPGAQIERLDDLIVPLVTVRAPGLLSLYGVGPDTAAMLLITAGDHPERLRSEAAWAHMCAVAPIPASSGKTRRHRLNRGGNREANHALRRIVITRMSAHPATRAYIQRRTAEGLSKKDIIRCLKRYVAREAYPCPRAGS

SEQ ID NO: 347417 - protein, 343 aa, unidentified
MDYFAGLDVSVKETSVCIVDDAGKIVREARMASEPEALLQVLTNTIYRLKRVGLEAGPLSQWLYSVLAEAGLPVICVETRHMRAVLKAQINKTDRNDARGIAQMMRVGLYRPVHVKTLRSQKLRMLLTHRKLLQSKAIAIENDLRATLRNFGLKVGIVGTVKFEARIKELVANLPDVALLVEPLLVVRRVLREQVGILHRRLLAVVRDDDVCRRLMTIPGVGPVVALTYRVTVDVPARFRNSKAVGAVFGLTPAKYQSGENDRTGAISRCGDEMMRMMLYEAAQSMLVRSTKWSWLKAWAMKIAKHRGMKKAIVALARRLAVIMHRIWVDSTAFRWTREVAVA

SEQ ID NO: 347418 - protein, 348 aa, unidentified
MRFYTKNHKHYCGIDLHTKMMYVCIIDQNANILIHKNIPTNTKAFLKLIEPYREDIVVGVECMFSWYWLADLCEREDVEFILGHALYMRCIHGGKAKNDKIDSEKIAHIILGKNFPLAYAYPAELRPVRDLMRRRSHLVRIKSEIQSHISITNYQYNLEAFEKNIVHKANRAEIADHFQNPSVRLNVETDIAVMDGLHDQIRRLENHIIKHAKHYDGRMLYRLKSVPGIGDVLALTIMYEVLSVERFPTVQKFCSYSRLVKCASESAGKRSGFSGSKIGNAHLKWAFSEAAILFIRGNDQAKRYVAKLTKKFGKGKALSILAHKLGRAVYFMMKRNDVFDMKYFFRTN

SEQ ID NO: 347419 - protein, 336 aa, unidentified
MEAMREVLGIDVSKSKLDIELLKNGKVKTKVLQNTPAGHKSLLEWIDKSKASRSLLHVCMEATGVYHEALALTLYDAGIKVSIVNPACIKGFGHGENIRNKNDEIDAGLIARYCLAMNPEPWTPPPLEQRQLRGWTLRVQALKDIRQQEENRLEAHTIGGMEDVATHVKTHIIWLDVEIKKLEKEIDDHIDRHPGLKNDAQLIASIPGLGTTTIARVLGHIGDIRRFKNAKAFAAFLGVTPKQRTSGSSVRGRTVMSKTGSSSLRAALFMPSMVARRHNPILRQFADRLLATGMAKKAVIGAVTHKLAHLIYGVIRTGKPFDANFLSNRLAIQDGI

SEQ ID NO: 347420 - protein, 306 aa, unidentified
MEHYAGIDVSLESASICVVDATGRIVREAKMASEPEVLIGWFGGLEIVVARIGLEAGPLSQWLYAGMRDVGLPVELLETRHVRDAFKTMPVKTDRKDARGIAQLMRLGWFRSVYCKSLPAQEVRALLAARKLLQTKNHDVEMSLRGVLRGFGLKVGPTTPRTFASRIRELVAGHATLSTIAEALLAARGTLFEQWQKLEKRLRSLAREDRRVRLLMTAPGVGPIVGLTYASAIDDPGRFRSSKAVGAHFGLTPKKYQSGETDVTGRISKIGDGGVRTALYEAANVILTGLDPKELGDAPGGSCRHA

SEQ ID NO: 347421 - protein, 396 aa, unidentified
MQVTRIGMDIAKQIFDLHGVDRRGKLVLRKTVRRECLLELLAQLKPCAIGMEACGGAHYWHREISRLGHTVRLLSAHKVKPYLDGNKNNRHDAAAICEAMSRPAMRLVQPKTRAQQDLQALHRARALLVRDLTALSNQIRGLLHEYGIVLRKGVAALKRTLPELLGSDDERLTPVLREVVAEQFERFNFLAQRREQYDRQLAQLCQQDPRCRRLLKIEGIGPLGATALAAAIGNGHEFKNGRHFSAYLGLVPGHSNTGDKTVMRGITKRGNRYLRTLLIHGGRSAVYAARRHTNSRAIWLNRLREAGGPNVAAVALANKNARVAWAMLRYGEDYRPARAHRPAPPRRAHRLASEKMLAVAVQSAHPDRQSRKHFFVPPSALTKGGTKKSLKREPHN

SEQ ID NO: 347422 - protein, 368 aa, unidentified
MEKTLYVGLDVHKETVSVTVAEEGRDGPVYFHGAISNTPTDIRKLARKLAQNGERLEFCYEAGCCGYTIHRQLQELGHACMVVAPSRIPKQPGERVKTDRRDSLKLAVLHRSGQLTAVWVPDKAHEAMRDLVRARLDAVVQLSRARQQLLAFLLRHGRSYDAGKHWTQRHRAWLAGQTFVEPAHAFVFHDYVEAVWAAQDRRDALVRQIASFLPQWSLGSLVEALRALRGMELISAATFVATVGDLSRFDTPQLLMSYLGLVPSEHSSGDRIHRGGITKTGNREARRMLIEAAWSYKYPARVAKEKAEVLVRLPKPIRDIAWKAQVRLCARYRQLQSRGKKPTVAIAAIARELVGFIWAIGQETIAAQ

SEQ ID NO: 347423 - protein, 322 aa, unidentified
MSVSNQRCAGIDVSKGTLDIAISNIASQFTVPNGTAGFTQVLRELKRNETRLILMEATGGLESCVACYLQSEGFDVVVINPRQARDFARAMGYLAKTDRIDARVLLQMSEVINQHPERERYIRPLPDAHRQILAAMVVRRRQLTIMLTAERNRLHPSHPLSHASIRSIISALKGELARIEGEMAIHIKEHFSELSELLNAVKGVGSATVAVLLAEVPELGSLSRREISALIGVAPVNRDSGTMRGRRTVFGGRASVRTALYMSALVGTRHNPVIKEFYTRLVAAGKPKKVALTACIRKLLTILNAMLKKNEAWDPMYHQHAS

SEQ ID NO: 347424 - protein, 407 aa, unidentified
MSNTTRFSVGIDISKGKSTVAVIDPFGNIVKSPFEIRHTSSDLKKLAGLIKSLDGETRIVMEYTGIYYQPVARFLSESGLFVSVVHAKILHDFANNSIRRIKTDKADAVKIANYGLLHWDSLKSYSKEDDTRLLLKIANRQYYYFLKQYVAANNNLIAVIDQTCPGLNDLFTSPRREDGHIKWVDVAIRFWHCEYITGFSLNKFTELYNDWCKKNKYIGSNSKAEELYLLAKECIPTLPKNESTKYIVKQAAEHLLTISEALGALQKEMLYLAEQLPEFPVVMSFTGVGKVLGPQLMAEIGDVRRFHKKSCLIAFAGVDAPPFQSGNFDSKNRHISKKGSGGLRKTLFQVVTVLLQNTLVYDPVYQFIDRKRQEGKPYYVYMVAGCNKFLRIYYARVKEYLVAQEVA

SEQ ID NO: 347425 - protein, 410 aa, unidentified
MKLLYQRCCGLDVHKDTVVACLRIVSDGKVTTEVRTFKTTTAGLLQLSAWLAANNCTHVAMEATGVYWKPVWHILDDGEFELVLANAAHVKNVPGRKTDVNDAMWLAELLAHGLIRSSFVPDTQTQEMRSLLRTRKQLIREQSSHTLRVQKTLEDANIKLDSVLSDLMGRSGRAMIEALIAGETNPAKLASLANRGVKASHEELREALRGRVTNNHRFLLRLHLNQIDALDAAVATVDAQVEGMLGPFRTAVELVMSVPGIKDLSAQVIISEIGTDMSRFPSDQHLISWAGMCPRNDESAGKRRSNRLRNGAPWLKTTLVQCAWAAKNKKDSYLQAQFYRIKARRGPKKAIMAVAASILTAIYHMLKDGTIYQDLGRKHFDRRSNDQQKRSLVKRLADLGYMVELKPLAT

SEQ ID NO: 347426 - protein, 348 aa, unidentified
MKFYNISHKYYCGIDLHTKMMFVCIMDQQGNILIHKNIPTDADTFLALIKPYQEDIVIGVECLFCWYWLADLCAQHNITFKLGHALYMKCIHGGKAKNDKIDSEKITRLLLGKNFPVAYVYPVEMRPIRDLLRRRTTLVHFSSTALAHIKITNYQYNLPAFEKQIRKKGNRQDVAERFTDPGVRKNVETDLAVVEHLHENITDIEAYVVRHAIHYNPRVFYRLQTVPGIGKIISLTLLYEIQDINRFPSVQDFCSYARLVKCAKESAGKHYGYSGAKIGNAHLKWAFSEAAALFLRNSDRAKAYMAKLTKKHGKGKAMAILSHKLGRAIFYMLKRQDAFDEKYFFRTV

SEQ ID NO: 347427 - protein, 442 aa, unidentified
MRLLNANANEHPLRIKLSAHIRTEIIMELQRNKVCGIDVHKRFLIATILSRDGKKDTQRFSVTLEDLLKFRDWVIENGCEQVSIESTGIYWHPVHSVLEGKIDLIVANSYKIKHTPGRKTDVSDSEWIAELCLNGMIEPSRIFPKDDRELRRLTRAREGYVKQMTQEKNKIHQSLDSACIKLASVISDIFGKSGMYLLNCVLEGRDIDEIIEGIPSGRLKKKTDQIKESIKSRLEISQVILIRGSLSLMRSIQERIDELDGEISARIQYRKNDLAIAMSIPGTGFVSATAILAEIGNYTDFKKPEQLAAWCGLVPSLYQSAEKTILGGITKQGSKHIRRMLIQVAYAISRTKDSKLKKFFLRIQAKKGSKVAAVALARKVLCILHHLLINQEMYLEDRDKKNMRQKPLTPPSPIEMSIQEMIDCIVRAGYVVTKSDSRGGFG

SEQ ID NO: 347428 - protein, 394 aa, unidentified
MGKMYVGIDIAKDRSSAHGIEEGGRSCFELSFDMDGAGFAELLQTIEANGGTPGNVVAAMESPACYHINLYSFLSAKGFEAIIINPLLIANYAKLSLRKTKTDKKDAKTIAQFILAHRNSVTQLVISQDLQDMRDMARERESLCHQISAAKVEIQRVLQTTFPELAAMTNPLTKVMLHFIQRFPSARLVSMSRPSVIEKTLKEKPCSCRLRFTPKELIEAARTSIATVSPAKELILSGKIETLVHLQKRRDELTKALIKHCESTIVDDLRIITSIDGINNETATTLLAEIGYIGNYHSHKNLIAFAGIDPTVYQSGKYEGASRISKRGNRHLRRVIWLMTISVIHHNPIFRNYFLKRRNEGQPFKKAAFATAHKLIRVIFAMLSKRTSFKAECA

SEQ ID NO: 347429 - protein, 394 aa, unidentified
MQPIILYLGLDVHKDSITIAVAQPGPKGEIRLFGSITNDLGRLEHALGRIRKAHPGAHLELAYEAGPCGFVLARRLKQLKVPCLVAAPSLIPKQPGAPFKTDKRDARAIARLLRAGELTAVYVPEPTDEAIRDLCRARTDAVDDLRRCRHRLKGFLLRHGYRYQGRANWSQPHMRYLRELVLPHPAMKTILEEYLQGIDAAHQRVQRIEASMLTLLNTWRLQPAVAALMAFRGFQLVAAMVTVSELGDIHRFAHPRQLMTYLGLVPTESSSGPHQRQGKISRCGNGHQRWLLTECAEHYALPPKVSKELSRRQEGQSPEVCALSWKAQNRLHTRFSRLLARRLPRNKAKVALARELCGFLWALLRTQNCYTQPSTATAPSGPGRTTATSSTRKP

SEQ ID NO: 347430 - protein, 355 aa, unidentified
MSRDIKYIGMDVHKEAIVIAVLNGSGKLVMESIVETKASSILEFIHGLRGELHVTWEEGTWASWLYDLLQPQVKQVLVCNPRRNALLKEGSKSDKVDARKLAELLRTGMLRPVYHGENGLRTLRELARNQTISKDLNRVMNRLKALYRGWGIACAGTQVYAPRYREEWLNKIPRAGVRRRAELLYQQLDGLQGLRRTLRPELLAESRKHKAVKLLRQIPCIGPIRAARLMALMQTPHRFRSKRQLWTYSGLGIETHDSAQYRYVGGQLQRSKNPQQIRGLNQNHNHEMKEIFKGAATRASCGRGPLHDFYAALLAKGMQPEMARLTLARKIAAITLTLWKGGKAFDAEQLKPQAA

SEQ ID NO: 347431 - protein, 392 aa, unidentified
MERQMQSNDLSRSFTAFDQDNTLVIVIEMSEASWLVLGLVPGVERQPLKKLDADKDNLLKLVNRWREEAVKAGHPIERVVIAYEAGRDGFWLARWLRARGNEAYVMHPSSVAVSREHRRAKTDRLDTELLMRAFLGWLRGERRHCSMAAIPTLEEEDAKRPSREHEKLVGERTRIINRIKSTLARLGIKGFKPTLRNAEEKLGQVRSAEGTPLPENTREELRRDMARLRIVRMQIKEIEQQRLSKLKAAAPAEKGRHAMIELIARIVGVGVETADMLVVEILSRNLRDSKAVARYAGLTGSPDESGKRRREKGLARAGNARVRRGMIQLAWRFLRFQKDSALAEWFHARAVDGRKGTRKTMIVAVARKLLIALWRLATTGEIPAGVVLCPAA

SEQ ID NO: 347432 - protein, 424 aa, unidentified
MTLHENAVPLEAEDFAAWVAIDWADQKHVWALQETGSPRRQQGELKASPEAVDAWVSELLLRFPGRRIAVALEQKRGALLCLLSKYEALVLYPVHPATVSRMRAALYPSNSKDDPKDADLLLDILLHHRKRLRRLDADTVETRKLQILVEDRRQLVDQGTAYSNQLRAKLKLYYPQALRWLPDLHAVVAGEFLKRWPTLPLLQKSRRETIEKFFHQHNCRSEELIQKRLEEIPQAVVATTDAAIVDSSVAMVRALVDLLAVLHTHIAALDREIAATAAVHPELPILASLPGAGPVMVPRLIAALGTQRERFACASELSAATGIAPVKQASGQSEWIHFRWACPKFWRQSFHEWAGHSLAKSTWAQAFYQEQIRKGKGHHAAVRALAFKWQRILFRCWQDRRPYDEQKYLAALRQKGSPYAQAAA

SEQ ID NO: 347433 - protein, 404 aa, unidentified
MLYAGIDWADQKHDGLVLDEAGHKLGSIRISHTPEGLDKLDAWLSSMLGGQSKEQMACIIETNHGLLISFLLEHGWPVYPINPRTVDRKRSASGAKTDAIDAYLLAKTGRADFADLHRLTPDSEKVAELKGLTRDQDRLIQMQTRLVNQLTACLKAYYPVALDLFAKVQQHSALVFLQTYPTLEAAQAASVEQIRQVLKSAGHTTASKVAPTIFAHLHQPSLRANAVTTRIKSRLAVALILQLLPLVEQIAAYDKEIEQLFLSHDDNEVFSSLPRAGKRLAPRLLAEIGDDPARYETAASLQALGGTSPVLFQSGNYSKPHRRLGCIKPLRNALHQFAWQSTLQEEWALAYYERKRAEGKSHSVAVRALSNIWARIIFAMLQSHEPYDRAAFETARHLHAPKAA

SEQ ID NO: 347434 - protein, 312 aa, unidentified
MTSEKFVGIDVSKRGLEVQVHGEAESRKFGNDPDGIRSLLEQMKALQPVLIVFEATGGYERRAAKALSEAGLAVAVVNPTRVRRFAEALGILAKTDKIDAKVIAHFASVVCPAPNGQHSDLEEQLAACVERRRQLLVELAAEKNRLATCPACVREDIEEHIAWLEEHVDRLEAEIQSCIMQKPEWQTRAEIIDSVPGVGPVTATTLIAELPELGQLNRQKIVALAGLAPFNKDSGPKKGKRKIFGGRSGIRRPLFMATLSATKFNPVIRAFYESLLKRGKEKKVALIACMRKLLVIINAMVRKGEAWRVSPD

SEQ ID NO: 347435 - protein, 371 aa, unidentified
MSSIHYVGMDVHKENFTLCCYSMEKDELLYRQTVAPDYRVILKYLEQVRKRYPGEIEFICGYEAGCLGYTLYHQLNERGVKCVILAPTTMGITNTNRVKTDKRDAGNIARCLAFNTYSAVFVPTAQDESVKEYIRMRDSQKKALKAVKQQILALVLRQGCRFTEGRNYWTQKHIKWLNSLEMGGILQESLDEYLITFDYLVNKIERLDKRIEEFAGDERYRDNVKRLSCLIGVKTHTALSAIVEIGDFKRFGKAGQLAGFLGLVPGENSSGGKERRGGITKAGNSHVRRLLVEAAQCYTRGVVGHKSANLKQRQNGNEAKVIAYADKANERLRRKFYKMTLKNGGNRNVAVTAVARELACFMWGLMTDNVA

SEQ ID NO: 347436 - protein, 321 aa, unidentified
MEPTVVGIDIAKKKFDVALLREDKEKSGAFQNTPEGFAMFARWLERNGAEHVHACMEATGVYGDRLAVYLHRAGHVVSVVNPAKVKGFGQSELSRTKTDKADARLIARFCRMMRPEPWQPPALEEKQLQAFVRRMDELNGMLTQERNRLATADDVVKPSIENVISLLEERIKEVRRLIREHIDQHPDLRGKRELLESIPGIGPATSAMVLAEFGDVARFQDARSMAAFCGLTPRQRQSGSSVRGKTRLSKTGSSRIRKALYMPALVAMKHNPLVAAFCERLRGYGKCPMVIVGAAMRKLIHIVFGVLKSGRPFDPSIAMAA

SEQ ID NO: 347437 - protein, 321 aa, unidentified
MSQFYLGIDVAKAKLDCALRLPTGKFRTKVLANSPEGFLALVAWLTQQHALDVQVGMEATGVYWEDIAQFLATQGFTVSVVNPAQIKAYAASRLTRTKTDAVDARLIAEFCAERRPPPWQAKSEAEVALRALVLRLDALQAMRTQESNRLDVANDAVCTNIQEHLDWLDQQIKTLIKTINEHIDTHPDLRAKRDLLDSIPGLGERTIAILLAYYADPGRFANSRQAAAFAGLDPRQQESGTSVKAKPRLSKIGHAFLRKALYMPAMVTLYKTDWGKQFKDRLALSGKPAKLIIGAMMRKLLHVAFGVLKSGKSFNPALHGA

SEQ ID NO: 347438 - protein, 366 aa, unidentified
MDVHAETIAVAVAEQDGEVRSLGVIANRAEAVRKLIKKLGPAEQLRACYEAGPTGYVLYWQLTELGVECAVVAPTLVPVKAGDRVKTDRRDATKLARCHRGGDLTGVWVPDASAEALRDLVRTREAAKQDQLRARHRLSKFLLRTGRRPPFAGKSWTQPYMAWVRQLRYEQAAQEWTRQDLLHEVEHMAERVKRLEESIREAVKLAPAAMQEVIRGLQALRGVAEISAVTVVAELGQISRFDGARQLMGYSGAVPSEDSSGKRQQRGSITKTGNAHLRRIAIEAAWSYRLKPAVGPGLRKRQEGVPEEIKEIAWKAQLRLHKRYARLAAAGKDQRKIVTAVGRELLGFIWAIGVKAETAARQAMAA

SEQ ID NO: 347439 - protein, 420 aa, unidentified
MARTVEIVYPVCCGMDVHKSFIVACVAVTDEHSRTEHHIKRFSTFTGDLRRLVNWLASYNCRDVCMESSGKYWIPVFNALEKTCNVCLTHPKYVKAIKGKKTDKKDAKWISELFKCDLVRSSFIPPPDIRQLRDLCRYYVKLTSFVSSEKNRAQNCLTMCNFKLDDVFTDVFGKSATRVLEALLEHGNGNFELDGLLSAKCKASPEKVRAALDGELDPTQAEKLSLIRRHMNDLNCLKASLETLIYNLAAKYRPQIDLLLTVPGISTQLTAIRILAEIGADMSVFETAKQLTSWAGLTPQNQESAGKKKTTRIGRAGAYLKPLLVQIALNCGKSNKCPELKNKYLDLKQRRGGKKAVIAIARKLLTAIWHILSKNEAYNAELYRKADKPPVARELTTAQAIALLRSKGFVIVDVETGEVA

SEQ ID NO: 347440 - protein, 334 aa, unidentified
MTSTRHAGDALFFFLSWGFFMAGPFVGIDVSKDHLDVALRPGQPFRVPNDPAGHAALVARLAPLSPALVVMEATGGLELPALAALAAAGMPAAAVNPRQAKDFAGATNRLAKTDRIDAEGLAHFAEAIRPEPRPLPGPEQRALDALVTRRRQLVEMRVMESNRLSACADAAVRAAIERHLAWLDAEIGDADRLLGEAIRQSPAWREKDDLLRSIPGIGPQASRTLLGAVPELGTLSGAKVAALAGLAPYADDSGQRRGRRHVRGGRVEVRRALYLAALSARRFCAPLKDFADRLAEAGKKAKVVLVAVARKLLVIANAILKTGMPWKAELAAAR

SEQ ID NO: 347441 - protein, 338 aa, unidentified
MSLYAAIDLHSSNSVLAVMDGEGKALLQCRRPNDLPRLLSDLAPYREELVGVAVESTYNWYWLVDGLMDHGYAVRLVNTTAIPQYDGLKHGADHTDALHLAQLMRLGLLPEGYIYPREQRATRDLLRRRFSLVRQAVRLMLSIQSSFSRSTGKQLSANALRQLAPSQLVDLFPELSTRYGVLIQFRLWLTLQDQITALEQWIRKDLARPDLLARLQSVPGIGPILGMTILLESGAIERFDSVGDYASYCRMVESVRLSNGKRKGTGNRKCGNRYLCWAYMEAANYAVRYHPSIRRWYERKQARKHRVVAIKAVAHKLARACYHMLHEGTTFDPTRAFG

SEQ ID NO: 347442 - protein, 346 aa, unidentified
MQSYVGLDVSLRKTAVCVVDEAGKILREGMVDSDPEVIAVFIQSNARNPVRIGLETGATSTWLWTELKKRGLPVICIDARHAKAALKMQINKSDRNDAAGIARIMQCGWYREVRVKDLDSHAVRALLASRALLVELKRDLENQIRGLLKNFGLIIGRAKMTTFTTRATELIEGRPELGVAIEPLLKAREALAGQIEGLDRKVLRLARSEPQARRFMTVPGVGPITALCYLATIDDPSRFKKSRSVGAYVGLTTRRYASGETDRTGRISKCGDEMLRSYLYEAANVLLTRVTKWSTLKAWGMRIAKRRSMNKARVAVARKLAVILHRMWIAGTEFCWTKEGDAMQPT

SEQ ID NO: 347443 - protein, 519 aa, unidentified
MQNLFKTVWILISRIRQEFWLGEEVPLYSGAPETMIGESCKDIPYRILKVESFARNSASFFKVESMKTKKQKDFEQMPVVNFRAAGIDVGSKSHFAAIGQGKEDVREFGSYTNNLHELCGWLKAASITTVALESTGSYWRPLFILLQAYDLNPILVNGKYTKNVQGKKTDVLDCQWIQKLHTMGLLEGSFIPDLFTETLRQYCRHRNYLVENASDYINKMQRALRVTNIRLDMAVTDIAGKSGKDIIEAIIAGERDPEKLASLANIQVKKSREEIILALTGDWRDEYVFELRHCYEVYCYFHLKISECDEQIENLLNTRIEANEKADGEARANYTNKFKIKGKNKPKINLPKLSFQLTGGIDLCEIEGVKSGTIMAILSETGIDLKAFPTAKHFVSWLRLTPNNRVSGGKVISHRTPKGKNLLAEALRRAANSVGLAKKGSLSEFFKRINHKKGRLVAITATARKLAVIIYNMLTKKQPYQPQDQTDYLNKIRMNQIRSMQRRINQLNVLPHELLFVTS

SEQ ID NO: 347444 - protein, 428 aa, unidentified
MSDNDTSRIKRFRQFKNEIRGSDRSLIVGLDIGKSMHYAFLGTATGKTVKRGLRVENSASGFEHLLTSTQFYMDRDGFKDLVFGLEPTGVYHKPLAEFLITHDHLVVYVTNAAIKNNRALLDGRWDKNDTKDSANAADLVAQGKCQFYDFAQIHLRDLRALLALRERLKKQHHSCRVRIRNNLVAQYFPELDNCWNQAQEENLAIVRWCLSPQRISHMLFEDFFQMVITRNKGLRQYNRLSKIWEIAPYSIGCQPGIAMQLEAKILVENIKTIQAQITTVDETIEDICLGYQEYEYLLSIPGFGPYVSAVVLAAIGTAQRFENTHQVIKFAGFDLNAHRSGKKSQSAVPVISKKGKASLRYALYQAALIASSLNTQFKGYYHHLLQGRAREKGIRTKMRVKLAAKLLVIAWTLMKKKQAFDPSYLKAQ

SEQ ID NO: 347445 - protein, 429 aa, unidentified
MKSLAPQQFTAYVGIDWADTKHDICVQVSGSEAREFDCIAHRMPDIDKWARSLHQRFKGPIAVALELARGPIVYALQRYDFFVFFPINPLTLAKYREAFQPSRAKDDPTDAELAVDILVRHPQRFSPLQPQSVGMRTLLSLTEHRRELVDDKTRCTNRLTNALKQYYPQALDWFGQHDTLLFCDFLARWPTLSQAKRARRSSLQAFFHAHNSHRAGVINARLDAIKGAMPLTEDKGVITPCRLQVLALVEQLRATLQAIDCFDREIAQLAPTLPDYGLFQDLPGAGPHLAPRLLAAFGEQRQRFGSADQIQKYVGIAPVTERSGKKNWVHWRWQCPKFLRQTFVEWAGQTVNKSFWAGAYYRQQRDKGSSHPAAVRALAFKWIRILYRCWETRTPYDESRYLNALRERGSPLLKNLEINKQSKEVAPLV

SEQ ID NO: 347446 - protein, 424 aa, unidentified
MNDTQNKKIAQVTDKTLVVGVDIGSDKHYARAILARGFEVSKKPFEFANTRDGFDRFVNWSFHLAVENHLTKIFVALEPTGHYWFNLADYLRDHDVKLVLVAPQHVKHSKEMDDNTQTKNDRKDPLVIAKLVTEGRYMFPYIPEDIYAELRVAFNRRCDLVEALSRNENRMIRWFDIYFPEYKEVYGKANAILGLMILMRAPLPSDILTLGVEGICQTWREAKIRAAGINRAKKLVAAAERSIGRKGCEAVRQELWQLMEEHDLLSRQLSNMMQIITELLARIPGAERLLNVPGAGVITVAGFLSEVGDISRFTDPKQIQKLAGLAIVENSSGKRKGLSGISRRGRKRLRWVLFQLARCMVKSNKEMKAYHLYYTTRKDNPLKKMQSLMATAGKIIRIFFGMLKNGTEYDPAIVMRDLNKATAA

SEQ ID NO: 347447 - protein, 348 aa, unidentified
MLADQLDYIIGVDPHRDSHALAVVHVQSGAVVFESTVVANSEGYAHALKLVDRHASGRRAFAVEGTGSFGAGLTRFLTRSGEQVLEVGRLRRERRSGGKTDALDAVRAARSVLAQERPATPRAGGERQGLQALVAAREGAVNAKRAGLCQLRDLLVTTPEPLRSELRPLTRARLLQRLAATRPHGRNDAELRGSMLALRSIARRVLQLTAEERELAREIETLTRKLAPQLLDQPGVGPHAAAQLVLSWSHQGRISSEAAFARLAGAAPIPASSGQTIRYRLDRSGDRKLNRALHMILVTRKRSHPATIAYIQRRLQEGKTRREANRCLKRYLARNLYRLLEHGPPLAT

SEQ ID NO: 347448 - protein, 321 aa, unidentified
MSEASNQWWVGIDVSKDWLDCCCAGAPAGQQSSRWGNDAEGIGALLKALSGAPIGLVVLEASGGYETAAATRLAAATLPVVVVNPKQVRDFARAKGILAKTDRIDARVLAEFARLIRPAVRPLPDDEQRELMELVDRRTQLVAMRAQERTRLATVQPIARESITEHIRWLDERIGKLDVDLTHRLRTSQAWKVKADLLKAVPGVGKVTLFTLLARLPELGQLNRRGIAALAGLAPMAADSGQHRGKRFVQGGRAEVRAVLYMATLTATRHNPLIRVLFERLIAAGKPFKVAMTACMRKLLTILNAILKSQQPWNPSLHSHP

SEQ ID NO: 347449 - protein, 347 aa, unidentified
MEYVGIDRHKKESQICLLTEAGEVIERRIRTEPQRFAEVLGGRPRARILVEASTESEWVARCLEALGHEVVVVDPNFAPMYATRTRKVKTDRRDARALQEACRLGAYRPAHRLSDAQRHVRGRLAVRDALVRTRTGYIALTRALLRRHGWRVPTGSAETFSRRVVALPLPGRLLSEVAPLLAVMRPVNQQLAYSDGAIEAVTRPDARVQRLRTVPSVGPVTAAAFVATIDDARRFRRAHEVEAYLGLVPRELSSGESPRRGRITQAGNTRMRWLLVQAAVSILRLRDPRTAPLRRWATGIAARRGKQIAVVALARRLAGLLSAMLRDGTTYTPRVLPRPAAAAAAPV

SEQ ID NO: 347450 - protein, 488 aa, unidentified
MPALHKDSKLKGALTVQNAAPPTADSPKKQSKPFKKTPPDPTAGLSISHPNAAAIDVGGDTHWVALPPDRAPKPVRTFGCFTTDLEALADWLVEHRIDTVVMESTGIYWVILYEILEQRGLTVFLINARLAKKLLSRKTDLLDCQWLQRLHAYGLLNNSFRPPEEIRVLRSYLRLRERVVGAASQSVQHMQKALTEMNVQLSTVISDITGETGLRIIDAILAGERDGQKLATLKDRRIKASEQTLTQALRGHWKDEQLFALEQARLTWAHHQLQIAQCQDRIDAQLRAMNAEPPAAEKTTDKAAPGDSAAPSSEAPPKPAPAFCLREQLKQLAGADLVSIDGIGVLTAQIVVSEVGTDMTPWPTEKHFSSWLALCPEHEISGGKILKRGRRRKVSQRAAQALRMSAYGLERSNSALGAKYRRLKRRLGAPKAIVAMAHHLARLVYRLLKHGQDYVDKGAAWYEARYQAQRLKWLQKQAQELNLKLVPA

SEQ ID NO: 347451 - protein, 365 aa, unidentified
MNKEAISSDSISAASLVNHVNRVLNLGLDVHYRQVTVAMQEDGGRIKAAGKMGHVDFLNWVQKKLQEGWQIYSCYEAGASGYWLHRDLVKLGVKNLVVVPKAMGQGGKKQKTDKRDAGELCDCLDRYLRGQDKALSVVAVPTEEQEEKRALIRYHRQIMADRGRCEARGKGLLCAQGIEVHGRWWHGKAWLEVQSDPRLKDWMKEQLIGWRNKLLSTEEEQGGLRERIAALAPAILPKGVGAYSAAVLEYEMRGFERFTNRRQVGSMTGLCPGIHQSDGRGKEGSINRCGIGIVRWTLVEMVWRLMIWQPQYPPVRRLAAGLVKGKRARKRLVVQAARRLAIDLWRLSTGQTTPEKLGLIMHSAK

SEQ ID NO: 347452 - protein, 344 aa, unidentified
MEITTIGLDLAKSIFQVHGVDATGQVVVRKSLRRAQVLPFFAKLPSCLVGMEACGTSHHWARELVKLGHEVRLMPPAYVKPYVKRGKTDAADAEAVCEAVARPTMRFVPVKSPEQQAALSMHRTRDLLVKQRTQLINMIRGLLAEFGIDIPKGLERALLVARRIVDGEAPDVPIEAAKIVGTLSQQALEIHVRIRQIDRDLLVWLRSNDVARRLTTIPGIGPVGATALAASVTDPHQFRSGRQFAAWLGLTPLQKSSGGRERLGRITKMGDKYLRKLLIVGMTSLVRRAKYHPNTVDPRLADLLARKPVRVATVAMANKTARTIWAIMARGDTYRTGHQPALAA

SEQ ID NO: 347453 - protein, 339 aa, unidentified
MSLHSQGGLRKTMNKQADVPCLGIDVSKKKLDCALLLGSKTRNKVVENSPAGINVLIAWLARHGANEVHVCMEATNTYWELCAEALADAGHTVSVVNPALVKAHAQSNGLRTKTDAVDARTLADFCREKQPQPWIAPSPSERALRALVLRHQALVEMQTQEKNRIDTAREAVHDSVQIHLQWLSEELKRIEQAIQKHIDDDPDMRRRRDLLKSIPGIGKRTIALLLAYLGTQFRFANARQFVAFAGLNPKLHESGSSVQRRARLSKIGHAEIRRALYMPAMVALYKTGWGKRFRERLEQAGKPAMLIIGAMMRKLAQVAYGVLMSGKSFDPTLHGACQR

SEQ ID NO: 347454 - protein, 358 aa, unidentified
MSEITRVGVDLAKNVIQVHAVDAAGKVVTNRQLKRDKFIEWCMQLPAMCLLAMESCTGAHHWARKLVTLGLDARIIAAHLVTPYRQQGKGGKNDANDAAAICEAASRPSMRFVAIKTTTQQGLLSVHRLREGLKADRTACINRIRGLLAEFGLVFPQSPKELREQLSATIEDASNELVGMARLVIEHAQTQWQEFDDHIAWCDQRIAAHLKEDEQARQATQLMGIGPITASAVVATVGDFKQFKNGAQFGAWLGLTPKQNSSGGKNNLGSITKHGERYLRMLLIQGARAAVLTAHRRDDPISKWVYQLREKSGWQKAAVALANKNARILWAVFTKGKSFDARHVSVKLGAPQVAMSAA

SEQ ID NO: 347455 - protein, 411 aa, unidentified
MDVVHARCCGLDVHKKSVVACVLASESDGLINRQVRTFGTMTADLLALSDWLSSLNVTQVALESTGVYWRPVYNVLEADERTLLLVNPQHMRAVPGKKTDVKDAEWIADLLRHGLLRGSFIPPVPIRVIRELTRYRKTLVQARADEVNRLQKTLEGANLKLASVATDVLGVSGRAMFAALLDGERDPDVLADLARGRLRAKLPQLRQALVGRVKPHHLVLISQILAHIDFLEQAIAEMQVEIDRCLPPFEKALELLQTIPGIREVAAAAILAEIGTDMSRFPSAGHLASWAGLCPTNKESAGKRMKGPRNRGNVWLRAIMGEVAWASIRTKASYFYAQYHRLARRRGKEKAAVAVAHSLLVVIYHVLSTGRPYQELGVDHFDRLNTAHIQRHHVRRLEQLGYTVTLTPIAA

SEQ ID NO: 347456 - protein, 349 aa, unidentified
MLADELDYVIGVDTHRDEHVLAVLTAAAGAVVAGEALPANARGYRETLRFAGRYAAGRRAWAIEGTGSYGAGLARFLAGRGETVLEVSRTPKAERRLRGKDDTLDAARTARAALASDTLALPRSGERREALRLLLVARRSAVDVRREALTQLRGVIVTAPEQLREELRGLSTGKLLHRCSRLRRSSAASVDELATKLVLRSLARRIEAATLEADELERDLLGHIRALAPALLDEPGVGPIVAAQLIVAWSHRGRLRSEACFARLAGVAPVPASSGQTVRHRLSRGGDRQLNRALHTIVLHRRQHDPATRDYIAKRIADGKSRRDATRLLKRYLARHLYRVLNNQAPLMA

SEQ ID NO: 347457 - protein, 361 aa, unidentified
MNTITIGVDLAKLVFAICELDENGRVRMRRELRRDAFAAWLAQLPAGTVVAMEACSGAHHWGRRCHELGLQPKLMAAQFVKPFRKSQKTKNDRNDAEAIATAARQGNMRFVPVKTLDQQTRLSWHRAREGYKTEALAIGNRMRGLLAEFGVVVAKSNKALRTLLADLSAHALPEPLVEMLGDLNAHWQMVCDRVAAYGKRIEHNAGTDVRCKRARAIPGVGALTTDALVAMVGSAQEFKNGRQMAAWIGITPSQHSSGSRKLLGKISCRGDSYLRTLLIQGARSTLQRAKAVSREKATPEQTWIMSLAARLPFGKVLAAIANKHARQLWAILARGEDYDPNAALRHPMAQRAASKRVVAAI

SEQ ID NO: 347458 - protein, 314 aa, unidentified
MSKAVVTVGIDVSRDRLDIAVRPSGESWSQERMAVTELLERLGSIKPDLVVMEATGNLEAPLAGELVGAGLQVAVVNPRQVRDFAKATGKLAKTDRIDAQIIAHFGEVVRPHLRTLADVERQQIKELVLRRRQLSDSLTAETNRLRRVLPGTQRYIQDHITFLHEQMERLDQDIDRTIKHSPVWHDQVNLLVSVPGVGQVTATTLATCLPELGHLNRKEIAALVGVAPFNRDSGFTRGKRTIWGGRSTVRRVLYMATLVATRYNPVIRDYYQRLCDAGKHRKVALVACMRKLLTILNTMTKQHTAWNQHLPLHT

SEQ ID NO: 347459 - protein, 358 aa, unidentified
MQPETSRKQNEMMYVGVDVGKRKCRAAIMNTEGKIIKELDFSNNLQGISSLTSMLSMADRVVMESTGPYWLDLYNHLDDLHIAVVLANPLKTKAIASARIKSDKVDARILAHLLRTDLIPECYVPPKEMREIRSLVRHRVSIVKLRTMVKNKVHALVDRNGLKHEFSDLFGKAGMQWLRSLELSGLDRLMLDNYLMHLETLDLQIERVDLEITSRASVDGDVRLLLSLKGVNVYSALLIRSEIGRIERFSDYRKLVSWAGLAPSLHQSGDVEYHGNITKQGSTMLRWIMVEAARVASVYDPRLKAFYERVAARRGDQKAVVAVANKMLKIIWFMLTRQEVYESVDEKRYGKKLNSLND

SEQ ID NO: 347460 - protein, 411 aa, unidentified
MIEHQNLVYVGVDLHKQHHTAVIIDCWSKKLGEIKFDNKPSAFPLLVKEVRKYAKKGLSVVYGLEDVGGYGRGLAVYLKENQCWVKEVNAKLANARRQSHVTVQKSDSWDAECVAKVLRDELERLPDAKPIDLYWAISQLVMQRKWFAKSLTATVKKLHQQISYPYPSYKKFFSEVDGKTALAFWEAYPSPHKLKDLSEEKLAEFLRSHSNNGLSHKKAGQILSLISVDGDTYRDFQDSRDSVVVSQVRSAGFFKKEIAKVEVDIEQLMGQLGFQLESMTGIDIVTAAELVAEIGDIHRFPTADKLARFAGIAPVMVGSGNKSRNHKSKQGNRELHDIIKSLAIRQIAVTRTKRVPRNPYFHAYYLQRMSEGKTKQQAIICIMRKLINIIYAMMKKKSAYEMPTIPRVQVG

SEQ ID NO: 347461 - protein, 314 aa, unidentified
MASRPERFVGIDVHKDTLEVHLEGQDERWEYSNDTAGIGDLVTTFGPLSPTLVVVEASGGYERAVVSQGYAAGLPMVVVNPTRVRRLAEAMGIIAKTDAIDAQVIARFASVVHPPVREPQSAQQQYLNALVTRRRQLVAMRTAEKNRLSTCPALVRAGVERHVAWFDAEIEELEDEIHDMLVHDPSWHELVELISSVPGIGEVTAATLVAELPELGTISRQKIAALAGLAPYNRDSGPRRRTRRIFGGRAQVRCVLYMATLSATRHNPVIRRFYERLIERGKEQKVALTACMRKLLVIVNAMVRKQEHWQYDPA

SEQ ID NO: 347462 - protein, 411 aa, unidentified
METIYRRCAGLDVHKETVEVNVRLLDERGHLQSEVRQFATFTRDLLEMSDWLGGQGVTHVAMESTGVYWKPIFNVLEERFEVLLVNARHVKNVPGRKTDVRDCQWLAQLLQHGLLRGSFIPNREIRELRDLTRHRTQLVAEKVRVGNRIEKVLEDANIKLGSVASEVLGKSGRAMIKDIIRGEKNVEKLADHARKRLKNKKSDLRLALHGYIREHHRFMLKLLWDQLMEVEKLIERIEKRIDEQMAPFEEAVERMDEIPGIDHRVAQTVIAEMGVDMNRFPTHRHLASWTGMCPGNNESAGKRKSGKTTKGNRWLRTALVQAAWAASHTKSTYFSAQYSRLSRRRGRKRALVAIGHSILVTIYYILKDHECYRDLGHNYFDLLNQKYLTKHLVKRLESLGHKVSLEPLAAA

SEQ ID NO: 347463 - protein, 345 aa, unidentified
MPIVGGLDIHRKQITFDYLDTVTGEVKRGQIAPADREHVRAWLARFAGRDDVAFAVEGCAGWRYVAGELAAAGIAAHLGEPADTAALRGRKRHAKTDKTDARHLRTLLAEGRLPECWIPPAQILEYRALLETYHDLRTAHTAWVQRIHAVFFHQGAPPLSDDALRTEAGLAKLRAAAAAHLSPAGQQQVATALDMIAAVEARLGPLRHQLRDAARHLTGAKVLAARLYGVGPLTALALTCWLAGKGRFSSSRKAVRFTGLDITVHSSDRKGPPGRLSRQGPPVLRWAVYEAGKTHARTSAPDHRYYAAVKDRKNSKRACLSEARKIVRQACHILTELGDDALTAA

SEQ ID NO: 347464 - protein, 478 aa, unidentified
MTPPKDYCLEAPCPPTPLLPPLPVLSDALQVCHPHAAGIDIGEAEHWVAVPPGRDPQPVRRFGTFTADLDALADWLLDCGITTVAMESTGVYWIPLFELLEARGVQVFLIDPRQAKRAPGRPKTDRLDCQWLQRLHTYGLLAAAFRPADEICVLRSYLRHRQMLLTYGAHHIQHMHKALQQMNLKLSQVVSDLTGVTGMAILKAILAGERDPLTLAKLRNPHCQHSEDEIAKALQGTWRAEHLFALRQAVDLYQFYHQQLTLCDQQIQTHLGTFADKSHGQPLPPKARRHKKANEPRFDARTPLYRLAGVDLTTIEGIEEGTALVILSEIGTDMSRWPSVKHFCSWLGLSPQHKISGGKVLSRRVRPGAQRVAVALRLAARTVHKARTALGAFFRRLRSRLGAPKAITATAHKLARLVYTLLKHGSAYVQQGLDAYESQYRERKVKAMARQAKALGYTLVALGTPEVARLDAVTAPTP

SEQ ID NO: 347465 - protein, 355 aa, unidentified
MDSTKYVGMDVHKDTMSIAVMNSAGKVVMESVLETKAVTILQFIQGLRGNLLVTLEEGTWAAWLYDLLKPHVTKVTVCNPRKNALLKSGNKSDRIDAQKLAERLRHGSLSAVYHGENGLRMLKELARSYLTVSKDLTRVMNRLKALFHSWGIACAGTQVYAPRHRLEWLSKITEEAVRGRAEFTYQQLDGLQALRQAVRRDFLAESRKHPAIKRLREIPGMGPIRAALWVALLQTPDRFRTKRQLWAYSGLAIETHGSGQYCYLEGQLRRVKKPVALRGLNRNHHHDVKWIFKSAAVKASSPTGPLHEFHEALLAKGIKPSLARLTLARKIAAITLTVWKKGVRFDAEHLKLQAA

SEQ ID NO: 347466 - protein, 422 aa, unidentified
MDVMHERVAGLDVHKETIVACVRIMAGGKATRECRTFGTTTADLEALLGWLTESGCTHVAMEATGVYWKPVWNILSEGKFELMVANAAHIKNVPGRKTDMNDAMWIADLLACGLIKASFVPEQEIQELRSLLRTRKQLTREQVRHVQRMQKTLEEANIKLDSVISDIMGVSGRRMIEAMIGGQRNPFKLAELAHGRIKASRKELYDALHGRLTDHHRFMLRLYLRQYDALAGSIDEIDQEIDAAIERMDAVAAGRATFRSLIGVLSTIPGVAELAATTILAEIGTDMGRFPTAGHLVSWAGLCPGQNESAGKRKSSRLRKSSPWLKTMMVQCAWAATHKKDSYYKAQFNRLRGKHGVKKAACAVAASILTAIYHMLKDGTHHQDLGASHFDHRSIEIRAKRLAAQIAKLGFQVELRPLADAA

SEQ ID NO: 347467 - protein, 317 aa, unidentified
MTEQQKPFVGIDVSKARLDIAVRPSRAFWQCSNAPESFSDLVARLRTIDPALIVLEASGGLETAVTAALAEAHLPVVVINPRQVRDFAKATGALAKTDALDAHVLAHFAEAVRPKVRALPSGQLAELDALADRRAQLVKMQSAEQNRLASAPTCVRADIQAHLDWLAERIDASNKELRRLIESSPAWRAEDELLQSMNSVGPVLSAVLISAVPELGTLSNRRISTLIGLAPLNRDSGQHRGKRKIFGGRAQVRSALYMPTRNAVRFNPVIKALYDRLKAAGKPEKVAMTACMHKMLVILNSMVKTNTYWHPPGVAQS

SEQ ID NO: 347468 - protein, 322 aa, unidentified
MQVKADRPEAPSAIRSDLGAIFVSLELSRSIWLITSLSPGAGEKMSKHSVPAGDIGALLARFSEMKQKAFARTGKSFPIIVIQEAGLDGFWTHRLLQKEGIESHVVDPASIATSRRRRRPKTDRIDGEALLRALLAYKRGEPRVCAMVKAPTPEEEDRRRLCRERKVLTTERVQHVNRIKGLLFCQGVSGYEPLRRNRRQRLDELKTGDGRLLPDHLKAQISRELDRLELLLEQIKAVEAERNALFAVAKAAAPTAAPVAMLLDLKGIGPEFAAVLWMEAFFRSFANRKQIAAYAGLAPTPWQSGSIDREQGVSKGAMWDFR

SEQ ID NO: 347469 - protein, 337 aa, unidentified
MKFCGIDLHSSNSVMVVTDEDDRIIVSRRCPNDLGKILHVLAPYQAELAGVVVESTYNWYWLVDGLMAEGYHVKLANTVAMKRYDGLKYSDDEDDAAHLAHLLRLGILPTGYIHPPAERALRDLARKRVQLVRMRTQQVLSVENILARETGSRLSSAAIKRFTVADVAALGLNADVTLAMQSNVAMIEALNREIGRLEARLLACARLRPDYALLKSIPGIGEVLAIVIMLETGDIQRFARVGNFASYARCVGSARYSNGKKKGEGNTRNGNAYLIWAFIEAANFARRFNADAKRFFERKKARTNKVIATKALAHKLARASYHILKEQRPFDGKRCFA

SEQ ID NO: 347470 - protein, 353 aa, unidentified
MGHKYVGLDVHQSSTVAAIQDEQGKSVMESILATEAEAIRDFLKGLRGTIHVTFEEGTQAAWLYEIVKPLVAEVIVCNPRRNKLLAVGNKADRVDAQKLAELLRCGQLKPVYHGAPAVRLLKELVHSYDSLVSDTTRVMNRVKAIYRGRAINCAGRDVYYQRNREQWLEKLSEPGVWQRAVLLYQQLDTLRGLRREAKKAMLKESRRHPAYRILKEIPVLGPIRIAQILAKVASPHRFRTKRQFWAYCGLAVVTRSSADYQFRGGKAEKRKRAPMTRGLNPNFNHRLKYVFKSAAVDGIHQAPFEGYYARLLVKGIRPEMARLTLARKIAAVTLTLWKRGKRFDELKVSEQAA

SEQ ID NO: 347471 - protein, 316 aa, unidentified
MAKSVAKITLGIDAAKVELVICNWTQQETTTLPNQRTEIRAFLKSFHGPLRIAIEPTSHYHMILVEEALAQGHEVYLVNARQLAHYREAVDVRNKTDSQDAWLLARFLEREADLLRPFQPRDPRAQRIWALILRRATVVQSRQQLQQSFAEVNLSIQAVLTQFQNLLKRIDRHITQLIREMGWWPDYLRCLSIPGVGPVNAAALVTAYHRGAFSGSNAFVAFMGLDIRVRESGQYKGKSKLSKRGEPELRRLLFCAGKGACSYQRFADYRQRMLDNGRCKIAARVALSRKLARIAFALMQKEETFIKQEKTHCMAP

SEQ ID NO: 347472 - protein, 325 aa, unidentified
MNEHKQDVIGIDVSKSTLDFALLRNNKLKHKVFKNTPAGHQAALNWLQKNKIKEAHICLESTNIYGDAIATLLYDAGYSVSIVNPARVKGFSQSELLRTKTDKSDAGLIARFCLAMNPSLWTPDPQETRELKGLVRRLEALMEMRHQEANRLEVAPEIVVNDVKAHITYLDNEIKETRQRIRNHINNNPDLKQKKTLLESIPGIGEATIAVVLSEFSDVSQFKNAKCLAAYIGVAPKERLSGSSVRGRTMMSKTGRSQLRKAFFMPALVALRYNPILIEMKLRLTNSGKAKMAIVGAAMRKLVHLIYGVLKSGLPFDANYVTKNS

SEQ ID NO: 347473 - protein, 313 aa, unidentified
MKEEKTFIGIDVSKEKLDVGVRPQVDFMTFANTEDGISLMTDFVKSKQPELIVLEATGGLEMAALRSLVVARLPAVCVNPRQVRDFAKAMGVLAKTDKIDAHVIARFADSVRPEIRPLKTEETEMLDAFNTRRSQIIIMLTAEKNRLTTASKWTKKDIEKSIKGLEKALAKINREVENLIKKSPHWRHMDKILQSVPSVGPVMSLTILADLPEIGTMNRRQIAALVGVAPLNRDSGKYKGRRAIWGGRARIRSVLYMCAVSGICHNPKIKAFYNRLISSGKKHKVAITACMRKLMIILNTMIKNDTCWNESGC

SEQ ID NO: 347474 - protein, 299 aa, unidentified
MEKITRVGVDLAKRVYQVHAVDNADLTVLARPMSPDRFLSWALGLPAGTVVAMESCSGAHHLARRLRLMGLDARLIAAHFIAPFRVQGASGKNDANDAAAICEAASRVRTRCVPVKTPDQQGWQGVHRLREGYKEERTACINRIRGLLAEFGLVFPQSPDALRRVLNDVLEDASNELPGVMRLALQRTQAHWRALDDEIAWCDQQVKQHVRADQAAARAAQLHGVGDLTASALVAAVGDMHQFKSARQFSAWVGLVPSQNSSGGKNRLGRITKRGDDYLRTLLIQGAKSALMAAPKRCD

SEQ ID NO: 347475 - protein, 340 aa, unidentified
MKDTVIGVDLAKNIFQVHGASRAGEVMFRKKLRRQQFMQFMATQPPALVVLEACGSAHYWARELAGAGHEVRLIAPQYVKPFVKRQKNDAADAEAIVIAARQPEMRFVEPRTEAQQARGVLFRARQRLVHQRTELVNALRAVLYEFGLVVPQGIAHIRHIEAMLDEAVLPEAVKQECLDLLRQISEQSVRIDVRTKKIRMLVQESENTCRLQSMPGVGPLTALAIEAFAPDLQSFRRGRDFAAWLGLVPRQFSSGGKERLGKISKAGQADIRRLLIMGAMTQVNWASRKAPAPGSWLARMLARKPRMLVAIALANRMARAIWAMATKQEDYRDPALSVAA

SEQ ID NO: 347476 - protein, 401 aa, unidentified
MTFVIGLDWGGAAHAVCVLDRGSGAVIDRFEARHDAGGLRDMERRLARHGAPGDLPVAVERPSGLIVDALVAAGHPVVPIHPNAVKASRPRYRANGAKDDRGDAYLLADLLRTDGHRFRPLTPPSDAIRALRALVRDRDDLVATRLQLANQLRALLESFWPGAAAIFADIDSPIALAFLERYPTPDSATRLGVKRLASFLAQHRYSGRRSPDELLARLRAAPQGLAGPVEAEAKGEMVRALVAILGPLVTRILDLTARIRHDTAASEDGQIIMSFPRAGQLCAGQILAELGEDRARYLTPDQLAADAGLAPVTRQSGKSRGVSFRWACNRRLRTALTCFADNSRHACAWAARIYSSARGRGCRHPHAIRILGRTWLRVLWRAWQDRKPYDPVLHGAANAIG

SEQ ID NO: 347477 - protein, 432 aa, unidentified
MNPISVSSPPSKVAAWVGLDWADQQHLVCLYDVGTGQTELSCLEQKPEALQSWLGQLRQRFGGQPVAVVLEQARGAVIYALLSADFLVLYPVNPQSLASYRKAYVTSGAKSDSADAVLLMEMVRNSPQRFRSWTPDDADTRSLQLLTQNRRQLVDQCTAFTNQLTGWLKSYYPQALELAGELDSLQACDFLEKWPTLEALQQARPAQIRKLYLDYGKPRPESLEQRLEQIRRARPLTTDLAAVLSGTMMVRALIELIRPLRATLERFDQQIAALFRKHPDRLLFESFPGAGAVLAPRLLAAFGTDRDRFESAQDMQQLSGIAPVTEQSGKQRWVHWRWACSKFLRQSFHEFADHSRKWCGWAKALHQRLRRAGKGHHAAVRVLAFKWIRILFHCWKTRTGYDEQIYLKSLEKRNPTLWAEAQALPPRKKKAA

SEQ ID NO: 347478 - protein, 412 aa, unidentified
MEVVYSCCAGLDVHKKTVSACVLCREADSSKRHEVRVFGTMTRDLLALADWLRERGVTHVAMEATGVYWRPVWAILEGHHDLLLANPQHMQAVPGRKTDTKDCEWIADLLQHGLLQGSFVPPTEIQDLRDLTRYRAELTQEQNRVANRIQKLLEQANIKLSSVASDVLGVSGRQMLRALIAGETKAEQLAELAQRRLRSKIPELRLALEGRVRDHHRFLLAEFLDEWEAIGKRIVRIEGEIERRIGPFEYAVALWQTIPGMDRVTASSLVAEIGVNMEQFPSPAHLASWAALCPGNHESAGKRRSGKTREGNRWLRRTLCQAAWAVTRKKNCYLSAQFKRLAARRGVKRAVIAVAHAMLVIAYTMLKNSRSYQDLGGDYLEQINKHQLQRYFVKRLQKLGLTVTIEPAIGAA

SEQ ID NO: 347479 - protein, 366 aa, unidentified
MLQKAGLSEEADPENYLGGSSETMYYIGLDVHKKTISYCVKDAAGCVLSEGKINASRRDLDVWVRTLPQPRMMAMEATIFTGWIYDHLLPHAEKVKVAHPLMLRAIAAAKRKNDRIDAAKIADCLRCDFLPECHMASTGIRDRRRILRYRNLVVKQSVQMKNRISGLLMETGVTYNKRRLHKVGYFADLMATNAEIHDCIRPLLRLSREHIERAQKLAYALVTSLERDPLLKERLRRLRTVPGVGPITALTWALEIGDYTRFHSIKEAISYCGLCGDEKSSADKVTRMPLSKQRNKHIQRVLVEAAKLAPRECHELAVVRERELERGNPNRATLAVARKIVGYLLAVERGQRDFVPAEEFSRTAAA

SEQ ID NO: 347480 - protein, 409 aa, unidentified
MKMAGIDVHKKVLMVVVVDTSALQEKPARRRFVTLPSELQRFRIWLQEQGVEEAVMESTAQYWRSVWLELEPHMRLHLAQAFSNRAPRGRKHDFKDAERLVRRLIADELILSFVPNGEQRIWRSLTRMKVQLTRDRVRLQNQMECLLEEMRIKLSIVVSNLLGASGLRILHALAQGETDPKKLAELGDERLHCTEEQLVDALTGRVQPMHRGMLALQLQRLQLIDQQMAQLNHMIAQAMKSHQDAVIRLAEVPGLGVDSAQQIIAEVGAQASTFSSAAELAAWVGTCPGKEESAEQNQSSRSAKGNKYLRRVLNQAAHAAVAKKGCHFQVVFRRLMPRLGYKSAIWAVANRLCRVVWKILHEGVRFIEQGREVGPREKKPRAQLLARALRKLGYEVTITPINQLAPKPA

SEQ ID NO: 347481 - protein, 343 aa, unidentified
MITTIGLDLAKNVFQVHGVDERGFAVLRKQLKRDQVAPFFARLEPCLIGIEACGGAHHWAAKLTALGHRVKMMAPQFVKPYVKTNKNDSLDAEAICEAVARPNMRFVPAKSPEQQSVVSLHTARESFVHARTAQANQIRGLLIEFGLIIPQGMRHLYERVPGLIEDASDYLPGRFRLLIERLFQHLKELDRQVQELECEIQQWHRSSEVSRRLETIPGIGPLTASALAASAGDPSNFKNARQFAAWIGLVPHQNSSGGKTQLLGISKRGNVYLRTLLIHGGRALVQLARTRPDRAGTWLGRLVGRRHHNVAAVAMANKNARLAWALLSSRKAYEPQHIAAAMS

SEQ ID NO: 347482 - protein, 350 aa, unidentified
MQYLGIDWGTRRAAWCSLSPSGELSEGTIAADEDGLARLVARLGPEVRGCIEMMSGAVWVRDRLTECGWAIEIADARKVKAIAPLACKTDRVDARVLADLARRDLVPTVWVPPLDDRAIRERLRRRSHLIRLRTSSMNRTFGLLTQWGLRRNLTALRQPGALDELADHGVPDVWRTSLATLLGVIDDLDRQLAPLERELRPLARADERARLLMSIPGVAELLGLTIAAEVGDISRFPSARKLVGYSGLTPRIKQSGQSSRTGRLSKAGPDTLRWAAVEASQQAWRPNNPWHELYSDIKRRHGKANPAKAAVARKVLIATWHILSQGEPFKPSAPRATDPVPASSSIRLAA

SEQ ID NO: 347483 - protein, 345 aa, unidentified
MNTTQVAVDLAKSVFQVSVSHAPGRVDEQHRLSRRRFRTFFLHHPPTHVLMEACGSAHHWGRELQGLGHQVSLLPPAHVARYRQGNKTDRADAKALLEAARNEDIAPVPVKSLDRQSITALHRLRSGYLATRTSRINTVRGLLREFGLPVPQGPRAFLAKAPIALDDDKLPTYLKTALTQALLEIKELQAKADDLKSQLERLAPLIPSVSFLMTVPGIGILSATALVATVGDVQRFPSGRSFANYLGLTARESSSGASRRLGPISKRGNRYLRMLLIHGARSALLAAYRTREPDSLQAWAIRTAQARGHNIATVALANRIARIAWRVWRDQRPFQRRPAEKENAV

SEQ ID NO: 347484 - protein, 385 aa, unidentified
MSKEKFDACGIGDEGKKIFSLSCSMNREGFEKFVVQLAARSTASLLLGMESTASYHIALFSYLTAKGYRVAIINPLLISNFAKLSLRKTKTDKKDAFTIAQFLLLQRKAVNTQTPSPHLAELRDLSRRRERLVDQMTSLKNDMKRILSVTFPELETITGIFTKSTLRLLMQFPSAHALQKAGYDAIAPIAISRSRGRKSSASVQVLMDTATTSVGVASPAKDLILKQEVTLLLELEEQAEEIMKLIMDLSGEKIKRDAKILISMRGIGDKTAFNFLIEMGGDVNAFEHDRKLIAAAGLDPTTYESGKYKGQSKISKRGNRHLRRVIWLMTTKVIISNPIFRTYYFKRRKEGLIYKMAVLATAHKLIRVMFSMLVNQKCFEPERRK

SEQ ID NO: 347485 - protein, 326 aa, unidentified
MSLPALGIDIAKRKFQAALLVNGKVKQKSCSNTPEGFEELKSWLSRQKVERVHACLEATGNYGEALATALADAGHLVSIVNPVRIQGFAKSELIRTKTDAVDSALIARFCEALKPETWVPPAPEVRELRALVRRLSDLQEMYQMESNRLEVGDPSKAVRDSIRALVEHLQEEIDKTKTLIRKHIDRHPGLKAQRDLLTSIPGIADQTAATLLAELGDLSQFTSAKQVAAYAGLFPKERSSGTSVWGKPRLSKVGNHRLRKALYMPAIVAMRANPLISDHCARMLDKGKAKMAAVGAAMRKLLHLAYGVLKSGMPFDSAYTAAQVRA

SEQ ID NO: 347486 - protein, 369 aa, unidentified
MAAKSLIIMNTQITANPKIYIGLDIHKKTWTVSIQTDIFFHKTYSMPSKSSDLFDYIEKNFPKHEVNLVYEAGCCGFSVARYFLNLGWNVLVVNPADVKTGDKQKYQKTDTLDAKNLSNQLKADTLIGINIPTEAEDQFTSLARHRTQVTKKLRQTKSHIKSLLLFHGIEIPAEYDNSNWANGFIEWLENLKFSTNCGDLALQGKIRMFKFIKSEYLEIANQMRAYCRKEHKTDYYLLKSIPGIGGYLSAVIIAECGDLRRFNTEGQFASFVGIVPGMYNSGGGEKCLGITPRSRSQLRSYLIEAAWIAIRKDAEMQQYYRKHHGKNVKNIIVKVSHKMTRRILSVIKKQTPYQVNVNLVLEKNKKKSA

SEQ ID NO: 347487 - protein, 343 aa, unidentified
MDHFGGLDVSVKETSVCIVDDTGRIVKEVKVASEPEALLKVLGKPAYRFKRIGLEAGPLSQWLFSALAEAELPVVCVETRHMQAMLKAQINKTDRNDARGIAQMVRAGLYRPVHVKTLRSQKLRMLLTHRKLLQSKAIAIENDLRGTLRNFGLKVGMIGKVKFESRIKELVDNLPDLALLVEPLLIVRRALREQIIILHRRLLAIVRSDEVCRRLMTTPGVGPVVALTYRATVDVPARFRKSKSVGAVFGLTCSRYQSGEIDWSGRISRCGDEMMRVMLYEAAQSMLRSKKWSWLKAWAMQIARRRGMKKAIVALARRLAVILHRIWVDGTEFRWTREAVPAA

SEQ ID NO: 347488 - protein, 336 aa, unidentified
MTQVAMDVHKRHSTLAALNPSTGEIVVRKFLTDRNDLARKLADLPRPLMVAVESSRHSPAICRWLQAMGAQVHLVNATELAKHTKGKAAKTDANDAGTMLRLMRLDELPECYLASEEVVQLRDLWRGRNALVEIGTKLRSLLRSTLARAGLQLNYSDLRGKSARDSMPELIEELGPLSAFMARVLWALLGELEAHLALINSELKSQVAAHPVASELLALPGIGPVVALGLVAEIGCIERFADPKNLHSYAGVVPRVSQSGDSRRTGSLASECNRHLRRATTTAAQGASRCRADSDAKRTYNRVKRRCGSNSAKIAAGRKVLTEVMFIWRDLMPQSA

SEQ ID NO: 347489 - protein, 323 aa, unidentified
MSVSQMRILGIDVAKAKLDVALLLPDGKFRSEVIPNTPEGFEKLAVWLERNDAVQVHACMEATGIYWEAAAAFLAEKGHAVSVVNPAQISAFGSAALSRTKTDKKDARLIARFCAERRPPLWETPAPELAELRALVTRRDALERMRTQEINRLHVSHAEIRQSVERHVAYLEREIKDIDAEIQRKTDDDANLKKQRELLDSIPGLGVKTIPVLLSFFSGKRFRSSRQAAAYAGLDPRQHESGSSVRRKPRISKMGHAFLRKTLYMPAMVAVSRTSWGKAFKARLTANGKPPMVILCAMMRKLVHVAIGVLNSGKMFDPALHGA

SEQ ID NO: 347490 - protein, 354 aa, unidentified
MKTYYVGMDVHRASIVIVVLNGAGKVVERITLQTSATAVRSYLQRLKGKVYVTFEEGTQAQWLYDLVRGLVTEVIVCDPRQNRLLAAGNKSDAVDAEKLAELLRNRSLKAVDHADHGMRALKELVRIYDSLVQDSTRVMLRLKALYRGRAIDCRGHDIYRQDRRPQWLKKLKERGAKQRAEFLYRELAALKPLRHEAKLLMVREARKQAAYPWLLSVPRLGAVSVAQLLAVVGTPHRFRTKRQFWTYVGLAVVTRSTADQEVVNGVLRRSRRPVATRGLNRNHNHLLKRVFKMAATSACHSEPFQAGYEARRQQGMDPALARLTIARQIAAITLSLWKRGEKFKVERIKKQPAA

SEQ ID NO: 347491 - protein, 338 aa, unidentified
MAIITVGIDLAKNVFAVHGVDESGKPALVRPEVTRAKLLELIANLPPCLIGMEACSGAHHWAREFAKFGHTVRMMAPKFVVPYRMSGKRGKNDAADAAAICEAVTRPNMRFVPVKSIEQQSRLFVHRARQGYVEQRTALINRIRGLLSELGIVLPLKAATVRREAHQHLEDLPGWCNTVVGDALSELTHLDERIKQYDKYIEQAAMEDARSKQLMQLAGIGPTTASAIVATVGGGHDFTCGRQFCAWLGLVPGQYSSGGKQRLGRITKAGDPYLRTLLIMGGKAVLAAAKNKTDPVSRWAISVQERRGYWKAVVAIAAKNARMCWAMLQQGEAFKMPA

SEQ ID NO: 347492 - protein, 311 aa, unidentified
MSYDSIGVDISKTHFDAHRTHTQAQARFANTASGLRALTRWIGRMPPDCVVYEPTGPYHRRFEAALSGQLPLVKVNPLQARRFAQARGTRAKTDAVDARMLAEMGRAFALVPDQPLNETQRELSELQVARASLVRDRTALRNRLKTQILAVTRRQTKARLAQLDRQLAQLAVEIDDRIAGCPDRRRARAILISIPGIAAVTARAILIACPEIGKIGSKQLAALAGLAPMTRQSGSWRGTSFIQGGRKHLRDALFMPALVARSRNPDLAAKYDALRAAGKPHKVALTVLMRKLLLLANTLIKEDRMWNPKRP

SEQ ID NO: 347493 - protein, 313 aa, unidentified
MHTIGIDMSKASFHAAFDEKTVIIFKNTNDGISSFVETLVTRGCTKDDTLIGTEATGVYHLLLCARLSEQGWHIKVINPLVAHRAISATLRKVKTDKHDALAIRRVLLLGAGYLYADTSETLAFKTLFGQRETLVYMRAKLRQQSHNHRTRQQAVSVPLHDGFGVVMRTLTVEIGRIEKKLPYHDAHTQTLLRSIPGVGTVTSAALVAHIGDIRRFSSPEKLVAYIGLDCRVHESGTSIRGKGYITKRGNRCLRHVLFNAAFIAKRHNPALREYFEKKVKEGKHYLSALCAVERKLVHIIFAVWTRGTPFEDR

SEQ ID NO: 347494 - protein, 387 aa, unidentified
MPQPNDLSRSLLALDQNSTIIAVVELSHSSWLVAGIVPGIERQPRKKLEASPERLLALLHRWRDEAVRAGRTITRMALAFEAGRDGFWLARWLAARGVEAHVIHASSLAVSREHRRAKTDRLDTELLKRGFLGWLRGERGHCSMARVPTIAEEDAKRPNRERDCLVGERTRIVNRIKSTLARLGVRNFKPTLRKGSERLATVHTPEGMPLPPNTLAELQRDMARLSLVVSQIKEIEDARQKRLEQQHETGSHAMVRLLARIVGIGVETADMLVHEVLSRPMRDRRAVARYAGLTGSPDESGAQRREQGLARAGNARVRRGMIQLAWRFLMFQKESALALWYRARTADSRSGTRKTMIAALARKLIIALWRFVTTGEPLEGVVLRPAT

SEQ ID NO: 347495 - protein, 345 aa, unidentified
MKITTIGLDLAKNVFQVHGIDAAGEVVVRRALRRGQMLAFFSKLEPCLVGMEACGTSHYWARELGSLGHEVKLMPPAYVKPYVKRGKTDAGDAEAICEAATRPTMRFVAVKSADQQSVVMLHRTRELLVRQRTQLVNMMRGQLAEFGVTLAKGIQHALKFVRRLLDGYAPDIPELAVKVVMVLAEQLRQLQIRIGELEKELKRWFRADRVAQGLATIPGIGFITASALASSVTDPHQFTSGRQFAAWLGLTPRANSSGGKERQGRISKMGDQHIRHLLVSGMTSQLRWARRHPDAHPWVASLLARKPAKLVAVAMANKAARIAWVVMTRGELYRARHPSTQQGAV

SEQ ID NO: 347496 - protein, 419 aa, unidentified
MDVVVARCAGLDVHKDTVVACVRTPGAEGDREVVTRTFGTMTVHLLALRDWLVASGVTLVGMESTGVYWRPIFYVLEDAMECWLLNARHMRNVPGRKTDVADAEWIAQLVEHGLVRPSFVPPPPIRELRTVTRYRKAQIDERSREAQRLDKVLQDAGIKLSSVASDILGKSGRDMLAALVDGTSDPEVLAELARGRLRSKLAALAQALEGRFGPTHALVVGEILAHLDYLDEAVGRLSERVEEMMAPFATKRDLLMTLPGVDRRVAEALVAETGGDMSRFSSAAHLASWAGMCPGQHESAGKSRSGRARHGNIWLQRHLAVAAMAAARTKGTYFAAQYARLVRTRGKAKARKAVGHSLLVAAWHILDGGVPYAELGEDWFERRNSPERRARRHLADLRSLGWAVTETDNGVLISPPAAA

SEQ ID NO: 347497 - protein, 370 aa, unidentified
MDEGIKFFVGLDVHKDTIAVAVAEADRAPARLIGNIAHDVSKLLKLLARYGEPGAVQVVYEAGPTGYGLQRELTRRGYQCQVIAPSLIPKRAGDRVKTDRRDSLRLAELSRAGELRAIWIPDPADEAIRDLARAREDAVNARTQVRHQLKGFLLRHGVRYAGRTSWSKAYYRWLATLNFGAAGAQTAFTDYWQAVSAADERVARLTTALVSSIEGWRFEAVVRSLQALRGIDQISAIGLVAEIGDIGRFAHPRQLMAYLGLVPGEQSSGERVVRGSITKTGNAHARRLLTEAAWNYRFQPRIGSRAQRRAEDLPQAVRDVAWKAQLRLSGRFSRLRARGVHLNKVCIAVARELAGFVWAIASTRAKLPQD

SEQ ID NO: 347498 - protein, 322 aa, unidentified
MSQPNPLCVGIDVSKATLDIAASSDVAQFTVSNDSDGFNAIITGLRRHSVALVLMEATGGLEVAVACSLQAEGFEVAVVNPRQARDFARAMGYLAKTDRIDARVLTQMAEVINRHPERKRFIRALPDAERQALAAMVVRRRQLIAMLVAERNRLHPFHPQNKKSINTIIKALEDELVRLEKEMDSHIRNHFKEIAERLSSIKGVGTMTVSAMLAEIPELGTLSRREISALIGVAPVNQDSGTMRGRRTIFGGRAGVRSALYMAALVATRFNPVIKTFYVRLLAAGKAKKVALVACMRKLLTILNAMLRKNEEWDESYHHVAP

SEQ ID NO: 347499 - protein, 354 aa, unidentified
MSQQTNCAIAVIGIDIGKNSFHVVGHDARGAIMLRQKWSRGQVEARLANLPPCLIGMEACVGAHHLSRKLASLGHDARLMPAKYVRPYSKGQKNDFNDAEAIAEAVQRPTMKFVATKTAEQLDLQALHRVRERLVSQRTGIINQIRAFMLERGIAVRQGIGYLRTELPTILATRTDALSPRMLRVIEELAGDWRHLDQRIDGLSGEIEALARQDPACSRLMTVPGIGPIISSAMVAAIGTGEVFSKGRDFGAWLGLVPKQISTGDRTILGKISRRGNRYLRVLFVQAAWVMLVRIKNWERYGLKSWIEAAKKRLHHNVLAIALANKLARIAWAVLHKGRAFECVKTNEAVSQSA

SEQ ID NO: 347500 - protein, 361 aa, unidentified
MKRALKDNQEAFAGQEFYIGIDVHQKQWTISVQSNQLPLAKPLTMDPSAGSLSSYLKRQYPGGKYYAVYEAGYSGFWPARDLLTYEIETMVVNPADIPTMHKERSTKTDSVDSRKLARSLENKELRAIYIPERKAEEYRLLNRYRSQLVRDETRIKNRIKAILAEFNYRVPVDLEGNRWSGAYLRWLQTITFETPYAQIAYNERLEHLAESRKRLAKVLRELKLMATQEPSIASLVKLLQTVPGVGFLTAILLVVELIDMHRFKRFDDLVSYIGLAPSIHQSDEHSYSRGLTKRQHKELRFRMLESAWIAVRKDPALTMKYGQLCKRMNKNKAIIRIAKMLLSRIRTVWITQTPYVYGVIE

SEQ ID NO: 347501 - protein, 365 aa, unidentified
MSMMHQSVVPDQSYFAGLDAHERHIAVAVVDKQGGLVHRASARSAEPARLVETLTPYHTPAHPLAVVVETCPFWPWLYDLLVPVGIRFHLAHAQELEAIAKAARKRDERDASLLARMLAGGLIPFAYPKPPAQRENACLVRHRAALVRHRTMLANRIHSQLHAVGLTLPRERLLRRATRAWLRETAGPVLRPEQRRLVASHWALLRRLTRMLRQLEPAITAAAAREPAAGLLTTIPGIGAYRGLLLATELLPMTRYASEGKFVGYAGLAPITQCSADTVHHGPLPNAANRWVRGALISSIPTHLRCAPASALSQYYARQKARLGWQIARVATARQLARVIYHMLRTGECWRATPALEAPARGPRA

SEQ ID NO: 347502 - protein, 459 aa, unidentified
MKKNDGRGKRVKVKRAEGTLSVTRAHVAGIDLGSVEHYVACPPRDGQANVKTFGTTTPERVALADWLQTEGVVSVAMESTGVYWIPLYELLEQRGLEVVLADARQLKHVPGRKTDMIDCQWLQLLHSCGLLRGAFRPADAFCHLRALVRQKATLVDDQATWLNRMQKSLDQMNVRVHRAVSDISGITGMAMIRAIVAGERDPRQLAGLRDERCFRSRREMVEELTGHWREDHLFNLKEALAVYDCLLARIASYEEEIQRVLKALVCKPDLGPAPETCKANKKKQMRTRGQEPLRQALYGACAADLTSIDGISTTTAEVVLSELGPDLSAFPTERHFVSFVKLSPKLAISGGKPIHKRPKGTASTRVSAALRMAAVALRNSQTALGAAYRRLARRKGASVAVFATARKLAILIYRMLRYGMAYVDEGVQAYEQRFQAARIQMCEQIANQFGYKLIQQESV

SEQ ID NO: 347503 - protein, 346 aa, unidentified
MEIHVIGIDLGKTVFHLVGLNQGGEVVVRKKFSRAQLLRFTSNLHVHLIGMEACGGAHFLGRALRAQGHEVRLMPAQYVKPYVKTNKNDFIDAEAIAEAVERPKMRFVPIKSDEQLDMQSLHRVRERWIVRRTAVVNQIGSLLLERGVTVRKGRKHLVAVLPGILEDPETDLSGPLRVLLAQLQWEMKHLENQIEEVDAVIVRTSGQDEACQRLLAIPGIGPLTATAIVSAIGNGAEFKKGRGFAAWLGLVPAQYSTGGKQKLLGISKRGNCYLRKLLVHGARAVLQTKDKQSSGLSTWLTQLTSRAHSNVAAVALANKLARMAWAVLAKGEAYRPPLLAAELVGQ

SEQ ID NO: 347504 - protein, 516 aa, unidentified
MVPEECANISGDMCGGHVVPFGRMQRAHLRARRVPMNPRCKGEAPMSTTPTRAKRRRQVRIASKPKVPLPPQLQRVNLNAAGIDIGSEEHWAAVPPGRDLEGQDVRRFGAFSGDLCALADWLKRCEIGTVAMESTGVYWIALYELLVERDFEVLLVDARRVQNVPGRKTDVLDCQWLQELHTYGLLRGAFRPADQVCVLRSYLRQRSMLVAYASHHIQHMQKALEQMNLKLAHVVSDITGVTGMGIIKAILSGERDPVKLAKLRDPRCKNSEATVARALEGHYREEHLFALQQALELVEFYQRQITACDRQIEACLQRFEERSPKTPLTDRPRRRRRSEVAFDARSYLYRITGVDLTQIDSIEANTALTLIGEIGIDMSRWPTEKHFGSWLGLAPGNKVSGGKRLSGRTKPSANRAAAALRLAAQSLNQSQSALGAYFRRLKARLGAPKALTAAAYKLARILYRMLKYGAGYVDQGETVYEERYRDRLLRNLKRRAAELGFQLTAINSSTGQPALI

SEQ ID NO: 347505 - protein, 375 aa, unidentified
MTQESPVSPKAAIHDTEVRMITIGVDAHKRVHVAVALDAAGRQLGVWKGANSSRAWQELKDWAAAFGGQRVWGVEGAWSYGRGLAQHLVVSGEVVCEVNSRWTALGRRSARKRGKTDRLDARSVAAFVRQEAATLPRVGEDDETAVLDLLVRERENAMAEVTRLRNQIHALLMQIDSEYEIRLRNRRVRTRMRLLESYEPPVAASTPLQRERVAAVRRLATRARVAFEHAEGLAKRIRALAQEGFAPLTELVGVDLLTAGQLAGILGPGHRFEGESQLAAYAGAAPLEASSAGLVRHRLNRGGHRQLNWILYRIVLTQSQHSEQARAYLARRRQEGKTTREAFRALKRYIVRAIWRLWQLCPGAVRREVVASAAA

SEQ ID NO: 347506 - protein, 408 aa, unidentified
MMKHVIALDVSKGKSSVVIYDRYRQCEFEGELNHTRIDFERLHERIEEITKSDGQVPHIVFEATGVYSKSVEAFFKNHGYTYSRMNPLEANLQMAKMRRHKTDCSDAHELAKTHFKMERETTYVQDDYYEQMRALTRYYDEVDEEMIGLKSRMHAILHLSFPELEELITPSSALFLTIVQLYPHPALVLSHSKTVIKNRLKANTKKNLSLTRAEKKAMELMEAAQNSYPAIKPIDVRCDQVRDYASRIGELKEKKEALVQQMVVLSKERQEYTVLRSIPGVGDSTACRLIGEIGDIRRFQNAKQLNAYAGIDIMRYQSGNTQYRDRINKRGNKHLRKILYFMIQGMLMLKEKPNHFVDYYYKLKTQPQRKPHKVAIIACVNKFLKVTFQLLTRGILYDYESALPAQNS

SEQ ID NO: 347507 - protein, 423 aa, unidentified
MNRLHYELHVGIDLGQWLHQACVVDANGELLEERGFEHSVDGLGTTLAWLLSLAGKDAERIAVAIEKPHGAVVETLLESGVAVFAINPKQVDRFRDRHSMSGAKDDRRDAFVLADALRTDGHRFQRLQLPPPEMVALRELLRTRDQLVKNHVALSSQIRDLLARCWPHLVTLAPKDKALDAFFCELLQLFFDHHPTAELSLQNIQKLVHQHHIRRLQPEHILEVLRKTPLRVAPGTTQATSAHLNLLLHQLILVRQHRRDSDQHLERWFKQLQPTSNQPYSDAAILASLPGVGAVVLASVLSYAHDPVRLRNLDAFRSLGGIAPVTKKSGKRGQQRPQILMRRARSLPLNNALHHWARIAVLTDPHFKDHYDRLRAKGHNYARALRGVMDRILAIAVAMLRDQTLYDPSKRANFNEGAKKVSS

SEQ ID NO: 347508 - protein, 341 aa, unidentified
MWIIGCDYHPRFQQIAMVNTEGGECGERRLEHVEQAEQFYRSLRGQAVRVGMEASGHARWFERLLAELGMELWIGNPAAIRAAEPRKQKTDARDAEHLLRLLMEGRFERLRIWVPRAEERDLRQLVLHRHRLVEMRTRVKNQLRAVALNEGVGRSTGAVEPEGAGAVSGSGPAGVDRSAARGQLGVAGGVDAAHRSAGPGGGAGSGAAAGGGAVADVSGSVCDHGAGVRADDGRSDALPVWQAGASYLGLIPSEDSSGGRQRLGHISKQGNALLRRLLVEAAHSAVRGDAELGCCYCRLAMKKNRSVAAVAVARKLAERLWWMWLRGLDYGQWHESGSHAG

SEQ ID NO: 347509 - protein, 335 aa, unidentified
MQVYGIDLSMEKFDVNFIDAKGKEKNREVKNGVVSISKFLSSVPEDGILCAEHTGAYGDLLVYLCNQANIPIALVSGYTIKHSLGLLKGKTDPLDARRIREYGERFTDKLVFSEYDKESIVELKQLHTFRSQLVKARKTLLTSETGRCNLPMQSVSVHNHLQPVLSGLDTEITAVEEEIEMLIKVDQEMNENYELVTSIMGIGPVIATDLIIKTGNFKTIDTHRKASSYAGVCPFPNTSGKMVGKSKTSPFADKKLKSLLYMGAKAAVKHNKEYRLYYQKKELEGKPYFLIMNNVANKMLRTIYSVVKNKTPFSLDHICLDPRERSINSSTKKVT

SEQ ID NO: 347510 - protein, 343 aa, unidentified
MDHFAGLDVSVKETSICIVDDTGRIVREVKTASEPEALLQVLTNPAYHFKRIGLEAGPLSQWLFSALAEAGLPVICVETRHMRAVLKAQINKTDRKDARGIAQMMRVGLYRPVHVKTLRSQKLRMLLTHRKLLQSKAIAIENDLRATLRNFGLKVGMVGTVKFETRIKELVENLPDLAMLVEPLLIVRRVLREQIGILHRRLLAIVRDDDVCRRLMTVPGVGPVVALTYRVTVDVPARFRTSKAVGAVFGLTPSKHQSGESNRTGGISRCGDEMMRMMLYEAAQILLVRSARWSWLKAWAMKIARHRGLKKAIVALARRLAVIMHRIWVDGTEFRWTREVAAA

SEQ ID NO: 347511 - protein, 402 aa, unidentified
MNAVGIDVSKGKSMIAIMRPFGEIVSAPFEIKHTASDINSLVELINSVEGESRIVMEHTGRYYEALAHQLSEANLFVSAINPKLIKDFDNDSLRKVKSDKADAIKIARYALDKWQNLKQYNVMDELRNQLKTMNRQFGFYMKHKTAMKNNLIGILDQTYPGVNTYFDSPARSDGSQKWVDFASTYWHVDCVRKMSQNAFIDHYQNWCKRKKYNFSQSKAEEIYGKAKELVPVLPKDDITKLIIKQAVNQLNSASTTVESLRTLMNETASKLPEYPIVMAMKGVGASLGPQLMAEIGDVSRFTHKGAITAFAGVDPGVNESGSYEQKSVPTSKRGSSDLRKTLFQVMDVLIKTHPQDDPVYQFLDKKRAQGKPYYVYMTAGANKFLRIYYGRVKEYLSSLPES

SEQ ID NO: 347512 - protein, 342 aa, unidentified
MKIIGCDFHPSFQQIAMVDTETGEHTEKKLTREEAAAFYRNLSGKVIVGMEACGNTLWLERLLAVLGHELRMGDATKIRAMAVRQQKTDRRDAELLLTLLVQGRFPQVWVPSLEQRDTRQLLLHRHKLVSVRRQIKNQLQHLALNQGVQRKWKLWTQKGRQLLEDLPLSGWTARRRSDDLELLDQLNRSIAELDTAVQQAAAQDRIALLLQTHPGVGPITALAFVLTLGQIDRFAHSKKVVSYLGLNPTEHSSGGRQRLGSISKQGNPMLRSLLVEAGQSSARLVPELKRAYQRLKHRKHSGVAKVMVARKLAVRLYWMWRTQQPYAATRMQGSPSHLVGAR

SEQ ID NO: 347513 - protein, 331 aa, unidentified
MIKKTAHFAGIDVGAKELVLVVRKNATSMKAQKFANTPAERARLVAKLVKLPGVSVCLEATGAYHLELAVALHDAGVRLNVVNPKAAHNFAKALMKHSKTDAIDADTLAQFAERMPFTVWVRPSPQALTVRSFARRINALTRQKAMTKNHLHALSLGPDLPKAVLDDAKLAIAQLEKRLAHLSSKAQAFIGKHEDLKRIFTLLLGIKGIAETSAIALMGELLLLPKALTHKQWVKYAGLDPRAFDSGKSVHKAPRLSKAGNRHIRQALYMPALSAKQHDPYVKAFFQHLIEKGKKPLQALCAVMRKLLHAIHGMLRDNQPFDNTRFYATAA

SEQ ID NO: 347514 - protein, 313 aa, unidentified
MKALQSNVFIGIDVSKERLDVAVAPSGETIGFANNEDGIALLADFIKPQAPALVLFEATGGWEMNAVNHLATQRLPLVVLNPRQVRDFAKATGQLAKTDAIDARILARFGEAVRPEVRPLKPVELRKLEALNTRRRQIVEMITAEQNRLVSAPEWVRPDIEELIAILKKRLAAINRDLNKLIRKSPLWREKDKILQSFPGVGPVMASTMIAELPELGNLNRREIAALVGVAPLNCDSGTHKGKRKIWGGRAALRSVLYMCALTATRCNPVIREFYQRLRRAGKPFKVAITSCMRKILVILNAMMRSRTCWQTP

SEQ ID NO: 347515 - protein, 356 aa, unidentified
MSENITADQGVTIGLDLGDKHTQCCSLDDSGEVEETFCVRTTAPALSKRFGSIVPCRIILEVGTHSPWVSRLLSELGHEVIVANPRRVRLISANDSKNDAVDSELLARLGRADPKLLSPITHRGQQAQKDLVLLRNRDGFVRSRTQLINQARGFAKSLGDRLPSSSAVAFPKRVRAAKKDQLFSGLETLLQVIDTLTVAIGDMDRKIERLSRERYPETMLLRQIKGVGPLTALCFLLTLEDPNRFKNSRSVGAYLGLRPKQRDSGEQQPQLRITKSGDEMLRRYLVTASHYVLGPFGPDTHLRRVGLRLAEHGGKAAKKRAIIAVARRLAVLLHRLWVTGEEYQPLGYGTAGSKAA

SEQ ID NO: 347516 - protein, 410 aa, unidentified
METIVKRAAGLDVHKAQVTACVRIPGRGGARTQEVAEFQTTVRGLLSLLDWLKAHRVTQVAMEATGVYWKPVWAILEDEFDCLLVNARHVKQVPGRKTDVSDAAWLCQLLEAGLLRRSFVPPKPIRALRNLTRYRKAQIGERQREANRLHKILEDTGIKLDCVATDILGASGRAMLDALVAGTTDPQVLAELAKGKLRAKIPALKEALVGRFDRQHALIVSAILAHLDFLDEQIQLLSDEIEAQLAPFARAVELLCTIPGVQRRTAESVLAEIGTDMSRFPSDRHLASWAGQCPGNDRSAGKRRSGKTRHGSKWLDTALTEAAMAATRTNDVYLAAQYQRLRPRRGHGRALGALKHSILCACWHMPQTGKLYREAGGDYFSRRDPERATRRLVAQLERLGHRVTLEAAAA

SEQ ID NO: 347517 - protein, 451 aa, unidentified
MKKEKVNKGVIKMGSGLPVFNHFAAGIDIGDTLHCVAINDGNGGHEVKTTSAFTCDLNEIVDYLKHNGITTAAMESTGVYWLPLYIMLEEAGIEPYLVNAKHVKNVTGRKKDDTDSIWIQKLHTCGLLQKSFQPDNEIRLLRNYTRQRKNLIILGTDAVRRMQKALELMNIKIHTVISDILGKTGMEMVKAILAGEKDPQILATLCDPRIKASQEEIIKSLQGIWKEEYLFMLEQAVENYEFHQKQIKNCEEKIKQQLIKQVAIIKEGDITSLEKMLKKKAKSKRNQFDFAIAPLLNAIAGVDLCMIPGISEVTALGFISEVGVDMSKWNSGKQFAAWLNLTPNTKITGGKIISSKMMKKNNKAGQYLRQAASCLSTNKTPIGDYYRRMRGRLGGRGAALTTAHKLSRVIYTMLSKKTEYNPEMMIDNQEKFKEEKIKKLEKQLARLKQAA

SEQ ID NO: 347518 - protein, 409 aa, unidentified
MEALYPHCAGLDVHKETVVACVRHMEGQVRTAVKTFSSTTRGLMDLSAWLSEEAVTDVAMEATGVYWKPVWHILSDGEFHLVLANAAHVKNVPGRKTDVNDATWLADLMAHGLIRASFVPDEPTEQMRNLLRTRKQFVRERASQVQRIQKTLEDANIKLESVISDVVGVSGRRMIEALIRGQSEPQELAALADGRIRATGAQLEAALRGRVKAHHRFLLRLHLDHLDAVDAAIARIDKEVDGQIEPFRTAVERLSSIPGVSSLSAEVIVSEVGLDMSRFPTVGHFISWAGLCPKNDQSAGKRRSTRMRKGAPWLKTILIQCAWAATRVKGCYLQAQYLRLRSRRGAKKAAGAVAASILTAAYHMLRDGTSYQELGGSHFDRRSTTQQVDRLLKRLHHLGYDVQIAPVAA

SEQ ID NO: 347519 - protein, 352 aa, unidentified
MPKATPTGQVVIAVDPHKASWTAVAVDQHCRPLGSLRVEVNRAGYRQLRRFARAWPHAIWAIEGARGLGAPLAQKLAIDGIETLDVPAKLAHRVRMLSTGHGRKIDEADALSVGIAALNSTGLQSMRTDSTAQVLRTLTEYRDDLILTRTQTANRLHRLLVQLVPAGLPKRLTAEAAAQLLRSVRPREHYGRTLRQVAVDLVTELRRLDRRIDTATDSLDAAVTESRTQLTTIHGVGTVVAAKILAHTGNIRRFRSAAAFASYGGVAPIEVSSGDARRHRLSRAGDRQLNDALHVIAITQIRRDTVGRAYYQRKRAAGKGHKEALRCLKRQLADVVYRIMLRDAGTSLLAGA

SEQ ID NO: 347520 - protein, 312 aa, unidentified
MRIIGCDLHARQQTLAMLDTETGEVVNLTLTHEGNNVREFYSKLPRPVLVGIEATGSMHWFLNLMEELGIECRVGHPAQIRAAEPRKQKHDRRDADLILKLLAENRFPAIWLPSKELLDLRALLLHRHQWVRMRVRMQNTLQAIAMANGLRRGPSLWSYDGQAKIAFLPLLPHAAYRRNRLQAMYKTMESEIESLNKQVAEQAGNRPGAQRLMTHPGVGPVTALATEVFLGDPQRFADSKALASYVGIIPREYSSGGQQRLGGVTKQGSPLLRFLWGEAGAHATRHDPELKRFYRRKLVHKVQKTLDNGRPH

SEQ ID NO: 347521 - protein, 404 aa, unidentified
MKGPIVSIDVSKGKSDYQAFKNLNVKYTGSRSIKHNKEGFDEIVNLVREMEKKLETEVCVVYEATGVYHRVLKKVLEDNNIKQFIINPLLSAKTRKNDSLRSPKTDKFDPKSIAKTYYSHSLHNSHKQETIYHELRELSRYYEDILVHIRKDKVAFRAQLDIVFPGYDTLYDDLYGPVALAIIEKYPHPEMLQKKKINTVSKVIQNKTCHRQAVSDTMADKAIEYSKTIYSGCDKDDIEVLILQRFIKKLNEDMAEAERTIGEMIKLAQELPDFNIIKSIPGIGDNLAARIIAELGDMTRFKKKNELVAFAGLDPRISESGQNDGDHMHITKKGNKRLRCLLYLAVTCSIRLKRDDNSIKDFYIKKKQQSNPMCSKAAKTACASKLVRIIYSMCKTGELYQYNK

SEQ ID NO: 347522 - protein, 371 aa, unidentified
MGESSKTLYVGLDVHKDTIAVAYAPEDRGADVESVGAIGTRQCDIDKVIRRLESKGATLVFVYEAGPCGYWLHRYLTRQGFSCAVVAPSLIPRKAGDRVKTDRRDAMTLARLLRSGDLTSIYVPTVADEAIRDLSRAREDAVGDLKRSKVRLKALLLRQDIRYEGRANWNAAHLRWLARVVCPTPAQQIVFQEYVHTVTEQSERLRRLESELLTAVKTWRLYPVVEAVQALRGLDLTGAGTLIAEVGDLTRFDTPRKLMSYLGLTPSEYSSGAHRRQGGITKAGNGHARRALVEGAWAYRYPAKVSRHLQLRLEHVSPDARAIAWKAQVRLCKRYRLLSARGKHVNQVVVAIAREMAAFAWAIARTVPVAS

SEQ ID NO: 347523 - protein, 373 aa, unidentified
MSIVMGVDQHRAQITAEWIDVASGEISRARVSPADRAGARRFLERFAGQQLEVALEATTGWRFLVEELRAVGAVVHLAEPAETAARRGNKRRAKTDRADARHHRELLLAGRLPESWIPPDHILDLRAQVRLRHTLSEQRSEWQQRIQAVLYHHGCPQRRQLITDDGRDWLQAQPLPGTAREQITVSLEVIDALELQIVPLDRELRSYARRQTGCKALIAAHYGIGPLCAVTVLSELGDVQRFDNSRDAVRYGGMDITVYQSDRHRSPGHLSRQGPPALRWALYEAAQAARRPGSPDRDYYLQTAERLGGNRACLALARKLLKRCYHTLRELGEDALAPPADERGSGAARRASSGSPSRTERPATPERADALAA

SEQ ID NO: 347524 - protein, 355 aa, unidentified
MTNTLGPVTGGVDTHGQTHHVAVIDQVGRQVSDAEFPTTPAGYRALLAWLGAQGQLDRVGVEGTGAYGAALSRYLSGQGVVLVEVDRPDRKTRRAQGKSDPIDAYAAARAALSGAATGIPKTRDGRVEAIRALRLVRGSAVKARTQAINQLKSLLVTGPADLREQLRPLGSAALVETCAQLCPDGDLTDPAIAVKTALRRLATRIHALNAEIAEADRELAPLVTAAAPCLVALLGVGPEVAGQLLVTAGDNPDRLHSEAAFAHLCGVAPLPASSGRIDRHRLNRGGDRAANCALYRIVLCRLRYDLATQAYTERRTKQGLSKPEIIRCLKRYVLREVYRTLVSAATPKEDLAPAA

SEQ ID NO: 347525 - protein, 347 aa, unidentified
MDQQCHYVGLDVSLETTSICVIDDAGAVIWRGKCRSDPDTITAIVRQHAPGAVRVGLETGQLSNWLTLSLRRRGVPVVCMDARHAKAALSLQINKTDANDAFGLAQVVRTGWYREVAVKSMDAHTLRMLLVARSRLVSQRQATANTIRGLLKTFGLVVARGSKGLFPVRVREQIAGNPALIAIIEPLLAVWHAIRDQVAMLDRQMLARARNDQAARRLMTIPGVGVVIALAYTAVIDDPARFRRSVSVGAYLGLTPRRYQSGEVDTTGHISKCGDSLLRGYLYEAAAVLLCRDARASILKSWGLGLAKRIGMRRAKVAVARKLAVIMHRIWSDHGEYRWTAIPPTAA

SEQ ID NO: 347526 - protein, 275 aa, unidentified
MQVTTIGLDLAKNVFQVHGVTDDEEVAFNRPLRRTQLLPFFSKIEPCLIGMEACSSAHHWARELTALGHEVRLIPPMYVKPYVKRGKSDAIDAAAICEAVTRPTMRFVAIKTVEQQALLSLHRARDLLVRQRTQLINGLRGMVAEFGVYIARGLARVIDFAENILTGEVLDLPDVANEVIRNLSEHLMALQARIRWYEDRVKQVAKEDARVRLLRTIPGVGAVTASAIIASIGDGHQFRNGREFAAWLGLTPANKSSGGKEKLGRITTLSGLCCA

SEQ ID NO: 347527 - protein, 355 aa, unidentified
MNSVKYIGLDVHLSTISVAVLDAEGKLVMHSVLATHAAAILDFMHGLSGTLHVTFEEGTHSAWLYDLLVRQVARVVVCNPRKNALLKAGNKSDTIDARKLAELLRAGMLSPVYHGETGTATVKQLGRSYTALTEDTTRTMSRLKALYRGQAIPSAGKNAYGRRHRDAWLAQLKGAGLHRRAEILYQELDSLQALRRQARRELIVESGKHGAVKLLRTVPFLGPIRAALLLGRVQTPHRFRTKRQFWAYCGLALETRTSSDYQFVNGQLERKKKPVWIRGLNLNHNHDLKNVFKSAATSASVREGPFRTFYEGLLAKGMAPAMARLTLARKIAAITLSVWKKGETFDAEQLKPQAA

SEQ ID NO: 347528 - protein, 276 aa, unidentified
MTNDMQFSSVCGIDIAKSVMQVYKVTSDGVVSNKAVKRANFLDEFRNVPPALIGMEACGGSQHWARELQNLGHTVRLMSPKAVKPYVTGLKNDKNDARGIYTALAMGVREVPVKSAAIRDLALLQTMRTKRQREKVAKINHIRGILSEYGLVMGKSINAFLAKAGSLIAELKERVDVSSYVVSELITVFEEVKGSILKIQELAKNIQSIARDNRQYEFFLSAPGVGPITAATMTVLLCNPSVFKNGREFATYIGLAPKSTGSGGKNIVTHIPSKFD

SEQ ID NO: 347529 - protein, 425 aa, unidentified
MNDVVMIAVDPHKASNTAAVLDPVTKTLIESARFANTMDGYAQLIAFAARWAQRRWAVEGCHGAGRSLAQRLVTDGERVLDVPAKLAARVRVYSRGHGRKTDKDDAVSVGLAALDGTGVLPVACDDALVSLRLLCDRREKLTAQRTQAVCRLHRLLAELTPGGMRRELSANKAQALLALIRPAGDVSKVRMHIARDHLADIRALDARIKYIGTQIAALVTASGTGLTGLFGVGPVVAGRILAEVGDVARFATKDTFASYNGTAPIDASSGDQIRHRLSRAGNRRISHALHMMAVTQIRYPDTLGRLYYERKRREGKTPKEALRCLKRRLSDLVYYQLLTDRRGTIGTCGSPTTPPLTRFTSTSPAARSPRAAPPCRPPRRPAPAGSSRWTVKTAASSASRSSTPVPASTTTSSTRPKTTAKTAAS

SEQ ID NO: 347530 - protein, 329 aa, unidentified
MSIALPNQQFVGKPYKILHNSIDSLTTAVSKIKEAEELYSLESRIFLESTGIYHYPLFCYLRDKGFNCSVINPIITKNSTNINIRKVHNDRFDSKKAALVGLKPDLKVSLMPSDLALNCRNLCREYYDLMDNRSAYVNKLQGELRMAFPQYLGIFSKVTINTSLTLLETYTSPSAFLKADKQEIIDIIKSTARFGLTYAQNKYNAIIQAATDANQFGYIIDSNIKRIRLYISFIRKYDEEINSILESLHELVDANEDADFVKQIHLIETFKGAGFLSAVSIMGEIGDFSAFSKPKQLFAYFGLDPSVKQSGKFEGTKVQMSKRGSADVV

SEQ ID NO: 347531 - protein, 357 aa, unidentified
MSEGTWVGLDVHARKVVAGVLDAGSGELRTLRVSPVSAEAVRWLSMLPAPVRVAYEAGPTGYGLARACAAAGIACTVAAPSKIPRAAGDKVKTDRRDAERLARLLRLGELVPVRVPEPYEEAARDLVRAREDARGDLMRARHRLSKLLLRHGLVYEATAWTLAHDGWLRRQRFVSRPLALTFDECYGTVLQAKMRRDALDAAIVELAMEPPFAEIVGRLCCLRGVSTLTAFGLTVELGDWSRFRPQSLGPFLGLTPSEDSSGKRRSLGAITKTGNTHARRLLVEAAWHQRRPLRVSTTLERRRQGQPAAVRARADQSARRLHARWHALEGRGKRRTIVAVAVARELAGHCWALATME

SEQ ID NO: 347532 - protein, 421 aa, unidentified
MKFKAQDKQNQLIENISSSHLVVGVDIAQEAHVARAVSYRGIALGSPLQFGSHHEGFGRFAWWIQDLLKSYKLSKVIVGMEPTGHYWLSLARWLSAQGIEAVLVNPHLVKKNKENRDNTPSKSDPKDALVIADMVKNGYYSPVRFNPQAYEELRILMSNRDTVSKRLNSAVNQIHRWVDIVFPELRQVFKVLTCNSAIATLRLFPLPEEISRLTTEQVIAGWKKYMKRHAGVHRAKQLVALAKRSVGVTQALHAYKLHLAQLLEEYDLAQRQLERINLELHSILERIPYAQKLLEIQGINATSLAGVLGEAGDLSGYSHGNALLRHAGLNLAEASSGKWRGKMVLSKRGRPRLRRFLYLMTMCMVMVNPDLRALHQYNVDVKKLKRMKSIMKLCGKIARILVGLARSNEVYDSTRVFPQAA

SEQ ID NO: 347533 - protein, 388 aa, unidentified
MFFLGIDIGKNTHVASLLDEKAKIIFKAYSFANTLDAAEALLVKLEPYKDSLEIGMEATGHYWLSLYSFLAEHKFVVHVLNPIQTDGWRKGIEIRKRKTDVIDSVLIADLIRYGDFLETSLADEDILSLRNLSRFRVYLVNSVSDLKRKAIAVLDQIFPEYASVFSNVFGQTSKELLKSLSLPSDYENLSATKIEEVLSNITQKKKASKTISTLSDKASRSFGISFCKDSFAFQLKLIIEQICFIEEQIASVELEIEQLMSKLGTNIKTIPGVGSVIGAVILGEIGDIERFDNPSKLVAYAGLDASVSQSGEYEASSGKLSKRGSPYLRKALYMAAQRAEFCDPVFHAYYEKKRNEGKHHLVATNAVARKLCHTIYAILKKDIPYEVQ

SEQ ID NO: 347534 - protein, 356 aa, unidentified
MTSLTDLREVVDVVIGVDTHVHTHSAAVVDAATGGILGEITVEATAEGYAELGEFAGEHATLRAWAIEGTGGHGAGLSRHLLDLGEIVVELDRPKRAPRRNGAKSDPLDAIRAAREALARTRLGSPRSGGERQALSVLLAARRSAVNAATEAQQQVFSLVIAAPEPIRARFRGQKLPGMLATAAALRVHPSWDVETTTTVLALRSLARRFRALTKEAVEHQKAILAIIRCWRPDLLEQFGVGPIVAATVLCAWSHSGRIHSEAAFAMLAGVAPIPANSGQVTNRYRLNRYGDRQLNRALHTIVQSRIRYHASTRDYVARRTTEGKTSREIKRCLSRYIARDLYRLLESGPPRLDEP

SEQ ID NO: 347535 - protein, 345 aa, unidentified
MRSMYYIGLDVHKKTISYCVKDGSGQIHSQGAIPATRLDLDRWMKTLPQPWTAAMEATIFTAWIYDHLLPHAAALKVAHPLMLRAIAAAKKKNDRIDAHKIADCLRCDFLPECYMASTEIRERRRTLRYRNLLVRQAVQMKNKIAVLLMEAGVSYNKQKLHKVGYFRELLATNKDIDDGLRPLLRLCRETLVRLGKTESALVRSLGRDPLLVERVERLMTIPAVGPITALTWVLGVGDVRRFSSIKKAISYCGLCGAEKSSAEAIKRTPLSKQRNKHLQSVLIEAAKLAPRRSPDLALVYDQEKQKGNANRATLAVARKLVAYLVALDRRQKEFLPVERENRTAA

SEQ ID NO: 347536 - protein, 341 aa, unidentified
MDYYTGIDVSLECSSVCVVDASGKIIRESKVASEPGALISWLGSLGYELRRIGLEAGPLSQWLFAAMREAGLAVELLETRHVRKAFEAMPVKSDRNDARGIAQLMRLGWFRPVHCKSMGAQETRAALTARKLVQSKLRDVENSLRGILRGFGLKVGKTTDLSFAGRIQELVAGHPHLEMIAEGLLSVHAVLLREFKVFEKRIRSMARLNAKARLLMSTPAVGPIIALTYASAIDDPGRFKSSKQVGAHFGLTPKKHQSGETDYTGRISKIGDGSVRTALYEAAHLMLTKPIKGCSQLKSWAMRIARRAGMSKAKVALARRLAVIMHRMLADGTTFNAAAAA

SEQ ID NO: 347537 - protein, 312 aa, unidentified
MIAHSVHLGADIAKLTIELGCPLFVVPASIPNTPAGFRALLKILAKSPSPIHVVCEATGYHHKAFAAALHQAAITVSVVNPRLPRDFARARNKLAKTDAIDALLLADYGQTMKPAPTPKPDARMTLLDDLVTRRAQLVEDRARETTRLEQTTCAEALASLQRHVRHLDGQIKKLLARIAEVVAGYPALRAKVARLVEVQGVGVLTASALLAALPELGTLSKNEVTALAGLAPFNRDSGAFRGTRSIRGGRLEVRRALYMAALTASRFNPILKAVYQRLRTAGKAHNVALVAVMRKLLVYLNSILKKHSLAHV

SEQ ID NO: 347538 - protein, 365 aa, unidentified
MKKISTVARKQSRNFSEQKLTIGLDLGDRSSWYCVLNEHGEVVLEQKLGTTPKALKAGFGGMPRSRIALETGMHSPWVSRLLSELGHEVIVAHARNVRLIGESRKKDDRLDAQTLARLARIDPQLLSPVKHRSARAQADLTVIRARAGLVRARTALVNTARGLAKSYGERLRGCNVRNMNPEKAQELSPELQRALEPLLAGIESLSERIREYNEGIEKLAQESYPQVARLKQVKGVGTLIALTFLLTLEDAHRFRKSRDVGCYLGLQPGRRNSGQSEPQMHISKEGDPYLRTLLVQGAHHILGPFGVDSDLRRWGLKLAERGGKSGKKRAIIAVARKLAVLLHRLWVSGEAYEPLRHQKALPAAA

SEQ ID NO: 347539 - protein, 316 aa, unidentified
MDHNKAVYGVDVSKAKLVIAQYDAQTLTEVDNQPESIAAWLAGLPKGAVVAMEATGTYHRLLAHMAHAAGMQVYVLNPQTLKHYASAIGQRGKTDNCDARMIARYAVHERAKLRRWWPAAQAADRLSQLLERRHTVVVARQTLAQSLSGLPMLKLPRASLLASLDRTLKRLDILIRHEIARLPGMAALYERLMSIVGIGPVVAAQLVAAFSTLNFARTDSFIAYTGLDPRAADSGTRRGRRRLSKHGPPLLRCQLYNAGRAASTSKLFKPVYKKLLERGLQTTEALVILARKIARIAFAVYKSGEVFDAQKHFKMA

SEQ ID NO: 347540 - protein, 367 aa, unidentified
MKKISTVTAKQGRKFSQPSLTIGLDLGDRNSWYCVLDEAGQIQLEQRIRTNAKALQEVLGTMPRSRIALETGTHSPWISRLLSELGHEVIVAHARKVRLIGESRKKDDRMDAQTLARLARIDPQLLCPVKHRSAKAQADLTVIRARAGLVRARTSLVNSVRSLAKSYGERLRGCNVRNMNPEKGEALSPELQRALEPLLSAIEALSERICQYNERIEALAQDSYPQVALLKQVKGVGTLIAMTFVLTLEDPHRFRKSRDVGCYLGLQPGRRNSGQSEPQMHISKEGDPYLRTLLVQGAQHILGPFGIDCDLRRWGLKLAERGGKSGKKRAIVATARKLAVLLHHLWVSGEVYEPLHHSSRMTVAAAA

SEQ ID NO: 347541 - protein, 328 aa, unidentified
MNYCFIGVDISKLWLDVAICPNLEEGVVQNFQVTNCVKGIRSLIKRCRKMKSNLWFCFEHTGNYGLLLSHLLEDESLQYSAIPALEIKRSIGITRGKNDQIDASRIAVYGATHKHKLTESKLGSEVLLRVKTLLSHREQLSKQSRQWQNALKSYQVSSEVTDLKDLVRNTKALITQLKKRIEKVEKQIEQAILGEQELKKKYQQAVSVKGVGSLIAAYFLVYTNNFTAFDNPRKFNSFAGLAPFTHTSGTSIRGKTRTSNLRNKKMKALLFRGAFSASRSDCEMRRYYLRKTEEGKSHLCVINAIACKLVYRIFAVVNRTTPYVPLVR

SEQ ID NO: 347542 - protein, 401 aa, unidentified
MKRLSGGIDVGSESHHIIILDEEDNFLYNQKVAHQLNEFTESIKLFRKIEKQEGGKISFALEGKNGYSAPFDRILLDQGFTLYNVDNFKLKRFREAFAGEWRDDERDSLMLSKMLKLKEHINSEREKVFIKIEKPSLITESLKLLSRHQQTLIDERVRLTNRLRKKLLEVCPQILELGKLKNKKIVAILTKYPDFSKYKRITLCSLLKIKGIGKKGVPFLLKRLNNIEYVPGLTNIYKTIILSYAQRILELREEIEDIDKKLDEIGNQSKEVNHLKTIPGVATKLASRFVGEIGDINRFPSEKQLAIYCGIACIDNNSGKVTKAKVVHKANKICKQTLINMAGCSIRFSPQCKTYYLKKRTEGKNHNHALRCLARQLIKVIYRMLTEDREYIVRKELSKAA

SEQ ID NO: 347543 - protein, 358 aa, unidentified
MTSGYQVFLGLDVGKGEHHAVGLDPAGKRLHDGPLPNSEPKLRALFDKLAAHGPLLVVVDQPATIGALPVAVARAAGHRVAYLPGLAMRRIADLYPGRAKTDARDAFVIADAARSLPHTLRPVDVGDDALAELDVLVGFDDDLAGEATRIANRIRGLLTGVHPALERAIGPKISHPAVLEILSRCGGPTGIRAAGRRKLTTIATAHAPRMGDKLVAAILAALEEQTVVVPGTTAANTVLPRLADSLKTVLLQRKQVAAEVEGILDAHPLAGVLTSMPGIGVRTAARILLEIGDATGFKTSGHLAAYAGIAPVTRSSGSSIKGEHPAPHRQPQTQTGVLPRSVRRLVRPNQQSLLPAKT

SEQ ID NO: 347544 - protein, 324 aa, unidentified
MTDAVLGIDVSKNTFDTNLGAGTKARSKNFANSPAGWHQLIAWLGEHKIGQVHACLEATGRHGLGIALALHEAGHVVSVVNPAQIRDFARTKLGRNKTDQVDAVHIREYAELFKPRPWTPPSPAMRRLCELQTIRAGTVAGLTEWKNRRHSGIMDDLAQSLAKTTIQHFTSQLEAVDQAIAETIDNDVELSAKRDLLVSVNGVGEALAGIVLAELPGPDILGSSAAVTAYAGLNPQQHQSGISVNRPVRISKIGNAVLRTALYMPALSAMRYNPAVAALVDRLKAQGRLKGKQIVIAAMRKLLVLCFGVLKTGKEFDPAMAMGK

SEQ ID NO: 347545 - protein, 304 aa, unidentified
MKIIGCDFHPSFQQIAMVDTETGEYTERKLTPEEARQFYAELKGPVLVGMEACGNTLWFERLLAALGIELWLGDAGKIRAMEVRKQKTDRRDAQLLLQLLLEKRFPKVWVPSVQQRDTRQLLLHRHKLVCMRRQVKNELQHLALNQGVQQKRKLWSAAGRQRLEELPLTGWTKQRRQDSLELLDELSGRVAKLDIAAQQEADRDAVARLLQTHPGVGPITALAFSLTLGTIERFARSRQVVSYLGLNPAEHSSGGRQHLGAISKQGNPMLRSLLVEAGQSAARSVPELKRAYQRLKHRRHSSAR

SEQ ID NO: 347546 - protein, 349 aa, unidentified
MSQNLNSAVAVIGIDIGKNSFHVVGLDDRGAIVLRQKWSRGQIEARLANLPPCLIGMEACVGAHHLSRKLKALGHDARLMPAKYVRPYSKGQKNDFRDAEAIAEAVQRPTMKFVATKTVEQLDLQALHRVRERLVSQRTGIINQIRAFLLERGVAIRQGLRFLRAELPRILATSPDVLSARMVRVIRDLAEDWRRLDERIDQLSSEIAVLVRQDAGCERLMSVPGIGPIISSAMVAAIGTGEAFSKGRDFAAWLGLIPKQISTGDRTILGKISKRGNRYLRVLFVQAAWVVLIKPMSWERHGLRSWIEAAKKRLHRNVLAIALANKLARIAWGVLAGGRIFEASKLQAA

SEQ ID NO: 347547 - protein, 347 aa, unidentified
MRFYTNQHPFYCGIDLHARTMYVCIMKHDGEIMLHRNMKAAPDLFLKAITPYREGLVVAVECIFTWYWLADLCAEEGIAFVLGHALYMKAIHGGKAKNDKIDSHKIAALLRGGMLPQAYVYPAKMRATRDLLRRRTHLMRKRAELLAHVQNTNSQYNLPEIGKKIAYKANREGVAARFVDPAVQKSIEVDLALSTSYDQLLSDVELSIVKAAKHHDANTLYLLQTVPGIGKLLSLVLLYEIHDIERFPTVQDFASYCRLVKCAKESAGKRLGTAGKKIGNAHLKWAFSEAAALFLRNNPAGQKYLARLEKKHAKGKALTILAHKLARAVYYMLKHKTAFNMARFLHS

SEQ ID NO: 347548 - protein, 339 aa, unidentified
MSIVMGLDQHRGQITGEWIDTETGEIQRTRVAPADRVHVRKWLARFRGRDLEVALEATTGWRFVVEELRLVGAVVHLAEPAETAGLRGPKKRAKNDRADARHLRELVMVKRLPESWIPPDHILDLRARVRLRHTLSEQRSEWQQRIQATLYHQGCPQRRQLMTADGRAWLAEQPLPAPAREQITVAIAMIDALELQIAPLDKELRAYARRQVGCKALMAHYGIGELTAVTILAELGDCTRFSSSRQAVRYAGLDITVYQSDQRRAPGHISRQGPPALRWALYEAAQVARRGERSPDREYYLEAKERIGGGRACISVARKLLKRSYHTLRELGEEALAPA

SEQ ID NO: 347549 - protein, 348 aa, unidentified
MDKILKQSLGFDVSQEKFDVALFVCGEDLAPREVASETFDNTKNGFKKLSQWYDKLIDKQLPIFACMEATGVYHEHLCRHMYTDPRVKVSVVLPNKSRKFIDSLDWSSKTDKLDAKALSLMGLNRKLRLWVPPKELYRKLRRLTREREHLSIAHSAQINFLHAMETEFGSCEENLMRVKQLKELIHQQIKAIDKQIENIVNSDDELKQEVALLKTIPGVGQQTAVVVLAETNNFQEVERSKQLVSYAGLDIRQKESGKWKGKTKISKKGNRHIRAVLYMPALTIIRGNSRLAQYYKCQIEKGKHKMTAITAISRKLLVLMYGVWKTKTVYQDDFNLHLSQMASGNARD

SEQ ID NO: 347550 - protein, 346 aa, unidentified
MGMDIAVLGVDLGKNVCSVVGLDASGAVVMRRKVRRETLIRLAEKLPPCVVGMEACCGAHHLGRLFAAHGHDVRLMSPEYVRPYVKAQKNDDRDAEGIAEAATRPTMRFVELKSQDQLDMQTLHRSRDRLVGERTALINQLRALLLERGMIAPQGKRKLEQFLSVLMDEQDGAGLSPRMVILVADVRAQWAELDRRIAAFDGEFVRWARENEDARRLVTIPGFGAIIASALVASVGRAEAFDRARDLSAWLGIVPQQFTTGGKPKLLGISKRGNKYLRRQLIHGARAALPYVAERDTPLGRWAKALLERAHRNVAVVALANKLARIAWAVLRRVERFVATGMPRAA

SEQ ID NO: 347551 - protein, 357 aa, unidentified
METAYDGRQVVGMDLHRRRSVLVRMTEDGRRLGTARITSSPQELRREIARAGKAPGVVLEATFGWYWAAGTLAVAGAEVHLAHPLGVKAFAYRRVKNDERDAADLADLLRMGRLPEAWIAPAEVRELRELTRYRHKLVHLRTSCKEQVHGVLAKLGVPVTCPDIFGVAGSAWLDGLPLPQPYAGKVTSLRHLTGELTAEVTMLSAVIADLLAGDRGYQVIQQLPGIGPVLAAVIIAEIGDVTRFKNAGQLCSWAGLTPRHRESDTKVARGHVTKQGSRMLRWAVIEAIQRAGADTVTGAVKGAIIARRGKEAKNIAKVAAARRVLTLVFYGMRDGQIRCLSQTSGHPPAPAPAQSAA

SEQ ID NO: 347552 - protein, 438 aa, unidentified
MSNKVIFNLDELFISVGIDVGADFSWMSIALPNQQFVGKPYKILHNSIDSLTTAVSKIKEAEELYSLESRIFLESTGIYHYPLFCYLRDKSFNCSVINPIITKNSTNINIRKVHNDRFDSKKAALVGLKPDLKVSLMPSDLALNCRNLCREYYDLMDNRSAYVNKLQGELRMAFPQYLGIFSKITINTSLTLLETYTSPSAFLEADKQEIIDIIKSTARFGLTYAQNKYNAIIQAATDANQFGYIIESNIKRIRLYISFIRKYDEEINNILESLHELVDANEDADFVKQIHLIETFKGAGFLSAVSIMGEIGDFSAFSKPKQLFAYFGLDPAVKQSGKFEGTKVQMSKRGSSIARRVIHTLALQSISISRNGRAKNPVLREYYLQKCDSKPKLVAMGAVSHKVCNMIFAILRDNKPFEIITPQEHIKQYNAAKCDIAA

SEQ ID NO: 347553 - protein, 389 aa, unidentified
MIYVGIDVAKDKHDCYIMGTDAQKLFPVFTISNNMAGFNELYEKVFSVAKDKTEIKVGLEATGHYSMNILSSLVDKGLATYLINPLHTNLYRKGQSLRKTKTDKVDACTIAMMLMTDRTLKPYSDTSYHNEELKSLTRYRFGKVQERAKLKVSVMRLVTILFPELEKIVSDIHSTSIYAVLEEMPGASFIAKCNLTHLKSVLESNSKGRYGREMAILIRNSARDSIGITMPAKSMELKHTLHLIEVLTEEIDEIDESIKKIVDMSASPILSIPGISYKMGAMILAEVGDFSRFNNADQLLAYAGLSPSTYQSGQLESCYAHMEKRGSRYLRYAIYNATKYVCLWDERFATYLAKKRAEGKHYNVAISHAAKKLVRTIYKMELTRQPYHK

SEQ ID NO: 347554 - protein, 468 aa, unidentified
MSKRKKPRSQDLDRNLRQINLNAAGIDIGADRHWVSVPLGRDDENVRSFACFTSDLYTMADWLKKCGIETVAMESTGVYWIPVFQILESRGFEVKLVNAHYVKTVPGRKTDVLDCQWLQQLHTYGLLSGSFRPEDQICALRSYIRQRDNLIKSACVHVQRMQKALTQMNIQLHRVISDITGTTGLSIIRGIVSGERNPIKLAALKDGRIKASKEKIAASLTGDYRPELVFILQQELKFYEFYQSQIADCDNQVEQCLASFTDKVDITKKPLNKPKRRGKKQPGNAPQFDLRTHLYRISGVDFTQVDGFGALTVLILLSELGLDPSRFPTVKHFTSWLGLCPSSRVTGGKVKSSKTRPVANRAANAFRMAAQTLSRSHSALGAYYRRMQTRLGAPKAITAAAHKLARIFYHLWTSGGAYTDPGINAYEQQYHDRMLKNLKKKAQAFGLELIPISNTSESVDSKTQTLAG

SEQ ID NO: 347555 - protein, 391 aa, unidentified
MVCVGIDVAKDKHDCCILDSEGTTLVDRFTIPNNMDGFKSLLQTIQDCSQKSDKIKVGLEATGHYSCNILGFLLDNDLPVYVMNPLHTNLYRKSLSLRKTKTDRVDAKTIATMLLSDVDLKSYTDTAYHNEELKSLTRYRFDKVQERAKLKQSVSRLVTILFPELEQLVSSIHGTSIYALLSEYPGAKQISEAHLTRLANILVTTSRGHYRKDRATHIRDAARTSIGSVMPAKSLELKHTIKLIQELTSEINEIEDAIRKIMDELKPPILSIPGMGFHSAAMILAEVGDFSNFNSPDKVLAYAGCSPSTYQSGKLTNCYAHMEKRGSRYLRYALYTATKYVCYWNPVFTEYLTKKQAEGKHYNVALSHATKKLVRLIYALQKSGKAYLAVT

SEQ ID NO: 347556 - protein, 351 aa, unidentified
MPRTATVHAVTAIGIDMGKNTLHMIGLDSRGAIVLREKVSRGRITSRLANLPCCLIGIEAGLATHYVARELAALGHNVKQVPPTYAKPFRQGHKNDFRDAHSVAEAVQRPTTRFVPAKTDEQLDLQALHRVRSRLVSERTAIINQIRGFLLERGIIIRQGLRFLRQALPDILAKRTDVLSPRMVRIVADLASDWRQLDERIEPVTDEIETLAKSDDGCRRVMTVPGIGPIISSAMVAAIGNGAAFARGRDFSAWIGLVPKQMSTGDRTILGRITKRGNGYLRTLFVQAARVILLRPASWPKHSFGVWLARAAQRLHRNVLAAALANKLARIAWTVLAQERSYEARITKPAA

SEQ ID NO: 347557 - protein, 370 aa, unidentified
MNKVSTFIGMDVHKNSIEIAIAQQGREGEIRSYGKIDGTLSALDKVVRKLVSKGNRLHFVYEAGPCGYQIHRHLTAKGFDCMVAAPSRIPKARGDRIKNDRRDAIKLARLHRAGELTPSYVPSAEDEAMRDLTRAREDATGDLRKSKQRLLAFLLRSGHKYTGGSPWSKAHMRWLADIKMPHRSQQIVFKEHIDTVGQCSDRVQRLTEQIRQLLPHWRLYPVIQALQSLRGVSLMVATTTAAEVGDLKRFKNPAELMSYLGLVPSEHSSGNRTKRGAITKAGNTHVRRALVEAAWAYRFRARVSQVLHKRQEGLPQPIRDISWKAQVRLCARYQRLWAKNKAKQVIVTAIARELCGFMWAIAQETPLPAE

SEQ ID NO: 347558 - protein, 333 aa, unidentified
MGQYVAIDLHKRRSLIVRADEHGERLETVRIDNDAINLARAVAEAGEDPEVVLEATCGWYWASEVLSELGANIHLAHPLGLHWDTRRVKNDVRDANALLDMLRLDLVPEAWIAPAPVRELRELVRYRAKLVMLRAGLKSQVQGVLTKEGVISTRYELWGPKGRALLDELDLAPSYRTRVDSLCRLIDLYDTEINAVGAEVATWLDDDLGYRAVQAIKGVGPVLASVFVAEIGSIERFSDPHKLCSWAGLTPKHRESDTKVTRGGITKQGSRLVRWAAIEAISRGRDTTVAELYQRVKERRGTNVARVAAARKLLHLVYYGLRDGEIRCLAQTG

SEQ ID NO: 347559 - protein, 349 aa, unidentified
MGRSIGIDLHRSNFVAATRAENGRTYVRTWKVAEIGRFAEQLRPDDRVAVEMTTNTRLFYDAVRPAVADVQVVNTAQFKVITKSVKKTDRRDAETLALYLEKDMLPTVRLKEVEQGQLSGLVSTRDTLVKQRTTLKNKINNRFAMYGRQIKREQLSSEKGLAAVEAEPFDALVRIEIGALVAQIRALNASIRDLEKAIEASAEKLKGYETLTSIKGIGKVSAAALLTVIGDVDDFASAEKLGAYLGLVPRVSNSNETERSGRITKRGSKLARTALVQCALVAKKYSPYLHAFHARIRQRKGGGKANIALARKLLEIIYRALRNDWVFEDFGAFRLVGNVNPLKRKRRAG

SEQ ID NO: 347560 - protein, 347 aa, unidentified
MSISMIGLDTAKAVFQVHAVDEAGKAEIRRKLRRNELMPFFEKQEACTVVLEACGAAHHWARMLTGLGHEVKLIAPEAVRPFVKKGKKNDAADAAALCAAASRPDVKFVPAKSLEQQGVLTLHSARTLLVKQQTMLANAMRGLATEFGLTVPQGIGKLEELMALVDLDEAFPKPARQAIRGLLDHCDALAESIETFEAEIVAHARHDATARRLATIPGIGPITASLIAVTVGDIGMFKSARHFAAWLGLVPRQHSTGGKTRLGRITKTGNREIRRLLVLGATSMVYRAPQWNSAAGIWTRAILERRPVRLVTVALANKMARIAWALMTRKEVYHAKGRVAVAAGAAA

SEQ ID NO: 347561 - protein, 349 aa, unidentified
MADKLIVGIDISKDWLDLCASNAAGVERIANTPEVVAAWLERVGAGLIAFEPTGGYERTLIAAARERGIAFVRVHPNDVIAFRKSRGIKAKTDAIDARLILAFVCDKAARAELRTSLIGDDRLRALAARRRQLADALQAERCRLDAAALPAVRASLEAVIAVLRHSLGVLEAELADAVAAHPQTAELAKLLQTIFGIGPVVAITLIADLPELGLLSAKQIAALVGLAPHTKRSGKTRYRETTGHGRPGVRRVLFNAARTAVRHPSLFKDFYDRLVTDNRRPGKVALTAVMRKILITANAVARDHEPWHGRLAAGTPCRPHAEQTDHRAGRVKAAAARRAVARSASLEAA

SEQ ID NO: 347562 - protein, 314 aa, unidentified
MNTTESDVIGIDVSKAQLDCCVGRDNRLFRIGNAAHAIRAKLLKLQEELPKLFLVVESTGKYHAVLFRVATELSIPIAIVNPKRIRDFAKAVGQLAKTDTIDARIIARYALTVEVAPTPAPSKELEALRSLVARRNDIVRMITQEQNRLGDIQDKMLIRSLKRHIKWLTQERKALEAEIKELALSSQFAAKLSLLRGFKGVGDLSAAALIAFLPELGTLSKSHIAALVGVAPFADDSGTSCRGKRRIWGGRCAVRSALYMCALTAIRCNSNIKSYYRSLRLRGKAAKVALVAAMRKTIIILNAMLRDGSQFKPI

SEQ ID NO: 347563 - protein, 374 aa, unidentified
MDQHSRAFVGIDTSKLRNAVAVAEEGRGGDIRYLGEIDTTEAATRKLVTKLAAKYRQLTFCYEAGPTGYGLYRLIRKLGHDCIVAAPSLIPKKPGDRVKTNRRDAVGLAKLSRAGELTAVWVPDERHEAMRDLSRAREAARKDLKGKRQQVSSFMLRLGRHYPGKKTWGPAHMNWLMLQKLEHREQRIVLEELLGAVRQESERVERLEQAIRDAVPEWSLAEVVTALQAMRGIDLVSAVTVLAEIGDLSRFQNPRELMGYLGLVPSESSTGDTVNRGGITKAGNGRARRILIEAAWSYRYPPRVSREKQIKVAAAPRAVREIAWKAQMRLCGRFRSLTRKGKRPTVVATAIARELAAFIWAINREVVGSHATAN

SEQ ID NO: 347564 - protein, 350 aa, unidentified
MIVLGADTHKRSHTVGAVAAATGELLGEQTVPVGLRGFGALLRWARSLDGERAWALEDCRHVSGSLERFLIERGERVLRIPTHLTANARRSARQRGKSDPIDALNVARAALREGLESFPAAHLDGPELDLRLLVDHRERLVRQRVEVNSTLLWHLHDLWPELQLPGGALFSKKWSTRISRRLARAEQTMRVRIARDELRRLRELTQAVTGLEREITELVGQLAPQLLSEPGFGPLIAAKLVGEIAGAQRFATPARLARAAGVAPIPASSGNTQRQRLDRGGNRQINAALHRVIVTRARCHPPTRDYIQRWRSEGKSTREAIRCLKRYLARRVWRLLQPPTPPRTSTRSIS

SEQ ID NO: 347565 - protein, 340 aa, unidentified
MRQLYVASDLHGNNNLIGIIDGEGKRIFKKKLPNDPLLINDTLKPFKEEIVGIVVESTYNWYWLVDALMEEGYKVHLANPAAIQQYSGLKHTDDKHDAFWLAEMLRLGILPEGYIYPKEERPVRDLLRKRGHLVKLRTSLILSLENIISRNFGRKLPVNDVKGLRKDHVTPLFEGKEDLGLAGRVSKETIDFLTHQIRQIEGVVEKRVTLKEQYRNLLTIHGVGKILGLTIMLETGPIGRFETVGDYTSYCRKVPSQWVSNGKRKGSGNRKNGNKYLSWAYAEASDFARRLHPESRAYYNRKMQKSNPAVAHSALSHKLARAAYYIMRDQVAFRPEKLFG

SEQ ID NO: 347566 - protein, 341 aa, unidentified
MSVYVGIDVHRKRSQVAVVDEAGKVLANRNVPNGAEPILGVIGGLPPGTPTAFEAALGTGWLEDYGFTPHLVHSLRCKAIASARLKNHKVDAAILAQLLRADLLPEAWIAPPPVRQLRALLRHRVALVRLRTLLRNRSHAILADHGHDRPGGGCWSGPGRAWLASLQLPAVSRELVEDDLTLIGALETVIDRLDWEIRQRGRSDPRVKVLTQLPGVGPFIALVILAEVGDVSRFGSARKLASWAGLTPAVRGSDRVAHYGHISKRGSVLLRWALCEAAQTAKRSPQFAASFQAIARRRGKKIATTAVARKLLTRAWHLLTAAERAASPPPAGAAAPPAKRR

SEQ ID NO: 347567 - protein, 372 aa, unidentified
MTAFSVYVGLDVHKATIAVAVAVAGRAEPQYRGEIANTPTAIKRLLHKLSPDGEVLGVCYEAGPCGYGIHRQITAVGHDCIVVAPGLIPRKATDRVKTDRRDALSLARLHRAGELTAVWVPDADQEAMRDLTRAREDLKAIERTARQRLGAFLLRHGQVYPGKSRWTQAHFRWLERVKMPMPVQQIVLTEYVDTVLAAQRRVAALVEQMRLALADWSLRPVVEALMALRGVSLITAMTVLAELGDITRFDSPSQLMAYLGLVPSEHSSGGNRRQGGITKTGNSHVRRVLVEAAWAYRFPARKSYAIQRRAERTSADVQAIAWQAQTRLCGRYRHLIHAGKTTPLATTAVARELAGFIWAIACEVPVNAAKAA

SEQ ID NO: 347568 - protein, 354 aa, unidentified
MDVGIPYKGFSQSNHFNSLKYKVMRIKQAIGIDISKLTFDVRIHSNQMFNQFENTNKGFKKLMKWVNSNNPFLKDETIFVFEHTGIYSYLLSVFLTEQKLSFALVPGLEIKRSLGISRGKDDKIDATKIAQYGYRLRDEIKLYNMPCKDIINLKRLLSLRDRFVKQRAGYKSSLKEFSRILALKNNKVLLETQEKIIRYLTKQINIIEQNLDSIINSNDTLKNVFKLITSVKCVGRQTALFIITYTEAFAKFKTWRQFASYCGTAPFPNSSGTSLRGNTQVSHLANKKVKSLLDLCAKVAIQHNPEMKAFYKRRVAEGKNKMSTINIIRNKLLSRIFAVVNRETPYVDFMKYAA

SEQ ID NO: 347569 - protein, 320 aa, unidentified
MQTPSVALNIGADVGKDEVVMACVEGSFPTRKIRNQRAVLLAFLKDLPAGSRIGMESTGIYHELLAELAHKRGLVVYVLNPKDTRHYAKAMGLRGKTDRVDAELIARMIAHEHAKLHPWLPPTAEQRQIDRLLKRRAKVSRIRATLTQSFKDVNGFAAEINALRQRLDQLLSHLDAKVKTLIEASTERKQDYARLRKITGVGAVVGSSVLNTLERVPFRNADAFVAFTGLDPRPDESGHHRGRRRLSKRGPSELRRLLYLAAMAAAKTKTWKPLYEHYRARGLSTTAALVVLARRIARTAWSIYTHKTAFDPERLTKALT

SEQ ID NO: 347570 - protein, 428 aa, unidentified
MDQTYRNRLEQFRQLRNEIRHSEQYLIVGIDIAKERHHAFFGTAAGKTLLRRFVFSNDHEGFRKLLDQAEALEVRHGLKKVVYGVEPTANYHKPLGEYLISLGGMVVLVSGVVVKRNRESLDGRWDKHDVKDSANVADLISQGKCLYYEHPSAELRGLRGLLSLKRRLKRQEQSYRVRIRNHLIAQYFPEMDSHYGRSEREGMAIVRWCFPPSMITQLDIDPFIERVTSRRVRMEQRRRLEMIWEKAGESIGCEGVPGVEHEAKVMVEGLRQLREMIKETEDKIEELCQQFPQYQYLLTIPGFGPDISAKVLGAIGDPDRFQNGKQVLKMGGLDLSADRSGKDSDKATPEISKRGKSDLRYALYQAAFIASTKNRDFMLYYTSKLQGRQKEKGIHTKRIVKLSAKMLLIAWTLMKKKEAFDPAYLNAE

SEQ ID NO: 347571 - protein, 404 aa, unidentified
MTVVIGIDPHKGSHTAAALNEAEAVLGELRVRSGAAQLEHLLAWAAQWPERTWAVEGAGGLGYLLAQQLVAANEHVVDVQPKLAARVRLLATSSTNKNDPNDARSVAITALRSPEAKEVRAEDHAAVMKVWAKRRHDLVSARTRVVCRLHAVLCELVPGGISGQLYASKAATMLDEFEPENAIAAARHELGLELLADLRRVDEQMRDTKKRIALAVAASKTTLTEIFGVGPIVAATVIGYVGDVTRFASSDRFAAYNGTAPIEVSSGPRKIYRLSRRGNRRLNHAIHMAAVTQIRNLRSEGRAYYDRKVAEGKTGKEALRALKRRISDALFRQLQIDAQRAQASIMGPGGQTGNDSKACVTDSHPEGRLFGEATPEPGTTLRPAATAVRSGRSKTLTRVAKRAS

SEQ ID NO: 347572 - protein, 382 aa, unidentified
MEERTQFFVGLDVHKDSISIAACDASREPARFVGTVGPDVRQLLKALTKAGAPSQVSVVYEAGPTGYGLYRELRRHGYRCEIAAPSLIPRRAGDRVKNDRRDCGRLAELSRAGELRAIWVPDEEHEAVRDLCRAREDAVQMRLRARQQLKAFLLRHDRRYPGKTSWTKTHERWIADLRFDHAGETIALTEYQLAVQAAQQRVERLTTALMETVKGWRFEPVVAALRSLRGIDSVSAIGLIAEVGDFSRFKSARDLMGYLGLVPSEHSSGNSIRRGSITKTGNGHARRLLTEAAWNYRFAARMSTTLRDRSAGLPEAIRNHAWKAQLRLSSRFAKLSARGVQINKVCVAVARELAGFVWAIARQAQAAPCPQREMTEVASGPR

SEQ ID NO: 347573 - protein, 425 aa, unidentified
MFAESRDDEQIIARVAALDIGKAEIVCCIRIPAVDGGRRVQEVSTHSTMVTSLCELANRLVGLGVERVVMEATSDYWRPPFYLFEAHGLDPWLVNAKDVKHLPGRPKTDRLDAVWLCKVAERQMLRPSFVPPADIRQLRDLTRYRIDLVGVRTAEKNRVDKLLEDACLKLSVVASDIFGVSGRAMMAALIAGERDPATLADLARSRMRTKIPRLEESFAGLRLGTFDDHHRFLLARMLARVDAVDLDIAAVDTQIGQHLTPFADAVARLDEIPGIGPTAAAIIIAEIGLDMTRFPTPAHLASWAKFAPGINSSAGKTKGNRSTGHGNRYLARVLGEAVAGAGRTDTFLGARYRRIARRRGKNKAIVAVGRSLLVIIWHLLADPDTRFHELGSDHYDRHVNTHAKRRNHVRQLEALGYRVTLEPAA

SEQ ID NO: 347574 - protein, 320 aa, unidentified
METEKVYVGIDVSKDTLDVAVHASEQRWRFANSDKGITEALSCLEELCPTLVVLEATGGMEYPLAAALAVAGRPVVVVNPRQVRDFARATGRLAKTDAIDARVLAHFAAAMHPPTRPLLDTQGQELKAILARRRQLIEMLTAERNRLHSARSKAVKANIQAHIAWLEKEMTHIDHDLGHSIRQSPVWQEKDDLLKSVPGVGPVLSTTILADLPELGLLDRRQIAALVGVAPFNRDSGHMRGQRTVWGGRAVVRSALYMATLVATRHNPIIQDFYQHLLSQGKPKKLALTACMRKFLTILNAMVKHQTPWHYPVSGTLQTP

SEQ ID NO: 347575 - protein, 366 aa, unidentified
MKKISTVQVLGNEILKEQKQTIGVDLGDRWSFYCVLDEAGKIILEQKVATTPEAMKQTFAKMPRSLIALETGTHSPWASRLLTELGHEVLVAHAQKVELITKSNRKDDRHDARTLARLARIDPELLGPVRHRSAKAQIHLTVIRARAELVSARTALVNAARGLVKSYGQRLPKCGTQQVNRELAVGLHTELREVLEPLLKEIESLNEHIKEYDERMEKIAQEVYPEVSLLKQVKGVGTQIALTYILTIEDPYRFEKSREVGCFLGLKPGRRNSGNSEPQKKISKEGDRYLRTMMVQGAHYILGPFGEDSDLRRWGLKLAERGGKNAKKRAVVAVARKLAVLLHRLWVGGEVYEPLRNSQKAMRAVA

SEQ ID NO: 347576 - protein, 457 aa, unidentified
MNRKTTKSKIDRTMPMVHPNAAAIDVGATMHMAAVSADRTPEPVRSFSTFTTDLHRLVNWLKECGVETVVMESTSVYWIPVFEILDAHGFTVFLVNARDAKHVPGRKTDVSDAQWLQRLHSYGLLRASFRPKGQIAELRAYVRQRERLLEYAGSHIQHMQKALTEMNLQLHHVVADITGATGLRIIRSILAGEHDPRELAHLRDYRCHASAETIEKALTGSYRAEHLFALEQALALFDAYHEKMSACDVRIEAVLKELSTGRGRGSGLLPSSRRRTDQTNAMAFDVRAALFALLGKDLTQIDGLGPYLSLKLIAECGDDLSAWPSAKHFTSWLCLAPSNKISGGKVLSSRTRRSGSRAAALLRLAAATVGRTDTALGAFYRRLSARIGKAKAVTATARKIAVLFYNAVQHGMEYVDPGASVYETRYRARVVDNLHRRARAFGFVLQPAEPTPSVAVS

SEQ ID NO: 347577 - protein, 354 aa, unidentified
MSPVNSRIAAIGIDIGKNSFHVVGQDERGAIVLRQKWSRGQVEARLANLPACLIGMEACVGAHHLSRKLQALGHDARLMPAKYVRPYSKGQKNDFRDAEAIAEAVQRPTMKFVATKTAEQLDLQALHRVRERLVGQRTGIINQIRAFLLERGIAVRQGLRFLRAELPTILATRSDALSPRMLRLIEDLAGDWRRLDERIEAISGEIEALARQDQACERLMTVPGIGPIISSAMVAAIGTGDAFSKGRDFGAWLGLVPKQISTGDRTILGPISKRGNRYLRALFVQAAWVVLVKLGKKWERYGLSAWIEAAKKRLHHNVLAIALANKLARIAWAVLHKGRAFECAKIDALSVRPI

SEQ ID NO: 347578 - protein, 316 aa, unidentified
MSDTLYVGIDVAKDSFDVASDPAGLVLSLPNDPPGRQRLLDALRNHPVALIVLEATGGYERSLVADLLDAGHKVVVANPRQVRDFARGIGRLAKTDRLDAQVLARFASMVKPEPRQKASEEAVNLAELVTRRRQLSDLMTQESNRVPHARHPHVRRSLKKSLRALEAQIDDLDKLIRQNIDSDDGLRRKDEIVQSFKGAGPGTSAMLLAQLPELGRLNRQQITALAGLAPWDVKSGPWAGQSRIWGGRMPVRNMLYMTALSAIRYNPIIRKFYQRLESKGKKFKVAITACMRKILVILNTLVRNDCLWSPPLPEKA

SEQ ID NO: 347579 - protein, 324 aa, unidentified
MTRGIFVGVDVSKDRLDVAFRPSGEKLIVPNDRRGITRLVRTISGFTPECVVLEASGGYERRLLERLAEEELPVALVNPRNIREFARASGRLAKTDAIDAAVLAHFAEVMKPELRRLPDPETRKLRALITRRNQLVRMMTAEQNRQLQALESVRAGLTAIIRCLKKQIAVLDKQLAALIRATPAFRQKAELLRSAPGVGPVVSATLIAHLAELGTLNRKKIAALVGVAPFNRDSGRLKGKRAIWGGRGDVRAMLYMSTLAAVRLNPSLRAFHSRLRSAGKSPKMALTACMRKLVVMLNAMLKTGSRCSEERIRPVEIISAEVST

SEQ ID NO: 347580 - protein, 412 aa, unidentified
MSYKVAGIDVHKKVLMVVVAEVDASQPEWNLQRRRFGTTTSELRQLAGWLREQDVKEAVMESTAQYWKPVWYELEPYVRLQLAQAFSNRAPRGRKHDFRDAERLVRRLVANELILSFVPAAEQRAWRTMTRMKCQLACDRVRLHNQVECLLEEMRIKLSSVLSDLLGVSGQRILGALAGGETDPQQLAKLAEERLQCSQQQLIEALAGKPEPMHRQLLGLYLQRLQLIEEQSQQLNGMVAQAMQAHQDAVVRLAEVPGFGADSAQQVIAEVGAQASTFPSAAQLTSWVGTCPGKNESAEENHSSRSPKGNKFVRRVLTEAAQAAVRTKGSQFQVVFRRLLPRLGYKQALWAIAHRLCRLVWKILHEGVSYIEHGAARDPKARQQRARVLTRKLRQLGYKVELTPLALATAEA

SEQ ID NO: 347581 - protein, 399 aa, unidentified
MNPVIGLDVSKGESHAQAFTDRGIPHGKIFQFEHNLEGLASFLNFVQDLECATGLRPAVVLEATGHYHSPVIQFLDEHQYLYIVINPLISHQAKKTSLRKVKTDIADAYQLGELFYKEELEPYKKRGQFMMNLRYLTRQHDSLTDMYVQAKLQFQAVLDQVFPEYRGVFGDLYSKVSLRFLALHPTSSAVLTKSLNDITATIQSLTGRSNSAWAPDRALKLTAAAERNPFKETAFSSHLISLELLINLLLQYQEHLANLDQSIDALAAELHEYELIQSIPGIGTRIAATILAEVGEIDRFDHAKKLVAFAGVDPSIFSSGKFTATRNRITKRGSRRLRTTLYLAVRCGLRSSRNQKLRAFYDKKRAEGKPFKVAVIACVNKLIHWIFAMLTHKEAFRLT

SEQ ID NO: 347582 - protein, 431 aa, unidentified
MLLGRLKIVYPICCGMDVHRDFVMACIASTNERGITEYQTRRFSTYTGGLRDCAAWLEANECKDICMESTGKYWFPVHNILEKTCRVVVTHPKFVKAIKGKKTDKRDAMWIADLFKHDVVSSSFIPPERIRQLRDLCRYWMKLTWNATGEKNRAHNCLTVSNLKLDSVFSNVFGKSASAIIDFMLEHPGETFDVAPFLDKHCKSSAEEVQAAVDGVFSPWQAEKLKIIRAHMADLGKHKEMIENLIIQLAEPYKRQVELILTVPGISDPMTAIRIIAEIGADMTQFDSSKHLCSWAGLTPQNNESAGKKKTTRIGKAGQYIKPLLIECSIGATNPRSKKYPEMARKYQQLRKRRGAKKARVAIARRLLSAIYQMLLKDEPYQPYVAPAKEAIPKQRVMTAEDALAMLRRKGYILVDAQGAVIEGNVLPAPA

SEQ ID NO: 347583 - protein, 453 aa, unidentified
MTKRKSGGHPDLKMVNPNAAAIDIGSTMHMAAVNPDTDIMPVRAFGTFTQDLHDLADWFRSCGVTSVAMESTGVYWIPAFEILEANGFEVILVNARYAKNVPGRKTDVSDAGWLRQLHSYGLLRGSFHPEAEIATLRAYMRQRERLTEYAAAHIQHMQKALMEMNLQLHHVVSDITGATGMLIIRAIVGGERDPEVLAAFRDVRCKSSMGTIKAALVGNDRPEHVFALTQSLELYDFYKAQIEACDRRLEAAITALTVRADDDLAPLPKARIKGKQHNAPSFDVRAALYGVLGTDLTQIHGLGPSLALKLVAECGTDLRAWRSAKHFTSWLCLAPGNKISGGKLLSSRTRRSSSRAAALLRLAAVTIGKSDTALGAFYRRLSSRIGKQKAVTATARKIAVLFYNAIRHGMTYQDQGATAYDERHRQRVLSNLQRRARALGFALAPIPATAAVS

SEQ ID NO: 347584 - protein, 330 aa, unidentified
MKKWEFTLGVDVSKNTLDISCSELNEHVKIKNGTEGFTVFLKWCKHFKIDLKQSFLVMEFTGGYEYKLIQFCESRGILYTRIPGLAIKNSLGITRGKNDKVDSSRIAQYGEEKHKSLTPSKPLNPAIVSLKELLSFRKRLVRENAGYQATIKERIHMYGGNKKDIIVKKLEQKLKGNIKNIAAIEAEMLNIVAQDEKISINYSLITSIKGIGKINGLMTIAFTENFTSFTNPRSYAVYVGVVPFDHSSGISIKGRKRVSHIANKELKQELNQAARSAMEWDKEMRSYGEEKLKTKCYKIVLNNIKFKLILRMFAVVKREEIYVENYRNVA

SEQ ID NO: 347585 - protein, 330 aa, unidentified
MKQYDHVFGVDVSKKTVDITHVINQQFTHRQFSNDEAGMEQLMDWLKELTPAFDKALFCMEATGLYCFPLTRFLAAHSIDIWIEHAAQIKKATALTRGKNDKVDSQRIALYATKNLERLRLWKPMNTTLEKIRHLASLRDRLVETKKKLVTPIQEFEDIGNHSMAKLLTKTIKSSLTAIDKDLKNIESKIIDIINEDDNLKLLYKLITSVVGIGFVTAINLLVHTNGFTMMKDARKLACYCGVAPFEYSSGSSVRGKTKVHYMANKKLKCNLHMASLTAVKLDADLKAYYERKVGEGKNKMSVLNAVKNKLLARVVAVVNKQQEYVKKSA

SEQ ID NO: 347586 - protein, 321 aa, unidentified
MDAIGIDIAKRKFDLAWLSGGKLKTKVFENTDKGHMELLGWLKKHNLTTENCHLAMEATSQYYEPVALALFDAGYTVSVVNPLQIKAFGESLMRRQKTDRADAELIARFCEVNKPQPWQAPPPRVRQLQRLLARLEAVQAMHVQEQNRRHDAQGFALESIGRVIETLDLEIAYLQDQIRDHIDRHPDLREQDELLQSIPGVGPAVSSYAIAWLRGERFDDVRQAVAFVGLSPRHNQSGSSVHGKTSISKLGHGRLRKILYWPAMSAMRYNAAAAALTQRITATGKNKKVAIVAVMRKLVHWMIGVIKSGKPFDVNLALARI

SEQ ID NO: 347587 - protein, 343 aa, unidentified
MEQVSTIGLDIAKNVFQVHGIDETGEVVIRRQLRRRQVLIFFGRLAPCLIGMEACATSHHWARELAKLGHEVRLMPPRYVKPYVKRNKNDASDAEAICEAVTRPTMRFVPIKTPEQQSVLMVHRTRQLFVRQRTALINAIRAHLAEFGIIAGVGRNGVEALLALITKGEDERIPLAARECLMALVAQLELVKRQILEADRRVLAWHRANSVSKRLEAIPGVGPLIATALVASIPDPGAFRSGRDLSAWIGLVPKQNSTGGKERLGSISKAGNRYLRQLLVVGALSVIRRAKQLGYTRHPWLVTLMQRRTVKIAAIALANKIARIAWAMMARNESYRIPLTQSA

SEQ ID NO: 347588 - protein, 372 aa, unidentified
MKQKILYVGLDVDDTEYHGSAFNKETGELLNFRCRPTLKGLLNQLVSLRKRFPRYSIRLVYEASYIGFTLQRDLAEKDYHCDVAAPSSIPRKGGKAIKTDRIDANELAQFYANELLTLVSVPELETEQDRDLLRSRQSLMEQREKVRKHLQALLRRNGLHYKTETQNKSHWTKHHRCWLDRTIESQAGSLKVNLELIYRQLKGLDVLMADYNQELEELAKTRRYERPVKALSCYKGIKTIFALTMITEIGDIQRFPHPRQLVSWIGMDIREYSSGGKQNRFGITKHGNRYLRTAFIEANQRGYRTTQLSREVKSRQARAAPEYADIANRCLRRLSKKGNRLLLAGKHPNKVKVACAREMVGFVWESLRLATA

SEQ ID NO: 347589 - protein, 356 aa, unidentified
MKIYVGIDIAKLNHFAAAISSDGEIILEPFKFTNDADGFQLLVSKLESFDKNSIIIGLESTAHYGDNLVRYLVAEFYQVCVLNPIKTCQMRKNNVRKTKTDKVDTFVIAKTLMMQDDLRFITFFDLDMMDLKALGRFRQKTIKQRTRLKIQLTTYVDQVFPEIQYFFKSGLHQNAVYALLKEAPSPKEIASMHMTHLANLLKVNSHGHFTKEQAKELRVLAQKSVGANDSAISIQITQTIQQIELLDSQLEKIEAEMTDIMKFNDSVIMTIPGIGYINGGMILGEIGDIHRFSNPNKLLAFAGLDPSVYQSGNFQAKTTRMSKRGSRVLRYALVNAAWNVVRNNATFKAYYDAKRA

SEQ ID NO: 347590 - protein, 418 aa, unidentified
MTTTNSNKVFDVMHPICCGLDVHKRTISACLLITHSDGHVESQIEEFETFTDELFRLRDWLLENNCHVVAMESTSVYWQPVYNVLEGSVEVELVNARHTKHVPGRKTDIEDCQWLANLLRNGLTKSSFIPSKETRQQRDLTRLRKKYSQCLADYKRRTQKLFESANIKISSVATDLFGTTGRALMRLLISKSKITYEDVEACAKGRLVHKVQELYRSIQGFFEQHHRFILEELLSTVEFLEAKIAKLDAKIEELLKENNDIIERLDEVPGINRVAACSLLSELGDTLETFPNSQALASWAGVCPGNNESAGKRYSGKTRVKKHPLKTLLVEIAWAAVKKKGSYYQAKYYRLKARRGAKRAIIAIAHRILKAIYHIIKHGDTYRELGDNYLDKRTRSYKLRKLKAEAKTLGYRLVPINS

SEQ ID NO: 347591 - protein, 384 aa, unidentified
MKTATTREGKPITVKEQVLYVALELGKAKWKVGSTVGMGQKPREVTIRGGDREGLKQEIERAKQRFKLSRLAPVVSCYEAGADGFWLHRFLLHIGVNNHVVDSSSIEVNRRARRAKTDRLDVRKLLGMLIRYHWGEKKVWSVVHAPSAEEEDRRQLHRELMSLKTERTRQINRIKGLLTSQGILLPTCSKGFLQWLKEVRLWDGSPLGSGMVEHLTHEYERLEVIRLQIKKLLAEREHRVRNSKEPSIQKVRKLMTLRGVGLDSAWLYTMELFGWRKIRNRRELGALSGLVPTPYQSGESSKEQGISKHGIRYVRAYAVELAWNWLRLQPKSDLSLWYTKRFAFGGRRMRKIGIVALARKLLIALWRYVEMDVVPQGAQLKAVA

SEQ ID NO: 347592 - protein, 347 aa, unidentified
MDYYAGIDVSLEASSICVVDGAGKILREAKIASEPAALIGWFASLGLDLARIGLEAGPLSQWLYAAMKEAGLAVELLETRHVRTALQTMPVKTDRNDARGIAQLMRLGWFRPVHCKSMAAQETRALLTARKLVQSKLYDIEMSLRGILRGFGLKVGPTTPKRFARRIEELVAGHSTLEVIAKALLSAHAALLRELDMFEKLVRAMARRDKRARLMMSAPGVGAIVALTYVSAIDDPARFSSSKRVGPHFGLTPRKYQSGETDVTGRITKIGDAGVRTALYEAANVILTRPVKGAGLKSWAMKLARRAGMKKAKVALARKLAVILHRMWIDGTAFDARKAAFAGVAAA

SEQ ID NO: 347593 - protein, 349 aa, unidentified
MSDLQLYQHFVGIDIAAKTATTALLAARDAAPAQPFTIDQTPEGMASLQRRLAQAGFSPTGCLVVMEATGTYWITLATTLHAAGYAISVINPAQAHHFAKALLKRSKTDAIDAQTLARLAATLQPQPWTPPPAVYHELQQRLAQRDAWISMRTQLRNQRHALVQQPVVIGAVVARIDTLIAMLNAQIAQIEAELQPALAMDATWEAAAVRLASINGIGQLTALWVLVTTLNFSTCATPEEATAYAGLAPRENESGTSVRHRKQIGKTGNGRLRTALYMATLSATRTNPAIKTFYNRLREGGKLEKVARCAAARKLLHVAWAVVTKECMWDPQYQAPCSFANPLEHIATC

SEQ ID NO: 347594 - protein, 348 aa, unidentified
MNALHYIGFDVHKKTISFCVKTAAGEIVEEGVVAAQRAGLRQWASARPQPWRGAMEATLFSGWIYDTLKPYGEQLEMAHPAKLKAISAGKKKSDMIDARTIADLVRCNLLPACYVAPPRIRELRRLLRYRSLVVSEAVRMKNKMAGLLMETGALYVKEKLHRKKYFANLLEELEEVPESVIDLLRWSRGALEMFESTQKRLVRELLADSELAQRVERLMTIPAVGEITALTWALEVGDPQRFHSCSDAMSYCGLTAALKSSAGKQQRGPISKQRNRWLQITLIEAAKLAPRWNPQLAALHARELERGHRNRATLAVARKLVAYLLAVDKSRQPFQERAPSEVPTQKPA

SEQ ID NO: 347595 - protein, 449 aa, unidentified
MQRYAGVDWASEKHDVLVQEGGGEQVLAATFTHDERGLSALCATLVRLRVVLVAIERPDGLLIERLLDAGLRVLAIHPNQVAAARPRFRASGGKSDGFDAFVLCELARTDHHRFRVLVADSDQTKALRALSRAREDLVQARVQLANQLRAELERFWPAGAKIFAEVDSPIGLAFLERYPSPSDARGLGEKRLAAFLARHGYSGRKTTAQLLAKLRDAPQGRAGDAEIEARRAIVHALVAALRPIVAKITELTSEIAHRVRAHPDGHVFLSLFRDPKSVVCAAALLSEIGDCRARYRSAEALAADAGMSPVAVESGKRKVACFRRGCDHRLRAAMSTLADATRHWHPWAADRYATARARGQDHQRAIRTLGRAWCRVLWRCWQDGVAYDPDRHHGLQQHIAVTIPDGSSPRLDLKATQRMAVAAVTRRAARSAEREALDGKPTSATNTEG

SEQ ID NO: 347596 - protein, 347 aa, unidentified
MEKVTRIGVDTSKNVFQLHGVDAEEKPVLRKKLTRPKMIAFFKELGPTVIAIEACGSAHHWARQLSSFGHEVKLIAPQLAKPYVKRGKNDAADAEALCEAMSRPTMRFVPVKTADQQAALMLVGMRDRLVRNRTQLANSIRGYAAEFGLTAAKGICRVEVLLTEIVSDDTLPELARDLFAIHRREYELLQVEIEKVEAKLMEWHRKDECSQRLSQIPGVGPIGASLLMMKTPDPKLFKSGRDFAAWMGLTPKDHSTAGRARPGGITRAGDELLRSVLVNGATAVLKQVRAGRGRNTSPWLHRLLEHKKPKLVAVALANRTARIAWKMMVSGESYRATPARPVLAKAA

SEQ ID NO: 347597 - protein, 347 aa, unidentified
MKRIAVDLAKSVYQVAESVRAGEVSQRKRLNRVAFARYVQEQVGPVEWVMEACGTAHYWGRVAQARGHRVILLHPRYVRPYLRRNKTDRNDCDALLEAARCAGLHPVPVKSLEQQQLQQLHALRESWKKSRTQRINLLRGIFRELGIDVPASTAAFLRAAGECLERPEVSALRGALQVVLAEINFYEQSMHECEAQLARWHAEDEIVRKLDEVSGIGLLTASALKTAVGTPERFANGRQLSAWLGMTPHEHSSGERRHLGRISRQGNVYVRTLLIHGARSALLAAQRCQARTPEKMTELQRWATTTAARIGQNKAAVALANKLVRICWAVWCHQRRFSGQWQSVPPV

SEQ ID NO: 347598 - protein, 355 aa, unidentified
MNSEKYIGLDVHQATISVAVMDSRGKVVMESILETKAATLLEFLAGLRGTLSVTFEEGTWAAWLYDLLKPHVQKLVVCNPRKTALLKDGNKNDRIDARKLAELLRLDNLKPVYHGETGVRMLRELARSYLTLVKDLTRVMNRLKAMYRSWAIPCAGRDVYYTRHRAAWLSKIREAGVRRRAEHLYQQLDMLQHLRQQARRELLAESRKHAITAKLRQIPALGPIRAALAVALIQTPNRFRTKRQLWAYSGLALETRTSGEHCYVQGQLRRSKKQVSIRGLNKDHNHDLKGLFKAAATRASVQPGPFQDFYQRSLAKGIKPTMVRLTLARKIAAITLTLWKKGENFDAEKLKSQAA

SEQ ID NO: 347599 - protein, 309 aa, unidentified
MDTIVVGIDVSKDRLDVAVRPAGTILSCSRDASGIEGLICELGRLGAQLIAVEATGGFETVVVASLAAAGLPVVVVNPARVRAFARALGQRAKTDPIDARVIAHFAAATNPPVRPLPDSATQALADLVTRRRQIIQMIVAEGHREKRASVRARRSIARLLKSLRAELSEIDAEIDESVRGSPIWCEKESLLTSVPGVGSGTARTMLADLPELGTLNRRQIAGLAGLAPFTRQSGKWCGKSFIGGGRASVRTALFMAAMTAMRWNPALRTFHHRLRASGKPKMVALIAVARKLLTILNAILRDNKKWQTA

SEQ ID NO: 347600 - protein, 352 aa, unidentified
MNQRYEKCRQYVGIDLHRRRSVVVRMDGEGEVVDCVRIDNSVPNLVAEVGKAGPGAEVAVEATYGWYWAVDALCEAGFAVTLAHPRGIASMQNRRAKTDQLDARELADLLRIGRLASAWIAPPGVRELRELVRYRHKLVHLRAGVKASVHSVLGKCGVVPEIADVFGPIGTKMLDALVLPEPYASRVASQRRILAALSAEIAVVEVETANRLKDNREYRALLTIGGIGPVLASIFVAEVGDVHRFTSADQLACWAGLTTRVDSSDTKTRRGNVSKQGSRLLRWAAVEGCQRAREPYLAERRRAIVARRGKSAQHIATVAAARHLIRIVYYTMRDGHARCLDGPIAATVPALQ

SEQ ID NO: 347601 - protein, 398 aa, unidentified
MLVGWDWASETHDVTVLDEAGMVVDRWVLRHTERELEEALRRLARHGRPGELPVAIERTTGLVVARLLTAGHPVVPVHPNAFHAARSRWGASKAKSDPGDSYKLADYLRTDGHRLRRLRPLDARTRELQALCRMRDDHVAARTAATNQLGALLEAHWPGAKAIFSRLGSEIALAFLEDYPTPEAAGRLGEARLAMFCRRHSYRGGRAPGELLERLRSAPVAPVGISPETLAELVRAQVRLVRATLSTIAELDQALGAALLGHPKAPLLAPLPRVGEVSLAQLVGEVGPILERSSHVEQASAEAGAVPVTKESGKAKSVQFRLATNRHARKALTAFADNSRHASPWAAALYADARRRGKRHPHAVRILARAWMRVIWACWHNDTPYDPSQHGGERRLAA

SEQ ID NO: 347602 - protein, 334 aa, unidentified
MENIALIGIDLGKNSFHIHCQDHRGKAVYRKKFTRPKLIEFLATCPATTIAMEACGGSHFMARKLEELGHFPKLISPQFVRPFVKSNKNDFVDAEAICEAASRPSMRFVQPRTESQQAMRALHRVRESLVQGKVKTTNQMHAFLLEFGISVPRGAAVISRLSTLLEDSSLPLYLSQLLLKLQQHYHYLVEQIKDLESQLKRKLDEDEVGQRLLSIPCVGTLTASTISTEIGDGKQYASSRDFAAATGLVPRQYSTGGRTTLLGISKRGNKKIRTLLVQCARVFIQKLEHQSGKLADWVRELLCRKSNFVVTCALANKLARIAWALTARQQTYEA

SEQ ID NO: 347603 - protein, 322 aa, unidentified
MHPFHLGIDVAKAKLDCALRTPAGKIRHKVVANTPAGFEDLRIWLAKQGAESVHVCLEATGTYGQAVAEFLAGFATITVSIINPAQIKAFGASQRVRTKTDKADAALIAQFCCERQPAAWQAPSPAEQALRVLVLRLDALQTMRTQESNRLEVAALPVRDGIAQHLTWLDREIERLIKEIRGQIGRDPTLHDKQCLLDSIPGLGERTIAILLAFYADPARFGNARRAAAFAGLDPRQHESGSSVKAKPRMSKVGHACLRKALYMPAMVALYKTDWGKRFRERLAASGKPPMLIIGAMMRKLVHVAFGVLKSGKAFDPAMHGT

SEQ ID NO: 347604 - protein, 345 aa, unidentified
MDSPVFLRNSGALVVMGMGIRSFKRKESDMNATTVAVDLAKSVFQLAVADEHWKIIETQRLTRTQFERWFLNREVNLVIMEACGSAHHWARWLNSLGIEVRLLPAQYIRAYVKRNKTDAADAAALLEAARASDMRPVRVKSVEQQALQGMHRIRSLWMGTRTSRINALRGFCREFGIAIPVGARTGVEAISRILADPNTAVPDLIRGTAKLLVEEIRLLEARIAQLERELAAIAKFSPACTTLLSIPGIGLLTATALVAATSGDVSHFKDARHFSSWFGLTPKEYSSGSSRHLGRISKKGDRYWHVADPRGQERAACVQGGAGRRARGVWRAPLGIGCAESKQPQ

SEQ ID NO: 347605 - protein, 473 aa, unidentified
MGRRIIGLDLGVATDHTAVVLDEAGTQLARRRAQPTRASLEGLRAVALAGAPEGTVVEVVMEPTGPAWLPVAVFFSARGDRVCRVSSQRASDLRRYFRRHHKTNRIDATTLARMAIVEGDTLRPVELARGDAAALDREVRVTERLTEEMAERKVRIRDLARQLMPTSGQALSRQLCRSDLEVLRAFGNPKALVAEGVDAIEALIVEVSRGMHGREKAQAFVAAATEALDLYGDTDAVAFEALAADLATEIALLDAIEAARAPHERRREELYVKVDPEGLARSVPGIGDKGGPLAVAVVGRAGRFPNADAFCSYTGLVPRASETGETDHKGQAMTKAGNRKLRRMLYRAADTARKEDPQLARIYWTQMVERGANHTKALAVVAAHLARRLWRTLERQSPYVVRDTDGNQVDRVEAKRIIAEHWTVDEETRRRRRSKKEAGKAPQQVLKGHAERGARSASARRPSPDSILDREAS

SEQ ID NO: 347606 - protein, 363 aa, unidentified
MRDPRTVAVGLDVHKSSVRLAAVRADELLREVTLPYDLERVEQELRAWPGARVAYEAGPTGFGLYRHLVAGGIDCEVVAPGLVPTRPGDRVKTDKRDARRLAALHGGGLLTAIFVPSPELEALRDLVRAREDARLDRMRARHRLGKFVLRHDRRMPTTCWGPTRRAWLGRQAFELPGQQQAFDDYLFNVDQIDRRIGVMEAEIARLAADGPHAELIGRLRCLRGIDTLTAVGLVCEVGDFERFKTAQQFMSFVGLVPSERSSGEGRRQGSITKAGSAHARRLLVESAWNSRRRPTVGYELARRHRDQDPAVLERAWRAQQRLHRRWQRMAGRGKPHQKIVVACARELAGFVWAIATNQPLRTA

SEQ ID NO: 347607 - protein, 414 aa, unidentified
MIFRWFVGIDWAAEKYDVCVLDASGKGIAKRVIKHSGTAIAELLDWLQEIAGGNPAAVAVAIEMPRGAMVEGLVERGFGVFAINPKQLDRFRDRYTVAGAKDDSRDAFVLGDSLRTDQACFHRVQLDSAQMLRLRELSRLQEELQVQENRLSNQLWEQLHRYYPQTLTLSPAANEAWLWDLIEMAPLPLQAGQLKLVAVKRLLRSHRIRRVSAEEVLDVLRAPALRLAPGAAEAASEHVLLLLPLLRSVHQQDDQVSKRIKHMLKELSDSLSGEGATPKHSDAAILLSLPGVGQSVGATMLAEASQPLAERDYHALRCYAGCAPVTRQSGKRKLVLMRRGCSERLRNALYYWSLGSLKEDWARQYYDRQRASGNEHGGALRSLGDRWLAVLIAMLKTGTLYDPARRSQAQAKAS

SEQ ID NO: 347608 - protein, 340 aa, unidentified
METPRHIGIDLHRNQFTCCVRLENGRNYLTDWKLEDLPRFVKKLRPSDQIAVEVTGNTRLFHDAVTPYVKRVVAVDPNQFKVISHSVKKTDPNDARNLALYLEKDLLPEVRMKDRTQAQLASLTQTRDTLVKLRTALKNKVNNILSAHGINLEKEALSSEKKLNEILAMRFDAMVTVELEVLIEEIRSLNQRIARLEKTIAEEGSKLEGHKNLTSIKGIGPLTGSILLSVIGDINDFADEGKLAAYFGIVPRVSNSNETERSGRITKRGSKLGRTALVQCALVAQRYSPYLKRYYEKVKARRGTGKAIIALARKLLGIIYRTLKNKWVFENFPNFVLAEG

SEQ ID NO: 347609 - protein, 315 aa, unidentified
MRSTVAQSVGVDISKDALDVAIHPAGESFRITNNPEGHRAVIKRLKGFDIARIVFEATGAYHRLFQQALVEAGLPWVKVNPCQARRFAQATGKLAKTDRCDALMLARMGAALELETRAPASKTVEALRELVNARDALIKDRVAALNRQAIAVSPLIKRQLAQRLRQIDRQIEAIDRRLKTLRDADADLCQRFDILTSIPGVGEVTANVLVVETPELGRLEHAQAASLVGLAPVPRDSGQTHGKRSIRGGRSRARQALYMPALNAIRLNPEFKAKYQAMVKAGKPAKVAIVAIMRKLLILANALIRDQRKWTPANP

SEQ ID NO: 347610 - protein, 424 aa, unidentified
MSSDLKIAAFIGLDWADQQHVIRLRVAGSATVEAQLLDQKPETLRAWIGQLRQRFGGRPVAIALEQSRGSLLYALMNVDFLLLYPVNPQNLSQFRKAFYPSGAKDDPQDALLLLEMLEKHRDRLRVWVPDDASTRCLRLLAENRRKLVNRRTALTNQLTSLLKESFPQALDWAGPLDSLRACDFLEPWPSLQILQKTSTSRLRKFYRDHTRHDSEAIHQRLDQIHQAQPLTSDSAVLAAAELMIPALVRQLRCLIESIQQFDQQLKDRFQQHDDYTLFHSFPGAGPALGPRLLSAFGSNRDRFECAAEVQTLSGIAPVTERSGKSRWVHWRLACPKFLRQSFHEFAAQSILVSPWARTFYDQLRLHGTSHHAAVRTLAFKWIRILFRCWKNRTPYDEQIYLASLRRHGSPLCAAMASPTTGANL

SEQ ID NO: 347611 - protein, 335 aa, unidentified
MHYLYYVGLDVSKETFDASLVAFEDANEMAHRKFANSRKGICSCLHWVEKRHGILLDDVIFCAEDMGSYISEMAVCASDRTLTFNFSLISPLVIKYSMGIARGKTDRVDARRIAEYAITHYRKIALYLPAEKELCQLRTWLILRAYLAKQRVAKLVLLEKLDYKEKFADVSIQRSMLQEEIAYAETHMKTIEREMKELIAADSNICRNYKLLTSIKGVGPITAIVMLCSTLNFTKITDHRKFACYCGLAPFEHSSGTSVRGGCHTSSMANRDIKEQLNRSALIAIRCDPQLKAYYERKVAEGKHKFSVLNAVRAKIAARCFAVVRRGTPYVALQI

SEQ ID NO: 347612 - protein, 347 aa, unidentified
MNDQNIHIIGIDLGKNWFHLVGMDEHGKPVYRKKLNRAQLGEWIVTLKPCIVAMEACPGSQFWGRRFQHAGHVVRVIPAQFVKPYLKSNKNDFNDAEAIAEAGSRGTMRCVALKSADQLELQALHRVRQRFIVERTAVVNQMRALLLEHGWVVPMGRELFARRLPTILGDLEHGLTVRMVQLIERLRRRWRALDDELASISNEIVQIAADSELCRRVRTVPGVGPIVSTALIAAVGNGAAFRRARDMSAWLGLVPKQYSTGGKSTLGGISKRGNAYLRMMVIQGARALLIHMKRDQSRIGLWLRELEQRSHPHVALIALANKIVRICWKVLTSGQNYRPFLEVSKLA

SEQ ID NO: 347613 - protein, 335 aa, unidentified
MIAFWVGIDVSKRKLDVAALDERSKLKTHVFANDAKGHAQLVPWLQGRGLRPDNAHICLEATGPYSESLAIVLADGGWPVSVVNPAQVKGFAQSELSRNKTDRADAALLARFCAAMRPALWQPPAPEYRHLRALVDRLQALKDMHQQETNRLEAHRFTGQDDLVASVQQHLDWLRTSIEALQRQIDDHIDGHPTLRRDAELLQSIPGVGDVTIAKVLAYIGDVRRFRNAKALAAFIGVTPRLRLSGTSVKGRTMLSRTGHPTMRHALYMPGLVALRHNPAIRTFGERLRATGLAPKAVVGAAMRKLVHLIFGVIRSGRPFDASMAIRTLDLQDGI

SEQ ID NO: 347614 - protein, 412 aa, unidentified
MALTEAMFFVGIDWAAKTHAVCILDAAGRGVAAFTVEHTAAGFARLAARLARLADDPESVPIAIERPDGRLVDALLEAGHPMVPVKPNAIKAWREGEVISGAKSDAGDAEVIAEYLRLRAHRLRPAVPYSDDTRAVRTVSRTRTDLVEARVAASNQLAALLDAQWPGAKEVFSDVASQSSLAFLTRYPTPASAAHLGVKRMAAFCTKHRYSGRRSPEELLERLRAAPAGITGPAQTEALRDAVTAHIRVLTALNTAIRDLDRSVAAHLTDHPDGQVFASLPRAGVVNAAQILAEWGDARDAYDGPEAVAALAGLVPVTRASGKHRGVGFRWACNKRFRVALTTFADNSRHQSDWAAEIYRRARASGKDHPHAVRILARAWVRVIWRCWQSGTPYDSALHAGAQRHRDTVEAA

SEQ ID NO: 347615 - protein, 334 aa, unidentified
MKSDAVYIGVDVSKAKLDVYIPPKKEGLRAEIKELENNPTGLRKLRSIARSVKGIICVEPTGGYELELIAFMHKFDVPVAYADALRVRQFAKAEGNLSKNDAIDAALISRFAAKVGVRIIDKKDIDIVELKRKTKFRQALIESRTALISRLDTEFDDVIKEMIKAQIKHLNKLARKIENSCIEIINNNERIKELLPRFTMIGGVGDLTAVSILAQLPEIGRLDDAQLNRLVGISPEQRQSGTKEWQRRIGGGRKDVRNALYMAATAGLMWNSILRDYYRKKRAEGHSHKWAMVPTMRKLLSLLNRIARDPNFIPLPEPESTRKNAGAGRKKKSA

SEQ ID NO: 347616 - protein, 389 aa, unidentified
MNGNTGMNVGQVIGTMNGLQVVGLDIAKQVFQMHTVEMNTGEIVNVQLKRAKVLERFANKPACLIAIEACGGAHHWARELSALGHSVRLLHAKIVRPFVSGNKTDATDARAIWLAVQQPGVKFVGIKTTAQQATLTLHRQREALMKMRIMQTNALRGLLYEFGATFAKGKNALLNDIETTLDALADTLPQMVADSLREQVLRIKAIEVDMQAIEKRLQLQLGQDRQMQRIAQIPGVGLLTATAAIATMGEARAFKSGREFCAWLGLVPKQTGTGGKVKLQGISKRGDAYLRTLLIHGARSVLSHTRRCSESLVEPLHHASDVYKAQKPAVELVITSGNPTKDLHALEKIFNQVARLVAVLVQRTRLLAIGFGRDDDLHALGLRGLDNLV

SEQ ID NO: 347617 - protein, 343 aa, unidentified
MKDITTIGLDTAKSVFQVHGVDATGETILRRQLKRRQVLAFFAKLPPCLVGIEACGASHYWSRELTKLGHTVRLIPPRYVKPYVKSQKNDATDAEAICEAVTRPNMRFVPTKTREQQAILMLHRTRHLLVRQRTSTINAIRSHLAEYGIVAGVGRNGVEALLKIVSDEQDDRVPAIARNCLMALGVQLEMLKRQVLELDAKILATHRSNELSRRLEAIPGVGPCIATALVASIADPGAFRSGRQMAAWIGLVPKQNSSGGKDRLGGITKAGDRYLRSLLMLGALSVIKRAKQLGYTRRPWLAQLMARRPIKVAAIALANKIVRMVWAMMVRGESYREPVALAA

SEQ ID NO: 347618 - protein, 370 aa, unidentified
MLDTTTFIGLDVHARSIKAVSLDVMTGEVRAATFGYDAGAVAEWVRSMDPRARCVYESGVTGFDLQKRLSGLGVDCAVGAVSKMIKPSADRRRKNDRNDAEFLARMLSVGNVVEVWVPDDECEAARDLTRALEDARDDLSRSKQRLSKFLLRHGLVFDERTPTGRRKGNWTRAHWSWIESIRFAERADNDVLAYYVDAVRRAAEEKARLEGLVEAEARKPRWRKRVDSLRCLKGVDTASAADLVFEAGEFSRFRNARSFAAWVGLTPSEHSSGESDRRGAITKAGNKHLRKTLVEAAWHYLTCSGRPKDLAKGQAPDRVARRHAAKGVRRPVERREALLARGVHGNKANVATARELACWVWAVGLMAEEA

SEQ ID NO: 347619 - protein, 341 aa, unidentified
MKKALYCGIDLHSTNGMYVVTDGTDKIVLKKRIPNDLPKILSTLEPYRNQLVTVVVESTYNWYWLVDGLMEAGYPVKLANPAAIEQYNGIKQANDLTDAAFLAHLARLDILPTGYIYPKEERPVRDLLRRRTLLVRQRTALILSLQNLFTRQAALNLSWRKIRKLTRPQRMDALNDQDYLLFVTAAQVELVEQFNTHIDQFEKKVLERAKLKAAYEPLLSIPGVGVILGLTIMLETGDITRFLKVGNFTSYCRCVRAKRVSNGKSKGTNNSKNGNPHLAWAFVEVVHHAIRTCPQAKRFYDRKKSKRNGALATKALAAKWSKAAYYVMKTQRAFDLKRVFG

SEQ ID NO: 347620 - protein, 427 aa, unidentified
MNEIKTNRIDAFRQFKREIRGCKDYLIVGLDIAKRKHHAFFGDANGRTLLKGLIVENNAEGFQHLLTQVRFYMDREALSRVVFGLEPTSVYHKPLAEHLIEQGHLVVYATNEAIKRNRSLLDGRWDKNDTKDSANVADLVAQGKCHYYDLPEVRLRDLRHLLLFRKRLRKQLHSCRVRIRNNLVAQYFPELDRFWNSAEAANLAIVRWFLDPASIRQLTCEQFIAKVTTHNGGLRQRRRLRQIWEAAEHSIGCRPGPAMKLEAELLVETLQCAQAQMGRVEKAIQKLAEGFEEYGYLKSIPGFGPYVSAMVLAATGNPHRFENRAQLIRLAGFDLSASRSGEKSNTAVPVISKKGKADLRYALYQAALIASSLTTHFRDYYNRLLEGRQREKGIRTKMRVKLAAKLLVIAWTLMKRKEPFNPAHIQA

SEQ ID NO: 347621 - protein, 437 aa, unidentified
MNYKQNEKINQVKESTLVVGIDIGSTTQYARAFDWRGIELGKVLPFSNSREGFESLKAWMQHLQDKYKKLDAIVGIEPTGHYWFDLGAYLEDEGIRLVMVNPYAVKQTKELDDNSQSKNDRKDPKVIAKLVTEGRYSAPYTPDGVYADLRIMVANRKRLIREMTQIKNRFARWFAIYFPEYTDVFGDYEAQSSMLLLKKVCTPEAIVELGAEKINQIWRDARLRAVGMKRATTLCETAKRSIGLKKGSSAARYEMKLLLEDYEYKKAQLDAVMEEIEKLCRKIPESEQMLAIKGIGVITVAGFLAEVGDVRRFGFLAEVGDVRRFESPRQIQKLAGLSLRENSSGKHKGQTTISKRGRSKLRAVLFNAAIPLIAKNPEFKSLHEYYTTRANNPLKKKQSVIAISCKLIRVFYAILAKGVTYDAQKLISDIHRQPQVA

SEQ ID NO: 347622 - protein, 357 aa, unidentified
MESQEVKYVGVDCGKKSIEVVRINSENSLERRQFSTTESGINNLLQWLTLNDIVGLEAGSQSFRIAKSILNKGVQVIVLNPGNLATIYQSLKKTDKEDSLKIARLIQRFPIEELPTVPIPNDEEEDNRRLCTEQENWTKQLTQGKNRLHSLFTQAGLTQITKKHLRTKANREISVALLPSRYQKEAERILKVLDLVEQNLKLIEKEIQEALKKNKAYVQTIMSMPGIGMITSLAIMSYMGDCKRFSSAKQAAYYAGLVPRVDISGDTVRYGRIINRGCHSIRRVIVQPAWSLVRCQHGGKVKEFYQRLYLKKGAKKSIIATSRKMIEVLYVMIRTGKLFDSMPENILNRKLTQYGLM

SEQ ID NO: 347623 - protein, 376 aa, unidentified
MLYVGIDIAKNKHDVTALNVPGKTVLKPLTFSNNKAGFELLDLSLRQLNQDCLIALEDTGHYAFNLLNFLHEQGYKVYTYNPLLIKEFAKSLSLRKTKTDKKDAHGIALKLLSDPNREQFQHDNRQVDLKILARHIHRLKKKQSDWKVQYTRCLDIIFPELDKIVGKHSEYTYQLLTRYPNPQKRIEAGFDKLIEIKRLTASKIQDILSVAPRSIGTTSPAREFEIIEIIKHYKRLIDKAETCVNDLMAEFNSVITTVTGIGGRLGAVILAEIRNIHAFDNPAQLQAFAGLDSSIYQSGQIDLAGRMIKRGSPHLRWALIQAAKACARFSPAFKAYLKTKLEQGKHYNVAIIHLAKKLIRTLFYILKKSCHLTNKK

SEQ ID NO: 347624 - protein, 400 aa, unidentified
MNAVGIDVSKGKSTVAVIQPFGVVIAEPFDVFHTDSSLKELVRFIKSLSGETKVVMEYTGTYYEPVANALHNAGIFVSVVNPLLIDDYDTNRVRKVKTDKLDALKIASYALDKWIKLRKYEPAETVRKTLQIMNRQCIKLNKILVMQKNSLIALLDCCFPNANTLFTSPRRVSDGHEKWVDFAMKFPHVDSVAKLSLSAFRAKYQSWCKKEHYNYSESKADQIHAYARTIVSTLPMTESVRKMVSDAAKLLNSTLEALGTLHSEMDALASQLPEYETVMNLYGVGKVFCSQLIAEIGDVTRLKSNKSLTALAGIDPPPNQSGKDDPKSRRISKRGSPALRRTLFLIMTIYLQHQPADEPVYQFLDKKRAEGKPYKVYMIAAAHKFLRIYYARVKEVMPTQ

SEQ ID NO: 347625 - protein, 352 aa, unidentified
MRYAQINAEYYCGIDLHSRTMYVCVMDKQGNILFHRNMKNNFSELKNYLAPFLPNVAVGVESSCYYYWLSDACKDGHIPFYLGHAYYMKAINGGKVKNDRVDSRKIADLLRANLFPLAYPYPEKMRATRDLLRRRHYYVRKRAGTYTHIQISCMQHGMYDVSSKIVKDEQDRRKLTALFDNPDLKLLLKTDIDFIESLQPIIEELEKQIRKQAKYHNQRDYNLLMTIHGVGEMLGLVILYETHQISRFPTVQQYSSYCGVVKCERRSAGKIIGAKNNKIRNPYLKWAFGDIIIKAQQVEPKIDKLYQRLKSKYGIGRAKSIIAHRFAVAAYFMLKNKQVFDVDRFCQSPKYN

SEQ ID NO: 347626 - protein, 486 aa, unidentified
MSAERRLVGVDLGIASDHTVRVLRGDGSEVCRRRARPTVESLAAVEAAALAGAPIGSRLEVVIEPTGPAWLPVAVFFLNRGHLVFRVASAKAADLRRFLSRHAKSNGIDADTLARLPLIAPEGLQPLELPGPEAAALDRRVRACDRLTQEGALHQRRIKDLVRQLLPDSPLTGDLSKTDLAVLERWADPRALLAAGQARLLVVISKASHGQQGAARADAWRAAAAAALELYGDHPAIAFTDLAAEVATEVRLLQAVRAELAGHAAARTEAYRFTDPSALAASLPGLAEIGAPTVTAIIGRPGRFRTGKQFRSFTGLAPKASETGNTDRKGEPMSKAGNRLLRTTLIRAADNARRQDPQLARIYYVQMVERGAGHLKACCVVAAHLAERLHAVLTRGMPYVLCDIDGTPVDPATAKKIIAEQWTVPLEVRARRRSRKPPSPRGRAGKAPQQVHAGHDRSDTRRVDKRGGLPRDTSVLAAATPVKATT

SEQ ID NO: 347627 - protein, 372 aa, unidentified
MEEISKIHVGLDVHKDSISVAAAEPGRVPARLIGKVTHDVNKLLKVLAKIGTAEQLHLVYEAGPTGFGLQRALKARGYVCEIIAPSQMPRRPGDRVKTDGRDSIQLAECSRAGQLSAIWIPDPGDEAIRDLSRAREDAVNSRMQSRHQLKGFLLRHDVRYTGKTSWCGAYYRWLATLNFGAGAAQTAFTEYWQAVKSADDRVDRLTKALQSSITGWRFEPVVAALQALRGVAAITAIGLVAEIGDLSRFAHPRKLMGYLGLVPSEHSSGERTSRGSITKTGNAHARRLLTEAAWNYRFKARIGKEAQVRQQELSEPVRTMAWKAQLRLTQRFAALNARGVQANKACVAVAGELAGFVWAIGMQAQHEKLMTT

SEQ ID NO: 347628 - protein, 344 aa, unidentified
MGDQSIQSEVILGVDTHLDTHVGAVISETGKLLGTLAVSTDSAGYLKLLTWAKSLGRLRRAGVEGTGTYGAGLARVLHEHEIGVLEVNRPDRANRRFQGKSDPTDAESAARAVLAGSATAIPKAQSGAAEAMRAVSVARRSAVKAKTQAINQVRALLVCAPQEIRERLWKGKPAECIDGCARLRSLGTTPLLHTLTATLRMLAKRWLMLAEELKELDAMLEHLTGQHAKRLRQQFGVGPHTAAVLIAVAGDNPERLRSEAALAALCGASPLQASSGKTTRHRLNRGGDRPANNALWTIAMVRMRSRSTNACVRREAHRRRHVTQGNSPMLEALHPQGAVSADPR

SEQ ID NO: 347629 - protein, 318 aa, unidentified
MHTSTHQNIHVGVDTGKSQLDIFIRPLDIFFTVNNDEKGIKEAIKTIKQYVPQRVVVEATGRLEMPFIIACSEAKLPFVIANPIHIKRFAGAIGQRAKTDKLDARLIAHYSEAIQPNLTQLKPENMRLMSDLVARRHQLLTMQTMEKNRLQSLPKHLVSTIKPVLTTFKNQIEKTEQKILFLIESCPEYQNKNRLLQSVPGIGKVAAASIISNVPELGLITNKQAAALIGVAPINRESGRYKGKRVIQGGRAQVRTVLYMAMMSAMQCNPVFKATYQRLLDAGKPKKVAIIACVRKMVVILNSMIRDGVMWNENIARN

SEQ ID NO: 347630 - protein, 339 aa, unidentified
MQVTTIGLDLAKNVFQVHGIAGNGDVAFNRALRRSQMLPFFARLDPCLVGIEACGTSHHWARELIKLGHNVKLIPPVYVKPYVKRGKSDAVDAAAICEAVTRPTMRFVEVKTPEQQAILAVHRTRDLIVRQRTQTINMLRAQLAEFGVILPQGIGHAIQFAKDYLDGEQPDLPEVAGNVIVELSDQLLFLHGKIQRCSREMIQIAKCEKRVALLQIIPGVGPITASAIVATIGSGKQFNNGREFAAWLGLTPINKSSGGKERLGRISKMGDQYIRRLLYLGMVSRVRQIAKTPEAFDPWFADILARKPTKLAAVAMANKTARIIWAVLTRNEPYKVRAI

SEQ ID NO: 347631 - protein, 425 aa, unidentified
MNYKQNEKINQVKESTLVVGIDIGSTTQYARAFDWRGIELGKVFPFSNSREGFESFKAWMQHLQDKYKKLDAIVGIEPTGHYWFDLGAYLEDEGILLVMVNPYAVKQTKELDDNSQSKNDRKDPKVIAKLVTEGRYSAPYTPDGVYADLRIMVANRKRLIREMTQIKNRFARWFAIYFPEYTDVFGDYEAQSSMLLLKKVCTPEAIVELGAEKINQIWRDAKLRAVGMKRATTLCETAKRSIGLKKGSSAARYEMKLLLEDYEYKKAQLDAVIEEIEKLCRKIPESEQMLAIKGIGVITVAGFLAEVGDVRRFESPRQIQKLAGLSLRENSSGKHKGQTTISKRGRSKLRAVLFNAAIPLIATNPEFKSLHEYYTTRANNPLKKKQSVIAISCKLIRVFYAILANGVTYDAQKMLSDIHRQPQAA

SEQ ID NO: 347632 - protein, 343 aa, unidentified
MQVTTLGIDLAKNVFQVHGVDAQGRQVFSKALRRSQLRNFVAQLPACRIGLEACGSAHYWARELQALGHEVRLMAPQFVKPYVKTNKNDRADAEAICEAVTRPNMRFVPIKTPDQQAVLALHRVREGQIKARTAQANQVRGLLAEFGIVVPQGMTTLFRELPGILEDAENGLPDLFRTLLADRLEELRRLEQAVKEQERQIQAWHRSHAVSRRLAEIPGIGPISATALVAAIGHARHFKNGRQLAAWMGLVPKQHSSGGQSNLLGISKRGDRYLRMLLIHGARSALLADQRRGEGGDPWLEGLRQRRCPNVATVALANKNARTVWALMAHDRTFDPGLRGAAA

SEQ ID NO: 347633 - protein, 399 aa, unidentified
MIKDHEHVDVFIGVDVGKTDHHAVALDKNGKKLLDKALPQDEAKLRQIINKLASHGTLLLVVDQPSTIGALPVAVAQAEGILVGYLPGLAMRRIADLHPGEAKTDARDAFIIAEAARTMPHTLRSVDVADEQVAELSMLCGFDDDLAKQATAASNRIRGLLTQIHPALERVIGPHLDHPVMAALLQKYPTPEALSRAGRTRIAGLMSKSAPRAGKPWAAEIFAALDEQTVVVSGTGAAGIVLPQLAAQLTQLRTSRTQILERVEAIVEAHPPHELLTSMPAVGVRTEARILTEVIGKEFKTAGHLGSYSGLAPVTWRSGTSIRGDHSSKKGNKILKRAFFLSAFASLKDPTSRAYYDRKRAEGKRHNQALIALARRRCDVLFAMLRDGALYEAPETQAA

SEQ ID NO: 347634 - protein, 392 aa, unidentified
MIITVGIDVAKEKHDCFILSSEGEVLADVFTIQNNAEGFNQLLQVIQSCASPIDKMKVGLEATGHYSYNILGFLLEKGLPTFVINPLHTNLYRKSLSLRKTKTDRVDARTIATMLMSDVGLKSYTDTSYHNEELKSLTRYRFDKVKQRAKLKSSITRLVCILFPELEKLVPTLHIASVYALLLEYPGAKQLAGANLTHLKAVLYEASKGRYGRDRAIMLRDAARNSIGSYMPAKSLELKHTIRSIQVLDTEIEEIETEIEKLMEQIQSPITSIPGIGSRMGAMILAEVGDFYNFDSADKVLAYAGLSPSTYQSGRMNNCYAHMEKRGSRYLRYAIFNATKYVCYWDPIFKAYLEKKRSEGKHYNVAISHAAKKLVRLIYAMQRSGQPYRKAG

SEQ ID NO: 347635 - protein, 342 aa, unidentified
MNIPVRIGMDTSKSVFQLHGVDENEVVVVRRQFRRAEMIRYFERLPPVLVAIESCGSSHHWGRLLQSFGHEVKLIPPQYVKAYVKRGKNDAADAEALCEAVTRPSMRFVPVKSKERQAACMLMTVRERLVSVKSQLSNAFRSYAAEFGIVGPAGRQNVAALIKRVLEDNSLPEMARDLFRLQADEYAAVQARLAKIEAKLMKWHREDDISKRIATIPGIGPIGSSMLSMKAPPPETFRSGRDFAAWLGLTPKDHSTGGRQRLGGITKAGDSVLRSTLIVGATALLRHVRKGRHKPTPWLASLLERKPPKLVAVALANKFARIAWRLMISGGVYNRPVAAMPT

SEQ ID NO: 347636 - protein, 349 aa, unidentified
MSIPNLTVGLDLGDRSSRTCGISGVGTKAFEDAISTTPASVREYFGRLPRSRVVLEVGTHSPWVSQELVQLGHEAIVANPSAVYGKRRRRKRNDRLDAEYLARQGRADPELLHPIRHRGTKARVHLELLRARDTLVRARTRLINHVRGAVKPVGGRTRRCSAEAFGRRTLEDIAPELQPALQPMLELIKKLSEQISKYDHDIEKLIASDYREAMHLQQIKGVGPLTALAFVLLIEDPRRFENSRDAGAYFGLCPRLDDSSDSQPQLRISKAGDEMGRRLLVSAARYILGPFGPECDLRRHGMAIAARGGKNARSRAAVAVARKLAVMLHKLWVSGTTYDPDRLTKRRAA

SEQ ID NO: 347637 - protein, 456 aa, unidentified
MNPVSFVGVDPASGDFQCALTRQGERHIVFRTFSVAESQLHQMVDWIRNEHIDIVAIEGQGGYATPLEKTLRGASIPFYSFSPFKIAKYRQAVLGQHKNNLKDATTVAFYARQLAAQDDLEPYRRTWFPDEVLRPLVRMYEQKQKEATREINRLWQTIHGISGDLYLFLKGSAPGTHNKRSLSQQWMLKLFAWYPDVHTWQSFTPDGITTVLKEHRAGIIEKVMCLKDMVSCVSWYSDIEKLRLQVSATTALALKQVVRSLYHQIEAEAAKNPATQRLMCYGGIGALTAAQIVGEIADISRFPNNNHLASYAGLGRREHKTGTGNTERRNHLFNRRLKNTFFTAARNYTLFNPDSHLTGYYRSLRSRGMKPTEVYKRVARALVRRFYRDLTIIREQEEKETRREGNSEPSPTGNKPPEQPHTSPSEEKFTTSRAQTKPLMCESIVSKQEVYINKFT

SEQ ID NO: 347638 - protein, 456 aa, unidentified
MPKTTTDNRPEFKPVNFGAAAIDIGSKMHMAAVNPACTDVAVRSFGTFTQDLHDLADWFKACGVTSVAMESTGVYWIPVYEILEQRGFDVILVNARFAKNVPGRKTDVSDAAWLRQLHSYGLLRGSFRPDAEIATLRAYLRQRERLVEYAAAHIQHMQKALMEMNLQLHHVVSDITGATGMRIIRAIVAGERNPDVLATYRDVRCHSSAETIRAALVGNDRDEHVFALSQSLELYDVYQAKMLDCDRKLEVLMAALSSKGAKPVGKLSKPRIKTKQVNTPTFDVRTALYGVLGVDLTDIHGLGPSLALKLIGECGTDLRAWPSAKHFTSWLCLAPGNKISGGKVLSSRTRRSSSRAAALLRLAATTVGRSETALGAFYRRLATRAGKSKAVTATARKIAVLFYNTLRHGMSYKDPGADQYEQQYRSRVLSNLQRRAKSLGFVLQAIPGEDANPAVS

SEQ ID NO: 347639 - protein, 405 aa, unidentified
MGQPGVKFTLKEYHTMIYAGIDVAKDKHNCLFTDSDGEVLFEPFAIENNRPGFDGFFLKLMDCSSDLSKIKVGLEATGHFSDNLLEFLITKGLNTTVINPLHTSLYRKSLSFRKTKTDRVDAHSIVTMLRTESLKPYSPTSYHVRELKSLTRYRFSLVQARARLKGSYARLCVILFPELEKLVPSLHMASVYALLSELPNAKTIADCHLTRLTNLLSSASKGHYGKAKAVEIRETANASVGSFSGVKSLELQQTIQLIRVIDAQIEQVEAKINPIVDAFESPITTIPGISYRMAAIIIAETENFTNFGSAEQVLAFAGLEPSVYQSGQLTSTHAKMVKRGSKYLRYALFNATKYVCHWDPVFNAYLAKKRSEGKAYNVAVSHAAKKLTRVIFHLVKTGQPFQKQA

SEQ ID NO: 347640 - protein, 355 aa, unidentified
MDSAKYIGMDVHTESISIAVLNAAGKIVMECVIETKASMILQFIDGLRGDLHVTFEEGTWAAWLYDLLKPHVTKLVVCDPRKNKSMREGNQSDKIDARRLAELLRLNHLNPVYHGEYGLRSLKELVRSYLTISKDLARVMTRVKALYRSWAIPCTGQQVYAPGHRAEWLAKITELGVRRRAEFYYQQLDALRSLRQEVRRELLAEAKKHKAWKLLCQIPSIGPIRAAVLLGILQTPHRFRTKRQLWTFSGFGIETHSSADHRYIEGELQRSRQRVSIRGLNKNHNHDLKNVFKGAAITASSRPGPFQEFYAALLAKGMRPEMARLTLARKIAAITLIVWKKGASFDARYLKSQTA

SEQ ID NO: 347641 - protein, 376 aa, unidentified
MREKLRFLGLDVHAETIAVAVAEPDGEVRSLGTISNREESIRKLIRKLGSPEQLRACYEAGPTGFVLYWQLTQLGVECAVVAPSLVPKKPGDRVKTDRRDALELARCHRSGDLTAVWVPDEDSEALRDLVRQREAAKQDQLRARHRLTKFLLRTGQRPPLGLKAWTEKYVEWIQQVHYTHPAREATLLDCLNEVQHMEQRVKRLEQSILEVVKLAPAPVQAVIQGLQTLRGVAHISAVTIAAELGNISSRFESARALMGYSGLFPSEDSSGERIRRGSITKSGNAHLRRIVVESAWSYRHRPSVGAKLRKRQEGVPAEITEIAWKAQNRLHKRYMTLMARGKEQRKTMTAVARELLGFIWAIAIRAEAACMQQKAA

SEQ ID NO: 347642 - protein, 350 aa, unidentified
MLIIGCDYHPGFQQIAFVDTETGELQERRLQHREEAEKFYRELAAQGMKVRVGMEASGHARWFERLLAELNFELWIGDAAEIRTKRVRKQKTDRQDAELILRLMLKDDFPQIWVPSWENRDLRQLLWHRHRMVQARTRIMNQLQAVALNEGLRSKKRLWREQGREQLESFRLAPWASRRRHDLLELLDRLNPTIAELSQAVEQEVEKCPEARRLMTHPGVGPLTALAFLLIIGRADRFQCGKQIASYLGLVPLEDSSGNRRRLGHITKQGNSLLRFLLVEAAQVTVRSLPEWRSKYVHLTMRRGRKIAKVAMARKLAVRLYWMMRKEWDYEQVKKFGSDAGQPGHRHGVK

SEQ ID NO: 347643 - protein, 340 aa, unidentified
MTQHKIIGIDLAKNIFFLFEINHKGKNLSRKKLQRSKLLSYIANKEPCTIAMEACSGAHYWAREFSQFGHKVILYAPQHVKTQRRKQKNDYNDAEAIAEVALYKRPHPVPHKSVEQQDIQSLIRMRRLLVTERTRIVNQVRGLISEYGIIMPKGAAAFRKAIPEILENDENQLSCILRELISHQYERYLYIDEQVKWFDDKLNQTIKQFENAKRLMSIPGFGPLTSQAVAVWLGSGQQFKTGRDASAAMGLVPKQDTSGDKVILLGITKRGNTYIRSLLVHGARAALRRAKFKSDNLSKWMLELQERRGPNRAAVALANKLMRIAWAVITKNEEYRPTQS

SEQ ID NO: 347644 - protein, 354 aa, unidentified
MSTMIIGVDLATAHFELAVADAQFQIQQRKRLSRSQFTQFCRELPPSLILMEACSSAHYWARTLQAGGHQVRLLPAQYVRAYVRRNKTDAADAAALIEATRCCELRPVPVKSVDQQSVLQLHRLREQYKNTRNARLNLLRAALRELGMLVPRGLRRGISALHAAVHEASSALPAKLTTIYVHVLEEVEQLQQDMVGVETALRELTRQDRIVRDLMTICGVGPLIATALRATVGEIERFPSGRHLACWLGLTAREYSTGGRHRLGRISRRGDLYVRTLLVNGARSALLAANRFSTPGGRRPLDRLRLWAVDIQHRRGLNKATVALANKLARIIWATWRYQRPFDGNWPGSTAACD

SEQ ID NO: 347645 - protein, 399 aa, unidentified
MVSKVSKLILFAGTDIGKKENALTLMLVSDSSYTEKNRVLREKSRAKAQKKVSKNDKAFMKDPSIVYRGMFKNQLSGFRKMTTEINRAIRNLGKDAEVEVHVAMEATGTYYLKLARYFHDLQQKQEEGSNRKYMVYVFNPRQVKHFAGFLNADNQNDKVDSGIIARYIRSAIVARDVEAREWIPAKEGASQMRNLARTRESLIKMKTMEQNRIEALSQNPDHCRIAMKTHKDLVEYLEERIDELEYVIKDNAKQGIYSDMKEDIELLCSIPGISEVTAINILSEIVDIKRFEKAKHFVGFSGMHPSRKTSGTSVNHRGKLSKHGNNRIRHSLYMATMNATQHNPVIKEYYQRLLNREGQDKKKKIVALVACMRKMLHIIYGVLNNKTAFDPEVAMAHCK

SEQ ID NO: 347646 - protein, 312 aa, unidentified
MDAMVVGIDVSKDWLDVAVRPTGESFAFKRTAAGIEDLVERLKDLSPALVAIEATGGFEAVVAAALAGAGLPVVVVNPAQVRAFAVALGKRAKTDPIDAAVIAHFAEATKPQLRQLPDEKTRFLADLIARRRQIVEMLAAESQRARRISDHRLTRSITRLRKALEEELAELERLIADHMRRSTVWVEKEKLLASVPGVGKTIARTLIAELPELGSLDRRQIAALVGLAPWTRQSGQWRGKSFIGGGRKTVRSSLFVGAMVAARYNPQLKQFRDKLVAAGKPKILALVAVARKLITILNAILRDRRPWHPNPA

SEQ ID NO: 347647 - protein, 365 aa, unidentified
MRKVSTAKQGRDCFEQKLTIGLDLGDHSSCYCVLDETGHILVEQKVSTRPKGLQAAFGAVPHCRIALETGVHSPWVSRLLSGLGHEVIVAHARNVRLIGESRRKDDRLDAQTLARLARIDPQLLCPVKHRSAKAQADLTVIRARAGLVRARTALVNSARGLAKSYGERLRGCNVRNMNPEKAEGLSPELQAALKPLLAALESLSEQIREYNERIEKLAQESYPQVALLKQVKGVGTLIALTFLLTLEDAHRFQKSRDVGCYLGLQPGRRNSGRSEPQMHISKEGDPYIRTLLVQGAQHILGPFGVDCDLRRWGLKLAERGGRNGKKRAIIATARKLAVLLHRLWVSGEVYEPLYNSRRVAIPAAA

SEQ ID NO: 347648 - protein, 311 aa, unidentified
MSRIAGIDVAKGHLDVHLLPQEQSFRCATDAKGLAELVERLTAAAPDLVVMEATGGYQTAIAAALTAEGLKVAVVNPRQVRDFAKALGLLAKTDAIDAYVVARFGLAVQPQCRAMPDEQELVVKELMARRGQLVKMRTAEGNRLEHARSGDVSNSINQVIRTIEKLIKKIDRDLDRRIRNSPIWHEKDQLLQSVPGVGPNTARMLLSCLPELGQLNRRQIASLVGVAPTNHDSGALRGKRMIRGGRVDVRTALYMPALVATRYNPVIRAFYLRLRADGKSAKLAITACIRKLLILLNAIIKTKIPYRGVTA

SEQ ID NO: 347649 - protein, 415 aa, unidentified
MEQIDRRVKLVPNKLWAGIDIGKEHHHCVVIDEAGQRLFSSRIANDETALTTLIDEALTLAAGGELLWAIDLNRGGAALVIGLLAARSQPVAYLTGLMMHRAAAGYRGEGKTDARDAFVIADQARVRRDLGLLRPGDDIAVDLRILTGHRLDVVFDRTRQINRLRAQLLEVCPTLERALTLTNQGPLMLLTRYQTPSAIRRAGVARIEAWLRKQHVRGAAALAQKASVAAAQQSISLPGETVAAQMIARLAQAVITLDAEIAELDTAIEERFRRHRSADIIVSLPGFGPLLAAEFLAATGGDMAAFTSVDQLAGFAGLAPQPRDSGRINCQQANLCRQLFLDLSERIRRHQPARTYHAALDHDAQRVRNHHRESCRINTLCGQWCQQRTPRRHDDRSRDHDMDWIFLCPPSCTHE

SEQ ID NO: 347650 - protein, 368 aa, unidentified
MKKCTLFIGLDDSKDTIEVAVAEGVPGGEVRDFGSVPNTPESLAKLVRRLGRPKDLFFAYEAGPCGYGTYRTLLGLGASCLVAAPSKTPRRPGERIKNDRRDARTLAKLHRASELTPIWVPDAPTEAMRDLTRAREDAKYAQTRARQRLFAFLLRHGRRYPGRTTWSAPHFRWLRTQSFDHPAQQICMEEYLLAIEEATNRVARLDQQIEQLVPQWTMRPVVRALTAHRGVNLLAASTLIAELGDLTRFDKPRTLMAFVGLVPSLTASGLERRTGRITKTGNAHARRCLIESAWAFRHPARRSNHLQRRLEGQPQDVQDLAWKAQVRLCGRYRRLTARGKQHNKVICAVARELVAFLWATARTVAVPA

SEQ ID NO: 347651 - protein, 409 aa, unidentified
MERLIERGCGLDVHRDTVAACVRVPGGKGQREQHVRTFGTTAGELLALRDWLEAHGVTHVAMESTGVYWKPVFYVLEEAFTCLLVNAAHIKQVPGRKTDVLDCIWIAQLLEHGLLRGSFVPPAPIRELRDLTRHRKVLIQERQRAANRLHKLLQDAGIKLASVATDILGVSGRAMLEALVKGTTDPEVLADLARGKLRKKLPALRQALAGRFRPHHAFLVSQLLAHVDYLDEAITTVSEEVAARLTPFAPQLEQLDTVHGIARRTAEVIIAEIGVDMSVFPSDRHLASWAGMCPGNHESAGKHKSGKTRKGNRWLRMALVEAAAAAIRTKDSALAARYRRVMRHRGHKKAVVAVAHAMLRAVYHLLAEGTPYRDPGPDYYDRRHARRVTRRAIEMLERQGYRVVLEPAA

SEQ ID NO: 347652 - protein, 347 aa, unidentified
MKKIIIGIDVSKEKCDATAIFVGKGLLEVAKLDYFVFENCPKGFRSMLSWAKKLMSDVLQEEFLFICETTGAYDRALCDYIYSKGLDIWRESALQILMSSGVRRGKDDKADSLMIAEYAAHHMDKMHLYESPDNRILEIRALFLYRHKLEQEKTSKLVRIKELEATAGKSKTLTFILRDAKKSVRQLEKSIKVCEEKIRELMKEDEALQKSYDHLDSVKGLGIVNITALIVYTNNFKAFRTSRKMATYWGVASFRSRSGTSVDKRVDVRNLSSSMLKSYLTQAALHTIAKGGIYHDYYERKIREGKTHSIALNNAKNKLLHLAMSLVTHDMDYEENHENLRSLRNEM

SEQ ID NO: 347653 - protein, 337 aa, unidentified
MTIVGGLDLHRRQITFDYLDTTTGELRRGRITPADREHLRSWLGGLPEQAGDFAVEGCTGWRFVVEELARAGLRPHLAEPAETATARGRKRRAKTDKGDARWQRELLLAGTLPESWIPPTHVLEVRALVRLYVDLLGEYIGWRQRLQATLFHHGVPVTSRLTPDLLDRIDLSPAGRDALTTGLRQLERLSAELDPLRRRLHRYAARQPGCLALQSHYGIGPLTAVAIWEELGDTRRFANSTAAVRHAGLDITVYSSDTTRARGHLSRQGPAVLRWALFEAALRAGNDTSPDHPYYSQVKQRLGAQRATLSVARKLVRRCHHTLRALGEKAWAPAELD

SEQ ID NO: 347654 - protein, 324 aa, unidentified
MNVIGIDVSKAKLDCAWLKEDNKVKSKVVTNQLEGWKELINWAKTQTGSQIGELHFVMEATGIYHENGANWLYNSGAKVSIANPVHVKYYAQSLGGRTKNDKKDSIVLTRYGVKEHPLLWQPAPQEIRVLNALLTRLDAVEKDLRREKNRQEKALVSDTPTTVIASIEQMIEHFKTEQKALEKLIDDHIKAHKNLKENKALLESIPGVGKVVAQRMLMLLGTHQFKDAHQCAAYLGLVPVQKESGSSIKGRSQLAKNGTKTVRAKLYMATVTATRYNPDIKAQYERLTKKGKTKMSALGAAMRKLVQICFGVLKHQLPYQPQIA
